United States Patent Application Publication US 2018/0126003 A1 - sequence listing, part 156

SEQ ID NO: 273739 - DNA, 5295 bp, Artificial Sequence
  derived and/or modified sequence
atggccaaaccaactagtaaggattccggccttaaggagaaatttaaaattttattagggttgggaactccccgtcccaaccctaggtctgccgaggggaaacaaactgagttcattatcacagcagagattctgagagagctctctatggaatgtggtctcaacaataggattaggatgattggacagatctgcgaggttgctaaaacgaagaagtttgaagagcacgccgttgaggcgttgtggaaagccgtcgctgacctgctgcagccagaacggccactcgaggcacggcatgccgttctggcattgctgaaagccatcgtccaaggccagggagagcggctcggagtgctgcgggctctcttctttaaggtgatcaaagactatcccagcaacgaagatttacatgaaagacttgaggtgttcaaggcgctaaccgataacggcaggcatattacttaccttgaagaagaacttgctgattttgtgctgcagtggatggacgtgggactgtcctcagaatttttgctggtgctcgtcaacctggttaaattcaactcttgttacttagacgagtatatcgcacgtatggttcaaatgatctgcctcttatgtgttagaacagctagcagcgtggatatcgaagtgagtttgcaggttctagacgccgttgtgtgttataactgtctcccggcagaaagcctccctctgttcattgtgacgttgtgccggactataaatgtgaaagaattatgtgagccatgctggaagttgatgcgaaatctcctcggcacacatctcggccacagtgccatctataacatgtgtcaccttatggaagacagggcgtatatggaggacgccccactactgaggggagccgttttttttgtcggaatggccctatggggtgctcatagactgtattctctgagaaactcaccaacatccgtcctgccctcattttatcaggccatggcatgccctaacgaggtggtcagctatgagatcgtgctgagtatcaccagactaatcaaaaagtatcgcaaggaattacaggtcgtggcctgggacatcctccttaacatcattgaacggctgctacagcaactccaaaccctggactcccccgaactgaggacaatagtgcacgacctgctgaccactgtggaagagctatgtgatcagaacgaattccatggaagtcaagagaggtatttcgaattggtggagaggtgtgccgatcagagacccgagagtagcctgctcaatctgataagttacagagcacagagcatccacccagcgaaagatggatggatacagaatctgcaggcgctcatggagagattctttagaagcgaaagtaggggcgctgttcggatcaaagtcctggacgtgctgtccttcgtccttctgattaatcggcaattctatgaggaggaactgatcaatagcgtggtgatctctcagcttagccacatccctgaggacaaagatcatcaggtaaggaagttggctacccagcttctggtggatcttgccgagggatgccacacacaccatttcaactcgttgcttgacatcatcgagaaggttatggcccgaagcctttctccacccccagaactcgaggagcgcgatgtggcagcgtactccgcatccctcgaggatgtgaagacagcagttctaggactactggtgatcctccagaccaagctttatactttacctgccagccatgccaccagggtgtatgagatgctagtgtcccatattcagctccactacaagcatagttacaccttgccaattgccagctccattagactgcaggccttcgactttcttctcctccttcgcgccgactcattacacagacttgggctacctaacaaggacggagtcgtccgtttctctccatactgtgtttgtgactacatggaaccggagcgtggcagtgagaaaaaaacaagtgggccattgtctccccccacgggccctccggggcctgccccggccggaccggcggtgagactgggcagcgtaccctattctctgctgtttcgagtactgttgcagtgcctgaagcaggagagcgattggaaggttctgaaattggtgttaggtaggcttccggaaagcctgcggtataaggtgctgatttttacatctccgtgcagtgtggatcagctgtgttcagctctgtgctccatgctgagtggtccgaagaccttagagcgactgaggggcgctccggagggcttttctaggactgatctgcatctagccgtggtgccggtcttgaccgcccttatctcctatcacaattacctagataagactaagcaaagagaaatggtctactgtcttgagcaagggttgatacaccgctgcgcatcccagtgtgtggtggcactgtcaatctgttcagtagagatgcccgacatcatcattaaggccctccctgttctggtggtaaagctgactcatatatctgctacagcctccatggccgtgcccctgcttgagttcctcagcactctagcaaggcttccccatctctatcggaacttcgccgctgagcagtatgcctctgtcttcgccatctcactgccatataccaaccccagtaaattcaatcagtacatcgtgtgcctagcccatcacgtcatcgcaatgtggtttatacgatgtagactgccctttcgaaaagattttgtaccctttattactaaaggattgaggagcaacgtgctactctcatttgacgataccccggagaaagactcattccgcgctcgatcaacctctcttaacgagcggcccaaatcccgtattcaaacctcattgacttctgccagtctgggcagcgccgatgagaattcagtggcacaagccgatgatagtctcaaaaacctgcatctggagctgaccgagacctgtctggatatgatggcccgctacgtcttctccaacttcacagccgtgccaaagcgctctcctgtaggagaattcctcctggctggagggcggaccaagacctggctcgtgggcaataagctggtgacggtgactacatccgttgggaccggaactaggagtttgctgggactcgactccggggaactgcagtctggccctgaatccagctccagcccaggagtacacgtcaggcagacaaaggaagcccctgcgaagctggagtctcaggccgggcagcaagtgagccgcggtgcccgagatcgtgtgcgcagtatgagtgggggacacggtctgcgagtaggcgcacttgatgtccccgcctcacagtttctcgggtccgctaccagccccgggcctaggaccgcccctgctgccaaacctgaaaaagcctccgccggaacccgagtgcccgttcaggaaaaaaccaacctagccgcctacgttccactgcttacccagggttgggcggagatcttagtgcggaggcccaccggcaacacatcctggttaatgtccctggagaaccctctaagcccctttagtagtgacattaataatatgccactgcaggagctctccaatgccctcatggcagcggagagattcaaagagcaccgggacaccgccctctacaagtccctgagcgtccctgcggcgtccacggccaagcctccgcctctaccgcgcagcaacacggttgcctctttctcctccctgtaccagagcagctgtcagggccagctgcatcgtagcgttagttgggccgactccgccgtcgtgatggaggagggttctcccggagaggtaccagtgctggtggagccacccgggctggaagatgtcgaggcagcactcggcatggatcgccgaaccgacgcctattctcggtcttcaagtgtctcatcccaggaagagaaaagcctgcacgccgaggaactggtggggcgcggcatcccaatcgagcgggtggtttcgagcgagggcggaagaccgtctgtcgacttaagctttcagcctagtcagcccctgtctaagtcaagtagtagtcctgagcttcagacacttcaagatatcctgggcgacccgggcgacaaagccgacgtgggccgcctgtcccctgaagtgaaggccaggtcgcaatctggtaccttagacggtgagagcgccgcttggtccgcctccggagaagattctaggggccagccagagggaccattgcccagcagcagccctaggagtcccagcggactgcgcccccgcggttatacaatctccgactctgctccttctcgcaggggaaagcgagtcgagagggacgctctgaaatctagagcaacagcatctaatgcagaaaaggtacccggcataaaccccagtttcgtgttcctgcagctgtaccatagccctttcttcggagacgagagtaataaacccatacttctcccaaacgagagccagagttttgagaggtccgttcagctcttggaccaaatacctagctacgatacccacaaaattgctgtgctttacgtaggggagggtcagtctaatagcgagttggccattctgagcaacgaacacggaagctatagatacacagagttcctgaccggactgggacgcctgatcgagctcaaggactgccagcctgataaagtgtacttgggaggactggatgtatgtggggaagacggacagttcacctattgctggcatgatgatattatgcaggccgtctttcacattgctacgctgatgcctacaaaagacgtggataagcacaggtgtgacaagaaacgccacctcggaaacgactttgtctcaattgtctacaacgacagtggcgaggacttcaagctaggaactataaaagggcagtttaacttcgtccatgttattgtgacaccactggattatgaatgcaacctggtttctctgcagtgcagaaaggacatggaaggattggtcgacacgtctgtcgccaagattgtgtccgatagaaacttgcccttcgtagcacgacagatggctctgcatgcaaatatggcctctcaggtgcaccatagtcggtccaatccaacggatatttaccccagtaagtggatcgctaggcttagacacatcaagagactgagacagcgcatatgcgaggaggcggcttactcaaaccctagtttgccactggtgcatccgccctcacacagtaaagcccctgctcagacccctgccgaacctacacccggatatgaagtaggccaaaggaagaggttaatatcgtccgttgaggattttacagaatttgtgtag

SEQ ID NO: 273740 - DNA, 5295 bp, Artificial Sequence
  derived and/or modified sequence
atggccaagcccaccagcaaggacagcggcctgaaggagaagttcaagatcctgctgggcctgggcaccccccggcccaaccccaggtctgctgagggcaagcagacagagttcatcatcacagctgagatcctgcgggagctgtccatggagtgtggcctgaacaaccgcatccgcatgattggccagatctgtgaggtggccaagaccaagaagtttgaggagcacgctgtggaggccctgtggaaggctgtggccgacctgctgcagcctgagcggcccctggaggcccggcatgctgtgctggccctgctgaaggccatcgtgcagggccagggcgagcggctgggcgtgctgcgggccctcttcttcaaggtgatcaaggactaccccagcaatgaagacctgcacgagcggctggaggtgttcaaggccctgacagacaatggccgccacatcacctacctggaggaggagctggccgactttgtgctgcagtggatggatgtgggcctgagcagcgagttcctgctggtgctggtgaacctggtgaagttcaacagctgctacctggatgagtacatcgccaggatggtgcagatgatctgcctgctgtgtgtgaggacagccagctctgtggacatcgaggtgtccctgcaggtgctggatgctgtggtgtgctacaactgcctgcctgctgagagcctgcccctcttcatcgtgaccctgtgcaggaccatcaacgtgaaggagctgtgtgagccctgctggaagctgatgaggaacctgctgggcacccacctgggccacagcgccatctacaacatgtgccacctgatggaggaccgggcctacatggaggatgcccccctgctgcggggagctgtgttctttgtgggcatggccctgtggggcgcccaccggctgtacagcctgaggaacagccccacctctgtgctgcccagcttctaccaggccatggcctgccccaatgaggtggtgtcctatgagatcgtgctgagcatcaccaggctcatcaagaagtacaggaaggagctgcaggtggtggcctgggacatcctgctgaacatcatcgagcggctgctgcagcagctgcagaccctggacagccctgagctgcggaccatcgtgcatgacctgctgaccaccgtggaggagctgtgtgaccagaatgagttccacggcagccaggagcgctactttgagctggtggagcgctgtgccgaccagaggcctgagagcagcctgctgaacctgatctcctaccgggcccagagcatccacccagccaaggatggctggatccagaacctgcaggccctgatggagcgcttcttccgctctgagagcagaggagctgtgcgcatcaaggtgctggatgtgctgagctttgtgctgctgatcaaccggcagttctatgaggaggagctgatcaacagcgtggtgatcagccagctgagccacatccctgaggacaaggaccaccaggtgaggaagctggccacccagctgctggtggacctggccgagggctgccacacccaccacttcaacagcctgctggacatcatcgagaaggtgatggcccggagcctgagccccccacctgagctggaggagagagatgtggccgcctacagcgccagcctggaggatgtgaagacagctgtgctgggcctgctggtgatcctgcagaccaagctgtacaccctgcctgccagccacgccaccagggtgtatgagatgctggtgagccacatccagctgcactacaagcacagctacaccctgcccatcgccagcagcatccggctgcaggcctttgacttcctgctgctgctgcgggctgacagcctgcaccggctgggcctgcccaacaaggatggagtggtgcgcttcagcccctactgtgtgtgtgactacatggagcctgagcggggcagcgagaagaagaccagcggccccctgagccccccaactggacctcctggccctgccccagctggccctgctgtgcggctgggctctgtgccctacagcctgctcttccgggtgctgctgcagtgcctgaagcaggagagtgactggaaggtgctgaagctggtgctgggccgcctgcctgagagcctgcgctacaaggtgctgatcttcaccagcccctgcagcgtggaccagctgtgcagcgccctgtgcagcatgctgagcggccccaagaccctggagcggctgcggggggcccctgagggcttcagcaggacagacctgcacctggccgtggtgcctgtgctgacagccctgatctcctaccacaactacctggacaagaccaagcagcgggagatggtgtactgcctggagcagggcctcatccaccgctgtgccagccagtgtgtggtggccctgagcatctgcagcgtggagatgccagacatcatcatcaaggccctgcctgtgctggtggtgaagctgacccacatcagcgccacagcctccatggctgtgcccctgctggagttcctgagcaccctggcccggctgccccacctgtacagaaactttgctgctgagcagtatgcctctgtgtttgccatcagcctgccctacaccaaccccagcaagttcaaccagtacatcgtgtgcctggcccaccacgtgattgccatgtggttcatccgctgccgcctgcccttcaggaaggactttgtgcccttcatcaccaagggcctgcggagcaatgtgctgctgagctttgatgacaccccagagaaggacagcttccgggcccggagcaccagcctgaatgaaagacccaagagccgcatccagaccagcctgaccagcgccagcctgggcagcgcagatgagaacagcgtggcccaggctgatgacagcctgaagaacctgcacctggagctgacagagacctgcctggacatgatggcccgctacgtgttcagcaacttcaccgctgtgcccaagaggagccctgtgggggagttcctgctggccggcggccgcaccaagacctggctggtgggcaacaagctggtgacagtgaccacctctgtgggcaccggcaccaggagcctgctgggcctggacagcggggagctgcagagcggccctgagagcagcagcagccctggggtgcacgtgcggcagaccaaggaggccccagccaagctggagagccaggccggccagcaggtgtccagaggagcccgggacagagtgcgctccatgtctgggggccacggcctgcgggtgggcgccctggatgtgcctgccagccagttcctgggcagcgccaccagccctggccccaggacagccccagctgccaagccagagaaggccagcgctggcaccagggtgcctgtgcaggagaagaccaacctggccgcctacgtgcccctgctgacccagggctgggccgagatcctggtgagaagacccaccggcaacacctcctggctgatgagcctggagaaccccctgagccccttcagcagtgacatcaacaacatgcccctgcaggagctgagcaatgccctgatggctgctgagcgcttcaaggagcaccgggacacagccctgtacaagagcctgtctgtgcctgctgccagcacagccaagcccccacccctgcccaggagcaacacagtggccagcttcagcagcctgtaccagagcagctgccagggccagctgcacaggtctgtgtcctgggccgacagcgctgtggtgatggaggagggcagccctggagaggtgcctgtgctggtggagcccccaggcctggaggatgtggaggccgccctgggcatggacagaagaacagatgcctacagccgcagcagctctgtgagcagccaggaggagaagagcctgcacgccgaggagctggtgggccggggcatccccatcgagcgggtggtgagcagcgagggcggccggcccagcgtggacctgtccttccagcccagccagcccctgagcaagagcagcagcagccctgagctgcagaccctgcaggacatcctgggggaccccggggacaaggcagatgtgggccgcctgagccctgaggtgaaggcccggagccagagcggcaccctggatggagagagcgctgcctggagcgccagcggggaggacagccggggccagcctgagggccccctgcccagcagcagccccaggagccccagcggcctgcggccccggggctacaccatcagtgacagcgcccccagcagaagaggcaagagggtggagagagatgccctgaagagccgggccacagccagcaatgctgagaaggtgcccggcatcaaccccagctttgtgttcctgcagctgtaccacagccccttctttggagatgagagcaacaagcccatcctgctgcccaatgaaagccagagctttgagaggtctgtgcagctgctggaccagatccccagctatgacacccacaagattgctgtgctgtatgtgggggagggccagagcaacagcgagctggccatcctgagcaatgaacatggcagctaccgctacacagagttcctgaccggcctgggccgcctgattgagctgaaggactgccagcctgacaaggtgtacctgggcggcctggatgtgtgtggagaagatggccagttcacctactgctggcatgatgacatcatgcaggccgtgttccacatcgccaccctgatgcccaccaaggatgtggacaagcaccgctgtgacaagaagaggcacctgggcaatgactttgtgtccatcgtgtacaatgacagcggggaggacttcaagctgggcaccatcaagggccagttcaactttgtgcacgtgattgtgacccccctggactatgagtgcaacctggtgtccctgcagtgcaggaaggacatggagggcctggtggacacctctgtggccaagatcgtgtctgacaggaacctgccctttgtggcccggcagatggccctgcacgccaacatggccagccaggtgcaccacagccgcagcaaccccacagacatctaccccagcaagtggatcgcccggctgcggcacatcaagaggctgcggcagaggatctgtgaggaggccgcctacagcaaccccagcctgcccctggtgcacccccccagccacagcaaggccccagcccagaccccagctgagcccaccccaggctatgaggtgggccagaggaagaggctcatcagctctgtggaggacttcacagaatttgtgtag

SEQ ID NO: 273741 - DNA, 5295 bp, Artificial Sequence
  derived and/or modified sequence
atggccaagcccaccagcaaggacagcggcctgaaggagaagttcaagatcctactcgggcttggtacacccaggcccaacccaaggtccgccgagggtaagcaaaccgagttcattataaccgctgagatcttgagggagctgagcatggagtgcgggctcaataacagaattagaatgattggccagatttgcgaggtggccaagactaaaaagtttgaagaacacgccgtggaagcactctggaaggctgtggccgaccttctccagcctgagcgtccactggaggctagacatgccgtcctggcactcctgaaggcaattgtgcagggccagggagaacgacttggcgttctgcgagcgctctttttcaaggtcataaaagactatccttcaaacgaagacctgcacgagaggctggaggtttttaaagccctcaccgataacggtcgacacatcacatatctggaagaggagttagcggacttcgttctgcagtggatggacgtggggttgagctctgagtttctcctcgttctggtgaatctcgtgaagttcaatagctgctatctggacgagtacatcgcccgcatggtgcagatgatctgtcttctgtgtgtgcgcaccgcgtctagcgttgatatcgaggtaagccttcaggtgctggacgcagtcgtgtgttacaactgcctgcccgctgaaagcctacccctattcattgtgactctttgcaggactatcaatgttaaggagctgtgcgagccgtgctggaaactcatgagaaacttgttgggcacacacctgggacactctgcgatctacaacatgtgccacctgatggaggatagagcttacatggaggacgctccgctgttgagaggggctgtgttttttgtcggtatggctctgtggggggcgcaccggttgtattcattaagaaacagccccacaagtgtgctcccatctttttaccaggcaatggcatgtccaaacgaggtggtgagctacgaaattgtactgtctattaccagactgattaagaagtatcggaaggaacttcaggtggtcgcctgggacatcctcctcaacattatcgagagactgctgcagcagctccaaacactggattcccccgagcttcgaacaattgtgcatgacttgctcacaacagtagaggagctctgcgaccagaatgagttccatggctcacaagagcggtacttcgagctggtagagaggtgtgccgaccagcgcccggaatcctcacttctgaatcttatcagctacagagcccaatctatccaccccgctaaggatggctggatacagaacctgcaggcccttatggaacggttcttcagaagcgaatcacgcggcgctgttcggatcaaagtactggacgtcttgagctttgtactgcttatcaaccggcaattttacgaagaagagctgatcaactccgtggtcatctctcagctgagccacattcccgaggacaaagatcatcaggtcaggaagctggccacccaactgctcgttgatttagcggaaggatgccatacacatcattttaattcactgctggatataatagaaaaggttatggccaggtcattgtcacctcctcctgagcttgaggagagagatgtcgcggcttattctgcctctttagaagacgtgaagacagcggtcctcggtctgctggttatactgcagaccaaactgtataccttgcctgcgtcacatgctaccagagtctatgagatgttagttagtcatatccagctacattataagcacagctatacactccctatcgccagctctatccgcctccaggcgttcgacttcttgcttttgttgagagccgactcacttcatcggttggggcttccaaacaaggacggggtcgtgcggtttagcccttactgcgtatgcgattacatggagccggagagaggcagtgaaaagaaaacttccgggcctctgagtccacccaccggcccccccggcccggcccctgctggccccgccgtgagattaggaagcgtgccttactccctcttattcagagtgctgttgcagtgtctcaaacaggaatccgattggaaggtgctgaagctggtacttggtaggctgcctgaaagccttagatataaggtcctgatctttaccagtccttgttctgtggatcagctgtgttccgcgctgtgctctatgttatccggacctaagaccctggaaagactcagaggagccccagaaggcttctctaggactgacttgcacttggcagtggtgcctgtccttacagctctgatcagttaccataattatctggataagacaaagcaacgcgaaatggtatactgcctggaacagggcctcatccatagatgcgcatcccaatgcgtcgtggccctcagcatctgctctgtcgagatgcccgacataataatcaaggccctacctgtgctggtggtcaagctcactcatatctcggcaaccgcctcaatggccgtgcctttgttggaatttctgtctacgctggcacggctgccacacttatacaggaattttgccgccgaacagtacgccagcgtgtttgcgatctctttgccatacactaatccaagtaagttcaaccagtacatcgtttgcctggcccaccatgtgattgctatgtggtttatccggtgtcgtcttccatttcggaaggacttcgtcccttttattaccaaaggcctgcgttctaacgttttgctgtctttcgacgacactcccgaaaaggattccttccgcgccagaagcacatccctaaacgaacgacccaagagtcgtattcagaccagtctcactagcgccagcctcgggtctgctgatgaaaattccgttgcccaggcagatgacagtctgaaaaacttacatctggaactgaccgaaacctgcctggacatgatggccagatacgtgttttcgaatttcacggctgtccccaaacgctcccctgtaggggaatttttgctagctggcggccgaactaagacatggttagttggaaacaaactcgtgactgttactacctcggtcgggaccggcactcgatcgttgcttgggcttgattcaggcgagttacagtccggacctgagagtagctctagcccgggggtgcacgttcgccaaaccaaagaggcccctgccaagctggagtcccaggccggccagcaggtgagtcgcggtgcccgggaccgggtgcgtagtatgtcaggaggccatggactgcgggtgggcgcactcgacgttcccgcctcccagttcttgggctccgcaacaagtccggggcccaggaccgctcccgcggcaaagccagagaaggcttccgcaggaacacgggtcccagtccaggagaaaacaaacttggcagcgtacgtgccattgttaacccaggggtgggccgaaattctagtgcggcggcccacaggaaatactagttggctcatgtctctggaaaaccctctcagtcccttcagtagcgatattaacaatatgccactgcaggagctgagtaatgccctcatggccgctgagagatttaaagagcatcgcgacaccgccctttataagagtctttcagtgcctgccgcctctactgcaaagccgcctcctctaccacggagtaacacagtagcctccttctcttccctatatcagtcatcttgccagggtcagctgcatcgttctgtgtcatgggccgatagcgccgtggtgatggaggagggcagccccggcgaggtgcctgttctagtggagccacccgggctggaggatgtggaggccgcactcggcatggacaggcgcactgacgcttactccagatcaagctccgtctcgtctcaggaggagaaatctttgcacgctgaagaattagtgggccggggaataccaattgagagagtcgtctcaagtgagggagggcgcccaagcgtggatctgtccttccagccttcacagcctctgagcaaatccagcagcagccctgaactacagacgctgcaggacattctgggagatccaggtgataaggcagacgtcggcaggttatcccccgaggttaaagcaagatcccagtctggtactctggatggggaatcggctgcgtggtccgcttctggggaggacagtagagggcagccagagggccccctcccgtcttccagtccgaggagcccctcaggactccggcctcgtggatacacaattagtgatagtgctcccagccggagaggaaaaagggtcgagagggatgcacttaagtccagggccaccgcatctaatgccgaaaaagtgcccggaatcaacccttccttcgtcttccttcaactgtatcattcaccctttttcggtgatgaatccaataaacctattttactgcctaacgagagccaatctttcgaacgatcggtccagttgctcgatcagattccctcctatgatacccacaaaattgcagtcttgtatgtaggggagggccaaagcaacagtgaactcgctattctgtctaatgagcatgggtcctaccgttacaccgaattcctgactggcctgggccgactgatcgaactgaaggattgccagcccgataaggtgtacttaggagggctcgacgtgtgcggcgaggacggccagttcacttactgctggcatgacgacatcatgcaggccgtgttccacatagcaacactcatgcccactaaggatgttgacaaacaccgctgtgataagaaacgccatctggggaatgatttcgtgagcatcgtgtacaatgactctggggaggattttaaactgggaactatcaaggggcagttcaattttgtccatgtaatcgtcacacctttagactacgagtgtaaccttgtgtcactccaatgtcggaaagacatggagggtctcgtcgatacttcagtcgccaagattgtttcggacagaaatttacctttcgtcgcgcgtcaaatggctctccatgctaatatggcgtctcaggtgcaccattctaggtccaatcctacagatatatatccatccaagtggattgctcgcctgcggcacataaagcggctcagacagaggatctgtgaggaggcagcctattccaatccctccctgccactcgttcatcccccatctcactctaaggctcctgcacagacacctgccgagcctacaccagggtacgaagtggggcagaggaagcggctcataagttccgtggaagacttcaccgagtttgtctag

SEQ ID NO: 273742 - DNA, 5294 bp, Artificial Sequence
  derived and/or modified sequence
atggctaagcccacctccaaggacagcggacttaaggagaaattcaaaattctcctgggactggggacacccaggcccaaccccagaagtgccgagggcaaacagacagagttcatcattaccgctgagatcctgagggagctgtcaatggaatgcggactcaataatagaattcgcatgattgggcagatctgtgaagtggcaaaaacgaaaaaatttgaggagcatgccgtagaggctctgtggaaagcagtggcagacctgctgcagcccgagaggcctctggaagctaggcatgcggtcctggcactcctcaaggcaattgtacaggggcagggggagcggctcggcgtgctacgtgcactatttttcaaggtcatcaaggactatccaagtaacgaagaccttcatgagagactggaagtttttaaggcgctcacagataacggtagacacataacttatctcgaagaagagctggctgactttgtgctccagtggatggatgtcggactgtccagcgaatttttactcgtattggtcaacttggtgaagtttaacagctgctacctggacgaatacatagcccgtatggtgcaaatgatttgtctgctctgtgttcggacagcctcctcggtggatatcgaagtgtctcttcaagttctggatgcggtagtttgctacaattgtctccctgcagaatccctccctctattcatcgtcaccttgtgccgtaccatcaacgttaaagaattgtgcgagccctgctggaagctgatgcgcaatctcctagggacccatttaggtcactcagccatatataacatgtgtcacctcatggaagaccgagcctatatggaggatgctccgctgctacgaggagcagtgtttttcgtagggatggcattgtggggggctcaccgcctgtattctcttcgtaatagccccacctccgtgcttcctagtttctaccaagccatggcgtgcccaaatgaagtcgttagctatgaaattgtcctgagtattaccagattgatcaaaaagtacagaaaggaactacaggtcgtggcttgggacatcctcttaaatatcatcgaacgcttgctgcagcagctccagaccctagactcacctgaacttaggacgattgtgcatgatctcctaacaactgttgaagagctgtgcgaccaaaacgagttccacgggtctcaagagcggtattttgagttagtcgaacgatgcgccgaccagcggcctgagtcttccctgttgaaccttatttcctatcgcgctcagtctatccaccctgcaaaggatgggtggatccagaacctgcaagcgttgatggagcgcttcttccggtcagaatcaaggggagcggtaaggattaaagttctcgacgttctttctttcgtcctgctcatcaacaggcagttttatgaagaggaattaattaattccgtagtcattagtcaactgtcccacattcccgaggataaagaccaccaggtgagaaaactggccacacagctgctggtcgatttggcagagggttgtcacacccaccacttcaacagtctgctcgatatcatcgaaaaagtgatggccagatcgctgagtccaccacccgagctcgaagagcgggatgtcgcggcttactccgcttcacttgaggatgttaaaactgcggtgcttgggttgttggtcattctccaaacaaaactttatactctgcccgcatcccacgccacacgcgtgtacgaaatgctggtgagccatatccagctacattataaacatagctacactctgccgattgccagctcgatacggctacaggccttcgactttctgctcctgctgagggccgacagcctgcacaggttgggactgcctaataaggacggtgttgtgaggttctccccatattgtgtgtgcgattacatggagcctgagagaggatctgagaaaaaaacgagcggccctctctcccccccaactggccctcccggaccagcacctgccggaccagctgtccgactgggaagtgttccctactccctgctgtttagagtgttattgcagtgtctcaagcaagagtccgattggaaggtgcttaagcttgtgctgggaaggcttcccgaaagtctacgttataaggtccttatcttcaccagtccctgctctgtggaccagctgtgcagcgctctatgtagcatgttatctggcccaaaaaccctggaacgcttgcgcggtgccccagaggggtttagtcgaaccgatcttcacttggccgtcgtgcccgtgctcaccgccctcatttcttaccacaattatttagataagacaaaacaaagagagatggtgtattgcctggagcaaggattaattcatcggtgtgccagccaatgtgtggtcgctttgagcatctgtagcgttgaaatgccagatatcatcataaaggcactccccgtcctggtggtgaagctgactcatatctccgccactgcatccatggccgttccactgctggagttcttgtcaaccctggcgagactcccacatttgtacagaaattttgccgctgagcagtatgcttccgttttcgctattagcctgccgtacaccaatccttccaaattcaatcagtatatcgtctgcctcgcccaccacgtcatagcgatgtggtttattagatgccgactgccatttaggaaggatttcgttcccttcatcaccaaaggcctgaggagcaatgtactgctctcattcgacgatactcctgagaaggattctttccgcgctcgatccacttctctgaacgagcgccctaaaagccgcatccaaacaagtctgacaagcgcaagcttgggaagtgcggacgagaatagcgtggcacaggctgatgactccctgaaaaacttgcatctagagctgacagaaacctgtctggacatgatggcgagatatgtcttctctaacttcacagcggtacccaagcggtctcccgtgggtgagttcctgctggccggagggcgaaccaagacatggctcgtgggaaacaaacttgtcacagtcaccaccagcgttggaacgggtaccagatcgctgctcgggctggatagtggtgaactccagagcgggccagaatccagtagctctcctggcgtccatgtgcgtcagactaaggaagcacccgctaagttggaaagccaggctggccagcaggtctcccgcggagctcgagatcgggtgaggagtatgagtggaggccacggcctgcgagtgggcgctcttgacgtgcccgcttctcagtttctaggctctgctacttctccaggaccacgtacagccccagcggcaaaaccagagaaggcctcggccggtacccgagtgccagttcaggaaaagactaacctagccgcttacgtgccactcctgacacaggggtgggcggaaatcctggtgcgaaggcccactggcaacacatcttggttgatgagcctcgagaatcctttgtcccccttctcgtcagatatcaataacatgcctctgcaggagctgtccaatgccctgatggccgctgagcgcttcaaggaacacagagatactgctctgtataagagcctcagtgtacccgcagccagtacggcaaagccccctccccttcccagaagtaacacagtcgcttccttcagttcactgtaccagtcaagctgtcagggtcaactgcacagaagcgttagttgggctgacagtgcggtcgtgatggaggaaggcagtccaggggaggtgcctgtcttagtggagcccccaggactggaggatgtagaggctgccctcggaatggataggcggactgatgcttatagccggtcctcctcggtgtcgagccaggaggagaaatctctgcacgcggaagagctggtgggtagagggatccccattgagcgggtcgtgtcctccgaaggagggcgtccttccgtcgatcttagttttcagcccagtcagcctttgagcaaaagtagctctagccctgagctgcaaacgctacaagatatcctgggtgatccaggggacaaagccgatgtgggtcggctgagtcctgaggtcaaagcacgctcgcagagcggcactctagatggcgagagcgcggcttggtctgcctcaggggaagattcgagaggccagcccgagggccctctcccaagtagcagcccccgatctcccagcgggctgaggccacgcggatacaccatttccgactccgccccttcccggagaggcaaacgggtggagcgggatgcacttaagtctcgcgctactgcatcaaatgccgaaaaggtgcctggaataaacccttccttcgtcttcctacagctgtaccattctcctttcttcggggacgagtccaacaaacccattctactcccaaacgaaagccaatcttttgaaaggagcgtgcaactactggatcagatcccctcttacgatactcataagatcgccgtgctgtatgtcggagaggggcaaagcaatagtgaacttgcaatcctctcaaacgagcatggaagttacaggtatactgagttccttactggccttggcaggcttatcgagctgaaagactgtcagcccgataaagtttatctgggaggtctggatgtctgcggcgaagacggacagtttacctattgttggcatgatgatatcatgcaggctgtcttccacatcgccacgttgatgcccacaaaggatgtggacaaacatcgatgtgacaagaaaagacatctggggaatgatttcgtctctatcgtatataacgattcgggcgaggatttcaagctgggcactatcaaagggcagttcaatttcgttcacgtgatcgtgaccccactggattatgaatgcaaccttgtcagtctgcagtgtcggaaagatatggagggcttggtcgatacttcagtggcgaagatagtctccgatcgaaatctgccattcgtcgccagacagatggctctgcatgccaacatggccagccaggtgcaccacagtagaagcaatcctacggatatctacccttctaaatggatcgctaggctccggcatataaaaagactgcggcagaggatttgtgaggaggccgcatatagtaatccttcactccctttggttcatcctccatcacacagtaaggcacccgcacagacccccgctgagcctacgcccggttatgaggtcggacagcgcaaacgacttatatcttctgtcgaggactttacggagttcgtcta

SEQ ID NO: 273743 - DNA, 5502 bp, Artificial Sequence
  derived and/or modified sequence
ccggcggcgtcccggggccaggggggtgcgcctttctccgcgtcggggcggcccggagcgcggtggcgcggcgcgggaggggttttctggtgcgtcctggtccaccatggccaaaccaacaagcaaagattcaggcttgaaggagaagtttaagattctgttgggactgggaacaccgaggccaaatcccaggtctgcagagggtaaacagacggagtttatcatcaccgcggaaatactgagagaactgagcatggaatgtggcctcaacaatcgcatccggatgatagggcagatttgtgaagtcgcaaaaaccaagaaatttgaagagcacgcagtggaagcactctggaaggcggtcgcggatctgttgcagccggagcggccgctggaggcccggcacgcggtgctggctctgctgaaggccatcgtgcaggggcagggcgagcgtttgggggtcctcagagccctcttctttaaggtcatcaaggattacccttccaacgaagaccttcacgaaaggctggaggttttcaaggccctcacagacaatgggagacacatcacctacttggaggaagagctggctgactttgtcctgcagtggatggatgttggcttgtcctcggaattccttctggtgctggtgaacttggtcaaattcaatagctgttacctcgacgagtacatcgcaaggatggttcagatgatctgtctgctgtgcgtccggaccgcgtcctctgtggacatagaggtctccctgcaggtgctggacgccgtggtctgctacaactgcctgccggctgagagcctcccgctgttcatcgttaccctctgtcgcaccatcaacgtcaaggagctctgcgagccttgctggaagctgatgcggaacctccttggcacccacctgggccacagcgccatctacaacatgtgccacctcatggaggacagagcctacatggaggacgcgcccctgctgagaggagccgtgttttttgtgggcatggctctctggggagcccaccggctctattctctcaggaactcgccgacatctgtgttgccatcattttaccaggccatggcatgtccgaacgaggtggtgtcctatgagatcgtcctgtccatcaccaggctcatcaagaagtataggaaggagctccaggtggtggcgtgggacattctgctgaacatcatcgaacggctccttcagcagctccagaccttggacagcccggagctcaggaccatcgtccatgacctgttgaccacggtggaggagctgtgtgaccagaacgagttccacgggtctcaggagagatactttgaactggtggagagatgtgcggaccagaggcctgagtcctccctcctgaacctgatctcctatagagcgcagtccatccacccggccaaggacggctggattcagaacctgcaggcgctgatggagagattcttcaggagcgagtcccgaggcgccgtgcgcatcaaggtgctggacgtgctgtcctttgtgctgctcatcaacaggcagttctatgaggaggagctgattaactcagtggtcatctcgcagctctcccacatccccgaggataaagaccaccaggtccgaaagctggccacccagttgctggtggacctggcagagggctgccacacacaccacttcaacagcctgctggacatcatcgagaaggtgatggcccgctccctctccccacccccggagctggaagaaagggatgtggccgcatactcggcctccttggaggatgtgaagacagccgtcctggggcttctggtcatccttcagaccaagctgtacaccctgcctgcaagccacgccacgcgtgtgtatgagatgctggtcagccacattcagctccactacaagcacagctacaccctgccaatcgcgagcagcatccggctgcaggcctttgacttcctgttgctgctgcgggccgactcactgcaccgcctgggcctgcccaacaaggatggagtcgtgcggttcagcccctactgcgtctgcgactacatggagccagagagaggctctgagaagaagaccagcggccccctttctcctcccacagggcctcctggcccggcgcctgcaggccccgccgtgcggctggggtccgtgccctactccctgctcttccgcgtcctgctgcagtgcttgaagcaggagtctgactggaaggtgctgaagctggttctgggcaggctgcctgagtccctgcgctataaagtgctcatctttacttccccttgcagtgtggaccagctgtgctctgctctctgctccatgctttcaggcccaaagacactggagcggctccgaggcgccccagaaggcttctccagaactgacttgcacctggccgtggttccagtgctgacagcattaatctcttaccataactacctggacaaaaccaaacagcgcgagatggtctactgcctggagcagggcctcatccaccgctgtgccagccagtgcgtcgtggccttgtccatctgcagcgtggagatgcctgacatcatcatcaaggcgctgcctgttctggtggtgaagctcacgcacatctcagccacagccagcatggccgtcccactgctggagttcctgtccactctggccaggctgccgcacctctacaggaactttgccgcggagcagtatgccagtgtgttcgccatctccctgccgtacaccaacccctccaagtttaatcagtacatcgtgtgtctggcccatcacgtcatagccatgtggttcatcaggtgccgcctgcccttccggaaggattttgtccctttcatcactaagggcctgcggtccaatgtcctcttgtcttttgatgacacccccgagaaggacagcttcagggcccggagtactagtctcaacgagagacccaagagcaggatacagacgtccctcaccagtgccagcttggggtctgcagatgagaactccgtggcccaggctgacgatagcctgaaaaacctccacctggagctcacggaaacctgtctggacatgatggctcgatacgtcttctccaacttcacggctgtcccgaagaggtctcctgtgggcgagttcctcctagcgggtggcaggaccaaaacctggctggttgggaacaagcttgtcactgtgacgacaagcgtgggaaccgggacccggtcgttactaggcctggactcgggggagctgcagtccggcccggagtcgagctccagccccggggtgcatgtgagacagaccaaggaggcgccggccaagctggagtcccaggctgggcagcaggtgtcccgtggggcccgggatcgggtccgttccatgtcggggggccatggtcttcgagttggcgccctggacgtgccggcctcccagttcctgggcagtgccacttctccaggaccacggactgcaccagccgcgaaacctgagaaggcctcagctggcacccgggttcctgtgcaggagaagacgaacctggcggcctatgtgcccctgctgacccagggctgggcggagatcctggtccggaggcccacagggaacaccagctggctgatgagcctggagaacccgctcagccctttctcctcggacatcaacaacatgcccctgcaggagctgtctaacgccctcatggcggctgagcgcttcaaggagcaccgggacacagccctgtacaagtcactgtcggtgccggcagccagcacggccaaaccccctcctctgcctcgctccaacacagtggcctctttctcctccctgtaccagtccagctgccaaggacagctgcacaggagcgtttcctgggcagactccgccgtggtcatggaggagggaagtccgggcgaggttcctgtgctggtggagcccccagggttggaggacgttgaggcagcgctaggcatggacaggcgcacggatgcctacagcaggtcgtcctcagtctccagccaggaggagaagtcgctccacgcggaggagctggttggcaggggcatccccatcgagcgagtcgtctcctcggagggtggccggccctctgtggacctctccttccagccctcgcagcccctgagcaagtccagctcctctcccgagctgcagactctgcaggacatcctcggggaccctggggacaaggccgacgtgggccggctgagccctgaggttaaggcccggtcacagtcagggaccctggacggggaaagtgctgcctggtcggcctcgggcgaagacagtcggggccagcccgagggtcccttgccttccagctccccccgctcgcccagtggcctccggccccgaggttacaccatctccgactcggccccatcacgcaggggcaagagagtagagagggacgccttaaagagcagagccacagcctccaatgcagagaaagtgccaggcatcaaccccagtttcgtgttcctgcagctctaccattcccccttctttggcgacgagtcaaacaagccaatcctgctgcccaatgagtcacagtcctttgagcggtcggtgcagctcctcgaccagatcccatcatacgacacccacaagatcgccgtcctgtatgttggagaaggccagagcaacagcgagctcgccatcctgtccaatgagcatggctcctacaggtacacggagttcctgacgggcctgggccggctcatcgagctgaaggactgccagccggacaaggtgtacctgggaggcctggacgtgtgtggtgaggacggccagttcacctactgctggcacgatgacatcatgcaagccgtcttccacatcgccaccctgatgcccaccaaggacgtggacaagcaccgctgcgacaagaagcgccacctgggcaacgactttgtgtccattgtctacaatgactccggtgaggacttcaagcttggcaccatcaagggccagttcaactttgtccacgtgatcgtcaccccgctggactacgagtgcaacctggtgtccctgcagtgcaggaaagacatggagggccttgtggacaccagcgtggccaagatcgtgtctgaccgcaacctgcccttcgtggcccgccagatggccctgcacgcaaatatggcctcacaggtgcatcatagccgctccaaccccaccgatatctacccctccaagtggattgcccggctccgccacatcaagcggctccgccagcggatctgcgaggaagccgcctactccaaccccagcctacctctggtgcaccctccgtcccatagcaaagcccctgcacagactccagccgagcccacacctggctatgaggtgggccagcggaagcgcctcatctcctcggtggaggacttcaccgagtttgtgtgaggccggggccctccctcctgcactggccttggacggtattgcctgtcagtgaaataaataaagtcctgaccccagtgcacagacatagaggcacagattgc

SEQ ID NO: 273744 - protein, 1692 aa, Artificial Sequence
  derived and/or modified sequence
MECGLNNRIRMIGQICEVAKTKKFEEHAVEALWKAVADLLQPERPLEARHAVLALLKAIVQGQGERLGVLRALFFKVIKDYPSNEDLHERLEVFKALTDNGRHITYLEEELADFVLQWMDVGLSSEFLLVLVNLVKFNSCYLDEYIARMVQMICLLCVRTASSVDIEVSLQVLDAVVCYNCLPAESLPLFIVTLCRTINVKELCEPCWKLMRNLLGTHLGHSAIYNMCHLMEDRAYMEDAPLLRGAVFFVGMALWGAHRLYSLRNSPTSVLPSFYQAMACPNEVVSYEIVLSITRLIKKYRKELQVVAWDILLNIIERLLQQLQTLDSPELRTIVHDLLTTVEELCDQNEFHGSQERYFELVERCADQRPESSLLNLISYRAQSIHPAKDGWIQNLQALMERFFRSESRGAVRIKVLDVLSFVLLINRQFYEEELINSVVISQLSHIPEDKDHQVRKLATQLLVDLAEGCHTHHFNSLLDIIEKVMARSLSPPPELEERDVAAYSASLEDVKTAVLGLLVILQTKLYTLPASHATRVYEMLVSHIQLHYKHSYTLPIASSIRLQAFDFLLLLRADSLHRLGLPNKDGVVRFSPYCVCDYMEPERGSEKKTSGPLSPPTGPPGPAPAGPAVRLGSVPYSLLFRVLLQCLKQESDWKVLKLVLGRLPESLRYKVLIFTSPCSVDQLCSALCSMLSGPKTLERLRGAPEGFSRTDLHLAVVPVLTALISYHNYLDKTKQREMVYCLEQGLIHRCASQCVVALSICSVEMPDIIIKALPVLVVKLTHISATASMAVPLLEFLSTLARLPHLYRNFAAEQYASVFAISLPYTNPSKFNQYIVCLAHHVIAMWFIRCRLPFRKDFVPFITKGLRSNVLLSFDDTPEKDSFRARSTSLNERPKSRIQTSLTSASLGSADENSVAQADDSLKNLHLELTETCLDMMARYVFSNFTAVPKRSPVGEFLLAGGRTKTWLVGNKLVTVTTSVGTGTRSLLGLDSGELQSGPESSSSPGVHVRQTKEAPAKLESQAGQQVSRGARDRVRSMSGGHGLRVGALDVPASQFLGSATSPGPRTAPAAKPEKASAGTRVPVQEKTNLAAYVPLLTQGWAEILVRRPTGNTSWLMSLENPLSPFSSDINNMPLQELSNALMAAERFKEHRDTALYKSLSVPAASTAKPPPLPRSNTDSAVVMEEGSPGEVPVLVEPPGLEDVEAALGMDRRTDAYSRSSSVSSQEEKSLHAEELVGRGIPIERVVSSEGGRPSVDLSFQPSQPLSKSSSSPELQTLQDILGDPGDKADVGRLSPEVKARSQSGTLDGESAAWSASGEDSRGQPEGPLPSSSPRSPSGLRPRGYTISDSAPSRRGKRVERDALKSRATASNAEKVPGINPSFVFLQLYHSPFFGDESNKPILLPNESQSFERSVQLLDQIPSYDTHKIAVLYVGEGQSNSELAILSNEHGSYRYTEFLTGLGRLIELKDCQPDKVYLGGLDVCGEDGQFTYCWHDDIMQAVFHIATLMPTKDVDKHRCDKKRHLGNDFVSIVYNDSGEDFKLGTIKGQFNFVHVIVTPLDYECNLVSLQCRKDMEGLVDTSVAKIVSDRNLPFVARQMALHANMASQVHHSRSNPTDIYPSKWIARLRHIKRLRQRICEEAAYSNPSLPLVHPPSHSKAPAQTPAEPTPGYEVGQRKRLISSVEDFTEFV

SEQ ID NO: 273745 - protein, 1741 aa, Artificial Sequence
  derived and/or modified sequence
MAKPTSKDSGLKEKFKILLGLGTPRPNPRSAEGKQTEFIITAEILRELSMECGLNNRIRMIGQICEVAKTKKFEEHAVEALWKAVADLLQPERPLEARHAVLALLKAIVQGQGERLGVLRALFFKVIKDYPSNEDLHERLEVFKALTDNGRHITYLEEELADFVLQWMDVGLSSEFLLVLVNLVKFNSCYLDEYIARMVQMICLLCVRTASSVDIEVSLQVLDAVVCYNCLPAESLPLFIVTLCRTINVKELCEPCWKLMRNLLGTHLGHSAIYNMCHLMEDRAYMEDAPLLRGAVFFVGMALWGAHRLYSLRNSPTSVLPSFYQAMACPNEVVSYEIVLSITRLIKKYRKELQVVAWDILLNIIERLLQQLQTLDSPELRTIVHDLLTTVEELCDQNEFHGSQERYFELVERCADQRPESSLLNLISYRAQSIHPAKDGWIQNLQALMERFFRSESRGAVRIKVLDVLSFVLLINRQFYEEELINSVVISQLSHIPEDKDHQVRKLATQLLVDLAEGCHTHHFNSLLDIIEKVMARSLSPPPELEERDVAAYSASLEDVKTAVLGLLVILQTKLYTLPASHATRVYEMLVSHIQLHYKHSYTLPIASSIRLQAFDFLLLLRADSLHRLGLPNKDGVVRFSPYCVCDYMEPERGSEKKTSGPLSPPTGPPGPAPAGPAVRLGSVPYSLLFRVLLQCLKQESDWKVLKLVLGRLPESLRYKVLIFTSPCSVDQLCSALCSMLSGPKTLERLRGAPEGFSRTDLHLAVVPVLTALISYHNYLDKTKQREMVYCLEQGLIHRCASQCVVALSICSVEMPDIIIKALPVLVVKLTHISATASMAVPLLEFLSTLARLPHLYRNFAAEQYASVFAISLPYTNPSKFNQYIVCLAHHVIAMWFIRCRLPFRKDFVPFITKGLRSNVLLSFDDTPEKDSFRARSTSLNERPKSRIQTSLTSASLGSADENSVAQADDSLKNLHLELTETCLDMMARYVFSNFTAVPKRSPVGEFLLAGGRTKTWLVGNKLVTVTTSVGTGTRSLLGLDSGELQSGPESSSSPGVHVRQTKEAPAKLESQAGQQVSRGARDRVRSMSGGHGLRVGALDVPASQFLGSATSPGPRTAPAAKPEKASAGTRVPVQEKTNLAAYVPLLTQGWAEILVRRPTGNTSWLMSLENPLSPFSSDINNMPLQELSNALMAAERFKEHRDTALYKSLSVPAASTAKPPPLPRSNTDSAVVMEEGSPGEVPVLVEPPGLEDVEAALGMDRRTDAYSRSSSVSSQEEKSLHAEELVGRGIPIERVVSSEGGRPSVDLSFQPSQPLSKSSSSPELQTLQDILGDPGDKADVGRLSPEVKARSQSGTLDGESAAWSASGEDSRGQPEGPLPSSSPRSPSGLRPRGYTISDSAPSRRGKRVERDALKSRATASNAEKVPGINPSFVFLQLYHSPFFGDESNKPILLPNESQSFERSVQLLDQIPSYDTHKIAVLYVGEGQSNSELAILSNEHGSYRYTEFLTGLGRLIELKDCQPDKVYLGGLDVCGEDGQFTYCWHDDIMQAVFHIATLMPTKDVDKHRCDKKRHLGNDFVSIVYNDSGEDFKLGTIKGQFNFVHVIVTPLDYECNLVSLQCRKDMEGLVDTSVAKIVSDRNLPFVARQMALHANMASQVHHSRSNPTDIYPSKWIARLRHIKRLRQRICEEAAYSNPSLPLVHPPSHSKAPAQTPAEPTPGYEVGQRKRLISSVEDFTEFV

SEQ ID NO: 273746 - DNA, 5079 bp, Artificial Sequence
  derived and/or modified sequence
atggagtgcggcctgaacaacagaatcagaatgatcggccagatctgcgaggtggccaagaccaagaagttcgaggagcacgccgtggaggccctgtggaaggccgtggccgacctgctgcagcccgagagacccctggaggccagacacgccgtgctggccctgctgaaggccatcgtgcagggccagggcgagagactgggcgtgctgagagccctgttcttcaaggtgatcaaggactaccccagcaacgaggacctgcacgagagactggaggtgttcaaggccctgaccgacaacggcagacacatcacctacctggaggaggagctggccgacttcgtgctgcagtggatggacgtgggcctgagcagcgagttcctgctggtgctggtgaacctggtgaagttcaacagctgctacctggacgagtacatcgccagaatggtgcagatgatctgcctgctgtgcgtgagaaccgccagcagcgtggacatcgaggtgagcctgcaggtgctggacgccgtggtgtgctacaactgcctgcccgccgagagcctgcccctgttcatcgtgaccctgtgcagaaccatcaacgtgaaggagctgtgcgagccctgctggaagctgatgagaaacctgctgggcacccacctgggccacagcgccatctacaacatgtgccacctgatggaggacagagcctacatggaggacgcccccctgctgagaggcgccgtgttcttcgtgggcatggccctgtggggcgcccacagactgtacagcctgagaaacagccccaccagcgtgctgcccagcttctaccaggccatggcctgccccaacgaggtggtgagctacgagatcgtgctgagcatcaccagactgatcaagaagtacagaaaggagctgcaggtggtggcctgggacatcctgctgaacatcatcgagagactgctgcagcagctgcagaccctggacagccccgagctgagaaccatcgtgcacgacctgctgaccaccgtggaggagctgtgcgaccagaacgagttccacggcagccaggagagatacttcgagctggtggagagatgcgccgaccagagacccgagagcagcctgctgaacctgatcagctacagagcccagagcatccaccccgccaaggacggctggatccagaacctgcaggccctgatggagagattcttcagaagcgagagcagaggcgccgtgagaatcaaggtgctggacgtgctgagcttcgtgctgctgatcaacagacagttctacgaggaggagctgatcaacagcgtggtgatcagccagctgagccacatccccgaggacaaggaccaccaggtgagaaagctggccacccagctgctggtggacctggccgagggctgccacacccaccacttcaacagcctgctggacatcatcgagaaggtgatggccagaagcctgagccccccccccgagctggaggagagagacgtggccgcctacagcgccagcctggaggacgtgaagaccgccgtgctgggcctgctggtgatcctgcagaccaagctgtacaccctgcccgccagccacgccaccagagtgtacgagatgctggtgagccacatccagctgcactacaagcacagctacaccctgcccatcgccagcagcatcagactgcaggccttcgacttcctgctgctgctgagagccgacagcctgcacagactgggcctgcccaacaaggacggcgtggtgagattcagcccctactgcgtgtgcgactacatggagcccgagagaggcagcgagaagaagaccagcggccccctgagcccccccaccggcccccccggccccgcccccgccggccccgccgtgagactgggcagcgtgccctacagcctgctgttcagagtgctgctgcagtgcctgaagcaggagagcgactggaaggtgctgaagctggtgctgggcagactgcccgagagcctgagatacaaggtgctgatcttcaccagcccctgcagcgtggaccagctgtgcagcgccctgtgcagcatgctgagcggccccaagaccctggagagactgagaggcgcccccgagggcttcagcagaaccgacctgcacctggccgtggtgcccgtgctgaccgccctgatcagctaccacaactacctggacaagaccaagcagagagagatggtgtactgcctggagcagggcctgatccacagatgcgccagccagtgcgtggtggccctgagcatctgcagcgtggagatgcccgacatcatcatcaaggccctgcccgtgctggtggtgaagctgacccacatcagcgccaccgccagcatggccgtgcccctgctggagttcctgagcaccctggccagactgccccacctgtacagaaacttcgccgccgagcagtacgccagcgtgttcgccatcagcctgccctacaccaaccccagcaagttcaaccagtacatcgtgtgcctggcccaccacgtgatcgccatgtggttcatcagatgcagactgcccttcagaaaggacttcgtgcccttcatcaccaagggcctgagaagcaacgtgctgctgagcttcgacgacacccccgagaaggacagcttcagagccagaagcaccagcctgaacgagagacccaagagcagaatccagaccagcctgaccagcgccagcctgggcagcgccgacgagaacagcgtggcccaggccgacgacagcctgaagaacctgcacctggagctgaccgagacctgcctggacatgatggccagatacgtgttcagcaacttcaccgccgtgcccaagagaagccccgtgggcgagttcctgctggccggcggcagaaccaagacctggctggtgggcaacaagctggtgaccgtgaccaccagcgtgggcaccggcaccagaagcctgctgggcctggacagcggcgagctgcagagcggccccgagagcagcagcagccccggcgtgcacgtgagacagaccaaggaggcccccgccaagctggagagccaggccggccagcaggtgagcagaggcgccagagacagagtgagaagcatgagcggcggccacggcctgagagtgggcgccctggacgtgcccgccagccagttcctgggcagcgccaccagccccggccccagaaccgcccccgccgccaagcccgagaaggccagcgccggcaccagagtgcccgtgcaggagaagaccaacctggccgcctacgtgcccctgctgacccagggctgggccgagatcctggtgagaagacccaccggcaacaccagctggctgatgagcctggagaaccccctgagccccttcagcagcgacatcaacaacatgcccctgcaggagctgagcaacgccctgatggccgccgagagattcaaggagcacagagacaccgccctgtacaagagcctgagcgtgcccgccgccagcaccgccaagcccccccccctgcccagaagcaacaccgacagcgccgtggtgatggaggagggcagccccggcgaggtgcccgtgctggtggagccccccggcctggaggacgtggaggccgccctgggcatggacagaagaaccgacgcctacagcagaagcagcagcgtgagcagccaggaggagaagagcctgcacgccgaggagctggtgggcagaggcatccccatcgagagagtggtgagcagcgagggcggcagacccagcgtggacctgagcttccagcccagccagcccctgagcaagagcagcagcagccccgagctgcagaccctgcaggacatcctgggcgaccccggcgacaaggccgacgtgggcagactgagccccgaggtgaaggccagaagccagagcggcaccctggacggcgagagcgccgcctggagcgccagcggcgaggacagcagaggccagcccgagggccccctgcccagcagcagccccagaagccccagcggcctgagacccagaggctacaccatcagcgacagcgcccccagcagaagaggcaagagagtggagagagacgccctgaagagcagagccaccgccagcaacgccgagaaggtgcccggcatcaaccccagcttcgtgttcctgcagctgtaccacagccccttcttcggcgacgagagcaacaagcccatcctgctgcccaacgagagccagagcttcgagagaagcgtgcagctgctggaccagatccccagctacgacacccacaagatcgccgtgctgtacgtgggcgagggccagagcaacagcgagctggccatcctgagcaacgagcacggcagctacagatacaccgagttcctgaccggcctgggcagactgatcgagctgaaggactgccagcccgacaaggtgtacctgggcggcctggacgtgtgcggcgaggacggccagttcacctactgctggcacgacgacatcatgcaggccgtgttccacatcgccaccctgatgcccaccaaggacgtggacaagcacagatgcgacaagaagagacacctgggcaacgacttcgtgagcatcgtgtacaacgacagcggcgaggacttcaagctgggcaccatcaagggccagttcaacttcgtgcacgtgatcgtgacccccctggactacgagtgcaacctggtgagcctgcagtgcagaaaggacatggagggcctggtggacaccagcgtggccaagatcgtgagcgacagaaacctgcccttcgtggccagacagatggccctgcacgccaacatggccagccaggtgcaccacagcagaagcaaccccaccgacatctaccccagcaagtggatcgccagactgagacacatcaagagactgagacagagaatctgcgaggaggccgcctacagcaaccccagcctgcccctggtgcacccccccagccacagcaaggcccccgcccagacccccgccgagcccacccccggctacgaggtgggccagagaaagagactgatcagcagcgtggaggacttcaccgagttcgtgtag

SEQ ID NO: 273747 - DNA, 5226 bp, Artificial Sequence
  derived and/or modified sequence
atggccaagcccaccagcaaggacagcggcctgaaggagaagttcaagatcctgctgggcctgggcacccccagacccaaccccagaagcgccgagggcaagcagaccgagttcatcatcaccgccgagatcctgagagagctgagcatggagtgcggcctgaacaacagaatcagaatgatcggccagatctgcgaggtggccaagaccaagaagttcgaggagcacgccgtggaggccctgtggaaggccgtggccgacctgctgcagcccgagagacccctggaggccagacacgccgtgctggccctgctgaaggccatcgtgcagggccagggcgagagactgggcgtgctgagagccctgttcttcaaggtgatcaaggactaccccagcaacgaggacctgcacgagagactggaggtgttcaaggccctgaccgacaacggcagacacatcacctacctggaggaggagctggccgacttcgtgctgcagtggatggacgtgggcctgagcagcgagttcctgctggtgctggtgaacctggtgaagttcaacagctgctacctggacgagtacatcgccagaatggtgcagatgatctgcctgctgtgcgtgagaaccgccagcagcgtggacatcgaggtgagcctgcaggtgctggacgccgtggtgtgctacaactgcctgcccgccgagagcctgcccctgttcatcgtgaccctgtgcagaaccatcaacgtgaaggagctgtgcgagccctgctggaagctgatgagaaacctgctgggcacccacctgggccacagcgccatctacaacatgtgccacctgatggaggacagagcctacatggaggacgcccccctgctgagaggcgccgtgttcttcgtgggcatggccctgtggggcgcccacagactgtacagcctgagaaacagccccaccagcgtgctgcccagcttctaccaggccatggcctgccccaacgaggtggtgagctacgagatcgtgctgagcatcaccagactgatcaagaagtacagaaaggagctgcaggtggtggcctgggacatcctgctgaacatcatcgagagactgctgcagcagctgcagaccctggacagccccgagctgagaaccatcgtgcacgacctgctgaccaccgtggaggagctgtgcgaccagaacgagttccacggcagccaggagagatacttcgagctggtggagagatgcgccgaccagagacccgagagcagcctgctgaacctgatcagctacagagcccagagcatccaccccgccaaggacggctggatccagaacctgcaggccctgatggagagattcttcagaagcgagagcagaggcgccgtgagaatcaaggtgctggacgtgctgagcttcgtgctgctgatcaacagacagttctacgaggaggagctgatcaacagcgtggtgatcagccagctgagccacatccccgaggacaaggaccaccaggtgagaaagctggccacccagctgctggtggacctggccgagggctgccacacccaccacttcaacagcctgctggacatcatcgagaaggtgatggccagaagcctgagccccccccccgagctggaggagagagacgtggccgcctacagcgccagcctggaggacgtgaagaccgccgtgctgggcctgctggtgatcctgcagaccaagctgtacaccctgcccgccagccacgccaccagagtgtacgagatgctggtgagccacatccagctgcactacaagcacagctacaccctgcccatcgccagcagcatcagactgcaggccttcgacttcctgctgctgctgagagccgacagcctgcacagactgggcctgcccaacaaggacggcgtggtgagattcagcccctactgcgtgtgcgactacatggagcccgagagaggcagcgagaagaagaccagcggccccctgagcccccccaccggcccccccggccccgcccccgccggccccgccgtgagactgggcagcgtgccctacagcctgctgttcagagtgctgctgcagtgcctgaagcaggagagcgactggaaggtgctgaagctggtgctgggcagactgcccgagagcctgagatacaaggtgctgatcttcaccagcccctgcagcgtggaccagctgtgcagcgccctgtgcagcatgctgagcggccccaagaccctggagagactgagaggcgcccccgagggcttcagcagaaccgacctgcacctggccgtggtgcccgtgctgaccgccctgatcagctaccacaactacctggacaagaccaagcagagagagatggtgtactgcctggagcagggcctgatccacagatgcgccagccagtgcgtggtggccctgagcatctgcagcgtggagatgcccgacatcatcatcaaggccctgcccgtgctggtggtgaagctgacccacatcagcgccaccgccagcatggccgtgcccctgctggagttcctgagcaccctggccagactgccccacctgtacagaaacttcgccgccgagcagtacgccagcgtgttcgccatcagcctgccctacaccaaccccagcaagttcaaccagtacatcgtgtgcctggcccaccacgtgatcgccatgtggttcatcagatgcagactgcccttcagaaaggacttcgtgcccttcatcaccaagggcctgagaagcaacgtgctgctgagcttcgacgacacccccgagaaggacagcttcagagccagaagcaccagcctgaacgagagacccaagagcagaatccagaccagcctgaccagcgccagcctgggcagcgccgacgagaacagcgtggcccaggccgacgacagcctgaagaacctgcacctggagctgaccgagacctgcctggacatgatggccagatacgtgttcagcaacttcaccgccgtgcccaagagaagccccgtgggcgagttcctgctggccggcggcagaaccaagacctggctggtgggcaacaagctggtgaccgtgaccaccagcgtgggcaccggcaccagaagcctgctgggcctggacagcggcgagctgcagagcggccccgagagcagcagcagccccggcgtgcacgtgagacagaccaaggaggcccccgccaagctggagagccaggccggccagcaggtgagcagaggcgccagagacagagtgagaagcatgagcggcggccacggcctgagagtgggcgccctggacgtgcccgccagccagttcctgggcagcgccaccagccccggccccagaaccgcccccgccgccaagcccgagaaggccagcgccggcaccagagtgcccgtgcaggagaagaccaacctggccgcctacgtgcccctgctgacccagggctgggccgagatcctggtgagaagacccaccggcaacaccagctggctgatgagcctggagaaccccctgagccccttcagcagcgacatcaacaacatgcccctgcaggagctgagcaacgccctgatggccgccgagagattcaaggagcacagagacaccgccctgtacaagagcctgagcgtgcccgccgccagcaccgccaagcccccccccctgcccagaagcaacaccgacagcgccgtggtgatggaggagggcagccccggcgaggtgcccgtgctggtggagccccccggcctggaggacgtggaggccgccctgggcatggacagaagaaccgacgcctacagcagaagcagcagcgtgagcagccaggaggagaagagcctgcacgccgaggagctggtgggcagaggcatccccatcgagagagtggtgagcagcgagggcggcagacccagcgtggacctgagcttccagcccagccagcccctgagcaagagcagcagcagccccgagctgcagaccctgcaggacatcctgggcgaccccggcgacaaggccgacgtgggcagactgagccccgaggtgaaggccagaagccagagcggcaccctggacggcgagagcgccgcctggagcgccagcggcgaggacagcagaggccagcccgagggccccctgcccagcagcagccccagaagccccagcggcctgagacccagaggctacaccatcagcgacagcgcccccagcagaagaggcaagagagtggagagagacgccctgaagagcagagccaccgccagcaacgccgagaaggtgcccggcatcaaccccagcttcgtgttcctgcagctgtaccacagccccttcttcggcgacgagagcaacaagcccatcctgctgcccaacgagagccagagcttcgagagaagcgtgcagctgctggaccagatccccagctacgacacccacaagatcgccgtgctgtacgtgggcgagggccagagcaacagcgagctggccatcctgagcaacgagcacggcagctacagatacaccgagttcctgaccggcctgggcagactgatcgagctgaaggactgccagcccgacaaggtgtacctgggcggcctggacgtgtgcggcgaggacggccagttcacctactgctggcacgacgacatcatgcaggccgtgttccacatcgccaccctgatgcccaccaaggacgtggacaagcacagatgcgacaagaagagacacctgggcaacgacttcgtgagcatcgtgtacaacgacagcggcgaggacttcaagctgggcaccatcaagggccagttcaacttcgtgcacgtgatcgtgacccccctggactacgagtgcaacctggtgagcctgcagtgcagaaaggacatggagggcctggtggacaccagcgtggccaagatcgtgagcgacagaaacctgcccttcgtggccagacagatggccctgcacgccaacatggccagccaggtgcaccacagcagaagcaaccccaccgacatctaccccagcaagtggatcgccagactgagacacatcaagagactgagacagagaatctgcgaggaggccgcctacagcaaccccagcctgcccctggtgcacccccccagccacagcaaggcccccgcccagacccccgccgagcccacccccggctacgaggtgggccagagaaagagactgatcagcagcgtggaggacttcaccgagttcgtgtag

SEQ ID NO: 273748 - DNA, 5079 bp, Artificial Sequence
  derived and/or modified sequence
atggagtgcgggttaaacaatcgaattagaatgatagggcagatctgtgaggtggccaagaccaagaagtttgaggagcacgcagtcgaggctctctggaaggccgttgcagacctgctccagccggaacgcccattggaagcccggcatgccgttctggcgttacttaaggcaattgttcaaggacagggtgagcggttgggcgtcctccgggccctgttcttcaaagtaattaaagactatccatccaatgaggatctgcatgaacgactggaagtgtttaaagccctgaccgacaacggacgccacattacttaccttgaggaagagctggccgacttcgtcttacagtggatggatgtcggcctgagctccgagtttttgctcgttcttgtcaacctggtgaaatttaacagctgctaccttgatgagtacattgctcgcatggttcagatgatctgcctcctatgtgtcaggacggccagctcagtcgatattgaggtatctcttcaggtactagatgctgtagtgtgctacaactgtctgcccgcggagtccctccccctcttcatcgttacgctgtgcagaacgatcaatgtaaaggaactgtgtgaaccatgctggaagctgatgcgcaatctgctcggcactcatctggggcattctgccatttataacatgtgccatctaatggaagatcgggcctacatggaagacgctccactgcttcggggggccgtttttttcgtgggcatggcactgtggggtgcccaccgactctattcactcaggaattccccaacttcagtgctcccatcattttaccaagctatggcttgccccaacgaggtggtgagttacgagatcgtgttgagcataacgaggctgatcaagaaatatagaaaggagctgcaggtggttgcttgggatatcttgctgaatataatcgaacgattgctgcagcaacttcagaccttggattcccctgaactgagaaccatcgttcacgatttactgaccacagtggaggagttgtgtgatcagaatgagtttcacggttctcaggaaaggtattttgagcttgtcgaaagatgcgcagatcagcgacccgagtctagtttacttaacttaatctcttatagggcgcagtcgatccaccccgcgaaagatggttggattcagaacctacaggctctgatggaacgcttttttcgcagcgaaagtcggggtgctgtgcgtattaaagtccttgacgtgctttcgtttgtgctactgattaatcggcaattttacgaggaggaactcattaattctgtggtgatttcacagttatcacacatccccgaggacaaagaccaccaggtacgcaaactagccacacaactattggtcgaccttgcagaaggatgtcacacacatcactttaactcactgctggacatcatcgaaaaagttatggctaggtccctcagtcctccacctgagttggaagaacgggatgtggctgcttactcagcctcattagaggacgtcaagactgccgttctcgggctcctcgtgatcctgcagacgaagctgtacactttacctgcatctcacgcaactagagtatacgagatgctggtaagccatatacaactgcactacaagcacagctatacactgccaattgcatcctctattcgcctacaggcgttcgattttctcctcctgctgcgagctgatagcctgcacaggttgggtctccccaacaaggacggcgtagtgcgcttttctccttattgtgtgtgtgattacatggagcctgaacggggctccgaaaaaaagacaagtggacctctgagtccacctaccggtcctcccgggcccgccccagcaggacctgctgtgagactcggttctgtgccttacagccttctgtttcgtgtgctccttcagtgcctgaagcaggagtcggactggaaagtgctcaagctcgttctcggacggctgcccgaatctttgcgttacaaggtgctgattttcacaagcccctgttcagtagatcaactctgctccgcactctgcagcatgcttagcggccccaaaacactggaacgattgcgcggcgcacccgagggttttagcagaactgacctgcatttagcagtggtccccgtcctgaccgccttgattagttaccacaactatctggacaagacgaagcagcgggagatggtatactgcctggaacagggacttatccacaggtgcgcctcacagtgcgtcgttgcactgagcatttgctcggtggaaatgccggacatcatcattaaggcactccctgtgctggtggtaaagcttacacacattagtgccacagcatctatggctgtacccctgctggaattccttagcacacttgcccggctgccacacttgtataggaacttcgcagcagaacagtacgcgtctgtctttgcaatcagcctgccgtatacaaacccatccaagtttaatcaatacatcgtttgcctcgcacatcacgttattgctatgtggttcataaggtgtagattgccttttcgcaaggacttcgtgccgttcattacaaaagggctgaggagtaatgtgttattgagctttgatgatacccctgagaaggatagcttcagggccaggagcacttcacttaacgaacggccgaagtccagaatccagacttcactgactagtgctagcttagggagcgccgatgagaatagtgttgcacaggctgacgactcactgaagaacctccatctggaactgactgaaacttgcttagacatgatggcacggtacgttttttcaaactttaccgcagtaccaaagcgcagcccagtcggcgaatttctgttggccggcggcaggacgaaaacttggctggtcggaaacaagctggttacagtcaccacatccgtgggcaccgggactcggagcctgctcgggttagacagtggagagctccagtccgggccagagagcagtagtagtccgggcgtgcacgttcgccaaactaaagaagctcccgctaagctcgaatcacaagccggacagcaagtttcccgcggcgcccgagatcgcgtccggagcatgtccggcggccatggcctgcgggtaggagccctggatgtccctgcatcccagttcttaggctcagcaacgagtccgggacctaggacagcccctgctgcgaagcccgaaaaggcgagcgccggaacaagggtgcccgtgcaggaaaagaccaacctggctgcttatgttcctcttctgactcagggctgggcagagatattagttaggcgcccaactggtaatacatcttggcttatgtccctggagaacccattgagccccttctcttctgacatcaataatatgcccctgcaagaactaagcaacgccctaatggctgcggagcgttttaaggagcatcgcgacactgctttatataaatccttatccgtgccggcggcttcgaccgcaaagcccccacccctcccacgtagtaatacagacagtgctgtggtaatggaggaaggatccccaggagaagttcccgtgcttgttgagcccccgggcttagaagatgtagaagccgcccttggaatggaccgtcgcaccgatgcctatagccgaagctcctcagtgagtagtcaggaggaaaagtctctgcacgccgaagaactagtgggcagaggaatccccatcgaacgggtagtcagctcagagggaggcagaccttctgtggatctctcatttcagccaagccagccactgtccaagtcgtcatccagtcctgagctacagactctgcaggatatactgggtgatcccggcgacaaggccgatgtgggtagactgtcccctgaggtgaaggcccgaagtcagagtgggactcttgatggagaaagtgccgcttggtctgcatctggggaagattcacgtggtcagcccgaagggcccctgccctcatcatctccacgcagcccctcagggctgcgaccccgcggctacacaatctctgattcagccccttcgaggcggggtaaacgcgttgaaagagacgctctgaagtccagagctactgcgagcaatgctgaaaaagtacctgggatcaatccgagctttgtgttcttgcagctgtaccattcccccttctttggagatgaatccaataaaccaatactacttcctaatgagtcccagagtttcgagcggagcgtgcaactattggaccagattccatcttatgacacacacaagattgccgtgctatatgtgggcgaaggacaaagtaattcagagctggccattttgagcaacgagcacggctcctatcggtataccgagtttcttacaggactgggacgcctcattgagctgaaggactgtcaacccgacaaagtgtatctggggggtttagatgtatgtggcgaagatggccagtttacctattgttggcacgatgatattatgcaggccgtttttcatattgcaactctcatgcctactaaggacgtcgacaaacacagatgcgacaagaagcggcatttaggaaacgactttgtgagtattgtgtacaacgacagcggtgaggacttcaaacttggcaccatcaagggccagttcaatttcgttcatgtcattgttacaccgctggactatgaatgtaacctggtatcgctgcagtgtagaaaggacatggaagggttagtggacacttccgtcgctaaaatcgtatcagatcgaaatctaccgttcgttgcaaggcagatggctctgcatgctaatatggcgagccaagttcaccattcccgctccaatccaaccgacatctacccaagtaaatggattgcaaggctcagacatattaaacggctaaggcaacggatctgtgaggaagccgcctacagtaaccccagtttgcctctggtgcatcctccatcccacagtaaggctcctgcgcagacacctgctgaacccaccccagggtacgaggtcggccaacgtaaacggcttatctcaagcgtggaagactttacggaattcgtgtag

SEQ ID NO: 273749 - DNA, 5226 bp, Artificial Sequence
  derived and/or modified sequence
atggccaaaccaacgtccaaggactcaggcttaaaggagaagtttaaaatcctgctcgggctggggacacctagacccaaccctagatcagccgaaggcaagcaaactgagtttattataacagccgagatcttgagagagttatctatggaatgcggactgaataatcgcattcgtatgattggccagatttgtgaggtagcaaagactaaaaaatttgaagagcatgctgtggaagctctgtggaaagccgtcgccgatctgcttcagcctgagcgacccctagaagccagacacgcggtcctcgctctactgaaagccattgtccaggggcagggcgaaaggctgggagtcttgcgcgccctgttcttcaaagtcattaaggactacccttctaatgaagatctacacgagcggctggaagtcttcaaggcgctgactgataacggaagacacattacatacctagaagaggagctcgccgatttcgtgctccagtggatggacgtgggcctgagcagtgagttcctgctcgtgctggtgaatctagttaagttcaactcctgttatctggacgagtacatcgcccgcatggtgcagatgatctgtttattatgcgtaagaaccgcgtctagtgtggatattgaggtctctctgcaagtcctggatgctgttgtgtgctacaactgcttgcccgctgaaagcctacccctcttcatagtaacattgtgccgcacgattaatgtcaaggaattgtgcgaaccctgttggaagcttatgcgcaatctgctcggcactcacttggggcacagcgctatttacaacatgtgtcatttaatggaggaccgagcctatatggaagatgcaccactcctgcggggtgcggtcttttttgttggaatggccttgtggggggcgcacaggctttattcattaagaaacagcccgacttctgtgttgccttcattctaccaggccatggcgtgcccaaatgaggtggtcagctacgaaatcgtactgtccattacgagactcatcaagaagtaccggaaggaactgcaggtagttgcctgggacatactcctcaatattattgaacgcctcctccaacagctccagaccctggactccccagaactaaggacgattgtacacgatttactgacgaccgtggaagaactgtgtgatcaaaatgagtttcatggatcccaggagcggtatttcgaactggttgaacgctgcgccgaccagcggccagaatcgtcactactgaacctgatctcatatagagcacagtctatccacccagctaaagacggttggattcagaaccttcaggcactgatggaacgattttttcggtccgaatcgaggggggctgtaagaataaaagtacttgatgtcttgtcttttgtgttgttgattaacaggcagttttacgaagaagagctgatcaattctgtggttattagccagctctcacatattcccgaagataaggatcatcaggtgcgcaagctcgcgacacagctgcttgtcgacttagccgagggctgccacactcatcatttcaactcccttctggacatcatcgagaaagtgatggctaggtccctgtctccgcccccagagttagaagagcgtgacgtggcggcatactctgctagtctggaggacgtcaagacggccgttctgggccttctcgtgatcttgcaaacaaaactgtacacactgcctgccagtcacgccactagggtgtacgagatgctggtgtcccacattcaactgcactacaaacatagctatacgttgcccatcgcatcgtccattcggttgcaggcatttgacttcttactcctgcttagagcagactctctacaccgcctgggcttacccaacaaggatggcgtggtgagatttagcccatattgcgtttgcgattacatggagccagagagaggtagtgaaaagaagacctcagggcctctctctccccctaccggtcccccgggacccgccccggccggaccagcagtgaggttgggatccgtgccttattcattattgtttagagtgctgctccagtgtcttaaacaggagtcagattggaaggtgctgaaactggttctgggacgcctgcccgagtccctccggtacaaggtgctgatttttacaagtccctgctccgtggaccagttgtgcagcgccttgtgcagcatgcttagtggcccaaaaactctagaacgtttgcggggggcgcccgaaggctttagcagaaccgacctgcacctagcagttgtccccgtgctgactgccttaatctcgtatcacaactatctggacaagactaaacagagagagatggtgtattgcctcgagcagggcctcatacatcgctgtgcatcacagtgtgtggtcgccctttctatctgttctgtagagatgccagacatcattattaaggcgttgcccgtgctggtagtgaaattgacgcatatttccgccaccgccagcatggcggtccccctgctcgaatttctcagcaccctggctaggctgccccatctgtatcggaattttgccgccgaacagtatgccagcgtgttcgcaatttccttaccctatactaatccatctaagtttaatcaatatatcgtttgcctagcgcaccatgtgatcgcaatgtggtttatcaggtgccgcctccccttcagaaaagatttcgtgccatttattaccaagggcctccggtcaaacgtgcttcttagcttcgatgatacccctgagaaagatagctttcgagctcggtctacctccttaaatgagcgccctaagtcacgaattcaaacttcgttaacaagcgcatctctgggaagcgcagacgagaattcagtcgcacaggcagacgattccctcaagaatctgcatctcgaactgaccgaaacatgtcttgacatgatggctcggtatgttttcagcaacttcaccgccgttcccaagcgttcacctgtaggcgagtttttgctggcaggcggccggacaaagacgtggctggtgggcaataaactggttaccgtcacaacttcagtcggcactggaacccgctctctgttagggctggacagcggcgagcttcagagcgggcccgagagttcgtcttctccaggtgttcacgtgaggcagactaaggaggccccagctaaactcgaatcgcaggctggacagcaggtctcgaggggagcccgagacagggtcagatccatgtccggcggccacggactgagagtcggcgcccttgacgtccccgctagccagttcctcgggtcagccactagccctggaccccggaccgcaccagccgctaaacccgaaaaggcatccgccggaacaagggttcctgttcaggagaagacaaacttagcagcatatgtgccgctcctcacacaggggtgggccgagatactggttcgcaggcctaccggcaacaccagttggttgatgagtctcgagaatcccttgagtcctttctccagtgacataaataacatgccccttcaggaactgagcaacgccctgatggccgccgagaggttcaaggaacatagagacactgctctgtataaatcgttatctgtaccagccgcctccacggctaagccgccccccctgcctcggagtaataccgacagcgccgtggtaatggaagaagggtcccctggggaagtcccagtactggttgagcccccaggattggaagacgttgaagccgccctgggaatggaccgtaggacggacgcctactccagatcctcttcagtgtcgtcccaggaggaaaaatccctacacgcggaggaactggtgggtcgtggcatccccatcgagcgggtcgtgtcttccgagggaggccgtccctctgtggatctctccttccagccttcccagccacttagtaaaagtagctccagccctgaactacagactctccaagacattctcggtgacccaggagataaggcggacgttggaaggctgtctccagaggtcaaagccagaagtcagagcggcacgctcgacggcgagtccgcggcgtggtcagcctccggcgaggatagtagaggtcaacccgaagggccacttccatcatcttccccacggtcacctagtggccttaggcccaggggttacacgattagtgactctgctcctagtcgacgcggaaagagagtggagagagatgcccttaaatcacgggcaaccgcctctaacgccgaaaaggtgcctgggattaatccatcattcgtttttctacaactataccacagccccttttttggggatgagagtaataaacctattctgctgccaaatgagagtcagtcctttgaacgcagcgtccagctgttagaccagataccaagctatgacacacataaaatcgcagtactatacgtcggggaaggccagtccaatagcgaactcgcgatcctgagtaacgagcatggatcttacagatataccgagttcttaaccggcctaggcaggctgatcgaactcaaggactgccagcctgataaagtgtacctggggggacttgacgtgtgtggtgaggatgggcagtttacctattgctggcatgatgacataatgcaggcagtgttccacattgcaaccttgatgccaacgaaggacgtcgacaaacacagatgtgacaagaaacgccacctgggcaacgactttgtgtctatagtatataacgattcaggagaggacttcaaactgggaaccattaagggccagtttaatttcgtacatgttatcgtcacacctctcgattatgagtgtaacctggtaagtctccaatgtcgaaaggatatggagggccttgtggacacaagcgtcgcaaagatcgtgtctgaccgaaatctgcccttcgtggctcgtcagatggcacttcatgcaaacatggcaagccaggtccaccacagcagaagtaaccctactgacatatacccgtccaaatggatcgctaggcttcgccacattaaaagattaaggcaacggatttgtgaggaagcggcatattcaaatcccagtttaccattggtacaccctcctagccactccaaagcccctgcacagactcctgccgaacccactccaggatatgaggtcggccaaaggaaacgtttgatcagctctgtcgaggattttactgagttcgtttag

SEQ ID NO: 273750 - DNA, 5079 bp, Artificial Sequence
  derived and/or modified sequence
atggagtgtggcctgaacaaccgcatccgcatgattggccagatctgtgaggtggccaagaccaagaagtttgaggagcacgctgtggaggccctgtggaaggctgtggccgacctgctgcagcctgagcggcccctggaggcccggcatgctgtgctggccctgctgaaggccatcgtgcagggccagggcgagcggctgggcgtgctgcgggccctcttcttcaaggtgatcaaggactaccccagcaatgaagacctgcacgagcggctggaggtgttcaaggccctgacagacaatggccgccacatcacctacctggaggaggagctggccgactttgtgctgcagtggatggatgtgggcctgagcagcgagttcctgctggtgctggtgaacctggtgaagttcaacagctgctacctggatgagtacatcgccaggatggtgcagatgatctgcctgctgtgtgtgaggacagccagctctgtggacatcgaggtgtccctgcaggtgctggatgctgtggtgtgctacaactgcctgcctgctgagagcctgcccctcttcatcgtgaccctgtgcaggaccatcaacgtgaaggagctgtgtgagccctgctggaagctgatgaggaacctgctgggcacccacctgggccacagcgccatctacaacatgtgccacctgatggaggaccgggcctacatggaggatgcccccctgctgcggggagctgtgttctttgtgggcatggccctgtggggcgcccaccggctgtacagcctgaggaacagccccacctctgtgctgcccagcttctaccaggccatggcctgccccaatgaggtggtgtcctatgaaattgtgctgagcatcaccaggctcatcaagaagtacaggaaggagctgcaggtggtggcctgggacatcctgctgaacatcatcgagcggctgctgcagcagctgcagaccctggacagccctgagctgcggaccatcgtgcatgacctgctgaccaccgtggaggagctgtgtgaccagaatgagttccacggcagccaggagcgctactttgagctggtggagcgctgtgccgaccagaggcctgagagcagcctgctgaacctgatctcctaccgggcccagagcatccacccagccaaggatggctggatccagaacctgcaggccctgatggagcgcttcttccgctctgagagcagaggagctgtgcgcatcaaggtgctggatgtgctgagctttgtgctgctgatcaaccggcagttctatgaggaggagctgatcaacagcgtggtgatcagccagctgagccacatccctgaggacaaggaccaccaggtgaggaagctggccacccagctgctggtggacctggccgagggctgccacacccaccacttcaacagcctgctggacatcatcgagaaggtgatggcccggagcctgagccccccacctgagctggaggagagagatgtggccgcctacagcgccagcctggaggatgtgaagacagctgtgctgggcctgctggtgatcctgcagaccaagctgtacaccctgcctgccagccacgccaccagggtgtatgagatgctggtgagccacatccagctgcactacaagcacagctacaccctgcccatcgccagcagcatccggctgcaggcctttgacttcctgctgctgctgcgggctgacagcctgcaccggctgggcctgcccaacaaggatggagtggtgcgcttcagcccctactgtgtgtgtgactacatggagcctgagcggggcagcgagaagaagaccagcggccccctgagcccccccaccggccccccaggccctgccccagctggccctgctgtgcggctgggctctgtgccctacagcctgctcttccgggtgctgctgcagtgcctgaagcaggagagtgactggaaggtgctgaagctggtgctgggccgcctgcctgagagcctgcgctacaaggtgctgatcttcaccagcccctgcagcgtggaccagctgtgcagcgccctgtgcagcatgctgagcggccccaagaccctggagcggctgcggggggcccctgagggcttcagcaggacagacctgcacctggccgtggtgcctgtgctgacagccctgatctcctaccacaactacctggacaagaccaagcagcgggagatggtgtactgcctggagcagggcctcatccaccgctgtgccagccagtgtgtggtggccctgagcatctgcagcgtggagatgccagacatcatcatcaaggccctgcctgtgctggtggtgaagctgacccacatcagcgccacagcctccatggctgtgcccctgctggagttcctgagcaccctggcccggctgccccacctgtacagaaactttgctgctgagcagtatgcctctgtgtttgccatcagcctgccctacaccaaccccagcaagttcaaccagtacatcgtgtgcctggcccaccacgtgattgccatgtggttcatccgctgccgcctgcccttcaggaaggactttgtgcccttcatcaccaagggcctgcggagcaatgtgctgctgagctttgatgacaccccagagaaggacagcttccgggcccggagcaccagcctgaatgaaagacccaagagccgcatccagaccagcctgaccagcgccagcctgggcagcgcagatgaaaattctgtggcccaggctgatgacagcctgaagaacctgcacctggagctgacagagacctgcctggacatgatggcccgctacgtgttcagcaacttcaccgctgtgcccaagaggagccctgtgggggagttcctgctggccggcggccgcaccaagacctggctggtgggcaacaagctggtgacagtgaccacctctgtgggcaccggcaccaggagcctgctgggcctggacagcggggagctgcagagcggccctgagagcagcagcagccctggggtgcacgtgcggcagaccaaggaggccccagccaagctggagagccaggccggccagcaggtgtccagaggagcccgggacagagtgcgctccatgtctgggggccacggcctgcgggtgggcgccctggatgtgcctgccagccagttcctgggcagcgccaccagccctggccccaggacagccccagctgccaagccagagaaggccagcgctggcaccagggtgcctgtgcaggagaagaccaacctggccgcctacgtgcccctgctgacccagggctgggccgagatcctggtgcggcggcccactggaaacacctcctggctgatgagcctggagaaccccctgagccccttcagcagtgacatcaacaacatgcccctgcaggagctgagcaatgccctgatggctgctgagcgcttcaaggagcaccgggacacagccctgtacaagagcctgtctgtgcctgctgccagcacagccaagcccccacccctgcccaggagcaacacagattctgctgtggtgatggaggagggcagccctggagaggtgcctgtgctggtggagcccccaggcctggaggatgtggaggccgccctgggcatggacagaagaacagatgcctacagccgcagcagctctgtgagcagccaggaggagaagagcctgcacgccgaggagctggtgggccggggcatccccatcgagcgggtggtgagcagcgagggcggccggcccagcgtggacctgtccttccagcccagccagcccctgagcaagagcagcagcagccctgagctgcagaccctgcaggacatcctgggggaccccggggacaaggcagatgtgggccgcctgagccctgaggtgaaggcccggagccagagcggcaccctggatggagagagcgctgcctggagcgccagcggggaggacagccggggccagcctgagggccccctgcccagcagcagccccaggagccccagcggcctgcggccccggggctacaccatcagtgacagcgcccccagcagaagaggcaagagggtggagagagatgccctgaagagccgggccacagccagcaatgctgagaaggtgcccggcatcaaccccagctttgtgttcctgcagctgtaccacagccccttctttggagatgagagcaacaagcccatcctgctgcccaatgaaagccagagctttgagaggtctgtgcagctgctggaccagatccccagctatgacacccacaagattgctgtgctgtatgtgggggagggccagagcaacagcgagctggccatcctgagcaatgaacatggcagctaccgctacacagagttcctgaccggcctgggccgcctgattgagctgaaggactgccagcctgacaaggtgtacctgggcggcctggatgtgtgtggagaagatggccagttcacctactgctggcatgatgacatcatgcaggccgtgttccacatcgccaccctgatgcccaccaaggatgtggacaagcaccgctgtgacaagaagaggcacctgggcaatgactttgtgtccatcgtgtacaatgacagcggggaggacttcaagctgggcaccatcaagggccagttcaactttgtgcacgtgattgtgacccccctggactatgagtgcaacctggtgtccctgcagtgcaggaaggacatggagggcctggtggacacctctgtggccaagatcgtgtctgacaggaacctgccctttgtggcccggcagatggccctgcacgccaacatggccagccaggtgcaccacagccgcagcaaccccacagacatctaccccagcaagtggatcgcccggctgcggcacatcaagaggctgcggcagaggatctgtgaggaggccgcctacagcaaccccagcctgcccctggtgcacccccccagccacagcaaggccccagcccagaccccagctgagcccaccccaggctatgaggtgggccagaggaagaggctcatcagctctgtggaggacttcacagaatttgtgtag

SEQ ID NO: 273751 - DNA, 5226 bp, Artificial Sequence
  derived and/or modified sequence
atggccaagcccaccagcaaggacagcggcctgaaggagaagttcaagatcctgctgggcctgggcaccccccggcccaaccccaggtctgctgagggcaagcagacagagttcatcatcacagctgagatcctgcgggagctgtccatggagtgtggcctgaacaaccgcatccgcatgattggccagatctgtgaggtggccaagaccaagaagtttgaggagcacgctgtggaggccctgtggaaggctgtggccgacctgctgcagcctgagcggcccctggaggcccggcatgctgtgctggccctgctgaaggccatcgtgcagggccagggcgagcggctgggcgtgctgcgggccctcttcttcaaggtgatcaaggactaccccagcaatgaagacctgcacgagcggctggaggtgttcaaggccctgacagacaatggccgccacatcacctacctggaggaggagctggccgactttgtgctgcagtggatggatgtgggcctgagcagcgagttcctgctggtgctggtgaacctggtgaagttcaacagctgctacctggatgagtacatcgccaggatggtgcagatgatctgcctgctgtgtgtgaggacagccagctctgtggacatcgaggtgtccctgcaggtgctggatgctgtggtgtgctacaactgcctgcctgctgagagcctgcccctcttcatcgtgaccctgtgcaggaccatcaacgtgaaggagctgtgtgagccctgctggaagctgatgaggaacctgctgggcacccacctgggccacagcgccatctacaacatgtgccacctgatggaggaccgggcctacatggaggatgcccccctgctgcggggagctgtgttctttgtgggcatggccctgtggggcgcccaccggctgtacagcctgaggaacagccccacctctgtgctgcccagcttctaccaggccatggcctgccccaatgaggtggtgtcctatgagatcgtgctgagcatcaccaggctcatcaagaagtacaggaaggagctgcaggtggtggcctgggacatcctgctgaacatcatcgagcggctgctgcagcagctgcagaccctggacagccctgagctgcggaccatcgtgcatgacctgctgaccaccgtggaggagctgtgtgaccagaatgagttccacggcagccaggagcgctactttgagctggtggagcgctgtgccgaccagaggcctgagagcagcctgctgaacctgatctcctaccgggcccagagcatccacccagccaaggatggctggatccagaacctgcaggccctgatggagcgcttcttccgctctgagagcagaggagctgtgcgcatcaaggtgctggatgtgctgagctttgtgctgctgatcaaccggcagttctatgaggaggagctgatcaacagcgtggtgatcagccagctgagccacatccctgaggacaaggaccaccaggtgaggaagctggccacccagctgctggtggacctggccgagggctgccacacccaccacttcaacagcctgctggacatcatcgagaaggtgatggcccggagcctgagccccccacctgagctggaggagagagatgtggccgcctacagcgccagcctggaggatgtgaagacagctgtgctgggcctgctggtgatcctgcagaccaagctgtacaccctgcctgccagccacgccaccagggtgtatgagatgctggtgagccacatccagctgcactacaagcacagctacaccctgcccatcgccagcagcatccggctgcaggcctttgacttcctgctgctgctgcgggctgacagcctgcaccggctgggcctgcccaacaaggatggagtggtgcgcttcagcccctactgtgtgtgtgactacatggagcctgagcggggcagcgagaagaagaccagcggccccctgagccccccaactggacctcctggccctgccccagctggccctgctgtgcggctgggctctgtgccctacagcctgctcttccgggtgctgctgcagtgcctgaagcaggagagtgactggaaggtgctgaagctggtgctgggccgcctgcctgagagcctgcgctacaaggtgctgatcttcaccagcccctgcagcgtggaccagctgtgcagcgccctgtgcagcatgctgagcggccccaagaccctggagcggctgcggggggcccctgagggcttcagcaggacagacctgcacctggccgtggtgcctgtgctgacagccctgatctcctaccacaactacctggacaagaccaagcagcgggagatggtgtactgcctggagcagggcctcatccaccgctgtgccagccagtgtgtggtggccctgagcatctgcagcgtggagatgccagacatcatcatcaaggccctgcctgtgctggtggtgaagctgacccacatcagcgccacagcctccatggctgtgcccctgctggagttcctgagcaccctggcccggctgccccacctgtacagaaactttgctgctgagcagtatgcctctgtgtttgccatcagcctgccctacaccaaccccagcaagttcaaccagtacatcgtgtgcctggcccaccacgtgattgccatgtggttcatccgctgccgcctgcccttcaggaaggactttgtgcccttcatcaccaagggcctgcggagcaatgtgctgctgagctttgatgacaccccagagaaggacagcttccgggcccggagcaccagcctgaatgaaagacccaagagccgcatccagaccagcctgaccagcgccagcctgggcagcgcagatgagaacagcgtggcccaggctgatgacagcctgaagaacctgcacctggagctgacagagacctgcctggacatgatggcccgctacgtgttcagcaacttcaccgctgtgcccaagaggagccctgtgggggagttcctgctggccggcggccgcaccaagacctggctggtgggcaacaagctggtgacagtgaccacctctgtgggcaccggcaccaggagcctgctgggcctggacagcggggagctgcagagcggccctgagagcagcagcagccctggggtgcacgtgcggcagaccaaggaggccccagccaagctggagagccaggccggccagcaggtgtccagaggagcccgggacagagtgcgctccatgtctgggggccacggcctgcgggtgggcgccctggatgtgcctgccagccagttcctgggcagcgccaccagccctggccccaggacagccccagctgccaagccagagaaggccagcgctggcaccagggtgcctgtgcaggagaagaccaacctggccgcctacgtgcccctgctgacccagggctgggccgagatcctggtgagaagacccaccggcaacacctcctggctgatgagcctggagaaccccctgagccccttcagcagtgacatcaacaacatgcccctgcaggagctgagcaatgccctgatggctgctgagcgcttcaaggagcaccgggacacagccctgtacaagagcctgtctgtgcctgctgccagcacagccaagcccccacccctgcccaggagcaacacagacagcgctgtggtgatggaggagggcagccctggagaggtgcctgtgctggtggagcccccaggcctggaggatgtggaggccgccctgggcatggacagaagaacagatgcctacagccgcagcagctctgtgagcagccaggaggagaagagcctgcatgctgaggagctggtgggccggggcatccccatcgagcgggtggtgtcctctgagggcggccggcccagcgtggacctgtccttccagcccagccagcccctgagcaagagcagcagcagccctgagctgcagaccctgcaggacatcctgggggaccccggggacaaggcagatgtgggccgcctgagccctgaggtgaaggcccggagccagagcggcaccctggatggagagagcgctgcctggagcgccagcggggaggacagccggggccagcctgagggccccctgcccagcagcagccccaggagccccagcggcctgcggccccggggctacaccatcagtgacagcgcccccagccggcggggcaagagggtggagagagatgccctgaagagccgggccacagccagcaatgctgagaaggtgcccggcatcaaccccagctttgtgttcctgcagctgtaccacagccccttctttggagatgagagcaacaagcccatcctgctgcccaatgaaagccagagctttgagaggtctgtgcagctgctggaccagatccccagctatgacacccacaagattgctgtgctgtatgtgggggagggccagagcaacagcgagctggccatcctgagcaatgagcacggcagctaccgctacacagagttcctgaccggcctgggccgcctcatcgagctgaaggactgccagcctgacaaggtgtacctgggcggcctggatgtgtgtggggaggatggccagttcacctactgctggcatgatgacatcatgcaggccgtgttccacatcgccaccctgatgcccaccaaggatgtggacaagcaccgctgtgacaagaagaggcacctgggcaatgactttgtgtccatcgtgtacaatgattctggagaggacttcaagctgggcaccatcaagggccagttcaactttgtgcacgtgattgtgacccccctggactatgagtgcaacctggtgtccctgcagtgcaggaaggacatggagggcctggtggacacctctgtggccaagatcgtgtctgacaggaacctgccctttgtggcccggcagatggccctgcacgccaacatggccagccaggtgcaccacagccgcagcaaccccacagacatctaccccagcaagtggatcgcccggctgcggcacatcaagaggctgcggcagaggatctgtgaggaggccgcctacagcaaccccagcctgcccctggtgcacccccccagccacagcaaggccccagcccagaccccagctgagcccaccccaggctatgaggtgggccagaggaagaggctcatcagctctgtggaggacttcacagaatttgtgtag

SEQ ID NO: 273752 - DNA, 5079 bp, Artificial Sequence
  derived and/or modified sequence
atggagtgcggcctgaacaaccggatccggatgatcggccagatctgtgaagtggccaagactaagaagtttgaggagcatgcggtggaggccctgtggaaagctgtagcagatcttctgcagccagagcgtccgctggaagcgcggcacgctgtacttgcattgcttaaggctatcgtccaaggtcagggcgaacggttgggggtgctcagggcgctgttctttaaggttattaaagattatccctctaacgaagacctccatgaacggctggaggtgtttaaggccctgaccgacaacgggcgccacatcacatacctcgaagaagaacttgccgacttcgtgcttcaatggatggacgttggcctgtcttctgaattcctcctggtccttgtgaaccttgtcaaattcaacagctgctatttagacgaatacatcgctcgaatggtgcagatgatctgcctactttgcgtgcgtaccgccagcagcgtcgacatagaggtttctctccaggttctggatgccgtggtatgctacaactgtttgccagcagagagcctacctcttttcatcgtgacactctgcagaaccattaatgtgaaagagctttgcgagccttgctggaaactgatgcgcaacctgctaggcactcacttaggccactccgctatatacaacatgtgtcacttaatggaagatcgcgcctatatggaagatgcgcccttgttaaggggagctgtgtttttcgttgggatggccttatggggcgcacataggctgtactccctgcgcaattctcctacctctgttctgcctagcttctaccaagcgatggcttgccctaatgaggttgttagctatgagatcgtgctctctatcacacggctcatcaagaaataccgcaaagagctgcaggttgtggcttgggacatcctcttgaatataattgagcgtctcttgcagcagctgcagaccctggatagtcccgagctgagaactatcgttcacgacctcctcactacggttgaggaattatgtgatcagaacgagttccatgggagccaggagaggtatttcgaactggtggagagatgtgcagatcaaagacctgaatcatccttgctgaatctgatctcttatagagcacaatcgatccatccagctaaagacgggtggattcaaaacctacaagcactcatggagagattcttcagatcggagtcaaggggcgccgtccgcatcaaagtcctggacgttctctcatttgttctgcttatcaacagacagttctacgaggaggaattaattaactcagtcgtgatttcccagttgtcccacatccccgaggataaagaccatcaggtccgcaagctggccacgcagcttctagtggatctggcagaagggtgccacacacaccattttaacagcctcctcgacataatagagaaagttatggccaggtctttgagtccaccccccgagctggaggaacgagacgttgccgcttacagcgccagcctggaagatgtgaagacagctgtccttgggctgcttgtcatccttcagactaaactgtatacactgccagctagtcacgccaccagggtgtacgaaatgctggtgtctcacattcaattgcactataaacattcttataccctccccatagccagctctatccgtttgcaagcctttgacttccttttgctcctgcgtgctgactcccttcaccgcctgggactgccgaacaaggacggagtggtccggttctctccatattgcgtgtgcgactacatggagcctgagagaggcagtgaaaagaagacaagtggacccctgtcgcctcctactggcccaccggggcccgcacctgctggacctgccgtacgacttggtagtgttccatactctctcctatttcgcgttttgctgcaatgcttaaagcaagagtcagactggaaagtattaaaactggttctaggacggctgcctgaatctctgagatacaaagtgctgattttcacgagcccctgttccgtggaccaactatgcagtgccctgtgcagcatgctgtcggggccaaagaccctcgaacgccttcgtggggctcctgaaggcttctcccgcaccgatctacatctggctgtggtgcccgtccttactgctctgatctcttaccataactacctggacaagacaaagcagcgagaaatggtatactgcctggaacaaggcctcattcataggtgcgcgagtcagtgcgtcgtggctctgtcgatttgcagcgtggagatgcccgatattatcatcaaagctctgcccgtgctggtagtgaaattgactcatataagcgccacggcgtccatggccgtcccactactggagttcttgtctacgctagcgcgcctgccacatctgtaccgcaacttcgcagcggagcagtatgcctctgtctttgcaatcagcttaccatacacgaatccttcaaaattcaaccagtacattgtctgcttggcacaccacgttatcgccatgtggttcatcaggtgccgcttaccattcagaaaggacttcgtccccttcatcactaaggggcttcgctccaatgtactgttgtcattcgacgacacgcccgaaaaagattcattccgagcccgttctacatccctcaacgaacgtccaaagtcacggatccaaacttctctgacctctgcttccctgggtagtgccgatgagaactccgtggctcaagcagatgactccctcaaaaatttacatctggagctgaccgagacttgtttggatatgatggctcgctacgtgttttccaactttacggcagtcccaaaaaggagcccggtgggtgagttcctgcttgccggtggaaggaccaaaacatggctggttgggaacaagctcgtgactgtcacaacctccgttggcactggcacgcgcagtctgttaggcctcgactctggcgaactacagagtggccccgagtcctctagctccccaggggttcatgtgcgacaaaccaaagaagcccccgccaagctggagtcacaggcagggcagcaagtgtcgcgcggcgctagggacagagttcggtccatgtctgggggccatggcctccgcgtgggcgcgcttgatgtccccgcctctcaatttcttggctccgccaccagccccggaccccggacggcgccggctgcaaaacccgagaaagcgtccgccgggactcgcgtacccgtgcaggaaaagaccaatctggcagcctatgtgccactgctcacacaaggctgggccgagatcctagttcggagaccgacgggtaacacatcatggctcatgtcactggaaaatcctttatcgcctttcagcagtgacattaacaatatgccactgcaggagctttctaatgctttgatggctgccgaacggttcaaggagcatagggacaccgcgctctataagtccctgtctgtaccagcagcttcaaccgccaagcctcctcctcttccacgttcaaatactgatagcgcggtcgttatggaagaggggtccccgggcgaggtgcccgtgctggtggagccgccaggacttgaggacgtggaagccgccttgggtatggataggcgtaccgatgcctattcccgcagttcaagcgtgtccagccaagaagagaaaagcctgcatgcagaagagctcgttggccggggaattcccattgagcgggtcgtgagttctgaggggggacgtccttccgtagatctctccttccaaccaagccagccattatctaagagcagtagcagcccagaactccagactttgcaggatattctgggggacccaggcgacaaggcagatgtagggcggcttagtcctgaagtcaaagccaggtcacagagtggtacactcgacggcgaatcagccgcgtggagcgcaagcggcgaggactccaggggtcagccagaaggtcccttgccgagctctagtcctcgcagtccaagtggcttgcgaccccggggctatactatttccgatagcgcacccagcagaagaggcaaacgagtggaaagggacgctcttaaatcgcgtgcaaccgcttccaatgctgagaaagttcccggtatcaacccaagcttcgtgtttctacagctataccacagtcccttcttcggcgacgaatctaacaaaccaattctgctgcctaatgagtcacagtcatttgagcgaagcgtccagctccttgatcagatcccgagctacgatacccacaagatcgcggtgctgtacgtgggagaaggccagtccaattccgagctggcaatcctcagtaatgagcatggatcgtatcgatatacagagtttctgacggggcttggtcgcctgattgagctcaaagattgtcagccagacaaagtctatctggggggacttgacgtttgtggcgaggacggtcagttcacttactgctggcatgacgatatcatgcaggccgttttccatattgccaccttaatgccaactaaagatgtcgacaagcaccgctgtgataagaagcggcatttaggcaacgacttcgtctcaattgtttataacgatagcggggaggactttaaattagggaccattaagggccagtttaatttcgtgcacgttatagttaccccactggattacgagtgtaacctggtctcccttcagtgccgtaaagacatggagggactggtcgatacaagcgtggccaagatagtgtccgatcggaatcttcctttcgtggcacggcagatggccctgcacgctaacatggcttcccaagtccatcattcgcgcagtaaccctacagacatctacccatccaaatggatagcccgattgaggcatatcaagaggcttaggcagcgtatctgtgaggaggctgcttattctaatccttccctgcctcttgttcacccgcccagccactcaaaagctcccgctcagaccccagcagagccgaccccagggtacgaagtgggacagagaaagcgcctcatcagcagcgtggaggactttaccgaattcgtgtag

SEQ ID NO: 273753 - DNA, 5226 bp, Artificial Sequence
  derived and/or modified sequence
atggccaagcccaccagcaaggacagcggcctgaaggagaagttcaaaatcttgctgggcctgggcactccgaggccaaatcctaggtccgctgaaggcaagcagactgagttcattatcaccgcggaaattttaagggaactcagcatggaatgtgggctgaataataggatcagaatgattggtcagatctgcgaagtggcaaaaaccaagaagtttgaggaacatgctgtagaggctctttggaaagcggtggcagatctcttgcaacctgaaagacccttggaagcccggcatgccgtgctggccctactgaaagccattgtccaaggccagggcgaacgacttggtgtcttacgtgctttattctttaaagttattaaagactatccttctaacgaggatctgcacgagcgcctcgaggtatttaaagccttaaccgataatggacgccacatcacttatctcgaggaggaactggctgactttgtcctgcagtggatggatgtcgggctttcaagcgagttcctcctcgtgcttgtcaacttagtaaagtttaacagttgttaccttgacgaatatatcgccagaatggtgcagatgatatgtctgctgtgcgtgcggaccgcttccagtgtggatattgaagtgagcttacaagtgttggacgctgtcgtatgctacaactgcctcccagctgagtccctgcctctcttcattgttaccctgtgtaggaccatcaatgttaaggagttgtgcgagccttgttggaaattgatgagaaatctgttgggaacccatttaggccattccgccatctacaatatgtgtcacttaatggaggatcgggcttatatggaagatgctccactgttgcgaggcgccgtgttctttgtggggatggccttgtggggggctcatcggctctattccttgagaaattcccctactagtgttctaccatctttttatcaagctatggcgtgtccaaacgaagtggtgtcctacgagattgtcctctctattacccgtctgataaagaaataccggaaggaactccaggttgtagcatgggatatcctgctgaacattatcgaaaggctgctgcagcaactgcagactctggactccccggaactacgcaccatagtgcacgatcttctcaccacagtggaggaactgtgtgatcagaatgagttccatggcagtcaggaaagatactttgaactcgtagagcgctgtgctgaccaaagaccggagtctagcctactgaatctgatctcatatcgagctcagagtatccacccggctaaggacggctggatccaaaacttgcaggccctgatggaaaggtttttcaggagtgaatcccgtggggccgtccgcatcaaggtgctcgacgtgctttcgttcgtgctcttgataaaccggcagttttatgaagaggaactgatcaatagcgtggtgatcagccagctatctcacatacctgaggataaggatcaccaagtccgtaaactcgccactcagttgctggtggatctcgcagagggttgccacactcaccacttcaattcactgctggacattatcgaaaaggttatggctaggtcattatccccaccgcccgagctggaggaacgggacgtggctgcttatagcgcaagcttagaggacgtgaagacagcggtcttgggattgcttgtgatactgcagacgaagctttacacgttgcctgcctcccacgccacacgagtgtatgaaatgctggtcagccacatacagctgcattacaaacacagttatacccttcctatagccagctctatacggctgcaagcttttgactttctgctgctgcttagggccgattccctgcacagactggggctgcctaataaggatggtgtggttaggtttagtccgtattgtgtctgcgactacatggaacccgaacgaggtagcgagaaaaagactagtggtccactcagcccacccaccgggccccccggaccggccccagctggtccagcagtcagactgggctccgtgccttactctctactttttcgagtcctgctgcagtgcctgaagcaggagagtgattggaaggtgctgaagctggtgttgggaagactgccagagagcttaaggtacaaggtgttgatctttacatctccctgcagcgtggaccagctttgcagcgcactgtgttcaatgctctccggacccaagacgcttgagagactgaggggagcgccggagggtttctcccgaaccgatctgcacctcgcagtggttcctgttttaaccgcgctgatttcataccacaattatctggataaaacgaaacaaagggagatggtctactgtctcgaacagggcctgattcaccgctgcgccagtcagtgcgtggtcgctctctccatttgcagcgtcgagatgcctgacattattatcaaggctctgcccgtgttggttgtcaagctgacccacatctctgctaccgcatccatggcagtccccttactagagttcctgagcactcttgcgcgtctgccgcacctgtatcggaactttgcagccgaacagtacgcctccgttttcgctatctctctcccctacacgaacccctccaagtttaaccaatatatcgtgtgcttagctcaccatgtaatcgcgatgtggttcatccgttgccggctcccttttagaaaggattttgtgcccttcatcaccaagggcctccggagtaatgtgttacttagcttcgacgacacccccgagaaagacagcttcagagcacgctctacctccctcaatgaacgccccaagtctcgtatccagacctctctgacctccgccagtcttggatctgcggatgaaaattccgttgctcaggcagacgacagcttgaaaaacctgcatctcgaactgacagagacttgcctggatatgatggctcggtatgtgttttccaacttcaccgctgtgcctaaaaggtcaccagtgggtgagtttttgctggccggcggccggacaaaaacatggttggtgggcaataaattggtgacggttacaacatctgtcggaactggaacacggagtttgcttggtctggactcaggggagctgcagtctggccccgaaagctcctcttctcctggtgtgcacgtacgacaaactaaggaggctcccgccaagcttgagtctcaggcaggacagcaggtgtccagaggcgctcgtgaccgggtgagatctatgtccgggggccatggcctgagggtcggcgcactggatgtacccgcatcacagttcctcgggtcggcaacgtctccaggccccaggaccgctccagctgccaaaccagagaaggctagcgcaggcaccagagtcccggtgcaagaaaaaaccaatctggccgcatacgtccctttgttaacccaaggatgggccgaaattttagtacgacgcccgactggtaacacatcctggttgatgtcactggagaaccctctctctccattctcctctgacatcaataatatgcctctgcaggaactgtccaatgccctaatggctgcggaaaggttcaaagagcatcgcgatacagcactgtataaaagcctgtccgtacctgccgcctcaaccgcaaaacccccccccttgccacggtccaacactgactcagctgtggtgatggaggaggggagcccgggggaggtccccgtccttgtagaacctcctggcctcgaggacgtcgaggccgcactgggtatggatcgcagaaccgacgcatactccaggtctagtagcgtctcttcccaggaggagaaaagtttgcatgctgaggagctcgtcgggagaggcattccgattgagcgggtagtctccagtgagggggggcgccccagcgttgacctgtctttccagcccagtcaacccttatcaaaaagcagctcgagtcctgagctgcagactctccaggacatactcggggaccccggtgataaggccgatgtcggccgtctctctcccgaagttaaggctagatcccagtccggtactctcgacggcgaatcagccgcctggagcgctagtggcgaggactcccgcggacagccagagggaccccttccctctagcagtccgcgaagccctagcgggttacgcccccggggatatacaatctctgattcagcccctagcaggcggggcaagagggtggagcgtgacgctctgaaaagtagagctactgccagcaatgccgaaaaagttcctggcatcaacccctcttttgtgtttctgcaactgtatcacagccccttcttcggggacgagtccaataagcccatcctcctgcctaacgaaagccagagtttcgaacggagtgttcagttacttgatcaaatcccttcttatgacacgcacaaaatcgccgtcctctacgtgggagagggtcagtcaaactccgagctcgccatcctttccaacgagcatggctcataccgatacaccgaattcctgaccggtctgggcaggttaatagagcttaaagactgtcagccagacaaagtgtatctgggaggcctggatgtctgcggcgaggatgggcagttcacatattgttggcatgacgacataatgcaggccgtattccacatcgccacgctcatgcccaccaaggatgtagataagcatcggtgtgacaagaagaggcacctaggcaatgactttgttagcatcgtttataatgacagtggtgaagactttaagctgggcaccattaaagggcagtttaactttgtgcacgtcatcgtcactcccttagactatgaatgcaatctggtttcacttcagtgtagaaaagacatggaggggcttgtggatacgtccgtcgcgaagatagtgtcagatcgaaatctgcctttcgttgcccgacagatggccctccatgctaacatggcctcacaggttcaccactccaggtctaatccaaccgatatctacccaagcaaatggatagcacgcctgcgacatattaagcgtttacgacagcggatctgcgaggaggccgcttattctaatccaagccttcctctcgtgcatccaccttctcactcgaaagcccctgctcagacccctgctgaacccactcccggatacgaggttgggcagcggaagcgattaatttctagcgttgaagattttacggagtttgtctag

SEQ ID NO: 273754 - DNA, 5079 bp, Artificial Sequence
  derived and/or modified sequence
atggagtgtggtctgaataaccggattagaatgattggccagatttgtgaagttgccaaaactaaaaaattcgaagagcatgccgtggaagcactgtggaaggctgttgccgacctcctccagccagagcggccattggaagccagacacgctgtgctagctctgctcaaagccattgtacaaggacaaggagagcggttgggtgtccttcgggctttgttcttcaaagttattaaagactatccaagcaacgaagacctccacgagcgcctggaggtgttcaaagctctcacagacaacgggaggcacataacatatttggaagaggaacttgctgactttgtgcttcagtggatggatgtggggctgtcgtcagagtttctcctggttcttgtgaatttagtgaagtttaacagctgttaccttgacgagtacatcgccaggatggtgcagatgatctgtctgctgtgtgtgcgcactgcaagttccgttgatattgaagtctcactacaagtcctggacgcagtcgtgtgctacaactgccttcccgctgagtcgctgccactttttatcgtcacattatgtcgaaccataaatgttaaggagctgtgcgagccgtgctggaagttgatgcgaaacctcctcggtactcatcttggacatagcgccatctacaatatgtgccatttgatggaagacagggcctacatggaagacgctcccctcctgagaggcgctgttttctttgtgggtatggctctgtggggagcccatcgcctctacagtctcagaaattcccccacgagcgtgctcccctcattttaccaggccatggcttgcccaaatgaggtggtatcatatgagatcgtactctccattaccagattaataaagaagtaccggaaggagctccaagtcgtcgcctgggacatcctgctgaatatcattgaacgcttgttacaacagttgcaaactttggattcacctgagctgagaaccatagtacacgatttgttaactaccgtggaagaactttgcgaccaaaacgagtttcatggttcgcaggagagatatttcgaactggtagagcgatgtgccgaccaaagacccgaatcctctctcttgaacttgatttcctacagagctcaaagcattcacccagctaaagacgggtggatccaaaatctgcaggcgcttatggaacgtttctttaggtccgaaagcaggggcgctgttaggattaaggtgttggacgtcttaagctttgttctgctgattaaccggcaattttacgaggaagagttaattaatagcgtggtcatatcacagctttctcacattccagaagataaagatcaccaggtcagaaagctggctacccagctgcttgttgacctcgccgaaggatgccacactcatcattttaacagcttgctggatatcatcgagaaggtcatggcacggagcctaagcccacctcctgaactggaagaaagggatgtggccgcttactcagcatcgctggaggacgtcaaaaccgcagtactggggctcctggtcatcctccagaccaaactttatacactgcccgcatcgcacgccacacgggtgtacgagatgctggtttcccacattcaacttcactataaacactcgtacacactgccaatcgcaagttccattcgtctacaggccttcgattttctgctgctgctgcgcgctgactcacttcaccgtctgggtttacctaacaaagatggcgttgtaaggttcagcccctactgcgtgtgtgattacatggaacccgagcggggatctgagaagaaaacatctgggccattatcgccacccacgggcccaccgggaccagcacctgctggcccagctgttcggctgggttccgtgccatatagcctgttgtttagagtactattgcagtgcctgaagcaggagagcgattggaaggtgctcaagctggtcctaggtaggctgccggagtctttgagatacaaagttttgattttcaccagcccatgctctgtcgaccagctatgttcggccttgtgtagcatgctttccggccctaagacactggaaaggcttcggggagctcctgagggtttctctcggaccgaccttcacctcgcggttgtcccagtcctgaccgccttaattagctaccataattacctggataaaaccaaacaaagggagatggtttactgcctggagcagggcctgatccatcggtgcgcgtctcaatgtgtggtcgccctttccatctgtagcgtggagatgccagacattattatcaaggcgctaccagtgcttgttgtgaagctaacccacatcagtgccacggctagtatggcagtccccctgctagagttcctctcaacactggcccgtctaccacacttgtaccggaactttgccgcagagcagtatgcttctgtctttgccatctctctcccatacactaatccatccaagttcaaccagtacatagtgtgtttagcgcatcatgttattgctatgtggtttatacggtgcaggttgccattccgcaaagactttgttcccttcatcaccaaaggattgaggagcaacgttctgttgtccttcgacgatacaccggagaaggattcctttcgggctagatcgaccagcttgaatgaacgacctaaaagccggatccagaccagtcttacctccgcttcactcgggtccgctgatgagaacagtgtagcccaggccgacgactccttaaaaaacttacaccttgagctgactgagacatgcctagatatgatggccaggtatgtcttcagcaacttcacggccgtccctaagagaagtcctgtcggagagttcctgctggcaggcggaaggacgaaaacttggttggtgggcaacaaattagtgactgtcaccaccagcgtgggtactggcacgcggtcactccttggtttggattctggtgagttacagagtgggccagaatcatcgtcttccccaggcgtgcacgtgagacaaacaaaggaagcgccagccaaactggaaagtcaggctggccagcaagtgagcaggggcgcacgggatcgcgtgcggtccatgtctggcggacacgggctgcgcgtgggagctttagatgtgccagccagccagttcctgggctcagccacctctccgggacccaggactgcacccgctgccaagcccgaaaaagcaagtgcagggacgagagtgcccgtgcaggaaaagaccaacctggccgcttatgtcccactgctgactcagggctgggcggaaatcctcgtacgcaggcctacaggcaatacctcttggttgatgtctctcgaaaacccactaagcccctttagcagcgatatcaacaatatgccgctccaggaactgtcaaatgctctgatggctgccgaacggtttaaagagcatcgcgacacagcactgtataaaagcctgagcgtgccggcagccagtacggctaagcccccacccttacctcggtccaacacagactccgccgtggtgatggaggagggcagtcccggtgaagtgccagtcttggtcgagcccccaggtctagaggacgtagaagctgcactaggcatggatcgaaggacagatgcatacagtcggtcatcatccgtatcgtctcaggaagaaaagtcgttgcatgccgaggaactggttggccgaggaatccccattgaaagggtggtgtcttcagaggggggtcgcccaagcgtcgacctgagcttccagccttcccagcccttgagcaagtcttcctcatcgcccgaacttcaaaccctccaagatatcctgggcgaccccggtgataaggccgatgtagggaggctgagtccggaagtgaaagccaggagccagtctggcactctggatggagagagtgctgcctggtccgcgagtggagaggactctagaggacaacctgaggggccactgccaagctccagtccaaggtcaccatccggactgcgccctagaggctatactatttcggacagtgctcctagccgaagaggaaaacgggttgaaagggatgcactgaagtctcgcgcaaccgcgtccaatgctgaaaaagtgcccggtatcaacccctccttcgttttcctgcagctgtaccacagccctttctttggggacgaaagcaacaaacccatccttctgccaaatgaatcccaatcattcgagcggtcagttcaattgctcgaccagatcccaagttatgacacccataagatcgctgtgctttatgttggggagggacagtctaactccgagctggccatcttgtccaacgaacatggatcctacagatatacagagtttctcactggtctgggccgattaatagagctgaaggactgtcagccggataaggtgtaccttggtggactggacgtgtgtggggaagatggtcagttcacctattgctggcacgacgacataatgcaggctgtattccatattgccaccctgatgcctacaaaggatgtagacaagcaccgctgcgacaaaaaacgccatctggggaatgactttgtgtccattgtctacaatgactcaggcgaggatttcaagctgggaactatcaaggggcagttcaattttgtgcacgtgattgttacccccctggattacgaatgcaaccttgtgtcacttcagtgccgcaaggatatggaaggtttagtggacacgagcgtagccaagattgtgtccgataggaaccttccctttgtcgcgcgacaaatggccttgcacgctaacatggcgtctcaggtgcatcactctaggtcgaaccctaccgacatttacccctccaagtggattgccaggctgagacatatcaagagattacggcagcgaatttgcgaggaggctgcgtattccaatccttcgctgcccttggtccatcccccttctcattccaaggccccagcacagacacccgctgaacccacccccggatacgaggtgggtcagcgaaagaggctgatctcttctgtggaagatttcaccgagttcgtctag

SEQ ID NO: 273755 - DNA, 5225 bp, Artificial Sequence
  derived and/or modified sequence
atggcaaaacccaccagtaaagacagtgggctcaaggagaagtttaagatactgctcggcttaggtactccaaggcctaaccctcgctccgcagagggaaagcagacggaatttatcattacagcagaaatccttagagagcttagtatggagtgcggccttaataaccgcatacgcatgataggacagatctgtgaagtcgccaagacaaaaaagtttgaggagcatgcagtcgaggctttgtggaaggcagtggccgatctgctccagccagaaagaccacttgaggctcgccatgccgtgttagctctgctgaaggccattgttcaaggtcaaggcgaacgcctgggggtgctgagagccctcttttttaaagtcatcaaggactacccctctaatgaggacctgcacgagagattggaggtgtttaaagcattgaccgataacggcagacacataacttatctggaggaggagctagctgatttcgtacttcaatggatggacgtcggcctttcatccgagttccttctagtcctcgttaaccttgtgaagttcaactcgtgttatctcgatgaatatattgcacggatggtccaaatgatctgcctgctttgcgttagaactgccagctcagtagatatcgaggtgagtctacaggtactggacgccgtggtgtgctacaactgtctgcctgcagagtcactgcccttgttcattgtcactctgtgtagaaccattaatgtcaaggagctgtgtgagccatgctggaagcttatgcgtaatctgttgggcacacatcttggacactctgctatttacaatatgtgccatctgatggaggacagagcctacatggaggacgccccactgctgcgcggtgccgtattcttcgttgggatggccctctggggcgctcataggttgtattccctacgcaatagtccaactagtgtcctgcctagtttctatcaagctatggcctgccctaacgaagtcgtaagttacgagatcgtgcttagtataactaggcttataaagaaataccgaaaggagctccaggtcgtggcctgggacatactgcttaatattatcgaacgactcctacagcagctgcaaaccttggatagtcccgagttgcgcaccatcgtacacgacctgctgaccacagtcgaagagctgtgtgatcagaacgaatttcacggcagtcaggaaaggtacttcgaactcgtggaaaggtgtgctgatcagcgacccgagtcatcgctcctgaaccttatcagctacagggcccagagcatccacccggcaaaggacggttggatccaaaatctccaagcactgatggagcgatttttcagaagcgagtcaagaggcgcagtgaggatcaaggtgttagatgtcttgtccttcgtgctcttgatcaatcgacaattttacgaagaggaactgattaactccgtagtgatcagccaactgagtcatattccagaagacaaagaccaccaagtgcgtaagttagctacacaactcctcgtggatctggcagaaggctgtcatacacaccacttcaacagcctccttgatatcattgagaaggtgatggccagaagccttagtccccctccagagttggaggaaagagacgttgccgcttattccgcctcgctggaggatgtgaagaccgccgttctgggtctgctggtgatcctgcagacaaagctgtatacactccccgctagccatgccacacgagtttacgagatgcttgtatctcatatacagctccactataaacatagttatacattgccaatagcatccagtatccgactgcaggcatttgacttcctgctcttgctcagggcagattccctgcataggctcggcttgccaaataaagacggcgtcgtgcgattttctccttactgcgtatgtgattatatggaacccgaaagaggatctgaaaagaagaccagcggacctttatccccgccaaccggtccccctggtcccgcacctgccggaccagctgttcggctgggatctgttccctactcactgctatttagagtgctcttacagtgtctaaaacaggagagcgactggaaagtgctcaagctcgtgctgggacgcctgcccgaaagtctgcgctataaagttctcatttttacttccccgtgcagcgtggatcaattgtgtagtgccctgtgtagcatgctttcaggcccaaagacgctggaaagactgaggggagccccagaagggttctcacggacggatcttcacttggccgtggttcctgtgctgacggccctaatctcttaccataactatctcgataaaacaaaacaacgcgagatggtgtactgtcttgaacagggacttatccacagatgcgcttcgcagtgtgtcgtggcgctatctatctgcagcgtggaaatgcctgatattattatcaaagcactaccagtgctcgttgtcaagcttactcacatctctgcaacagcctccatggccgtgccactgctagagttcctaagcaccctggcacggctgccccacctgtataggaacttcgccgcagaacaatatgcatccgtttttgcaatctctttaccttacactaacccatcgaaatttaaccagtacattgtatgtttggctcatcatgtgatcgcaatgtggttcatacgctgccgcctgccttttcgcaaagactttgtcccctttatcaccaaaggccttcggtcaaacgttctgctctccttcgacgatactccagagaaagactcttttagggcccgttcaaccagcctgaacgagcgaccgaagtcccggatccagacgagtctcacctctgcatctctggggtccgcagacgaaaatagtgtcgcgcaagcagacgattcactgaagaacctgcaccttgaacttacagaaacctgtctggacatgatggcaagatacgtattcagcaattttacggccgtccctaaacggtcaccagtgggggagttcctcctggcgggaggtcgcaccaagacctggcttgttgggaataagctcgtgaccgtgaccacttccgtgggaacaggaacaaggtcactgctgggattggattccggggagctccagtcaggacctgaatctagctcatcacctggcgtgcacgttcgacagactaaggaggctcccgcaaagctggaatcccaggccggtcaacaggtctctcgtggagcaagggacagggtgagatctatgtccggagggcatgggctgagagtgggggctctggacgtccccgctagccaatttcttgggtctgctacatcccctggcccaaggaccgcacccgcagcaaaacccgaaaaagcctctgccggaaccagggtgcccgtgcaggaaaaaactaatcttgccgcatacgtgccactgctcactcagggctgggccgaaatacttgtgcggcgacctacaggtaataccagttggttgatgagtctcgagaatccgctatctccattcagcagtgatattaacaacatgcccctccaggagctgtccaatgcactaatggccgctgagaggttcaaagagcacagggataccgcgctgtacaagtcactctccgtgccagccgcttcaaccgcaaagcctccgcctcttcctagaagtaacactgatagcgccgtagtgatggaggagggcagtcctggggaggtgccagttctggttgaaccgcctggcctggaagacgttgaggccgctcttggcatggacagacggaccgacgcttactctagaagttcctcagtgtcgtcgcaggaggagaagagtctgcatgcagaggagctcgtcgggaggggcatcccaatcgaacgggtcgtttcgtcggagggaggcagaccgagcgtagacctctcgtttcagccatctcagcctctttcaaagtcttctagcagtcctgagctgcagacactccaggatattttaggagatcccggtgacaaggccgatgtgggcagacttagccctgaagtgaaagcacgcagccagagcggcactctagatggagagtcggccgcttggagcgccagcggcgaggactccagagggcaaccagaggggccactccccagctcaagtccccgttccccctcagggctgaggccacgtggatacacaatcagtgatagcgccccttcacgacgcggaaaacgcgtcgagagagacgcgttgaagagcagagcgactgccagcaacgcagagaaagtcccaggaattaacccatcctttgtcttcctgcagctgtaccattcaccctttttcggtgacgaatctaacaagcccatccttctaccgaatgaaagccagtctttcgagaggtctgtacagctgctggatcagatcccctcctatgatacacacaaaatcgccgtactctatgtgggtgaagggcagagtaacagcgaactggctattcttagtaatgagcacggaagctaccgctataccgagtttctgacaggcctgggacgactcatagagctgaaagactgtcaaccagacaaggtttacctcggcggactcgacgtgtgtggggaagacggccagtttacctattgctggcacgacgacatcatgcaggccgtctttcacattgcaacgttaatgcctaccaaggatgttgataagcaccgctgcgataagaagcggcacctaggtaatgacttcgtatccatcgtgtacaacgatagtggagaggacttcaagcttggtactataaaaggccagttcaattttgttcacgtgatcgtgacaccactggactatgagtgtaatctggtgtcactgcaatgtcgaaaagatatggaaggactggttgacactagcgtagctaagatcgtgtccgacaggaatctgccctttgtagccagacagatggctctccacgcaaacatggcttcccaggtgcaccatagcagaagcaaccccaccgacatatacccaagtaaatggatcgctaggctccggcacattaagagactgcgacaaaggatatgcgaggaggcggcttacagtaacccttcgctacctctggtgcaccccccatcccactctaaggcccctgcacagacccctgccgaacctactcccggttatgaagtggggcagcgcaagagactgatctccagtgtggaggattttaccgaatttgttta

SEQ ID NO: 273756 - DNA, 5236 bp, Artificial Sequence
  derived and/or modified sequence
aggggggtgcgcctttctccgcgtcggggcggcccggagcgcggtggcgcggcgcggggaactgagcatggaatgtggcctcaacaatcgcatccggatgatagggcagatttgtgaagtcgcaaaaaccaagaaatttgaagagcacgcagtggaagcactctggaaggcggtcgcggatctgttgcagccggagcggccgctggaggcccggcacgcggtgctggctctgctgaaggccatcgtgcaggggcagggcgagcgtttgggggtcctcagagccctcttctttaaggtcatcaaggattacccttccaacgaagaccttcacgaaaggctggaggttttcaaggccctcacagacaatgggagacacatcacctacttggaggaagagctggctgactttgtcctgcagtggatggatgttggcttgtcctcggaattccttctggtgctggtgaacttggtcaaattcaatagctgttacctcgacgagtacatcgcaaggatggttcagatgatctgtctgctgtgcgtccggaccgcgtcctctgtggacatagaggtctccctgcaggtgctggacgccgtggtctgctacaactgcctgccggctgagagcctcccgctgttcatcgttaccctctgtcgcaccatcaacgtcaaggagctctgcgagccttgctggaagctgatgcggaacctccttggcacccacctgggccacagcgccatctacaacatgtgccacctcatggaggacagagcctacatggaggacgcgcccctgctgagaggagccgtgttttttgtgggcatggctctctggggagcccaccggctctattctctcaggaactcgccgacatctgtgttgccatcattttaccaggccatggcatgtccgaacgaggtggtgtcctatgagatcgtcctgtccatcaccaggctcatcaagaagtataggaaggagctccaggtggtggcgtgggacattctgctgaacatcatcgaacggctccttcagcagctccagaccttggacagcccggagctcaggaccatcgtccatgacctgttgaccacggtggaggagctgtgtgaccagaacgagttccacgggtctcaggagagatactttgaactggtggagagatgtgcggaccagaggcctgagtcctccctcctgaacctgatctcctatagagcgcagtccatccacccggccaaggacggctggattcagaacctgcaggcgctgatggagagattcttcaggagcgagtcccgaggcgccgtgcgcatcaaggtgctggacgtgctgtcctttgtgctgctcatcaacaggcagttctatgaggaggagctgattaactcagtggtcatctcgcagctctcccacatccccgaggataaagaccaccaggtccgaaagctggccacccagttgctggtggacctggcagagggctgccacacacaccacttcaacagcctgctggacatcatcgagaaggtgatggcccgctccctctccccacccccggagctggaagaaagggatgtggccgcatactcggcctccttggaggatgtgaagacagccgtcctggggcttctggtcatccttcagaccaagctgtacaccctgcctgcaagccacgccacgcgtgtgtatgagatgctggtcagccacattcagctccactacaagcacagctacaccctgccaatcgcgagcagcatccggctgcaggcctttgacttcctgttgctgctgcgggccgactcactgcaccgcctgggcctgcccaacaaggatggagtcgtgcggttcagcccctactgcgtctgcgactacatggagccagagagaggctctgagaagaagaccagcggccccctttctcctcccacagggcctcctggcccggcgcctgcaggccccgccgtgcggctggggtccgtgccctactccctgctcttccgcgtcctgctgcagtgcttgaagcaggagtctgactggaaggtgctgaagctggttctgggcaggctgcctgagtccctgcgctataaagtgctcatctttacttccccttgcagtgtggaccagctgtgctctgctctctgctccatgctttcaggcccaaagacactggagcggctccgaggcgccccagaaggcttctccagaactgacttgcacctggccgtggttccagtgctgacagcattaatctcttaccataactacctggacaaaaccaaacagcgcgagatggtctactgcctggagcagggcctcatccaccgctgtgccagccagtgcgtcgtggccttgtccatctgcagcgtggagatgcctgacatcatcatcaaggcgctgcctgttctggtggtgaagctcacgcacatctcagccacagccagcatggccgtcccactgctggagttcctgtccactctggccaggctgccgcacctctacaggaactttgccgcggagcagtatgccagtgtgttcgccatctccctgccgtacaccaacccctccaagtttaatcagtacatcgtgtgtctggcccatcacgtcatagccatgtggttcatcaggtgccgcctgcccttccggaaggattttgtccctttcatcactaagggcctgcggtccaatgtcctcttgtcttttgatgacacccccgagaaggacagcttcagggcccggagtactagtctcaacgagagacccaagagcaggatacagacgtccctcaccagtgccagcttggggtctgcagatgagaactccgtggcccaggctgacgatagcctgaaaaacctccacctggagctcacggaaacctgtctggacatgatggctcgatacgtcttctccaacttcacggctgtcccgaagaggtctcctgtgggcgagttcctcctagcgggtggcaggaccaaaacctggctggttgggaacaagcttgtcactgtgacgacaagcgtgggaaccgggacccggtcgttactaggcctggactcgggggagctgcagtccggcccggagtcgagctccagccccggggtgcatgtgagacagaccaaggaggcgccggccaagctggagtcccaggctgggcagcaggtgtcccgtggggcccgggatcgggtccgttccatgtcggggggccatggtcttcgagttggcgccctggacgtgccggcctcccagttcctgggcagtgccacttctccaggaccacggactgcaccagccgcgaaacctgagaaggcctcagctggcacccgggttcctgtgcaggagaagacgaacctggcggcctatgtgcccctgctgacccagggctgggcggagatcctggtccggaggcccacagggaacaccagctggctgatgagcctggagaacccgctcagccctttctcctcggacatcaacaacatgcccctgcaggagctgtctaacgccctcatggcggctgagcgcttcaaggagcaccgggacacagccctgtacaagtcactgtcggtgccggcagccagcacggccaaaccccctcctctgcctcgctccaacacagactccgccgtggtcatggaggagggaagtccgggcgaggttcctgtgctggtggagcccccagggttggaggacgttgaggcagcgctaggcatggacaggcgcacggatgcctacagcaggtcgtcctcagtctccagccaggaggagaagtcgctccacgcggaggagctggttggcaggggcatccccatcgagcgagtcgtctcctcggagggtggccggccctctgtggacctctccttccagccctcgcagcccctgagcaagtccagctcctctcccgagctgcagactctgcaggacatcctcggggaccctggggacaaggccgacgtgggccggctgagccctgaggttaaggcccggtcacagtcagggaccctggacggggaaagtgctgcctggtcggcctcgggcgaagacagtcggggccagcccgagggtcccttgccttccagctccccccgctcgcccagtggcctccggccccgaggttacaccatctccgactcggccccatcacgcaggggcaagagagtagagagggacgccttaaagagcagagccacagcctccaatgcagagaaagtgccaggcatcaaccccagtttcgtgttcctgcagctctaccattcccccttctttggcgacgagtcaaacaagccaatcctgctgcccaatgagtcacagtcctttgagcggtcggtgcagctcctcgaccagatcccatcatacgacacccacaagatcgccgtcctgtatgttggagaaggccagagcaacagcgagctcgccatcctgtccaatgagcatggctcctacaggtacacggagttcctgacgggcctgggccggctcatcgagctgaaggactgccagccggacaaggtgtacctgggaggcctggacgtgtgtggtgaggacggccagttcacctactgctggcacgatgacatcatgcaagccgtcttccacatcgccaccctgatgcccaccaaggacgtggacaagcaccgctgcgacaagaagcgccacctgggcaacgactttgtgtccattgtctacaatgactccggtgaggacttcaagcttggcaccatcaagggccagttcaactttgtccacgtgatcgtcaccccgctggactacgagtgcaacctggtgtccctgcagtgcaggaaagacatggagggccttgtggacaccagcgtggccaagatcgtgtctgaccgcaacctgcccttcgtggcccgccagatggccctgcacgcaaatatggcctcacaggtgcatcatagccgctccaaccccaccgatatctacccctccaagtggattgcccggctccgccacatcaagcggctccgccagcggatctgcgaggaagccgcctactccaaccccagcctacctctggtgcaccctccgtcccatagcaaagcccctgcacagactccagccgagcccacacctggctatgaggtgggccagcggaagcgcctcatctcctcggtggaggacttcaccgagtttgtgtgaggccggggccctccctcctgcactggccttggacggtattgcctgtcagtgaaataaataaagtcctgaccccagtgcacagacatagag

SEQ ID NO: 273757 - DNA, 5424 bp, Artificial Sequence
  derived and/or modified sequence
ccggcggcgtcccggggccaggggggtgcgcctttctccgcgtcggggcggcccggagcgcggtggcgcggcgcgggaggggttttctggtgcgtcctggtccaccatggccaaaccaacaagcaaagattcaggcttgaaggagaagtttaagattctgttgggactgggaacaccgaggccaaatcccaggtctgcagagggtaaacagacggagtttatcatcaccgcggaaatactgagagaactgagcatggaatgtggcctcaacaatcgcatccggatgatagggcagatttgtgaagtcgcaaaaaccaagaaatttgaagagcacgcagtggaagcactctggaaggcggtcgcggatctgttgcagccggagcggccgctggaggcccggcacgcggtgctggctctgctgaaggccatcgtgcaggggcagggcgagcgtttgggggtcctcagagccctcttctttaaggtcatcaaggattacccttccaacgaagaccttcacgaaaggctggaggttttcaaggccctcacagacaatgggagacacatcacctacttggaggaagagctggctgactttgtcctgcagtggatggatgttggcttgtcctcggaattccttctggtgctggtgaacttggtcaaattcaatagctgttacctcgacgagtacatcgcaaggatggttcagatgatctgtctgctgtgcgtccggaccgcgtcctctgtggacatagaggtctccctgcaggtgctggacgccgtggtctgctacaactgcctgccggctgagagcctcccgctgttcatcgttaccctctgtcgcaccatcaacgtcaaggagctctgcgagccttgctggaagctgatgcggaacctccttggcacccacctgggccacagcgccatctacaacatgtgccacctcatggaggacagagcctacatggaggacgcgcccctgctgagaggagccgtgttttttgtgggcatggctctctggggagcccaccggctctattctctcaggaactcgccgacatctgtgttgccatcattttaccaggccatggcatgtccgaacgaggtggtgtcctatgagatcgtcctgtccatcaccaggctcatcaagaagtataggaaggagctccaggtggtggcgtgggacattctgctgaacatcatcgaacggctccttcagcagctccagaccttggacagcccggagctcaggaccatcgtccatgacctgttgaccacggtggaggagctgtgtgaccagaacgagttccacgggtctcaggagagatactttgaactggtggagagatgtgcggaccagaggcctgagtcctccctcctgaacctgatctcctatagagcgcagtccatccacccggccaaggacggctggattcagaacctgcaggcgctgatggagagattcttcaggagcgagtcccgaggcgccgtgcgcatcaaggtgctggacgtgctgtcctttgtgctgctcatcaacaggcagttctatgaggaggagctgattaactcagtggtcatctcgcagctctcccacatccccgaggataaagaccaccaggtccgaaagctggccacccagttgctggtggacctggcagagggctgccacacacaccacttcaacagcctgctggacatcatcgagaaggtgatggcccgctccctctccccacccccggagctggaagaaagggatgtggccgcatactcggcctccttggaggatgtgaagacagccgtcctggggcttctggtcatccttcagaccaagctgtacaccctgcctgcaagccacgccacgcgtgtgtatgagatgctggtcagccacattcagctccactacaagcacagctacaccctgccaatcgcgagcagcatccggctgcaggcctttgacttcctgttgctgctgcgggccgactcactgcaccgcctgggcctgcccaacaaggatggagtcgtgcggttcagcccctactgcgtctgcgactacatggagccagagagaggctctgagaagaagaccagcggccccctttctcctcccacagggcctcctggcccggcgcctgcaggccccgccgtgcggctggggtccgtgccctactccctgctcttccgcgtcctgctgcagtgcttgaagcaggagtctgactggaaggtgctgaagctggttctgggcaggctgcctgagtccctgcgctataaagtgctcatctttacttccccttgcagtgtggaccagctgtgctctgctctctgctccatgctttcaggcccaaagacactggagcggctccgaggcgccccagaaggcttctccagaactgacttgcacctggccgtggttccagtgctgacagcattaatctcttaccataactacctggacaaaaccaaacagcgcgagatggtctactgcctggagcagggcctcatccaccgctgtgccagccagtgcgtcgtggccttgtccatctgcagcgtggagatgcctgacatcatcatcaaggcgctgcctgttctggtggtgaagctcacgcacatctcagccacagccagcatggccgtcccactgctggagttcctgtccactctggccaggctgccgcacctctacaggaactttgccgcggagcagtatgccagtgtgttcgccatctccctgccgtacaccaacccctccaagtttaatcagtacatcgtgtgtctggcccatcacgtcatagccatgtggttcatcaggtgccgcctgcccttccggaaggattttgtccctttcatcactaagggcctgcggtccaatgtcctcttgtcttttgatgacacccccgagaaggacagcttcagggcccggagtactagtctcaacgagagacccaagagcaggatacagacgtccctcaccagtgccagcttggggtctgcagatgagaactccgtggcccaggctgacgatagcctgaaaaacctccacctggagctcacggaaacctgtctggacatgatggctcgatacgtcttctccaacttcacggctgtcccgaagaggtctcctgtgggcgagttcctcctagcgggtggcaggaccaaaacctggctggttgggaacaagcttgtcactgtgacgacaagcgtgggaaccgggacccggtcgttactaggcctggactcgggggagctgcagtccggcccggagtcgagctccagccccggggtgcatgtgagacagaccaaggaggcgccggccaagctggagtcccaggctgggcagcaggtgtcccgtggggcccgggatcgggtccgttccatgtcggggggccatggtcttcgagttggcgccctggacgtgccggcctcccagttcctgggcagtgccacttctccaggaccacggactgcaccagccgcgaaacctgagaaggcctcagctggcacccgggttcctgtgcaggagaagacgaacctggcggcctatgtgcccctgctgacccagggctgggcggagatcctggtccggaggcccacagggaacaccagctggctgatgagcctggagaacccgctcagccctttctcctcggacatcaacaacatgcccctgcaggagctgtctaacgccctcatggcggctgagcgcttcaaggagcaccgggacacagccctgtacaagtcactgtcggtgccggcagccagcacggccaaaccccctcctctgcctcgctccaacacagactccgccgtggtcatggaggagggaagtccgggcgaggttcctgtgctggtggagcccccagggttggaggacgttgaggcagcgctaggcatggacaggcgcacggatgcctacagcaggtcgtcctcagtctccagccaggaggagaagtcgctccacgcggaggagctggttggcaggggcatccccatcgagcgagtcgtctcctcggagggtggccggccctctgtggacctctccttccagccctcgcagcccctgagcaagtccagctcctctcccgagctgcagactctgcaggacatcctcggggaccctggggacaaggccgacgtgggccggctgagccctgaggttaaggcccggtcacagtcagggaccctggacggggaaagtgctgcctggtcggcctcgggcgaagacagtcggggccagcccgagggtcccttgccttccagctccccccgctcgcccagtggcctccggccccgaggttacaccatctccgactcggccccatcacgcaggggcaagagagtagagagggacgccttaaagagcagagccacagcctccaatgcagagaaagtgccaggcatcaaccccagtttcgtgttcctgcagctctaccattcccccttctttggcgacgagtcaaacaagccaatcctgctgcccaatgagtcacagtcctttgagcggtcggtgcagctcctcgaccagatcccatcatacgacacccacaagatcgccgtcctgtatgttggagaaggccagagcaacagcgagctcgccatcctgtccaatgagcatggctcctacaggtacacggagttcctgacgggcctgggccggctcatcgagctgaaggactgccagccggacaaggtgtacctgggaggcctggacgtgtgtggtgaggacggccagttcacctactgctggcacgatgacatcatgcaagccgtcttccacatcgccaccctgatgcccaccaaggacgtggacaagcaccgctgcgacaagaagcgccacctgggcaacgactttgtgtccattgtctacaatgactccggtgaggacttcaagcttggcaccatcaagggccagttcaactttgtccacgtgatcgtcaccccgctggactacgagtgcaacctggtgtccctgcagtgcaggaaagacatggagggccttgtggacaccagcgtggccaagatcgtgtctgaccgcaacctgcccttcgtggcccgccagatggccctgcacgcaaatatggcctcacaggtgcatcatagccgctccaaccccaccgatatctacccctccaagtggattgcccggctccgccacatcaagcggctccgccagcggatctgcgaggaagccgcctactccaaccccagcctacctctggtgcaccctccgtcccatagcaaagcccctgcacagactccagccgagcccacacctggctatgaggtgggccagcggaagcgcctcatctcctcggtggaggacttcaccgagtttgtgtgaggccggggccctccctcctgcactggccttggacggtattgcctgtcagtgaaataaataaagtcctgaccccagtgcacagacatagaggc

SEQ ID NO: 273758 - protein, 262 aa, Artificial Sequence
  derived and/or modified sequence
MCGPRRLAAPGSSLGSFGRASRGGRRGSSGGRAAEPGLGDTMRRVLRLLLGCFLTELCARVCRAQERAGHGQLAQLGGVLLLAGGNRSGAASGEASEGAEASDAPPTRAPTPDFCRGYFDVMGQWDPPFNCSSGDFIFCCGTCGFRFCCTFKKRRLNQSTCTNYDTPLWLNTGKPPARKDDPLHDPTKDKTNLIVYIICGVVAVMVLVGIFTKLGLEKAHRPQREHMSRLYDNLLFMEAQISFQEDEPAPGEWSVGLQTWTV

SEQ ID NO: 273759 - protein, 554 aa, Artificial Sequence
  derived and/or modified sequence
MSADGGGIQDTQDKETPPEVPDRGHPHQEMPSKLGEAVPSGDTQESLHIKMEPEEPHSEGASQEDGAQGAWGWAPLSHGSKEKALFLPGGALPSPRIPVLSREGRTRDRQMAAALLTAWSQMPVTFEDVALYLSREEWGRLDHTQQNFYRDVLQKKNGLSLGFPFSRPFWAPQAHGKGEASGSSRQAGDEKEWRGACTGAVEVGQRVQTSSVAALGNVKPFRTRAGRVQWGVPQCAQEAACGRSSGPAKDSGQPAEPDRTPDAAPPDPSPTEPQEYRVPEKPNEEEKGAPESGEEGLAPDSEVGRKSYRCEQCGKGFSWHSHLVTHRRTHTGEKPYACTDCGKRFGRSSHLIQHQIIHTGEKPYTCPACRKSFSHHSTLIQHQRIHTGEKPYVCDRCAKRFTRRSDLVTHQGTHTGAKPHKCPICAKCFTQSSALVTHQRTHTGVKPYPCPECGKCFSQRSNLIAHNRTHTGEKPYHCLDCGKSFSHSSHLTAHQRTHRGVRPYACPLCGKSFSRRSNLHRHEKIHTTGPKALAMLMLGAAAAGALATPPPAPT

SEQ ID NO: 273760 - protein, 279 aa, Artificial Sequence
  derived and/or modified sequence
MSADGGGIQDTQDKETPPEVPDRGHPHQEMPSKLGEAVPSGDTQESLHIKMEPEEPHSEGASQEDGAQGAWGWAPLSHGSKEKALFLPGGALPSPRIPVLSREGRTRDRQMAAALLTAWSQMPVTFEDVALYLSREEWGRLDHTQQNFYRDVLQKKNGLSLGFPFSRPFWAPQAHGKGEASGSSRQAGDEKEWRGACTGAVEVGQRVQTSSVAALGNVKPFRTRAGRVQWGVPQCAQEAACGRSSGPAKDSGQPAEPDRTPDAAPPDPSPTEPQEYRVP

SEQ ID NO: 273761 - protein, 118 aa, Artificial Sequence
  derived and/or modified sequence
MSADGGGIQDTQDKETPPEVPDRGHPHQEMPSKLGEAVPSGDTQESLHIKMEPEEPHSEGASQEDGAQGAWGWAPLSHGSKEKALFLPGGALPSPRIPVLSREGRTRDRQMAAALLTA

SEQ ID NO: 273762 - DNA, 2077 bp, Artificial Sequence
  derived and/or modified sequence
ctgtcttccctactcccagtctccacccaactcccccgcccgccccgtgcaggctgtggagactcccttcccgggggagggggcccccactgccgcaggtgccccctctgcctccaccccggctcctggccagaagctggagggggcttggccaaaaagagggagaaacaactcagctgttctttctagctctgaaatagaaaatgtctgcagacggcggaggcatccaggacacccaggacaaggagacacccccggaggttccagatcgtggacatcctcatcaggaaatgccttctaagctgggggaggcggtaccttcaggggacactcaggagtcactgcacattaagatggagcccgaagagccacactccgagggggcatcgcaggaggatggggctcaaggtgcctggggctgggcacccctaagtcacggctctaaggagaaagctctcttcctgcctggcggagccctcccctccccccggatccccgtgctttcccgagaggggaggaccagagaccggcagatggctgcagcgctcctcactgcctggtcccagatgccagtgactttcgaggatgtggccttgtacctctcccgggaggagtggggacggctggaccacacgcagcagaacttctacagggatgtcctgcagaagaaaaatgggctgtcactgggctttcccttcagcaggcctttctgggcccctcaagcgcacggcaagggtgaggcctcgggctccagccggcaggcaggagatgagaaggagtggagaggcgcgtgcacaggagccgtcgaggtggggcagagggtgcagacctcatccgtggcagcccttgggaatgtgaagcccttcagaaccagggcagggagagtccagtggggcgtcccgcagtgcgcgcaggaagcagcctgcggccggagctcagggccggccaaagactccgggcagccggctgagccagatcgcaccccggatgcagctccgccagaccccagtcccacggagccccaggagtaccgcgtcccggagaagcccaacgaggaggagaagggcgccccggagagtggcgaggagggcctggcccctgacagtgaggtgggcaggaagagctaccggtgcgagcagtgcggcaagggcttcagctggcactcgcacctggtgacgcaccggcgcacgcacacgggcgagaagccctacgcctgcactgactgcgggaagcgcttcggccgcagctcgcacctcatccagcaccagatcatccacacgggcgagaagccctacacctgccccgcctgccggaagagcttcagccaccactccacgctgattcagcaccagcgcatccacaccggagagaagccctacgtgtgcgaccgctgcgccaagcgcttcacccgccgctcggacttggtcacccaccagggcacccacacgggcgccaagccgcacaagtgccccatctgcgccaagtgcttcacgcagagctcggcgctagtcacccaccagcgcacccacactggggtcaagccctatccgtgccccgagtgcggcaagtgcttcagccagcgttccaacctcatcgcgcacaaccgcacacacacaggcgagaagccctaccactgcctcgactgcggcaagagcttcagccacagctcgcacctcaccgcgcaccagcgcacccaccgtggcgtgcggccctacgcctgcccgttgtgcggcaagagcttcagccggcgctccaacctgcaccggcacgagaagatccacaccaccgggcccaaggccctggccatgctgatgctgggggcggcggcggcgggggctctggccacacccccacccgctcccacctaggaggccaggaaagggggagcggggcgcccagggccactggaacagccccactggagtcaaggctccgagggaggagagaggggctcgggaagggagctggggcggtgagggcatggggtgaggcatggcgatgggggagggcgagggcgagaaagggcaggcactctgcgaattaaaggccttggacttgaaaaaaaaaaaaaaaaaaa

SEQ ID NO: 273763 - DNA, 840 bp, Artificial Sequence
  derived and/or modified sequence
atgagcgccgacggcggcggcatccaggacacccaggacaaggagaccccccccgaggtgcccgacagaggccacccccaccaggagatgcccagcaagctgggcgaggccgtgcccagcggcgacacccaggagagcctgcacatcaagatggagcccgaggagccccacagcgagggcgccagccaggaggacggcgcccagggcgcctggggctgggcccccctgagccacggcagcaaggagaaggccctgttcctgcccggcggcgccctgcccagccccagaatccccgtgctgagcagagagggcagaaccagagacagacagatggccgccgccctgctgaccgcctggagccagatgcccgtgaccttcgaggacgtggccctgtacctgagcagagaggagtggggcagactggaccacacccagcagaacttctacagagacgtgctgcagaagaagaacggcctgagcctgggcttccccttcagcagacccttctgggccccccaggcccacggcaagggcgaggccagcggcagcagcagacaggccggcgacgagaaggagtggagaggcgcctgcaccggcgccgtggaggtgggccagagagtgcagaccagcagcgtggccgccctgggcaacgtgaagcccttcagaaccagagccggcagagtgcagtggggcgtgccccagtgcgcccaggaggccgcctgcggcagaagcagcggccccgccaaggacagcggccagcccgccgagcccgacagaacccccgacgccgccccccccgaccccagccccaccgagccccaggagtacagagtgccctag

SEQ ID NO: 273764 - DNA, 357 bp, Artificial Sequence
  derived and/or modified sequence
atgagcgccgacggcggcggcatccaggacacccaggacaaggagaccccccccgaggtgcccgacagaggccacccccaccaggagatgcccagcaagctgggcgaggccgtgcccagcggcgacacccaggagagcctgcacatcaagatggagcccgaggagccccacagcgagggcgccagccaggaggacggcgcccagggcgcctggggctgggcccccctgagccacggcagcaaggagaaggccctgttcctgcccggcggcgccctgcccagccccagaatccccgtgctgagcagagagggcagaaccagagacagacagatggccgccgccctgctgaccgcctag

SEQ ID NO: 273765 - DNA, 1665 bp, Artificial Sequence
  derived and/or modified sequence
atgtctgctgacggcggtgggatccaagacacacaggacaaggagaccccacctgaagttcctgaccgagggcatccccatcaggagatgccctctaaactgggcgaagcggtcccatccggtgacacacaagagagcctccacattaagatggaacccgaagaaccccatagcgagggagcatcacaagaggatggtgcacaaggagcttggggatgggccccactttcccacggttccaaggaaaaggcactgttccttcctgggggagctctgccgagcccccgaatccccgttctgtcccgggagggaaggacccgcgatcggcagatggccgcggcattattgacagcttggagtcagatgcccgtgacgtttgaggatgtggccctctatctatccagggaagagtggggcagactggatcacactcagcagaacttctatcgcgatgtattgcaaaagaagaacggactttccctgggctttcccttctctaggcctttctgggccccgcaggctcacggcaaaggagaggcgagcggaagcagtagacaggctggggacgagaaggagtggcgcggagcgtgcacaggcgccgtcgaggtcggccagagagttcagacctcatcggtggcagctctcggcaacgtgaagccctttcggacacgggccggccgggttcaatggggggtgcctcagtgcgcccaggaagctgcgtgcggacgctcaagcggccccgccaaggactccggccaacccgccgagcccgacaggaccccggacgcggctccgccagatccctcccccacagaaccccaagaatatcgagtgcctgaaaagcccaatgaagaggaaaagggggcgcccgagagtggcgaagaggggcttgccccagactctgaggtaggcaggaaatcttatcgctgtgaacagtgtggcaagggattttcttggcactcccacctggtaactcataggagaacccacacaggggagaaaccttatgcttgcactgactgcggcaagcgattcggaagatcatcccacctcatccagcatcaaatcatccacacgggtgagaagccatacacttgcccagcatgccgcaagagcttcagtcaccacagtacactgatccagcaccagcgcatccacaccggagagaagccatacgtgtgcgaccgctgcgcaaaacgcttcacaaggagaagtgacctggtgacacatcagggcactcataccggggccaagccccacaagtgtccaatatgcgcaaagtgttttacacagtctagcgcactagtgacacatcagcgcacgcacacaggggtgaagccttatccatgccccgagtgcggaaagtgtttttcccaaagatcgaatctgatcgcacacaatcggacccatactggcgagaagccctatcattgcctggattgtggtaagtctttcagtcatagtagtcaccttacagcccaccagaggacgcacagaggcgtgagaccatatgcctgtcctctctgcgggaagagcttcagccgaagatccaacctacaccgccatgagaaaatccacacgacaggcccgaaagccctggcgatgctgatgctcggggctgcagccgccggcgcccttgcgaccccacccccagccccaacctag

SEQ ID NO: 273766 - DNA, 1665 bp, Artificial Sequence
  derived and/or modified sequence
atgagtgccgatggaggtggtattcaggatacacaggataaggaaacacctcctgaggttcccgaccgtggacatccacatcaggaaatgccgagtaagttgggagaggctgttccatccggcgacactcaggaatccctgcatatcaagatggagccagaagagccccactccgaaggagctagtcaggaggacggcgcccagggcgcttggggatgggcaccgctgtctcatggatcgaaagaaaaggctctattcctgccaggtggggcacttccatctccccgcattcctgtactctctagggaaggccgcacccgcgacaggcagatggctgccgctctgctgacagcctggtctcagatgcctgtcacctttgaagacgtcgcattgtacctgtcccgggaggaatgggggcgacttgaccacacacagcagaacttctaccgagacgtgctgcagaaaaagaatggattgagcctgggatttcccttcagccgccccttttgggccccacaggcccacggcaagggggaagccagcggctcaagcagacaagcaggcgacgagaaagagtggcgtggcgcctgcaccggggccgtcgaggtcggccagcgtgtccagacctcatctgtagccgcgttaggtaacgtaaagccttttcggacacgagcaggcagagttcagtggggtgtgccccaatgcgctcaggaggctgcgtgtggtcgtagtagcgggccagctaaagattcgggacagccagccgagccagacagaaccccagacgccgcaccgccagacccttccccaaccgagccccaagagtatagagtgccagagaaacctaatgaagaggagaaaggtgccccagaatctggggaggagggactcgccccggactccgaggttgggaggaagtcctaccggtgtgaacagtgcggtaagggcttttcatggcacagtcatttagtgactcacaggcgcacacatacaggcgaaaagccttatgcatgtaccgattgtggaaaacgatttggtagatctagtcacctcattcagcatcaaatcatccataccggcgaaaagccctacacatgtcctgcttgcagaaagagcttcagtcaccattccaccttgatccagcaccagcgcatccataccggagaaaaaccttacgtttgtgaccgatgcgctaaaagattcacacgcagatctgacctggtcacccaccaggggactcacaccggtgctaaaccacataaatgcccgatttgcgcgaaatgctttacccaatctagcgctttggttactcatcagcgaactcacactggtgtcaagccctacccatgccccgagtgcgggaagtgttttagccagcggtctaatttaattgcccacaacaggacgcatacaggggaaaagccataccactgtttggactgtggtaagtctttcagccactcgtctcatctgactgcccaccagaggacacacaggggggttcgaccatacgcctgtccactctgtggaaagtcattttccagacgtagcaacctccacagacacgagaaaatccatacaacggggccgaaggcactcgccatgttaatgctcggcgcggcggccgccggagccctagccactcctcctcccgccccaacctag

SEQ ID NO: 273767 - DNA, 840 bp, Artificial Sequence
  derived and/or modified sequence
atgagtgcagatggcggcggcatccaggacacacaggacaaggaaaccccgcccgaggtccccgacagggggcatccgcatcaggagatgccctccaaactgggtgaggccgtgcctagcggcgacacccaggagtctctacatatcaaaatggagcctgaagagcctcatagcgagggcgccagtcaggaggacggcgctcagggcgcatggggttgggccccgctttcccacggatctaaagaaaaggctttattcctgccaggaggagcacttccttcccccaggatccctgtgctcagccgagaggggcgcacaagggaccggcagatggctgccgccctcctgactgcttggagccagatgcctgtgacatttgaggacgtggccctgtatttgtcccgtgaggagtggggccgactggaccacacccagcaaaacttttacagagacgttctgcaaaagaaaaatgggctcagcctgggtttccctttttcaaggccattctgggccccgcaggcgcacggcaagggggaagcctcagggtctagccgtcaggcgggcgatgaaaaggagtggcggggcgcctgtacaggcgcggtagaagtagggcagcgcgtgcagaccagctctgtcgccgccctgggtaacgtgaaaccatttaggaccagggcaggccgtgtccagtggggggttccacaatgtgcacaagaggctgcctgcggccgctcatcagggcccgccaaggattcaggccaacccgccgaacccgatcgtacccccgacgccgctccccccgatcccagcccaaccgaaccccaggaatatcgtgtgccatag

SEQ ID NO: 273768 - DNA, 357 bp, Artificial Sequence
  derived and/or modified sequence
atgtctgccgacggaggaggcatccaggatactcaggataaagaaacgccccctgaagtgccagatcgcgggcacccacaccaggagatgccttctaagttgggggaagctgtacctagtggcgacacacaggagagtctccacattaagatggagcccgaagagccacatagcgagggggctagtcaagaggacggagcccagggtgcctgggggtgggcacctttatcacatggatctaaggaaaaggccctgtttctgcccggcggggccctcccttctcctaggatccccgttctgagcagagaaggtcgtacccgcgaccgacagatggccgccgctcttctaactgcctag

SEQ ID NO: 273769 - DNA, 1665 bp, Artificial Sequence
  derived and/or modified sequence
atgtctgcagatggcggcggcatccaggacacccaggacaaggagaccccacctgaggtgcctgaccggggccacccccaccaggagatgcccagcaagctgggggaggccgtgcccagcggggacacccaggagagcctgcacatcaagatggagcctgaggagccccacagcgagggcgccagccaggaggatggagcccagggcgcctggggctgggcccccctgagccacggcagcaaggagaaggccctcttcctgcccggcggggccctgcccagcccccgcatccctgtgctgagccgggagggccgcacccgggaccggcagatggctgctgccctgctgacagcctggagccagatgcctgtgacctttgaagatgtggccctgtacctgagccgggaggagtggggccgcctggaccacacccagcagaacttctacagagatgtgctgcagaagaagaatggcctgagcctgggcttccccttcagccggcccttctgggccccccaggcccatggaaaaggagaggccagcggcagcagccggcaggccggagatgagaaggagtggaggggggcctgcaccggggctgtggaggtgggccagagggtgcagaccagctctgtggccgccctgggcaatgtgaagcccttccgcaccagggctggccgggtgcagtggggcgtgccccagtgtgcccaggaggccgcctgtggccgcagcagcggccctgccaaggacagcggccagcctgctgagccagacaggaccccagatgctgcccccccagaccccagccccacagagccccaggagtacagagtgcctgagaagcccaatgaggaggagaagggggcccctgagagcggggaggagggcctggccccagattctgaggtgggcaggaagagctaccgctgtgagcagtgtgggaagggcttctcctggcacagccacctggtgacccacaggaggacccacactggagagaagccctatgcctgcacagactgtgggaagagatttggccgcagcagccacctgatccagcaccagatcatccacactggagagaagccctacacctgcccagcctgcaggaagagcttcagccaccacagcaccctcatccagcaccagaggatccacactggagagaagccctacgtgtgtgacagatgtgccaagcgcttcaccaggagaagtgacctggtgacccaccagggcacccacactggagccaagccccacaagtgccccatctgtgccaagtgcttcacccagagcagcgccctggtgacccaccagaggacccacactggagtgaagccctacccctgcccagaatgtgggaagtgcttcagccagaggagcaacctgattgcccacaacagaacccacactggagagaagccctaccactgcctggactgtgggaagagcttcagccacagcagccacctgacagcccaccagaggacccaccggggcgtgcggccctatgcctgccccctgtgtgggaagagcttcagcagaagaagcaacctgcacagacatgagaagatccacaccaccggccccaaggccctggccatgctgatgctgggcgctgctgctgctggggccctggccaccccacctccagcccccacctag

SEQ ID NO: 273770 - DNA, 840 bp, Artificial Sequence
  derived and/or modified sequence
atgtctgcagatggcggcggcatccaggacacccaggacaaggagaccccacctgaggtgcctgaccggggccacccccaccaggagatgcccagcaagctgggggaggccgtgcccagcggggacacccaggagagcctgcacatcaagatggagcctgaggagccccacagcgagggcgccagccaggaggatggagcccagggcgcctggggctgggcccccctgagccacggcagcaaggagaaggccctcttcctgcccggcggggccctgcccagcccccgcatccctgtgctgagccgggagggccgcacccgggaccggcagatggctgctgccctgctgacagcctggagccagatgcctgtgacctttgaagatgtggccctgtacctgagccgggaggagtggggccgcctggaccacacccagcagaacttctacagagatgtgctgcagaagaagaatggcctgagcctgggcttccccttcagccggcccttctgggccccccaggcccatggaaaaggagaggccagcggcagcagccggcaggccggagatgagaaggagtggaggggggcctgcaccggggctgtggaggtgggccagagggtgcagaccagctctgtggccgccctgggcaatgtgaagcccttccgcaccagggctggccgggtgcagtggggcgtgccccagtgtgcccaggaggccgcctgtggccgcagcagcggccctgccaaggacagcggccagcctgctgagccagacaggaccccagatgctgcccccccagaccccagccccacagagccccaggagtacagagtgccctag

SEQ ID NO: 273771 - DNA, 357 bp, Artificial Sequence
  derived and/or modified sequence
atgtctgcagatggcggcggcatccaggacacccaggacaaggagaccccacctgaggtgcctgaccggggccacccccaccaggagatgcccagcaagctgggggaggccgtgcccagcggggacacccaggagagcctgcacatcaagatggagcctgaggagccccacagcgagggcgccagccaggaggatggagcccagggcgcctggggctgggcccccctgagccacggcagcaaggagaaggccctcttcctgcccggcggggccctgcccagcccccgcatccctgtgctgagccgggagggccgcacccgggaccggcagatggctgctgccctgctgacagcctag

SEQ ID NO: 273772 - DNA, 1665 bp, Artificial Sequence
  derived and/or modified sequence
atgagcgccgacggcggcggcatccaggacacccaggacaaggagacccctcccgaggttccagacagggggcacccccaccaggagatgcccagcaaactcggggaggctgttccctctggcgatacacaagagtcactccatatcaagatggagcctgaggaacctcattcagaaggagcttcacaggaagatggggcgcagggagcatggggctgggctccactgagtcatggaagtaaggagaaggctctctttctcccaggtggcgcactgccatcccccaggattccagttctgtctcgcgagggaaggactcgcgaccgccagatggcggccgccctcctgacggcttggtcccagatgcccgttacattcgaggacgttgcactgtatctctctagggaggaatggggcagactggaccatacgcaacagaatttctatagggatgtccttcagaaaaaaaacggcctgtctcttggctttcctttcagcagacctttttgggcacctcaggcacacggcaagggggaggcctctggatcctctaggcaagccggtgatgagaaggagtggcggggtgcatgtaccggcgctgtagaagtcgggcagcgagtgcagaccagctccgttgccgccctcggcaatgttaaaccatttaggacgcgggccggccgagtacagtggggggtgccccaatgcgcccaggaggccgcttgcggccgcagctcagggccagccaaggatagcggacagcccgccgaacctgaccgcaccccagacgcagctcccccagacccctcccctactgagccccaggaatacagagtgccagagaagcccaatgaagaggagaaaggggctcccgagtccggcgaagagggcctggctccagatagcgaggtcgggagaaaaagctatcgctgcgagcagtgtggaaagggcttcagctggcactctcacctcgtgacccaccgtaggacccatacaggtgaaaaaccctatgcctgcactgattgcgggaaacggttcgggcggagttcccaccttattcagcatcagatcatccatacaggggagaaaccctatacttgtcctgcatgcaggaagtcattcagccatcactctaccctcatacagcaccaaagaatccacacaggggagaagccatacgtgtgcgaccggtgtgctaagcgctttactcgacgttccgatctggttacccaccaggggacccataccggcgccaaaccacataaatgccctatctgtgcaaaatgctttactcaaagttccgctcttgtgactcaccagagaacacacactggggtgaagccttacccgtgccctgagtgtggcaaatgcttctctcagcggtccaatctgattgcacacaatagaacccacacaggagagaaaccctaccactgcctcgactgcggcaaatcattctcccatagctcacacttgactgcccaccagcgcacgcacaggggcgtgcggccctatgcctgccctctttgtgggaaaagcttttcacggcggtccaatctgcaccgccacgagaagattcacaccaccgggcccaaagcgctcgccatgctgatgcttggagctgccgcagcaggtgctctcgctactcctcccccagcgccgacatag

SEQ ID NO: 273773 - DNA, 1665 bp, Artificial Sequence
  derived and/or modified sequence
atgagcgccgacggcggcggcatccaggacacccaggacaaggagacgccgccagaagtgcctgatcggggccacccccaccaagagatgccctccaagttgggcgaggccgtgccatctggggacactcaggagtctctgcatatcaagatggaaccggaggagccccactctgagggcgcttcccaggaggacggcgcccaaggggcctgggggtgggcgcccctctcccacgggtctaaagaaaaggccttatttctccccggcggtgcgctcccctcaccaaggattcccgtgctctctcgggagggccgaacgcgagatcgccagatggccgcagcattgctcacggcctggtcccaaatgcctgtcacatttgaagatgttgcactgtacctgtcaagagaggagtgggggcgactggaccacacacagcagaatttttaccgggatgtattgcagaagaaaaatggtcttagccttggcttccctttcagcagacccttctgggcccctcaggcacatggcaagggagaggcctccggatcttcccggcaggctggagacgaaaaagaatggcggggcgcctgtaccggagcggtggaagtgggtcagagggtgcagacatcttcagtggccgcgttgggtaatgtgaaaccctttcgtacccgggctggcagggtccagtggggggtgcctcagtgcgcgcaggaggccgcttgtggtaggagttctggcccagctaaagactcaggccagccggccgagcccgaccggaccccagacgccgcgccgcctgatccttcgcctactgagccccaagaatatcgtgtccctgagaaacctaacgaggaggagaaaggcgccccagagagcggcgaagagggacttgcccccgactccgaggtcgggagaaagtcttaccgctgtgagcaatgtggcaagggcttttcttggcactcccacctggtcacacaccgtagaacacataccggagagaagccctacgcctgcaccgactgtggcaagagattcggcaggtcctcccacttaatccagcaccagatcatccatacaggcgagaaaccgtacacctgtccagcttgtcgcaagtctttctcccatcatagtacccttatccagcaccagcgtatccacacaggcgaaaagccatatgtgtgtgacagatgtgctaaacgattcacccggcgctcggatctggtgactcaccagggcacgcacacgggcgccaaacctcataaatgcccgatttgtgccaaatgctttactcagtcctctgctctagtgacacatcagcgcacgcacaccggcgtgaagccatacccttgtcctgaatgcggtaaatgcttcagtcagcgcagcaaccttatcgcacacaataggacccacacaggagaaaagccataccactgcctggactgcggcaagtcattctctcactcttcccaccttaccgcccaccagcgcacccacagaggagtccgaccttacgcttgcccgctttgtggcaagagtttttcgcgacgcagcaatctccacaggcatgagaaaatccacactaccgggcctaaagctttagcaatgctgatgctaggagctgctgcagccggtgcactcgccacaccacctcctgcccccacctag

SEQ ID NO: 273774 - DNA, 840 bp, Artificial Sequence
  derived and/or modified sequence
atgagcgccgacggcggcggcatccaggacacccaggacaaggagaccccaccagaggtgccagaccgtggacatccacatcaagaaatgccttcaaaactgggagaggcagtgcccagtggcgatacacaggagagtctgcacattaaaatggaaccagaagagccgcattcggaaggggcctcacaggaggacggcgcccagggggcatggggatgggccccactgagccatggctctaaggaaaaagccctctttctgccaggcggggcacttccttcaccacggatccccgtgttaagccgggagggaagaactagagaccgtcagatggcggccgcattactaaccgcctggtctcagatgcccgtgactttcgaagacgtcgccctttacttatctcgggaggaatggggtcgactggatcacactcagcaaaacttttatagagatgtcctgcagaaaaaaaatggcctcagtctcggttttccgtttagccggccgttttgggccccacaggctcacggtaaaggggaggcctccgggagctcccggcaggccggcgatgaaaaggagtggagaggggcctgtactggcgcagtggaggtcgggcaaagggtgcaaacttcgtctgttgccgctctcggaaatgtgaaacccttccgcacacgcgccggaagggtgcagtggggggtcccacagtgcgcacaggaggccgcgtgtggccgcagttccggtcctgcaaaagactccggccaacccgccgagcccgatcggacccccgacgcagctccacccgatcctagccctaccgagccccaggagtacagggtcccatag

SEQ ID NO: 273775 - DNA, 357 bp, Artificial Sequence
  derived and/or modified sequence
atgagcgccgacggcggcggcatccaggacacccaggacaaggagactccacctgaagttcctgacaggggacatccccaccaagagatgcctagcaagttaggcgaagccgtgcctagtggagacacacaggaatccctccatattaaaatggaacccgaagagcctcactccgagggcgcaagtcaggaggacggcgcacaaggggcatgggggtgggctccactgagccatggcagcaaggagaaagcgctcttcttgccgggtggggccctgcccagtccaaggatccctgtgctctcacgcgaaggcaggacccgcgacaggcaaatggctgccgcactcctgactgcctag

SEQ ID NO: 273776 - DNA, 1665 bp, Artificial Sequence
  derived and/or modified sequence
atgagcgctgacggcggtggcatccaggatacacaggataaggagaccccgcctgaagtgccggatagaggccatcctcaccaagaaatgccctccaaactgggggaggccgtgccctccggggatactcaggagtccctgcatattaagatggaaccagaagagccacacagcgagggcgcatcacaagaagatggggctcaaggagcctggggctgggcacccctaagccatggctctaaagaaaaggcgttgttccttcccggtggtgctctccctagtcctcgcatcccagtgctctcgcgggaaggcagaactagagataggcaaatggccgcagccctcctcacagcatggagccagatgccagttacctttgaggacgtcgcactgtatctttctcgggaggaatggggcagattagaccacacacagcagaacttttacagggacgtgctgcagaaaaaaaacgggttatcattggggtttccgtttagccggccattctgggcgcctcaggcccatggcaagggcgaggctagcgggtcttctaggcaggctggcgatgagaaggaatggcggggagcctgcacaggggctgtggaggtgggacagcgggttcaaacctcctctgtcgctgccttgggcaatgtcaaacccttccgaacccgagcagggagggtacagtggggcgtgcctcagtgtgcccaggaggccgcttgtggtcgctcttctgggcctgctaaggacagtggccaacctgctgagcccgacagaactcccgatgcggctcctcccgatccgtcgccaaccgagccacaggaataccgtgtgccagagaagcctaacgaggaggaaaaaggggcacctgaaagcggggaagagggattggccccagatagtgaagttggaagaaagtcctacagatgcgagcagtgcggcaaaggcttctcctggcactcacacctggtcacacatagacgcacacacaccggggagaaaccttatgcctgtactgattgcgggaaaaggttcggaaggtcctcccatcttatacagcatcagataatacacaccggcgaaaaaccctatacctgtccggcatgccggaaaagcttctcgcaccactccacgttgatccagcaccaacgcatccacaccggcgagaagccttatgtctgcgacaggtgtgccaagaggtttacccggcgaagcgacctagtaacacaccagggcacccataccggagctaagccacacaaatgtccgatttgcgctaagtgcttcacccagtcaagtgcgcttgtcacacatcaaaggacccatacgggggtgaaaccgtatccctgtcctgagtgcgggaagtgcttttcgcagaggagcaatctgatcgctcacaacagaacccataccggagaaaagccctatcactgtctggattgtggcaaatccttctcccattcttcacacctgaccgcgcaccaacgcacgcatcgcggtgtgcggccatatgcctgcccgttatgcggcaagtctttctccaggcggtcgaaccttcatcgtcatgaaaagattcacaccacgggtcccaaggccctggccatgttgatgcttggagcagccgcagccggagccctagccacacccccacctgcaccaacttag

SEQ ID NO: 273777 - DNA, 1665 bp, Artificial Sequence
  derived and/or modified sequence
atgtctgccgacggcggaggaatacaagacactcaggacaaggaaacccctcctgaggtgcccgataggggccatcctcatcaggaaatgccttcgaagttgggggaggcggtcccgtccggcgatactcaggaatcacttcacattaagatggagcccgaagagcctcactcagaaggagccagccaggaggacggggcacagggcgcttgggggtgggcccctctgagccacggatcaaaggaaaaggctctgtttcttccaggaggagctttgccgagtccgaggatccctgttctgagtagggagggcaggacaagggacaggcaaatggcagccgcactgctcacggcctggtctcagatgcccgttacatttgaggacgtggctctgtatctttctcgggaagagtggggtagactggaccatacccagcagaacttctacagagacgtcttgcagaagaagaatgggctgagcctaggctttcccttctccagacccttttgggcacctcaggctcatggtaaaggtgaagcttcaggaagctccaggcaggccggagatgagaaagagtggaggggagcatgtactggagccgtagaggtcgggcaacgagtccagacctcgagcgtcgccgcactgggcaacgtcaagccgtttaggactagggcaggcagggtgcagtggggggtccctcagtgtgcacaggaagccgcttgcggtcgctcttctgggccagccaaagacagcgggcagcctgccgagcccgacaggactcccgatgccgcacctccggacccctcaccaactgagcctcaggagtacagagtgccagaaaaacctaatgaggaggagaagggggcaccggagtcaggcgaggagggtcttgccccagattctgaggtggggaggaaatcctacagatgtgaacagtgcggaaaaggcttctcctggcactcacacctggtgacacacagacgcactcacactggcgagaagccttatgcttgtaccgattgcggaaagaggttcggccgttcttctcacctgatccaacaccaaatcattcacactggcgaaaagccctacacttgccccgcatgccgaaaaagtttctctcaccacagtactcttattcagcaccagaggattcatacaggagagaaaccttatgtctgcgacaggtgtgccaagcgttttaccaggaggagcgatctggttacacatcagggcacccatacgggcgctaaaccccataagtgtcccatatgtgcaaaatgcttcacccaaagctccgccctggtgacacatcagaggacacacaccggcgtgaaaccctatccctgtccagagtgcgggaaatgcttttcccaacgttccaacttgattgctcacaacaggacgcacactggcgagaagccctatcactgtttagactgcggaaaaagtttcagtcactcttctcatctcacggcacatcaacgcactcatagaggtgtgaggccgtatgcctgccccttatgtgggaagagcttctctcgacgatccaatcttcacagacatgaaaaaatacataccaccggtccaaaggctctcgcaatgctcatgctcggagcagccgcagccggagcccttgccacaccaccccctgccccaacttag

SEQ ID NO: 273778 - DNA, 840 bp, Artificial Sequence
  derived and/or modified sequence
atgagcgccgatgggggaggcattcaggatactcaggataaagagaccccacctgaggtgcctgatcgcggtcaccctcatcaagaaatgccatcaaaactgggcgaggcagttccaagcggcgatacgcaggaatctcttcacattaagatggaaccagaggaacctcacagcgaaggcgcatctcaagaggatggggcacagggcgcttggggttgggcccctctttctcacgggtcaaaagagaaagccctgttcctgcccggtggagccctgcccagtccccgtatccctgtcctctcgagggaaggacgcacaagggatcgtcaaatggctgccgcactgctgaccgcatggtctcagatgcctgtaacctttgaggacgtggccctctacctgtcacgcgaggaatggggaagactcgaccatactcagcaaaacttttatagggacgtcctgcagaaaaaaaacggcctgagcttaggattccctttctcacgccctttttgggctccccaggcgcacgggaagggcgaagcctcaggttctagtagacaggccggagacgagaaggagtggcggggtgcatgcactggggcagtggaggtaggccagagggtgcagacttctagcgttgccgcactgggcaacgtcaaaccctttcggactagagcaggcagggtgcaatggggagtgccgcagtgtgcacaggaggctgcttgtggaagaagtagtggacccgcaaaggactctggccaacctgctgagcccgacagaaccccagatgccgcacccccagatcctagtcccaccgaaccccaggagtacagggtgccatag

SEQ ID NO: 273779 - DNA, 357 bp, Artificial Sequence
  derived and/or modified sequence
atgagcgctgatgggggtggcattcaagatacccaggacaaggagacacctcccgaagtgcctgaccgcggacatccacatcaggagatgcccagcaaattgggcgaggcagttcccagcggggatacacaggagagtctacacatcaagatggaacccgaggagcctcactcagaaggagcttcacaggaggacggcgctcagggagcatggggttgggcccctcttagtcatggttccaaggagaaggcgctgttcttacccggtggcgctctaccctcgccacgcatacctgtgctgtccagagagggacggactagggatcgacagatggctgctgccctgttgacagcatag

SEQ ID NO: 273780 - DNA, 1947 bp, Artificial Sequence
  derived and/or modified sequence
actcccagtctccacccaactcccccgcccgccccgtgcaggctgtggagactcccttcccgggggagggggcccccactgccgcaggtgccccctctgcctccaccccgctctgaaatagaaaatgtctgcagacggcggaggcatccaggacacccaggacaaggagacacccccggaggttccagatcgtggacatcctcatcaggaaatgccttctaagctgggggaggcggtaccttcaggggacactcaggagtcactgcacattaagatggagcccgaagagccacactccgagggggcatcgcaggaggatggggctcaaggtgcctggggctgggcacccctaagtcacggctctaaggagaaagctctcttcctgcctggcggagccctcccctccccccggatccccgtgctttcccgagaggggaggaccagagaccggcagatggctgcagcgctcctcactgcctggtcccagatgccagtgactttcgaggatgtggccttgtacctctcccgggaggagtggggacggctggaccacacgcagcagaacttctacagggatgtcctgcagaagaaaaatgggctgtcactgggctttcccttcagcaggcctttctgggcccctcaagcgcacggcaagggtgaggcctcgggctccagccggcaggcaggagatgagaaggagtggagaggcgcgtgcacaggagccgtcgaggtggggcagagggtgcagacctcatccgtggcagcccttgggaatgtgaagcccttcagaaccagggcagggagagtccagtggggcgtcccgcagtgcgcgcaggaagcagcctgcggccggagctcagggccggccaaagactccgggcagccggctgagccagatcgcaccccggatgcagctccgccagaccccagtcccacggagccccaggagtaccgcgtcccggagaagcccaacgaggaggagaagggcgccccggagagtggcgaggagggcctggcccctgacagtgaggtgggcaggaagagctaccggtgcgagcagtgcggcaagggcttcagctggcactcgcacctggtgacgcaccggcgcacgcacacgggcgagaagccctacgcctgcactgactgcgggaagcgcttcggccgcagctcgcacctcatccagcaccagatcatccacacgggcgagaagccctacacctgccccgcctgccggaagagcttcagccaccactccacgctgattcagcaccagcgcatccacaccggagagaagccctacgtgtgcgaccgctgcgccaagcgcttcacccgccgctcggacttggtcacccaccagggcacccacacgggcgccaagccgcacaagtgccccatctgcgccaagtgcttcacgcagagctcggcgctagtcacccaccagcgcacccacactggggtcaagccctatccgtgccccgagtgcggcaagtgcttcagccagcgttccaacctcatcgcgcacaaccgcacacacacaggcgagaagccctaccactgcctcgactgcggcaagagcttcagccacagctcgcacctcaccgcgcaccagcgcacccaccgtggcgtgcggccctacgcctgcccgttgtgcggcaagagcttcagccggcgctccaacctgcaccggcacgagaagatccacaccaccgggcccaaggccctggccatgctgatgctgggggcggcggcggcgggggctctggccacacccccacccgctcccacctaggaggccaggaaagggggagcggggcgcccagggccactggaacagccccactggagtcaaggctccgagggaggagagaggggctcgggaagggagctggggcggtgagggcatggggtgaggcatggcgatgggggagggcgagggcgagaaagggc

SEQ ID NO: 273781 - DNA, 2062 bp, Artificial Sequence
  derived and/or modified sequence
tcctgtcttccctactcccagtctccacccaactcccccgcccgccccgtgcaggctgtggagactcccttcccgggggagggggcccccactgccgcaggtgccccctctgcctccaccccggctcctggccagaagctggagggggcttggccaaaaagagggagaaacaactcagctgttctttctagctctgaaatagaaaatgtctgcagacggcggaggcatccaggacacccaggacaaggagacacccccggaggttccagatcgtggacatcctcatcaggaaatgccttctaagctgggggaggcggtaccttcaggggacactcaggagtcactgcacattaagatggagcccgaagagccacactccgagggggcatcgcaggaggatggggctcaaggtgcctggggctgggcacccctaagtcacggctctaaggagaaagctctcttcctgcctggcggagccctcccctccccccggatccccgtgctttcccgagaggggaggaccagagaccggcagatggctgcagcgctcctcactgcctggtcccagatgccagtgactttcgaggatgtggccttgtacctctcccgggaggagtggggacggctggaccacacgcagcagaacttctacagggatgtcctgcagaagaaaaatgggctgtcactgggctttcccttcagcaggcctttctgggcccctcaagcgcacggcaagggtgaggcctcgggctccagccggcaggcaggagatgagaaggagtggagaggcgcgtgcacaggagccgtcgaggtggggcagagggtgcagacctcatccgtggcagcccttgggaatgtgaagcccttcagaaccagggcagggagagtccagtggggcgtcccgcagtgcgcgcaggaagcagcctgcggccggagctcagggccggccaaagactccgggcagccggctgagccagatcgcaccccggatgcagctccgccagaccccagtcccacggagccccaggagtaccgcgtcccggagaagcccaacgaggaggagaagggcgccccggagagtggcgaggagggcctggcccctgacagtgaggtgggcaggaagagctaccggtgcgagcagtgcggcaagggcttcagctggcactcgcacctggtgacgcaccggcgcacgcacacgggcgagaagccctacgcctgcactgactgcgggaagcgcttcggccgcagctcgcacctcatccagcaccagatcatccacacgggcgagaagccctacacctgccccgcctgccggaagagcttcagccaccactccacgctgattcagcaccagcgcatccacaccggagagaagccctacgtgtgcgaccgctgcgccaagcgcttcacccgccgctcggacttggtcacccaccagggcacccacacgggcgccaagccgcacaagtgccccatctgcgccaagtgcttcacgcagagctcggcgctagtcacccaccagcgcacccacactggggtcaagccctatccgtgccccgagtgcggcaagtgcttcagccagcgttccaacctcatcgcgcacaaccgcacacacacaggcgagaagccctaccactgcctcgactgcggcaagagcttcagccacagctcgcacctcaccgcgcaccagcgcacccaccgtggcgtgcggccctacgcctgcccgttgtgcggcaagagcttcagccggcgctccaacctgcaccggcacgagaagatccacaccaccgggcccaaggccctggccatgctgatgctgggggcggcggcggcgggggctctggccacacccccacccgctcccacctaggaggccaggaaagggggagcggggcgcccagggccactggaacagccccactggagtcaaggctccgagggaggagagaggggctcgggaagggagctggggcggtgagggcatggggtgaggcatggcgatgggggagggcgagggcgagaaagggcaggcactctgcgaattaaaggccttggacttgaa

SEQ ID NO: 273782 - DNA, 1006 bp, Artificial Sequence
  derived and/or modified sequence
ggggccaggaccgggtttgggaaggagaaggacattgtctgccaggaccgagagcaggatgggcatcccaggcctggggcaggtggttgcagctgcaggggggctgctgagagcgggcaggttgatttctgaattcctggtgggcatgggagtcagctctgaaatagaaaatgtctgcagacggcggaggcatccaggacacccaggacaaggagacacccccggaggttccagatcgtggacatcctcatcaggaaatgccttctaagctgggggaggcggtaccttcaggggacactcaggagtcactgcacattaagatggagcccgaagagccacactccgagggggcatcgcaggaggatggggctcaaggtgcctggggctgggcacccctaagtcacggctctaaggagaaagctctcttcctgcctggcggagccctcccctccccccggatccccgtgctttcccgagaggggaggaccagagaccggcagatggctgcagcgctcctcactgcctggtcccagatgccagtgactttcgaggatgtggccttgtacctctcccgggaggagtggggacggctggaccacacgcagcagaacttctacagggatgtcctgcagaagaaaaatgggctgtcactgggctttcccttcagcaggcctttctgggcccctcaagcgcacggcaagggtgaggcctcgggctccagccggcaggcaggagatgagaaggagtggagaggcgcgtgcacaggagccgtcgaggtggggcagagggtgcagacctcatccgtggcagcccttgggaatgtgaagcccttcagaaccagggcagggagagtccagtggggcgtcccgcagtgcgcgcaggaagcagcctgcggccggagctcagggccggccaaagactccgggcagccggctgagccagatcgcaccccggatgcagctccgccagaccccagtcccacggagccccaggagtaccgcgtccc

SEQ ID NO: 273783 - DNA, 659 bp, Artificial Sequence
  derived and/or modified sequence
gcagatgatcagcttgcaggaggggatggggtcaaaggtggaaggcttcaagctggcaggagagaagggggccaggaccgggtttgggaaggagaaggacattgtctgccaggaccgagagcaggatgggcatcccaggcctggggcaggtggttgcagctgcaggggggctgctgagagcgggcaggttgatttctgaattcctggtgggcatgggagtcaggctcctggccagaagctggagggggcttggccaaaaagagggagaaacaactcagctgttctttctagctctgaaatagaaaatgtctgcagacggcggaggcatccaggacacccaggacaaggagacacccccggaggttccagatcgtggacatcctcatcaggaaatgccttctaagctgggggaggcggtaccttcaggggacactcaggagtcactgcacattaagatggagcccgaagagccacactccgagggggcatcgcaggaggatggggctcaaggtgcctggggctgggcacccctaagtcacggctctaaggagaaagctctcttcctgcctggcggagccctcccctccccccggatccccgtgctttcccgagaggggaggaccagagaccggcagatggctgcagcgctcctcactgcc

SEQ ID NO: 273784 - DNA, 1665 bp, Artificial Sequence
  derived and/or modified sequence
atgagcgccgacggcggcggcatccaggacacccaggacaaggagaccccccccgaggtgcccgacagaggccacccccaccaggagatgcccagcaagctgggcgaggccgtgcccagcggcgacacccaggagagcctgcacatcaagatggagcccgaggagccccacagcgagggcgccagccaggaggacggcgcccagggcgcctggggctgggcccccctgagccacggcagcaaggagaaggccctgttcctgcccggcggcgccctgcccagccccagaatccccgtgctgagcagagagggcagaaccagagacagacagatggccgccgccctgctgaccgcctggagccagatgcccgtgaccttcgaggacgtggccctgtacctgagcagagaggagtggggcagactggaccacacccagcagaacttctacagagacgtgctgcagaagaagaacggcctgagcctgggcttccccttcagcagacccttctgggccccccaggcccacggcaagggcgaggccagcggcagcagcagacaggccggcgacgagaaggagtggagaggcgcctgcaccggcgccgtggaggtgggccagagagtgcagaccagcagcgtggccgccctgggcaacgtgaagcccttcagaaccagagccggcagagtgcagtggggcgtgccccagtgcgcccaggaggccgcctgcggcagaagcagcggccccgccaaggacagcggccagcccgccgagcccgacagaacccccgacgccgccccccccgaccccagccccaccgagccccaggagtacagagtgcccgagaagcccaacgaggaggagaagggcgcccccgagagcggcgaggagggcctggcccccgacagcgaggtgggcagaaagagctacagatgcgagcagtgcggcaagggcttcagctggcacagccacctggtgacccacagaagaacccacaccggcgagaagccctacgcctgcaccgactgcggcaagagattcggcagaagcagccacctgatccagcaccagatcatccacaccggcgagaagccctacacctgccccgcctgcagaaagagcttcagccaccacagcaccctgatccagcaccagagaatccacaccggcgagaagccctacgtgtgcgacagatgcgccaagagattcaccagaagaagcgacctggtgacccaccagggcacccacaccggcgccaagccccacaagtgccccatctgcgccaagtgcttcacccagagcagcgccctggtgacccaccagagaacccacaccggcgtgaagccctacccctgccccgagtgcggcaagtgcttcagccagagaagcaacctgatcgcccacaacagaacccacaccggcgagaagccctaccactgcctggactgcggcaagagcttcagccacagcagccacctgaccgcccaccagagaacccacagaggcgtgagaccctacgcctgccccctgtgcggcaagagcttcagcagaagaagcaacctgcacagacacgagaagatccacaccaccggccccaaggccctggccatgctgatgctgggcgccgccgccgccggcgccctggccacccccccccccgcccccacctag

SEQ ID NO: 273785 - protein, 69 aa, Artificial Sequence
  derived and/or modified sequence
MLDHKDLEAEIHPLKNEERKSQENLGNPSKNEDNVKSAPPQSRLSRCRAAAFFLSLFLCLFVVFVVSFV

SEQ ID NO: 273786 - DNA, 210 bp, Artificial Sequence
  derived and/or modified sequence
atgctggaccacaaggacctggaggccgagatccaccccctgaagaacgaggagagaaagagccaggagaacctgggcaaccccagcaagaacgaggacaacgtgaagagcgcccccccccagagcagactgagcagatgcagagccgccgccttcttcctgagcctgttcctgtgcctgttcgtggtgttcgtggtgagcttcgtgtag

SEQ ID NO: 273787 - DNA, 309 bp, Artificial Sequence
  derived and/or modified sequence
atgctggaccacaaggacctggaggccgagatccaccccctgaagaacgaggagagaaagagccaggagaacctgggcaaccccagcaagaacgaggacaacgtgaagagcgcccccccccagagcagactgagcagatgcagagccgccgccttcttcctgagcctgttcctgtgcctgttcgtggtgttcgtggtgagcttcgtgatcccctgccccgacagacccgccagccagagaatgtggagaatcgactacagcgccgccgtgatctacgacttcctggccgtggacgacatcaacggctag

SEQ ID NO: 273788 - DNA, 156 bp, Artificial Sequence
  derived and/or modified sequence
atgctggaccacaaggacctggaggccgagatccaccccctgaagaacgaggagagaaagagccaggagaacctgggcaaccccagcaagaacgaggacaacgtgaagagcgcccccccccagagcagactgagcagatgcagagccgccgcctag

SEQ ID NO: 273789 - DNA, 264 bp, Artificial Sequence
  derived and/or modified sequence
atgctggaccacaaggacctggaggccgagatccaccccctgaagaacgaggagagaaagagccaggagaacctgggcaaccccagcaagaacgaggacaacgtgaagagcgcccccccccagagcagactgagcagatgcagagccgccgccttcttcctgagcctgttcctgtgcctgttcgtggtgttcgtggtgagcttcgtgatcccctgccccgacagacccgccagccagagaatgtggagaatcgactacagctag

SEQ ID NO: 273790 - DNA, 210 bp, Artificial Sequence
  derived and/or modified sequence
atgctcgaccataaggacctggaggcagaaatccatcctctcaagaatgaggagcggaagagccaggaaaatctaggcaatcctagcaagaacgaggataacgtgaagtctgccccgccacagagtaggctctcccggtgcagagccgcagccttctttctgtccctgtttctctgtctgtttgtagtattcgtcgtgagcttcgtttag

SEQ ID NO: 273791 - DNA, 309 bp, Artificial Sequence
  derived and/or modified sequence
atgctcgatcataaggatctggaggctgagattcatccccttaaaaatgaggaacgcaagtctcaagagaatcttggcaatccatcgaaaaatgaagataatgtgaaaagtgcccctccccagagcaggctgagccgctgccgcgccgctgccttcttcttaagtctttttctatgtctctttgtggtattcgtcgtaagtttcgtcattccttgtcccgataggccagccagtcagcgcatgtggagaatcgattacagtgcagccgtgatttacgacttcctcgctgttgatgacatcaatgggtag

SEQ ID NO: 273792 - DNA, 156 bp, Artificial Sequence
  derived and/or modified sequence
atgctcgaccacaaagacttggaggctgagattcatcctctgaagaatgaagagagaaaatcccaagaaaatctcgggaatccctcaaaaaatgaggataacgtcaaaagtgccccaccacaatcaagactgtctcggtgtagagccgctgcctag

SEQ ID NO: 273793 - DNA, 264 bp, Artificial Sequence
  derived and/or modified sequence
atgctggatcacaaggacctggaggcggagattcacccgctaaagaacgaagagcgcaagtcacaagagaatctggggaatccctccaagaacgaggataatgtgaagagcgcaccccctcagagccggctaagcagatgtcgcgctgccgctttcttcctgtcactgtttctctgcttgttcgtggtgttcgtggtgtccttcgttatcccttgcccagatagacctgctagtcagagaatgtggcgcatagactatagctag

SEQ ID NO: 273794 - DNA, 583 bp, Artificial Sequence
  derived and/or modified sequence
atttggggacaagcatttgggcacactcgctacaagattggttagtgattatggatgatgaagtctgtcggaaaattcagatcttgattgtccacctgggcttgcgaaggcacagattccccgtccacagctcacgaccagatgcaccagcaggagtccacatcgaggacgtcctccgggcactcccacgaccagataaggaaactgaggcacagttcagtcaaagcacatgtcctggtcacacagctagggaggtgcaagcctgcccgcccagagcccatcttcactccggctttgtgccgtgggactgctggcctcgccgacctcttgctttatcgacacagtgaccaggagttaaactttgggatgtgcccgtgatgttggaccacaaggacttagaggccgaaatccaccccttgaaaaatgaagaaagaaaatcgcaggaaaatctgggaaatccatcaaaaaatgaggataacgtgaaaagcgcgcctccacagtcccggctctcccggtgccgagcggcggcgttttttctttcattgtttctctgcctttttgtggtgttcgtcgtctcattcgt

SEQ ID NO: 273795 - DNA, 583 bp, Artificial Sequence
  derived and/or modified sequence
ggggccagcggcgcggtcgggtgagaggccgcggcggcaggtccacctgggcttgcgaaggcacagattccccgtccacagctcacgaccagatgcaccagcaggagtccacatcgaggacgtcctccgggcactcccacgaccagataaggaaactgaggcacagttcagtcaaagcacatgtcctggtcacacagctagggaggtgcaagcctgcccgcccagagcccatcttcactccggtgaccaggagttaaactttgggatgtgcccgtgatgttggaccacaaggacttagaggccgaaatccaccccttgaaaaatgaagaaagaaaatcgcaggaaaatctgggaaatccatcaaaaaatgaggataacgtgaaaagcgcgcctccacagtcccggctctcccggtgccgagcggcggcgttttttctttcattgtttctctgcctttttgtggtgttcgtcgtctcattcgtcatcccgtgtccagaccggccggcgtcacagcgaatgtggaggatagactacagtgccgctgttatctatgactttctggctgtggatgatataaacgggg

SEQ ID NO: 273796 - DNA, 374 bp, Artificial Sequence
  derived and/or modified sequence
ggcgcggtcgggtgagaggccgcggcggcaggtccacctgggcttgcgaaggcacagattccccgtccacagctcacgaccagatgcaccagcaggagtccacatcgaggacgtcctccgggcactcccacgaccagctttgtgccgtgggactgctggcctcgccgacctcttgctttatcgacacagtgaccaggagttaaactttgggatgtgcccgtgatgttggaccacaaggacttagaggccgaaatccaccccttgaaaaatgaagaaagaaaatcgcaggaaaatctgggaaatccatcaaaaaatgaggataacgtgaaaagcgcgcctccacagtcccggctctcccggtgccgagcggcggc

SEQ ID NO: 273797 - DNA, 432 bp, Artificial Sequence
  derived and/or modified sequence
gcggtcgggtgagaggccgcggcggcaggtccacctgggcttgcgaaggcacagattccccgtccacagctcacgaccagatgcaccagcaggagtccacatcgaggacgtcctccgggcactcccacgaccaggtagtgaccaggagttaaactttgggatgtgcccgtgatgttggaccacaaggacttagaggccgaaatccaccccttgaaaaatgaagaaagaaaatcgcaggaaaatctgggaaatccatcaaaaaatgaggataacgtgaaaagcgcgcctccacagtcccggctctcccggtgccgagcggcggcgttttttctttcattgtttctctgcctttttgtggtgttcgtcgtctcattcgtcatcccgtgtccagaccggccggcgtcacagcgaatgtggaggatagactacagt

SEQ ID NO: 273798 - DNA, 210 bp, Artificial Sequence
  derived and/or modified sequence
atgctggaccacaaggacctggaggccgagatccaccccctgaagaatgaggagaggaagagccaggagaacctgggcaaccccagcaagaatgaagacaacgtgaagagcgccccaccccagagccggctgagccgctgcagagctgctgccttcttcctgagcctcttcctgtgcctgtttgtggtgtttgtggtgtcctttgtgtag

SEQ ID NO: 273799 - DNA, 309 bp, Artificial Sequence
  derived and/or modified sequence
atgctggaccacaaggacctggaggccgagatccaccccctgaagaatgaggagaggaagagccaggagaacctgggcaaccccagcaagaatgaagacaacgtgaagagcgccccaccccagagccggctgagccgctgcagagctgctgccttcttcctgagcctcttcctgtgcctgtttgtggtgtttgtggtgtcctttgtgatcccctgcccagacaggcctgccagccagaggatgtggagaattgactacagcgctgctgtgatctatgacttcctggccgtggatgacatcaatggatag

SEQ ID NO: 273800 - DNA, 156 bp, Artificial Sequence
  derived and/or modified sequence
atgctggaccacaaggacctggaggccgagatccaccccctgaagaatgaggagaggaagagccaggagaacctgggcaaccccagcaagaatgaagacaacgtgaagagcgccccaccccagagccggctgagccgctgcagagctgctgcctag

SEQ ID NO: 273801 - DNA, 264 bp, Artificial Sequence
  derived and/or modified sequence
atgctggaccacaaggacctggaggccgagatccaccccctgaagaatgaggagaggaagagccaggagaacctgggcaaccccagcaagaatgaagacaacgtgaagagcgccccaccccagagccggctgagccgctgcagagctgctgccttcttcctgagcctcttcctgtgcctgtttgtggtgtttgtggtgtcctttgtgatcccctgcccagacaggcctgccagccagaggatgtggagaattgactacagctag

SEQ ID NO: 273802 - DNA, 210 bp, Artificial Sequence
  derived and/or modified sequence
atgctggaccacaaggacctggaggccgagatccaccccctgaagaacgaagaaaggaaatcgcaggagaatctcgggaacccctcaaagaatgaggataacgtgaagtccgcgcctccacagtccagactcagtaggtgtcgggctgcggccttttttttgagtctatttttgtgtctttttgtcgtgttcgtcgtaagtttcgtatag

SEQ ID NO: 273803 - DNA, 309 bp, Artificial Sequence
  derived and/or modified sequence
atgctggaccacaaggacctggaggccgagatccaccccctgaagaacgaggagaggaaaagccaggaaaacttgggcaacccatccaagaacgaggataatgtgaagtcagcaccccctcaatccagactgtcccggtgccgggcggccgcattttttctgtctctgtttctgtgcttgtttgtcgtctttgtggtgagtttcgtgattccttgtccagatcgccccgcgtctcagaggatgtggcgcatcgactactcagcggccgtgatttacgatttcctcgctgtcgatgatattaatggctag

SEQ ID NO: 273804 - DNA, 156 bp, Artificial Sequence
  derived and/or modified sequence
atgctggaccacaaggacctggaggccgagatccaccccctgaagaatgaggaacgaaagtcccaggagaacctcggtaatccctctaaaaatgaggataacgtgaagtcagctcccccacagagccggttatcacgatgcagagctgcggcctag

SEQ ID NO: 273805 - DNA, 264 bp, Artificial Sequence
  derived and/or modified sequence
atgctggaccacaaggacctggaggccgagatccaccccctgaagaacgaggagaggaagagccaggaaaatctcggaaatcccagtaaaaatgaggataacgtgaaatccgcaccaccccagagcagattgagccgttgccgcgctgccgctttcttcctctctcttttcctgtgcctgttcgtggtcttcgtggtgtccttcgttattccttgtcctgatagacctgccagccagcgtatgtggaggattgactactcctag

SEQ ID NO: 273806 - DNA, 210 bp, Artificial Sequence
  derived and/or modified sequence
atgctggatcacaaagatctggaggctgaaatccacccactgaagaacgaagaacggaagagtcaggagaacttgggcaatcctagcaaaaatgaagataacgtcaagagcgctccccctcagtctcgtttatcccgatgtagggccgcagctttcttcctgtccttgtttttatgtctgtttgtggtgttcgtggtctccttcgtgtag

SEQ ID NO: 273807 - DNA, 309 bp, Artificial Sequence
  derived and/or modified sequence
atgttggaccacaaggacttggaggctgaaatccatccgttgaagaacgaagagcgcaaatcccaggagaatctggggaatccatctaagaacgaagataacgttaaatcagctcctcctcagtcaaggctcagtcgctgccgcgctgcggctttttttctttctttgtttctgtgcctgtttgtagtcttcgtggtgtccttcgtcattccctgccccgacaggcccgctagtcaacgtatgtggcgaatagactacagcgctgcggtgatctatgacttcttagctgtagacgacattaatggctag

SEQ ID NO: 273808 - DNA, 156 bp, Artificial Sequence
  derived and/or modified sequence
atgctcgatcataaagatctcgaggctgaaattcacccactgaaaaacgaagaaagaaagtcgcaggagaacctgggtaacccctctaagaacgaagataacgtgaagtccgcccctccccagagcaggctgtctcgatgtcgggcagctgcttag

SEQ ID NO: 273809 - DNA, 264 bp, Artificial Sequence
  derived and/or modified sequence
atgctcgaccacaaggatctcgaggccgagatccatccgctgaagaacgaagaacgcaaaagccaagaaaacttgggcaatccatccaaaaatgaggacaatgtgaaaagtgcccctccccagagccggctcagtcgctgtcgcgcagccgcatttttcttgtccttgttcttatgcttgtttgtcgtatttgtggtgtcattcgtgattccttgtcccgaccggcctgcctctcaacggatgtggaggattgattatagctag

SEQ ID NO: 273810 - protein, 524 aa, Artificial Sequence
  derived and/or modified sequence
MHSLDEPLDLKLSITKLRAAREKRERTLGVVRPRALHRELGLVDDSPTPGSPGSPPSGFLLNSKFPEKVEGRFSAAPLVDLSLSPPSGLDSPNGSSSLSPERQGNGDLPPVPSASDFQPLRYLDGVPSSFQFFLPLGSGGALHLPASSFLTPPKDKCLSPDLPLPKQLVCRWAKCNQLFELLQDLVDHVNDYHVKPEKDAGYCCHWEGCARHGRGFNARYKMLIHIRTHTNEKPHRCPTCSKSFSRLENLKIHNRSHTGEKPYVCPYEGCNKRYSNSSDRFKHTRTHYVDKPYYCKMPGCHKRYTDPSSLRKHIKAHGHFVSHEQQELLQLRPPPKPPLPAPDGGPYVSGAQIIIPNPAALFGGPGLPGLPLPLAPGPLDLSALACGNGGGSGGGGGMGPGLPGPVLPLNLAKNPLLPSPFGAGGLGLPVVSLLAGAAGGKAEGEKGRGSVPTRALGMEGHKTPLERTESSCSRPSPDGLPLLPGTVLDLSTGVNSAASSPEALAPGWVVIPPGSVLLKPAVVN

SEQ ID NO: 273811 - DNA, 3705 bp, Artificial Sequence
  derived and/or modified sequence
tgaagaccagctgggagcccactgcctgctgccacctccaactccggccccctcaccatgcactccctggacgagccgctcgacctgaagctgagtatcaccaagctccgggcggcaagagagaagcgggagaggacgctgggtgtggtccggccccgtgctctgcacagggagctgggcctggtggatgacagccccacacctggctctccaggctccccgccctcaggcttcctgctgaactccaagttccccgagaaggtggagggacgcttttcagcagcccctctcgtggacctcagcctgtcaccaccatctgggctggactcccccaatggcagcagctcgctgtcccccgagcgccagggcaacggggacctgcctccagtgcccagtgcctcggacttccagccactgcgctatttggatggtgtccccagctccttccagttcttcctgcccctcggctccgggggggccctgcacctgcctgcctcctccttccttacccctcccaaggacaagtgcctctcgccagacctgcccctgcccaagcagctggtgtgtcgctgggccaagtgtaaccagctctttgagctcctgcaagacctggtggaccatgtcaacgattaccatgtcaagcccgagaaggatgcggggtactgctgccactgggagggctgcgcccgccatggccgaggtttcaacgccaggtacaagatgctcatccacatccgcacacacaccaacgagaagccacaccgctgtccgacctgcagcaagagcttctcccgcctggagaacctgaagatccacaaccggtcgcacacaggtgagaagccctacgtctgcccctacgagggctgcaacaagcgctattccaactccagtgaccgctttaagcacacgcgcacccactatgtggacaagccctactactgcaagatgcccggctgccacaagcgctacacggaccccagctcactgcgcaagcacatcaaggcccatggccactttgtgtcccacgagcagcaagagctcctgcagctgcgcccaccccccaagccgccactgcccgcccccgacggcggcccctatgtcagtggggcccagatcatcatccccaacccagctgccctctttggaggccctggcctgcccggcttacccctacccctggcccccggcccccttgacctcagtgccctggcctgtggcaacggtgggggcagtgggggtggggggggcatgggccctgggctgccaggccccgtcctgcctctcaatctggccaagaacccgctgctgccctcgccctttggggctggcggactgggcttgcctgtggtctccctccttgctggcgcagctggtggcaaggccgagggggagaaggggcgtgggtcggtgcccaccagggccctgggcatggagggccacaagacgccccttgaaaggacggagagcagctgctcccggccaagccccgatggactccccctgctgccaggcaccgtgctggacctgtccacgggcgtcaactcagctgccagcagcccagaggcgttggcccctggctgggtggtcatcccgccgggctcggtgctgctcaaaccggctgtggtgaactgagcccatcctgcggacagttgtggtgcccccccggcagctcccggcactgcccccgacgaacggaaactcttctgtgaaatagcaataatgtcctactgcccgggcagccccagcccagcccgccgggagcaaggatggtgctaggtcattcatggctggcctcccagcccccgggtggggacctggcctgtcatgcagggagagctgtgctcctgggtgctgaagcctcgctcctgtctgtcccccaccacctggccctcagcttctgagaggctttcccctgcccgacctcctcccgtttccctctcccaccctggcacctccctcacctagtgaccacccatggcaagttgccctctcccagcagagggggtgggtggggtggcatctgccctccctgctagcaccaggctcccccttcctgagaggagcccccagggaccagaggcctgcccttccctcctaggcttacccagcccctgccctgggggctccttggacccctttccctctgaccctgcctccagagggaaagcaagacagatgcaggcccctgcaaagccccaggtagaagcatgccccccaggacaaggcgcctcccactagttaggaggaggcccgctctgcagccgccgtcctcaccccaggccaggcctgcagtaccagacgggatagctggccactccacccctgcaccccagggtctcctccctctaccttttggggcaccctgggagcgtgggaagcaggtccgagggcccctgagctggcaaggggaggtgccaggccagctgtggtgccaagatactgagtgacctgggccctggctcagggagcatgtggggccaggcccagcgccccgtcttcctccttctacccccgctgggcctggcctgggcagcgccccctgcagaggcctttgggtccttggtcctgtaacaggaagggggaggctggctggggacgaccgaccacaggctgggacacagctcctggtctgggggctccaagtgacagcatgcaggggagggggctcccagtcagtgctgtgttgggagctttctggaggctgtggactgaaggccttgagggaagcagtggctggaggagggtgctggacccatgacacgttgcttcctctggcttttccctgctgggccgctttctcagaggcacttccccacccctaacacccagtgggcccccccaggttctgtgccactcagagggaccctggcaggggccagaaccacttaagggtggtgctggagggccttgtgccccagtcccatcccaggacgccctgagggatggacgcagccatgcaccccccatctggggcctctccctgctccctctcccacctggcagctgggagttctggcttctaggcctgccctgtcaccaggcctctgagtggccaggcccttccacctccccatctgtaaaacgaggcagctgcccggacagccttggggtccttagtggccctgcaggtcctctggcagctctgctgaccccaccctctcccggactgcccttctgtcccagaggggtcaccctgacccggcccaccttgccactgggctttggactccagccctgacagggcccagccacactggctctgcccctcgaaggggctatgagcaaggtaggagggagctggtctcctttcttcgggccccacccaggccctgagcaccccccacccctgtgagggccccaggccttaagtccctggcggggtcatgggtttgcgacttgagcagagcggaggaacagggcactggaaggccgacgagctcagcatgcgactcggtgacggaccaggctcggcagggccggtgtactttttgtggttgtcattggtgtgttgttgcacattccaggacgtcagtattttaacaggttctaagtgcctttctatcgtagcttatgttttcctcctcttggctccattgctgttagcatagagttttaaaaaaagagataagctaatgactataacaatatattcctccatgggagaggaagtttataaagaaacaataaaagtgagttgcaaagatg

SEQ ID NO: 273812 - DNA, 1575 bp, Artificial Sequence
  derived and/or modified sequence
atgcattctttagacgagcccctggacctaaagttaagcattacaaagcttcgtgccgccagggagaaaagggaacgcacattgggggtagtgcgcccgagggcactgcaccgggaactcggcctggttgacgacagccctaccccaggaagccccggttcccccccaagtggttttctgctaaattcaaaattccccgagaaggtcgagggaagattctcagctgcccctctggtggatctttctcttagcccaccctcaggcctcgattccccaaatggtagcagctcactcagccctgagcgccagggaaatggggacctacccccggtgccctccgcctcggacttccagccactgcgatatctggacggagtgccttcctccttccagttctttctcccactgggctctggcggtgctttacatctccccgcatctagcttccttacaccacctaaggacaagtgcctaagccccgatctgcctcttcctaagcagctcgtgtgccgttgggctaaatgcaaccagctcttcgaattgctgcaagatctcgtggatcacgtgaatgattatcacgtgaagcctgaaaaagatgccgggtattgctgccactgggaaggctgcgcacgccacggccgcggctttaatgctagatataaaatgctcattcatatcagaacacacacaaacgaaaaaccacatcggtgccccacgtgttccaaatccttcagccgcctcgaaaatctaaagattcacaaccggagccacactggcgaaaagccctacgtatgcccgtacgaaggttgcaacaagagatatagtaattcgtcggaccggttcaagcataccaggacacactatgttgataagccatattactgcaagatgccggggtgccacaagcggtataccgatccgagctccctgcgcaaacatattaaggcccatggccacttcgtatcccacgaacagcaagagctgttgcagctacgccctccacctaagcccccactccccgcaccagatgggggcccctatgtgtcaggagcgcagatcataatacctaatccagccgcgttgtttgggggccctggcctgcccggactacccctgcctctagctcccggaccgctggatctcagcgccttagcatgtggcaatggcgggggctcaggtggaggcggagggatgggaccgggactgcctgggcctgtattacctttaaatctggccaaaaatccccttctgccttctccattcggcgccgggggtctaggtctcccggtcgtcagcttgttagcgggtgccgctggcggcaaagcagagggagagaagggcagaggcagcgtgcccacacgcgctctcggaatggaaggccacaaaacacccctggagcgcacggaatccagttgctctagacccagtcccgacggactgcctttgcttcccgggactgtgctggacttgtctacaggagtcaactccgcagcctcatctcctgaggcactggctcctggatgggtggtgattccccccggatccgtgttgctgaagcctgcagtggtgaattag

SEQ ID NO: 273813 - DNA, 1575 bp, Artificial Sequence
  derived and/or modified sequence
atgcacagccttgacgagccgttggaccttaagctgtccatcacaaaactacgggccgccagggagaagagggagcgcactctgggagtcgtacggccaagggccctccatcgggagctcggcctggtcgacgattctccgacacctggttcccccggttctcctccttcaggtttccttttaaatagtaagtttcctgagaaggtcgaaggaaggttcagcgctgcacctctggtcgatctctctctatccccccccagcgggttggattcacctaatggctcgtcctccttgtccccagagagacagggcaacggagatctcccccctgttccttctgcgtctgacttccaacccttgagatacctcgacggggttccgtcgtcatttcagttttttttgccattgggctcaggcggcgcacttcatctgcctgcgtcctcatttctgacccctcctaaggataagtgtctcagtcctgatctgccgttgcccaagcagttagtatgtaggtgggctaaatgcaatcagctgttcgaactcctacaagatctggtagatcatgtgaacgactaccatgtgaaacctgaaaaggatgcagggtactgctgccattgggaaggatgtgcaaggcacggacggggctttaatgcccgatacaagatgctgatacacattcgcacccatacaaatgagaagccacaccggtgtcctacttgctccaaaagcttcagcagactggaaaatctcaagatccacaatcggtcccacactggagagaagccctatgtgtgtccatatgagggttgcaacaagcggtatagcaatagctcggacaggtttaagcatactcgaacccactacgtcgataaaccatactattgcaaaatgcctgggtgccataaacggtatactgacccctcttccctgcgaaagcatataaaagctcacggacacttcgtttctcacgagcagcaggagctccttcagctccggccgccccctaaaccacctctgcctgcccctgatggagggccttatgtgagcggagctcagataatcatccctaacccagcggctctgttcgggggccccggcctgccaggtctgcctctccccttggcaccaggtcccctggacttgagcgcattagcttgcggcaatggaggaggatcgggtggaggaggcggcatgggtcccggtctaccagggccagttttgcccctgaatctggctaagaacccactgttgccaagtccgttcggtgcaggcggtctggggcttcccgtcgtaagtctgctggcgggtgccgcaggtggcaaggccgagggtgaaaagggacgagggtccgtgcctaccagagctctgggaatggaggggcacaagacacctctggaacgtactgaaagtagctgctcccgacccagccccgacggcctgccactgctgccggggaccgtactggacctatcaacaggagtgaactcagcggcgagctcacctgaggccttagcacccgggtgggttgtgatcccccccggatctgtcttgctgaagcccgccgtggtgaattag

SEQ ID NO: 273814 - DNA, 4469 bp, Artificial Sequence
  derived and/or modified sequence
agatgcctcacctctaggggatgctgattctgggatgcctttttcgtctcctaggctcctcaaggccaactgcgctgggaagagggggtgtccaacagcaggagggctgtttttttgaactacaatttgccagcatacagcagagcagcaagaagataacagggcggggggcacgggattagcccaaacaaaacacactcaagaacgcgagtctgtggttcaacacgaggcagaaaacagctgggccgggtgcggggcttctccctcgcgtgtatccgctcactgcactcgctgccctggccgcgggcgccgcgcagggtgctgatgtccaggagggatctagacctcccgcggcgctcgggctagtggacgcaggtggtcccaaatgctgggaccaagctaggaaccaagcggaagctcggattgctcggcatcgggcctcgtcgttattctaccgtgagggaaactgagaccgagggcacggcagggagtcgcccgccgtctcaccagcgtgaggggttgcgccgggccccgaaaactggtttgcgccgcccggcatcgggatccgggacctctgcccgccgggcgctgcctgcgcgttcctggaactgggctgggcggagaaatcagggcccgcagagaggcattcctgccgccttccccgccgcccggggccgcaggggggcctggccaaggcttccagcacagaggagcttcggggaggctggattgcgcctgtgtctaaaaataaacaggttcctgcgtgaagaccagctgggagcccactgcctgctgccacctccaactccggccccctcaccatgcactccctggacgagccgctcgacctgaagctgagtatcaccaagctccgggcggcaagagagaagcgggagaggacgctgggtgtggtccggccccgtgctctgcacagggagctgggcctggtggatgacagccccacacctggctctccaggctccccgccctcaggcttcctgctgaactccaagttccccgagaaggtggagggacgcttttcagcagcccctctcgtggacctcagcctgtcaccaccatctgggctggactcccccaatggcagcagctcgctgtcccccgagcgccagggcaacggggacctgcctccagtgcccagtgcctcggacttccagccactgcgctatttggatggtgtccccagctccttccagttcttcctgcccctcggctccgggggggccctgcacctgcctgcctcctccttccttacccctcccaaggacaagtgcctctcgccagacctgcccctgcccaagcagctggtgtgtcgctgggccaagtgtaaccagctctttgagctcctgcaagacctggtggaccatgtcaacgattaccatgtcaagcccgagaaggatgcggggtactgctgccactgggagggctgcgcccgccatggccgaggtttcaacgccaggtacaagatgctcatccacatccgcacacacaccaacgagaagccacaccgctgtccgacctgcagcaagagcttctcccgcctggagaacctgaagatccacaaccggtcgcacacaggtgagaagccctacgtctgcccctacgagggctgcaacaagcgctattccaactccagtgaccgctttaagcacacgcgcacccactatgtggacaagccctactactgcaagatgcccggctgccacaagcgctacacggaccccagctcactgcgcaagcacatcaaggcccatggccactttgtgtcccacgagcagcaagagctcctgcagctgcgcccaccccccaagccgccactgcccgcccccgacggcggcccctatgtcagtggggcccagatcatcatccccaacccagctgccctctttggaggccctggcctgcccggcttacccctacccctggcccccggcccccttgacctcagtgccctggcctgtggcaacggtgggggcagtgggggtggggggggcatgggccctgggctgccaggccccgtcctgcctctcaatctggccaagaacccgctgctgccctcgccctttggggctggcggactgggcttgcctgtggtctccctccttgctggcgcagctggtggcaaggccgagggggagaaggggcgtgggtcggtgcccaccagggccctgggcatggagggccacaagacgccccttgaaaggacggagagcagctgctcccggccaagccccgatggactccccctgctgccaggcaccgtgctggacctgtccacgggcgtcaactcagctgccagcagcccagaggcgttggcccctggctgggtggtcatcccgccgggctcggtgctgctcaaaccggctgtggtgaactgagcccatcctgcggacagttgtggtgcccccccggcagctcccggcactgcccccgacgaacggaaactcttctgtgaaatagcaataatgtcctactgcccgggcagccccagcccagcccgccgggagcaaggatggtgctaggtcattcatggctggcctcccagcccccgggtggggacctggcctgtcatgcagggagagctgtgctcctgggtgctgaagcctcgctcctgtctgtcccccaccacctggccctcagcttctgagaggctttcccctgcccgacctcctcccgtttccctctcccaccctggcacctccctcacctagtgaccacccatggcaagttgccctctcccagcagagggggtgggtggggtggcatctgccctccctgctagcaccaggctcccccttcctgagaggagcccccagggaccagaggcctgcccttccctcctaggcttacccagcccctgccctgggggctccttggacccctttccctctgaccctgcctccagagggaaagcaagacagatgcaggcccctgcaaagccccaggtagaagcatgccccccaggacaaggcgcctcccactagttaggaggaggcccgctctgcagccgccgtcctcaccccaggccaggcctgcagtaccagacgggatagctggccactccacccctgcaccccagggtctcctccctctaccttttggggcaccctgggagcgtgggaagcaggtccgagggcccctgagctggcaaggggaggtgccaggccagctgtggtgccaagatactgagtgacctgggccctggctcagggagcatgtggggccaggcccagcgccccgtcttcctccttctacccccgctgggcctggcctgggcagcgccccctgcagaggcctttgggtccttggtcctgtaacaggaagggggaggctggctggggacgaccgaccacaggctgggacacagctcctggtctgggggctccaagtgacagcatgcaggggagggggctcccagtcagtgctgtgttgggagctttctggaggctgtggactgaaggccttgagggaagcagtggctggaggagggtgctggacccatgacacgttgcttcctctggcttttccctgctgggccgctttctcagaggcacttccccacccctaacacccagtgggcccccccaggttctgtgccactcagagggaccctggcaggggccagaaccacttaagggtggtgctggagggccttgtgccccagtcccatcccaggacgccctgagggatggacgcagccatgcaccccccatctggggcctctccctgctccctctcccacctggcagctgggagttctggcttctaggcctgccctgtcaccaggcctctgagtggccaggcccttccacctccccatctgtaaaacgaggcagctgcccggacagccttggggtccttagtggccctgcaggtcctctggcagctctgctgaccccaccctctcccggactgcccttctgtcccagaggggtcaccctgacccggcccaccttgccactgggctttggactccagccctgacagggcccagccacactggctctgcccctcgaaggggctatgagcaaggtaggagggagctggtctcctttcttcgggccccacccaggccctgagcaccccccacccctgtgagggccccaggccttaagtccctggcggggtcatgggtttgcgacttgagcagagcggaggaacagggcactggaaggccgacgagctcagcatgcgactcggtgacggaccaggctcggcagggccggtgtactttttgtggttgtcattggtgtgttgttgcacattccaggacgtcagtattttaacaggttctaagtgcctttctatcgtagcttatgttttcctcctcttggctccattgctgttagcatagagttttaaaaaaagagataagctaatgactataacaatatattcctccatgggagaggaagtttataaagaaacaataaaagtgagttgcaaagatg

SEQ ID NO: 273815 - DNA, 1575 bp, Artificial Sequence
  derived and/or modified sequence
atgcacagcctggatgagcccctggacctgaagctgagcatcaccaagctgcgggccgcccgggagaagcgggagaggaccctgggcgtggtgcggccccgggccctgcaccgggagctgggcctggtggatgacagccccaccccaggcagccctggcagccccccatctggcttcctgctgaacagcaagtttcctgagaaggtggagggccgcttctctgctgcccccctggtggacctgagcctgagccccccatctggcctggacagccccaacggcagcagcagcctgagccctgagcggcagggcaatggagacctgccccctgtgcccagcgccagtgacttccagcccctgcgctacctggatggagtgcccagcagcttccagttcttcctgcccctgggcagcggcggggccctgcacctgcctgccagcagcttcctgaccccacccaaggacaagtgcctgagcccagacctgcccctgcccaagcagctggtgtgccgctgggccaagtgcaaccagctgtttgagctgctgcaggacctggtggaccacgtgaatgactaccacgtgaagccagagaaggatgctggctactgctgccactgggagggctgtgcccggcacggccggggcttcaatgcccgctacaagatgctgatccacatccgcacccacaccaatgagaagccccaccgctgccccacctgcagcaagagcttcagccggctggagaacctgaagatccacaacagaagccacactggagagaagccctacgtgtgcccctatgagggctgcaacaagcgctacagcaacagcagtgaccgcttcaagcacaccaggacccactacgtggacaagccctactactgcaagatgcctggctgccacaagcgctacacagaccccagcagcctgaggaagcacatcaaggcccacggccactttgtgtcccatgagcagcaggagctgctgcagctgcggcccccacccaagccacccctgcctgccccagatggcggcccctacgtgtctggggcccagatcatcatccccaacccagctgccctgtttggaggccctggcctgcccggcctgcccctgcccctggcccctggccccctggacctgagcgccctggcctgtggaaatggaggcggcagcggcggcggcggcggcatgggccctggcctgcccggccctgtgctgcccctgaacctggccaagaaccccctgctgcccagcccctttggagctgggggcctgggcctgcctgtggtgtccctgctggccggggccgccggcggcaaggccgagggggagaagggccggggctctgtgcccacccgggccctgggcatggagggccacaagacccccctggagaggacagagagcagctgcagccggcccagcccagatggcctgcccctgctgcccggcaccgtgctggacctgagcactggagtgaacagcgctgccagcagccctgaggccctggcccctggctgggtggtgatccccccaggctctgtgctgctgaagccagctgtggtgaactag

SEQ ID NO: 273816 - DNA, 1575 bp, Artificial Sequence
  derived and/or modified sequence
atgcacagcctggacgagcccctggacctgaagctgagcatcaccaagctgagagctgcccgtgagaaaagagaacgcaccctgggagtcgtgcgcccacgggctctgcacagggaacttgggctggtggatgatagccccaccccggggtccccgggatcaccaccgagtggttttctcttgaatagcaagttcccagagaaagtggagggccggttttctgcagcccccttagtggaccttagcctgtccccaccttccggcctcgactcccccaatggctctagcagcctctcacccgagaggcaagggaatggagaccttccccccgttccatccgccagtgattttcagcccctgcgttaccttgatggcgttccgagctcttttcagttttttttgccattgggaagcggaggcgccctgcatctcccagcctctagttttttaaccccccctaaagacaagtgcttgtcccccgacctgcctctgcctaaacaacttgtctgtcgttgggcaaaatgcaaccagcttttcgagctactgcaggatctagtggaccacgtaaacgactatcatgtgaagcccgagaaggacgcaggatattgttgtcattgggaagggtgtgcccgccatggacgtggattcaacgcaaggtataagatgctgattcacattcgtacccacaccaatgaaaagccacaccgctgtccgacatgttctaagtcattcagtaggctcgaaaacctcaaaatccacaatcggagtcacacgggtgagaaaccttacgtgtgtccctacgagggatgcaataaacgctactctaatagttccgaccgatttaaacataccagaactcattatgtggataagccttactactgcaaaatgccgggatgccataaaaggtatacggatccaagtagcctgcgcaaacacatcaaggcccatggtcacttcgtgagtcacgagcagcaagaactgctacagctccgccccccaccaaaacctcctctgccagcaccggatggaggtccctatgttagcggggcccagataatcatacccaatccggcggccctctttggcggccccggtttgcccggtctgcccctgccccttgcacccgggccactggatctgtccgccctagcttgtggaaacggaggaggaagcggcgggggaggcgggatgggaccgggcttgcccggtcctgtgttacctctgaatcttgccaagaatcctttgctgccttcaccatttggagcaggcggcctggggctccccgtagtttcactcttagctggcgccgctggcgggaaagccgaaggagaaaaaggacggggttcagtgcccacgagggcactgggaatggaggggcataagactcctttggaacgcaccgagagctcatgttcccggccctccccagacgggctcccactgctccccggcacggtccttgatttaagcactggcgttaactcagcagccagctctccggaagcactggctcctgggtgggtggtgattccacccggtagtgtccttctgaagcctgcggtggtgaactag

SEQ ID NO: 273817 - DNA, 1575 bp, Artificial Sequence
  derived and/or modified sequence
atgcacagcctggacgagcccctggacctgaagctgagcatcaccaaacttcgagccgccagagaaaagagggagcgtactcttggagttgtccggccgagggccttgcatagggaacttgggctggtggacgactctccaacccccggctcaccagggtctccgccttccggttttttacttaactctaaatttcccgaaaaggtagaaggtcgctttagcgcagctcctctggtggatctgtctttgtcgccaccaagcgggctggactcacccaacggtagctcgagtcttagtccggagcgccaaggcaacggcgatcttcctcccgtgccttcagcatcagattttcagcctctgcggtatctggacggcgtgccctctagttttcagttctttctgcccctaggcagtggaggtgctctgcaccttcctgcgtcttcctttctcacacctcctaaggacaaatgcctttcccctgacctgccgcttccgaaacagcttgtatgccgttgggccaagtgcaaccagctgttcgaacttttgcaagatttggtagaccacgtgaacgactaccacgtcaaacccgaaaaagatgccggatactgttgtcactgggaaggctgcgcccgtcatgggaggggttttaatgccaggtacaaaatgctgatccatatcaggacccatacaaacgaaaagccgcacagatgcccaacgtgcagtaagtctttcagcaggcttgaaaacctgaagatacacaacagaagccatactggcgagaaaccgtatgtgtgcccatacgagggttgcaacaagaggtacagtaactcttcagatcggttcaagcacacgcggacccactatgtggataagccgtattattgcaaaatgcccgggtgtcacaaacggtacaccgatcccagttctttgcgaaaacacattaaggctcacggacacttcgttagtcacgagcagcaggagttgctgcaactgaggccacccccaaaaccccctcttcctgcaccagatgggggtccatatgtctctggggctcagattataatccccaacccagctgctttgttcgggggtccaggtctgcctggtctgcctcttccccttgcacccgggcccctggatttaagcgccctggcctgcggcaacggcggcggctctggcggtggcgggggtatggggcctggtctaccgggcccagttctgcctctgaacctggcaaagaatcctcttttaccctctccatttggagccggcgggttaggattaccagtggttagcctgctggcaggagccgccggaggtaaagctgagggagagaaggggcggggcagtgtgcctacacgtgcccttgggatggaaggacacaaaacgccactggaaaggactgagagctcgtgtagcagaccctcacctgatggtctgcccctgctgcctggaactgtgctcgatctgagtaccggggtgaattcggctgcatctagtcccgaggccttggcccctgggtgggttgtgatcccaccaggctctgtcctgttgaaacctgccgtggtgaactag

SEQ ID NO: 273818 - DNA, 1575 bp, Artificial Sequence
  derived and/or modified sequence
atgcactccctcgacgaacctctggatctcaagttaagtataaccaaacttagagccgctcgggagaaaagagagagaacccttggcgtcgttaggcctcgggctctccaccgggagcttgggctggtggacgattcacctaccccgggtagcccgggttctccacctagcgggtttctgctgaattcgaagtttcccgagaaggtcgaaggaagattcagcgcggcaccgcttgtggatctgagcctgtcacctcctagcggactggactccccaaatggttcgtcaagtctgagtcccgaaaggcagggcaacggagatcttcctcccgtgcctagcgcaagtgattttcaaccgctgagatatctagatggtgtgccatcgtcatttcaattcttccttcctctgggcagtggcggtgccctgcatctgcctgcctcttcattcctgactccacccaaagataagtgtttatcccctgacttaccgctccctaagcagctggtgtgccggtgggcgaagtgcaatcagctgttcgagttgctgcaagacctcgtggaccacgtgaacgactatcatgtcaagcccgagaaggacgcgggatattgctgccattgggaagggtgtgcccgtcatggacggggatttaatgcgagatacaagatgctgatacatattcggacacacacaaatgaaaaacctcaccgctgcccaacttgttcaaaaagttttagtcggcttgagaacctcaagatacacaatagaagccataccggagaaaaaccttacgtttgtccatatgaaggatgcaataagagatactctaactccagcgatcgcttcaagcacaccaggacacattacgtcgataaaccatattactgcaagatgccaggatgccataagaggtacactgatccttcatcgctgcggaagcacattaaggcccacggacacttcgtgagccacgagcagcaagagctgctgcaattgaggccaccccctaaaccccctttacccgctcccgatggcggtccttacgtgagcggggcacagataataattcccaaccccgctgcgcttttcgggggtccaggattacccggtctccctttacccttggctcctggcccactggacctgtctgcattagcatgtggaaatggaggtggttctgggggtggcggaggcatgggcccaggacttcccggtccagtgctccctcttaatctagccaaaaatcccctgctaccttctccttttggagccggaggcctgggacttcctgtggtatcattgctcgccggtgccgctggtggaaaggccgaaggcgagaaaggacgaggatcagtccctactcgggctcttgggatggaaggccacaagacccctctggaacgaaccgagtctagttgttcaaggccctcccccgacggactgcctctgctgccaggcactgtgctggacctgtccacaggtgtgaattctgcggctagcagccccgaagctctggccccaggatgggtggtaattcccccagggtccgtgctgctgaaacctgcggttgtgaactag

SEQ ID NO: 273819 - DNA, 1575 bp, Artificial Sequence
  derived and/or modified sequence
atgcacagcctggacgagcccttagacttgaagctgagcataaccaaactgcgggctgcacgagagaaacgggagcgcactctcggggtggtccgcccacgtgcactacatagagagttgggcctcgtggacgactccccaaccccaggctctcccggttctccaccatccggattcctgctcaacagcaaatttccggaaaaggtcgagggcagattctcggcagccccactggtagatctgagtttatctccgccatccggcctggattctcctaatggctcctcatctttaagtcccgagcgtcaaggcaacggggatctacctcccgtgccatctgcctccgacttccagcctctacgctacctggatggcgtcccaagttcgtttcaattcttcctaccgctaggctccggtggcgctctacatcttcccgcttcaagcttcctgacccctccaaaggacaagtgcctgtccccagacttacccctccctaagcaactcgtttgccgctgggctaagtgcaatcaattattcgagctgctgcaggatctggtcgaccatgtcaacgactaccacgtcaaaccggaaaaggacgctgggtactgctgccactgggagggatgcgccagacatgggagaggcttcaacgctcggtataagatgcttattcatatacgtacacacacgaatgagaagccccaccgctgccctacatgcagcaagagcttctctaggctcgagaatctgaagatccacaacaggtcacacactggagagaaaccctacgtctgcccctacgaagggtgcaataaacggtactcaaactcctctgatcgtttcaagcacactagaacacactatgtcgacaaaccatattactgcaagatgcctggttgtcacaaacggtacacggacccctcctccctccggaagcacataaaggcccacggccattttgtgtcccatgaacagcaggaactgttgcaactccggccacctccaaaaccccctctgcctgctccggatggcggaccatacgtgtccggagcacaaattatcatccccaatccagctgctctatttggaggtcccggactgcccggactgcccctcccactggcaccgggaccactagatctgtccgccctagcctgcgggaacggtggaggctctggtggtggaggcggtatggggcctggcctcccaggcccagtactgcctcttaatctggccaaaaatccacttctcccaagcccattcggcgctgggggtctgggtctgccagtcgtgagcctgctggcaggggctgctgggggaaaggccgagggagaaaagggtcgaggatcagtgcctacccgcgctttgggtatggaaggacataaaacacccctcgagcggactgagtcttcctgcagcaggccaagtccagatggccttcctctcctgcccggtacagtcctcgatctgagcactggtgtgaatagtgcagcttcctcccccgaagcgctggcgccaggttgggtggtgatacccccaggaagtgtactgttaaagcctgcggtggtgaattag

SEQ ID NO: 273820 - DNA, 1575 bp, Artificial Sequence
  derived and/or modified sequence
atgcacagcctggacgagcccctggacctgaagctgagcatcaccaagctgagagccgccagagagaagagagagagaaccctgggcgtggtgagacccagagccctgcacagagagctgggcctggtggacgacagccccacccccggcagccccggcagcccccccagcggcttcctgctgaacagcaagttccccgagaaggtggagggcagattcagcgccgcccccctggtggacctgagcctgagcccccccagcggcctggacagccccaacggcagcagcagcctgagccccgagagacagggcaacggcgacctgccccccgtgcccagcgccagcgacttccagcccctgagatacctggacggcgtgcccagcagcttccagttcttcctgcccctgggcagcggcggcgccctgcacctgcccgccagcagcttcctgaccccccccaaggacaagtgcctgagccccgacctgcccctgcccaagcagctggtgtgcagatgggccaagtgcaaccagctgttcgagctgctgcaggacctggtggaccacgtgaacgactaccacgtgaagcccgagaaggacgccggctactgctgccactgggagggctgcgccagacacggcagaggcttcaacgccagatacaagatgctgatccacatcagaacccacaccaacgagaagccccacagatgccccacctgcagcaagagcttcagcagactggagaacctgaagatccacaacagaagccacaccggcgagaagccctacgtgtgcccctacgagggctgcaacaagagatacagcaacagcagcgacagattcaagcacaccagaacccactacgtggacaagccctactactgcaagatgcccggctgccacaagagatacaccgaccccagcagcctgagaaagcacatcaaggcccacggccacttcgtgagccacgagcagcaggagctgctgcagctgagacccccccccaagccccccctgcccgcccccgacggcggcccctacgtgagcggcgcccagatcatcatccccaaccccgccgccctgttcggcggccccggcctgcccggcctgcccctgcccctggcccccggccccctggacctgagcgccctggcctgcggcaacggcggcggcagcggcggcggcggcggcatgggccccggcctgcccggccccgtgctgcccctgaacctggccaagaaccccctgctgcccagccccttcggcgccggcggcctgggcctgcccgtggtgagcctgctggccggcgccgccggcggcaaggccgagggcgagaagggcagaggcagcgtgcccaccagagccctgggcatggagggccacaagacccccctggagagaaccgagagcagctgcagcagacccagccccgacggcctgcccctgctgcccggcaccgtgctggacctgagcaccggcgtgaacagcgccgccagcagccccgaggccctggcccccggctgggtggtgatcccccccggcagcgtgctgctgaagcccgccgtggtgaactag

SEQ ID NO: 273821 - DNA, 1128 bp, Artificial Sequence
  derived and/or modified sequence
atgagcggcagccagaacaacgacaagagacagttcctgctggagagactgctggacgccgtgaagcagtgccagatcagattcggcggcagaaaggagatcgccagcgacagcgacagcagagtgacctgcctgtgcgcccagttcgaggccgtgctgcagcacggcctgaagagaagcagaggcctggccctgaccgccgccgccatcaagcaggccgccggcttcgccagcaagaccgagaccgagcccgtgttctggtactacgtgaaggaggtgctgaacaagcacgagctgcagagattctacagcctgagacacatcgccagcgacgtgggcagaggcagagcctggctgagatgcgccctgaacgagcacagcctggagagatacctgcacatgctgctggccgacagatgcagactgagcaccttctacgaggactggagcttcgtgatggacgaggagagaagcagcatgctgcccaccatggccgccggcctgaacagcatcctgttcgccatcaacatcgacaacaaggacctgaacggccagagcaagttcgcccccaccgtgagcgacctgctgaaggagagcacccagaacgtgaccagcctgctgaaggagagcacccagggcgtgagcagcctgttcagagagatcaccgccagcagcgccgtgagcatcctgatcaagcccgagcaggagaccgaccccctgcccgtggtgagcagaaacgtgagcgccgacgccaagtgcaagaaggagagaaagaagaagaagaaggtgaccaacatcatcagcttcgacgacgaggaggacgagcagaacagcggcgacgtgttcaagaagacccccggcgccggcgagagcagcgaggacaacagcgacagaagcagcgtgaacatcatgagcgccttcgagagccccttcggccccaacagcaacggcagccagagcagcaacagctggaagatcgacagcctgagcctgaacggcgagttcggctaccagaagctggacgtgaagagcatcgacgacgaggacgtggacgagaacgaggacgacgtgtacggcaacagcagcggcagaaagcacagaggccacagcgagagccccgagaagtag

SEQ ID NO: 273822 - DNA, 750 bp, Artificial Sequence
  derived and/or modified sequence
atggacgaggagagaagcagcatgctgcccaccatggccgccggccccaacagcatcctgttcgccatcaacatcgacaacaaggacctgaacggccagagcaagttcgcccccaccgtgagcgacctgctgaaggagagcacccagaacgtgaccctgctgaaggagagcacccagggcgtgagcagcgtgttcagagagatcaccgccagcagcgccatcagcatcctgatcaagcccgagcaggagaccgaccccctgcccgtggtgagcagaaacgtgagcgccgacgccaagtgcaagaaggagagaaagaagaagaagcaggtgaccaacatcatcagcttcgacgacgaggaggacgagcagaacagcggcgacatgttcaagaagacccccggcgccggcgagagcagcgaggacaacagcgaccacagcagcgtgaacatcatgagcgccttcgagagccccttcggccccaacagcaacggcagccagagcagcaacagctggaagatcgacagcctgagcctgaacagagagttcggctaccagaagctggacgtgaagagcatcgacgacgaggacgtggacgagaacgaggacgacgtgtacggcaacagcagcggcagaaagcacagaggccacagcgagagccccgagaagaacggcgcccacagcgtgacccaggccggcgtgcagtggcacgacctgagcagcctgcagcccctgccccccggcttcaagtag

SEQ ID NO: 273823 - DNA, 807 bp, Artificial Sequence
  derived and/or modified sequence
atgctgctggccgacagatgcagactgagcaccttctacgaggactggagcttcgtgatggacgaggagagaagcagcatgctgcccaccatggccgccggccccaacagcatcctgttcgccatcaacatcgacaacaaggacctgaacggccagagcaagttcgcccccaccgtgagcgacctgctgaaggagagcacccagaacgtgaccctgctgaaggagagcacccagggcgtgagcagcgtgttcagagagatcaccgccagcagcgccatcagcatcctgatcaagcccgagcaggagaccgaccccctgcccgtggtgagcagaaacgtgagcgccgacgccaagtgcaagaaggagagaaagaagaagaagcaggtgaccaacatcatcagcttcgacgacgaggaggacgagcagaacagcggcgacatgttcaagaagacccccggcgccggcgagagcagcgaggacaacagcgaccacagcagcgtgaacatcatgagcgccttcgagagccccttcggccccaacagcaacggcagccagagcagcaacagctggaagatcgacagcctgagcctgaacagagagttcggctaccagaagctggacgtgaagagcatcgacgacgaggacgtggacgagaacgaggacgacgtgtacggcaacagcagcggcagaaagcacagaggccacagcgagagccccgagaagaacggcgcccacagcgtgacccaggccggcgtgcagtggcacgacctgagcagcctgcagcccctgccccccggcttcaagtag

SEQ ID NO: 273824 - DNA, 351 bp, Artificial Sequence
  derived and/or modified sequence
atgctgctggccgacagatgcagactgagcaccttctacgaggactggagcttcgtgatggacgaggagagaagcagcatgctgcccaccatggccgccggccccaacagcatcctgttcgccatcaacatcgacaacaaggacctgaacggccagagcaagttcgcccccaccgtgagcgacctgctgaaggagagcacccagaacgtgaccctgctgaaggagagcacccagggcgtgagcagcgtgttcagagagatcaccgccagcagcgccatcagcatcctgatcaagcccgagcaggagaccgaccccctgcccgtggtgagcagaaacgtgagcgccggctag

SEQ ID NO: 273825 - DNA, 1128 bp, Artificial Sequence
  derived and/or modified sequence
atgtctggaagccagaataacgacaaaagacagttcctgctggagcgactcctggatgcagttaagcagtgccagattcgatttggcggtagaaaagagatcgcatcagatagtgacagtcgtgtaacatgtctgtgcgctcagttcgaggcggtactgcagcacggcctcaagcggtcccgcggattggcgctcactgcagctgcgataaaacaggctgcagggtttgcctccaagactgaaacagagccagtgttttggtactacgtcaaagaagtgctgaataaacacgaactgcagcgattttattccctgcgacatatagcctctgacgtggggcgaggacgggcttggctccgctgcgctctaaacgagcattcccttgagcgttatctgcacatgttgttggcagaccgctgccgtttgtctaccttttacgaggattggagcttcgtcatggatgaagagcggagctcgatgttacctacaatggctgccggcctgaacagcatcttgttcgccatcaacattgacaataaagatctgaacgggcagagtaagttcgccccgacggtgagtgaccttcttaaggaaagtactcagaatgtaacctcactgcttaaggaaagcacacaaggcgtgtcttccctgtttagagagatcacagctagcagcgctgtgagcatattgattaaaccagaacaggagaccgaccctttacctgtcgtcagcaggaatgtttctgctgacgctaaatgcaagaaggaaaggaaaaaaaaaaagaaggtcaccaatatcattagtttcgacgatgaagaggatgaacaaaattctggcgacgttttcaaaaaaaccccaggcgccggggagtcgtctgaagataactccgaccgctcttccgttaatattatgtccgcatttgagtctcccttcggaccaaattcaaatggttcacagtcaagtaattcttggaaaattgattctttgagcctgaacggagagtttggctaccagaagcttgacgtcaaaagcattgatgacgaggacgtggacgagaacgaagacgacgtttacggtaactcatccggacgaaaacaccgcgggcattcagagtccccagaaaagtag

SEQ ID NO: 273826 - DNA, 750 bp, Artificial Sequence
  derived and/or modified sequence
atggacgaggagagatcctcgatgctcccgactatggccgcgggtcccaatagcatcctgtttgcaattaatatcgataataaggacctgaacgggcagagcaaattcgccccgacagtgtcagacctgctgaaagagtccacacaaaacgtgacactgctgaaagaatcaacgcagggcgtgagcagtgtttttagagaaatcaccgctagctctgcaattagcatactgattaagcccgaacaggagaccgatccgttaccagtcgtttcccggaacgttagcgccgacgcaaagtgtaagaaggagcgcaagaagaagaaacaggtcacgaacatcatcagctttgatgacgaagaagatgagcagaatagcggtgacatgttcaagaaaaccccgggtgctggagagtctagtgaggataattccgaccactcaagcgtgaacatcatgtccgcctttgaaagcccctttggccccaattctaatggatcccagtcttcaaactcgtggaaaatcgattcccttagtcttaaccgtgaatttggctaccagaaattggatgtgaagtccatagatgacgaagatgttgacgaaaatgaggacgacgtgtatggaaattcgagcggcagaaaacaccgtggacactcagaaagtccagaaaagaacggtgctcacagcgtcacccaggccggtgtccaatggcacgatctctcaagcctccagccgctgccacccgggttcaagtag

SEQ ID NO: 273827 - DNA, 750 bp, Artificial Sequence
  derived and/or modified sequence
atggatgaagagcggtcctcaatgttacctacgatggccgctggcccaaacagcattctattcgcgatcaacattgacaataaagatctcaatggccaatctaagttcgctcccaccgtctccgacctactaaaagaaagcacgcagaacgtgaccctcttgaaggaaagcacccagggagtttccagtgttttcagagagataacagcttcttcggctattagcatcctcatcaaacccgagcaagagaccgaccccctacccgttgtttccaggaatgtctccgccgatgccaaatgcaagaaggagcgcaagaaaaagaagcaggtgaccaatattatctcttttgatgatgaagaggatgagcagaactccggagatatgttcaagaaaacccctggagccggagaatcctctgaggacaacagtgaccatagttcggttaacatcatgtccgctttcgaatccccattcggacctaattccaatggtagtcagtcttccaacagctggaagatcgacagcctcagtctcaacagagagttcggttatcagaagcttgacgtgaaatcgatcgacgacgaggatgtagacgagaatgaagacgacgtgtacggcaacagtagcgggagaaaacatcgtggacattcagagagccccgagaaaaacggggctcactcagtcactcaagccggcgtgcaatggcacgacctgagcagcctccagccacttccacccggcttcaagtag

SEQ ID NO: 273828 - DNA, 807 bp, Artificial Sequence
  derived and/or modified sequence
atgctcttagccgatcgctgcaggctaagcacattctacgaggactggtcctttgtgatggatgaagagcgcagctccatgctcccaaccatggctgcaggacctaattctatcctgttcgccattaatattgataacaaggacctcaacggacagagcaagttcgcaccaaccgtctctgacttgcttaaggaatctacacaaaacgtaacgttgctaaaggaatccacccaaggggtttcatccgttttccgcgaaatcaccgctagttcagcaatatcaattttgattaaacccgagcaggagacagatccccttcctgtggtcagcagaaacgtatcggctgacgcaaaatgcaagaaagagcgtaagaaaaagaagcaagtgaccaacataatatctttcgacgacgaggaggatgaacagaattctggggacatgttcaaaaagaccccaggagcgggcgagagctccgaagataattctgatcacagctccgtgaacattatgtcagcatttgagtcaccattcggaccaaatagtaatgggtcacagtcgagcaattcctggaagatcgattccttgagcttgaatcgcgagttcgggtatcagaaactcgatgtgaaatccatagatgatgaggacgttgacgagaatgaggacgatgtttacgggaactcctccggtagaaagcatcgcgggcattcagagtctcccgaaaaaaatggcgcccacagcgtcacacaagccggggtgcaatggcatgacttatcaagccttcaaccgctgccgcccggcttcaaatag

SEQ ID NO: 273829 - DNA, 351 bp, Artificial Sequence
  derived and/or modified sequence
atgctgctcgccgaccggtgtcgactgtcgaccttctatgaggattggagttttgtaatggacgaggaaagaagctcaatgctacccacaatggcagcggggcccaattccatcctgtttgccatcaatattgacaataaggaccttaatggacagtcgaaattcgccccaaccgtgagtgatttgttgaaggagtcaacacaaaacgtcaccctgctgaaggagtccacccaaggagtgtctagcgtgtttagagaaattacagcttctagcgccatctctattttaatcaagccagaacaggagaccgatccccttcctgtcgtaagtcgcaatgtgtccgctggatag

SEQ ID NO: 273830 - DNA, 1128 bp, Artificial Sequence
  derived and/or modified sequence
atgagcggcagccagaacaatgacaagaggcagttcctgctggagcggctgctggatgctgtgaagcagtgccagatccgctttggaggcaggaaggagatcgccagtgacagcgacagccgggtgacctgcctgtgtgcccagtttgaagctgtgctgcagcacggcctgaagaggagccggggcctggccctgacagctgctgccatcaagcaggccgccggctttgccagcaagacagaaacagagcccgtcttctggtactacgtgaaggaggtgctgaacaagcatgagctgcagcgcttctacagcctgcggcacatcgccagtgatgtgggccggggccgggcctggctgcgctgtgccctgaatgagcacagcctggagcgctacctgcacatgctgctggccgaccgctgccgcctgagcaccttctatgaggactggagctttgtgatggatgaggagaggagctccatgctgcccaccatggccgccggcctgaacagcatcctgtttgccatcaacatcgacaacaaggacctgaatggccagagcaagtttgcccccaccgtgtctgacctgctgaaggagagcacccagaatgtgaccagcctgctgaaggagagcacccagggcgtgagcagcctcttccgggagatcacagccagcagcgctgtgtccatcctgatcaagccagagcaggagacagaccccctgcctgtggtgtccagaaatgtgtctgcagatgccaagtgcaagaaggagaggaagaagaagaagaaggtgaccaacatcatcagctttgatgatgaagaagatgagcagaacagcggagatgtgttcaagaagacccctggggccggggagagcagcgaggacaacagcgacaggagctctgtgaacatcatgtctgcctttgagagccccttcggccccaacagcaatggcagccagagcagcaacagctggaagattgacagcctgagcctgaatggagaatttggctaccagaagctggatgtgaagagcattgatgatgaagatgtggatgaaaatgaagatgatgtgtatggcaacagcagcggcaggaagcaccggggccacagcgagagccctgagaagtag

SEQ ID NO: 273831 - DNA, 750 bp, Artificial Sequence
  derived and/or modified sequence
atggatgaggagaggagctccatgctgcccaccatggccgccggccccaacagcatcctgtttgccatcaacatcgacaacaaggacctgaatggccagagcaagtttgcccccaccgtgtctgacctgctgaaggagagcacccagaatgtgaccctgctgaaggagagcacccagggcgtgtcctctgtgttccgggagatcacagccagcagcgccatcagcatcctgatcaagccagagcaggagacagaccccctgcctgtggtgtccagaaatgtgtctgcagatgccaagtgcaagaaggagaggaagaagaagaagcaggtgaccaacatcatcagctttgatgatgaggaggatgagcagaacagcggggacatgttcaagaagaccccaggagctggggagagcagcgaggacaacagcgaccacagctctgtgaacatcatgtctgcctttgagagccccttcggccccaacagcaatggcagccagagcagcaacagctggaagattgacagcctgagcctgaaccgggagtttggctaccagaagctggatgtgaagagcattgatgatgaagatgtggatgaaaatgaagatgatgtgtatggcaacagcagcggcaggaagcaccggggccacagcgagagccctgagaagaatggagcccacagcgtgacccaggccggcgtgcagtggcatgacctgagcagcctgcagcccctgcccccaggcttcaagtag

SEQ ID NO: 273832 - DNA, 807 bp, Artificial Sequence
  derived and/or modified sequence
atgctgctggccgaccgctgccgcctgagcaccttctatgaggactggagctttgtgatggatgaggagaggagctccatgctgcccaccatggctgctggccccaacagcatcctgtttgccatcaacatcgacaacaaggacctgaatggccagagcaagtttgcccccaccgtgtctgacctgctgaaggagagcacccagaatgtgaccctgctgaaggagagcacccagggcgtgagcagcgtcttccgggagatcacagccagcagcgccatcagcatcctgatcaagccagagcaggagacagaccccctgcctgtggtgtccagaaatgtgtctgcagatgccaagtgcaagaaggagaggaagaagaagaagcaggtgaccaacatcatcagctttgatgatgaagaagatgagcagaacagcggggacatgttcaagaagacccctggggccggggagagcagcgaggacaacagcgaccacagctctgtgaacatcatgtctgcctttgagagccccttcggccccaacagcaatggcagccagagcagcaacagctggaagattgacagcctgagcctgaaccgggagtttggctaccagaagctggatgtgaagagcattgatgatgaagatgtggatgaaaatgaagatgatgtgtatggcaacagcagcggcaggaagcaccggggccacagcgagagccctgagaagaatggagcccacagcgtgacccaggccggcgtgcagtggcatgacctgagcagcctgcagcccctgcccccaggcttcaagtag

SEQ ID NO: 273833 - DNA, 351 bp, Artificial Sequence
  derived and/or modified sequence
atgctgctggccgaccgctgccgcctgagcaccttctatgaggactggagctttgtgatggatgaggagaggagctccatgctgcccaccatggctgctggccccaacagcatcctgtttgccatcaacatcgacaacaaggacctgaatggccagagcaagtttgcccccaccgtgtctgacctgctgaaggagagcacccagaatgtgaccctgctgaaggagagcacccagggcgtgagcagcgtcttccgggagatcacagccagcagcgccatcagcatcctgatcaagccagagcaggagacagaccccctgcctgtggtgtccagaaatgtgtctgctggatag

SEQ ID NO: 273834 - DNA, 1128 bp, Artificial Sequence
  derived and/or modified sequence
atgagcggcagccagaacaacgacaagcggcagttcctgctggagcgcctactcgacgcagtcaagcagtgccagatccgcttcggggggaggaaggagatcgcgagcgactccgattcaagggttacctgcctctgcgcccagtttgaagccgttttacagcacggactgaaaagatccagaggcctggccctgacggctgcggcaatcaagcaggccgccggctttgcgtctaaaaccgaaacggagcccgtgttctggtattacgtgaaggaagtattaaacaagcacgaattgcaaaggttctattccctgcgtcacattgcctccgatgtgggaagagggcgcgcctggctgcggtgtgccctcaacgagcattcgctggaacgctacctgcatatgctgctggcagatcggtgtcgactgagcaccttttacgaggattggtcttttgtaatggatgaggagcgtagtagcatgcttcctacaatggccgctggcctgaacagcatccttttcgctataaatattgacaataaagacctgaacggtcagtctaaattcgccccaaccgtctctgatctgctgaaagagtccactcaaaatgtgactagtctgctgaaggaatcgacccagggggtcagctccctctttcgagagattactgcaagctcagcagtgtccatcctgattaaacccgaacaggaaaccgatcccctgccggtcgtgtccagaaacgtcagcgctgatgccaagtgcaaaaaggagcgtaagaagaaaaaaaaggtgactaacattatttccttcgatgacgaagaagacgagcagaactctggagatgtgttcaagaaaactccgggtgctggagaaagtagcgaagataatagcgatcggagttctgtcaacataatgagcgcgttcgagtcgccattcggccccaactcgaacggctctcagagttctaactcctggaaaatagatagtttatcgttaaatggggagtttggatatcagaagcttgacgtgaagtccatagatgacgaggacgtagacgagaatgaagatgatgtatacggcaactccagcggtcgcaaacaccggggccactctgaaagccccgagaagtag

SEQ ID NO: 273835 - DNA, 750 bp, Artificial Sequence
  derived and/or modified sequence
atggacgaggagcggagcagcatgctgcccaccatggccgccggcccaaactccattctttttgccattaatatcgacaataaagacctcaatggccagtctaagtttgcccctaccgtttctgatctactgaaggagtccacacaaaatgtcacattattgaaggaaagcacccagggagttagctccgtgttccgcgagataaccgcgtcaagcgctatctccatcctaataaagccggagcaggaaactgatccactcccagtggtgtcccgaaatgttagcgctgatgcgaaatgcaaaaaagagcgaaaaaagaagaagcaggtcactaacatcatcagtttcgatgacgaggaggacgaacagaactccggagatatgttcaagaaaacgcccggcgctggcgaatctagcgaggacaatagtgatcattcttccgtcaatatcatgtctgccttcgaatctccattcggaccaaactcaaacggatcccagagttcgaatagctggaagatagactcactgagtctgaatcgagaattcggttatcagaaactggacgtgaagtctattgacgatgaggacgtcgacgagaacgaagacgacgtctacggcaattcttctggtagaaagcatcgggggcactccgaatctccagaaaaaaacggtgcccactccgtgactcaggctggcgtccagtggcatgacctcagctcgctgcaacctctgccaccggggtttaagtag

SEQ ID NO: 273836 - DNA, 750 bp, Artificial Sequence
  derived and/or modified sequence
atggacgaggagcggagcagcatgctgcccaccatggccgccggcccaaattctatcctgttcgcaatcaacatcgacaacaaagacttgaatggacagtccaagttcgccccaactgtcagtgatctcttgaaggaaagcacacagaatgtgactctgcttaaggagagcacccagggagtttcatcagtattcagagagattaccgcctcaagcgccatcagcatccttattaaacctgaacaggaaacagatcccctccccgtcgtgtcaaggaatgtatcagccgacgctaaatgcaaaaaagagagaaaaaagaaaaaacaggttactaacataataagctttgatgatgaggaagacgagcaaaacagtggcgacatgttcaagaagactccaggcgccggcgagtcgagtgaagataatagcgatcatagcagcgtcaacattatgtccgcattcgagtctccattcgggcctaacagtaatggatctcagtcctcaaattcatggaaaatagactccttatcactcaatcgtgaattcggttatcaaaaactggacgtaaagtccatcgatgacgaagacgtggatgaaaatgaagatgacgtctacgggaactcttcaggccgtaaacaccgcgggcactctgagagtcccgaaaaaaatggagctcacagtgtgacccaggccggcgtccaatggcatgatctgtcttcccttcagccgctccctccaggctttaaatag

SEQ ID NO: 273837 - DNA, 807 bp, Artificial Sequence
  derived and/or modified sequence
atgctgctggccgaccggtgccggctgagcaccttctacgaggactggtccttcgttatggatgaagaacgatcttccatgctgcctaccatggcagctggccctaattctatactttttgcaatcaacattgacaataaagatctcaacggccagtcaaagttcgcgcctactgtgagcgacttgctcaaggaatctacccaaaatgttaccctcttaaaggagtcaacccaaggtgtgtcttccgtgttcagagagattacggccagcagcgccatctccatcctcatcaagccggagcaggagaccgaccctctgcctgtggtgtcccgcaatgtgtctgccgacgcaaagtgcaagaaagagcggaagaagaaaaaacaggtgacgaatatcatttccttcgacgatgaggaagacgaacagaattctggcgacatgtttaaaaaaaccccgggcgccggggaatcttcagaggacaacagtgatcactcatcagtgaatattatgagcgcttttgagagcccattcgggcccaacagcaacggatcacaaagcagtaattcctggaaaattgacagcctttccctgaatcgtgaatttggatatcaaaaactagatgtgaagagcatagatgacgaggacgtcgacgaaaatgaggacgatgtgtacgggaactcctctggaaggaaacaccggggacattcagagtcccctgaaaagaacggtgctcattctgttacccaggctggggttcagtggcatgatctcagcagtctccagccccttccccccgggttcaagtag

SEQ ID NO: 273838 - DNA, 351 bp, Artificial Sequence
  derived and/or modified sequence
atgctgctggccgaccggtgccggctgagcaccttctacgaggactggtcattcgtgatggacgaggagcgaagttctatgctgccaactatggccgccgggccaaattcgatcttgttcgccatcaacatcgacaacaaagacctaaacggacagagcaagttcgcccccacggtaagtgatcttctgaaagagagtacccagaatgttacgctgctaaaggaatctacacagggagtgagctcagtgttcagagagataacggcctcctctgctatatccatcctgataaaacctgagcaagaaaccgatccacttcccgttgtatcccgtaacgtgagcgctggctag

SEQ ID NO: 273839 - DNA, 1128 bp, Artificial Sequence
  derived and/or modified sequence
atgtcaggatcccagaacaacgataagagacagttcttgttggagagattactcgacgccgtcaaacagtgccagattcgcttcgggggtcgcaaggagatcgcctccgacagtgactctcgcgtcacgtgcctgtgtgcacagtttgaagccgtgttacagcatggcttaaaacgatctagggggctcgccctgacggccgcagccattaagcaggcagctggatttgcctcaaagactgagaccgaaccggttttctggtactacgtcaaggaagtgctgaacaagcacgaactgcagcgattctattctctgagacatattgctagcgacgtggggcgtgggagagcatggctgaggtgcgcactcaatgaacattccctggaaaggtaccttcacatgttactggctgatcggtgccggctctccacattctatgaggattggagcttcgtaatggacgaggagcggtcttccatgctgcccacaatggccgcaggcctgaacagcattctttttgctatcaatattgataataaagacctgaatgggcaaagcaaatttgctccaactgtgagcgacctgttgaaggaatcaacgcagaacgttacgagtcttcttaaggaaagtacccagggcgtgtcttcactttttcgggagataactgcaagttcggctgtgtctatcttaatcaagcctgagcaggaaaccgaccctctaccagtggtgagccgtaatgtatcagccgatgccaagtgtaaaaaagagcgaaaaaagaaaaagaaagtaaccaacatcattagctttgatgatgaagaagacgaacagaactccggcgacgtgttcaagaagacgcccggagccggtgagagttcagaggataactctgaccgtagttccgtgaatattatgtccgcattcgaatctcctttcggcccaaatagtaacggctcacagtcttcaaatagctggaagattgacagcttgagcctgaatggcgagtttggataccagaagctggatgtgaagtccatcgatgatgaggatgttgatgaaaacgaggacgacgtctatggcaactcctctggcagaaagcatagggggcacagtgaatctccagagaaatag

SEQ ID NO: 273840 - DNA, 750 bp, Artificial Sequence
  derived and/or modified sequence
atggatgaggaaagatcatcaatgttacccacaatggccgcaggtccgaattctatcctttttgccattaacatcgataataaggacttaaacgggcagtctaaattcgcccctacagtgagcgacctgttgaaggaaagtactcagaacgtgacactcctgaaagagagcacccaaggcgtatcgagtgtgtttcgcgagattaccgcctcctcggccatttcgatcttgatcaaaccagaacaagagactgatccactgcctgttgtgtccagaaatgtaagcgctgacgccaagtgcaagaaggaaagaaaaaagaagaagcaggtcacgaacatcatcagtttcgacgacgaagaggatgaacaaaatagtggggacatgttcaagaagacaccaggtgcgggagaatcttctgaggacaattctgaccattccagcgtcaatatcatgagtgctttcgagtcaccattcggccctaatagcaatggatcccagtcaagtaactcctggaagattgactccctctctctgaatagagaattcggttaccagaagctcgatgttaagtcaattgatgacgaagacgtggacgagaacgaggatgacgtctatggaaattcctcaggtcgcaaacaccgaggccatagcgagtcacctgagaagaatggggcacacagtgtgacccaagccggagtacagtggcatgaccttagcagtctccaaccactgcctcccggatttaaatag

SEQ ID NO: 273841 - DNA, 750 bp, Artificial Sequence
  derived and/or modified sequence
atggatgaggaacgctcctctatgttgcctacaatggctgccggtccgaattcaattctgtttgcgataaatattgataataaggacctgaacggtcagagtaaattcgctccaacagtaagtgatcttctcaaggagagcactcagaacgttactctactaaaggagtccacccaaggtgtatctagcgtttttagggagattacagctagctcggctatatctatcctcataaagcccgaacaggaaaccgatccattaccggtggtatcaaggaacgtgtccgcggatgccaagtgcaagaaggaacggaagaaaaagaaacaggtgacgaacatcatttcatttgacgacgaggaagatgagcagaattccggggacatgttcaaaaaaacacccggtgcaggcgaatcaagtgaggacaactccgaccatagctctgtcaatattatgtcagcctttgagagccctttcggcccaaactccaacggtagccaatcgtccaattcatggaagatagactcattgtctctcaaccgagagtttggataccaaaaactggacgtcaagagcatagacgatgaggacgtggacgagaacgaggatgacgtatacggtaatagcagtggtagaaagcaccggggacattcagaatcaccagagaaaaacggtgcgcactccgtgacacaggccggagttcaatggcacgatttatccagcctgcagcccctgccccctggcttcaagtag

SEQ ID NO: 273842 - DNA, 807 bp, Artificial Sequence
  derived and/or modified sequence
atgctgctcgcagataggtgccgccttagtaccttctacgaggattggtcattcgtgatggatgaagagaggagttccatgctgcctaccatggccgcagggccaaactcaatactgttcgctatcaacattgacaataaagacctaaatggtcaatctaaattcgcccctacagtttcagacctcctgaaagaatctactcagaatgtgacactgctcaaggagtctactcagggagtgtctagcgtttttcgcgagatcaccgccagttccgccattagtatcctgatcaagcctgagcaggaaactgatccactgcccgtggtctctcgaaacgtgagtgccgacgccaaatgtaaaaaggagcgaaagaagaaaaagcaggtgacgaatatcattagcttcgacgacgaagaagacgagcagaactctggcgacatgtttaagaagactccgggtgccggagaatcgagtgaagacaattctgaccactcctccgtaaacattatgagcgcattcgaatcacccttcgggcctaacagcaacgggtcccagagcagcaatagctggaaaatcgacagcctctccttgaatagagaatttggctatcagaagctggacgtcaagtccattgacgacgaggacgtagacgagaacgaggacgacgtatacggaaattcctcagggcgtaagcatagggggcattcagaatctccggaaaagaacggcgcacattctgtcacacaggctggagtgcaatggcacgatctgtcgtctctgcagcctctcccgcctggctttaaatag

SEQ ID NO: 273843 - DNA, 351 bp, Artificial Sequence
  derived and/or modified sequence
atgctcctggcagaccgctgtcggctgagcactttttacgaagattggagcttcgtcatggacgaagagcgatcaagtatgttgccgactatggcagctggccctaattctatactctttgctatcaatattgacaacaaggatctgaacggacaatcaaagttcgcccctactgtctccgatctgcttaaggaaagtacccaaaatgtcactctcctgaaagagagtacccagggcgtttcctccgtgttccgagaaataaccgcctcaagtgccatcagtatcctgattaagccagagcaagagacagaccccctgccggtagtctcgcgtaacgtgagtgctggctag

SEQ ID NO: 273844 - DNA, 2248 bp, Artificial Sequence
  derived and/or modified sequence
ggcagccgcagaagcggcagcggcggcggcgcggcgcaggcaccggcccggggagaggcaccatgagcggatcacagaacaatgacaaaagacaatttctgctggagcgactgctggatgcagtgaaacagtgccagatccgctttggagggagaaaggagattgcctcggattccgacagcagggtcacctgtctgtgtgcccagtttgaagccgtcctgcagcatggcttgaagaggagtcgaggattggcactcacagcggcagcgatcaagcaggcagcgggctttgccagcaaaaccgaaacagagcccgtgttctggtactacgtgaaggaggtcctcaacaagcacgagctgcagcgcttctactccctgcgccacatcgcctcagacgtgggccggggtcgcgcctggctgcgctgtgccctcaacgaacactccctggagcgctacctgcacatgctcctggccgaccgctgcaggctgagcactttttatgaagactggtcttttgtgatggatgaagaaaggtccagtatgcttcctaccatggcagcaggtctgaactccatactctttgcgattaacatcgacaacaaggatttgaacgggcagagtaagtttgctcccaccgtttcagacctcttaaaggagtcaacgcagaacgtgacctccttgctgaaggagtccacgcaaggagtgagcagcctgttcagggagatcacagcctcctctgccgtctccatcctcatcaaacctgaacaggagaccgaccccttgcctgtcgtgtccaggaatgtcagtgctgatgccaaatgcaaaaaggagcggaagaagaaaaagaaagtgaccaacataatctcatttgatgatgaggaagatgagcagaactctggggacgtgtttaaaaagacacctggggcaggggagagctcagaggacaactccgaccgctcctctgtcaatatcatgtccgcctttgaaagccccttcgggcctaactccaatggaagtcagagcagcaactcatggaaaattgattccctgtctttgaacggggagtttgggtaccagaagcttgatgtgaaaagcatcgatgatgaagatgtggatgaaaacgaagatgacgtgtatggaaactcatcaggaaggaagcacaggggccactcggagtcgcccgagaagtaagtttgtgtgtaaggtggagtctcaccgtcccccaggctggagtgccgtggcgtgatctcagctcactgcaacctccacctcccgggttcaagctattctcctgcctcagcctcccgagtagctgggattacaggcacctgtcaccacacccagctaatttttgtatttttagtagagatggggtttcaccatattggccaggctggtctcaaactcctgacctcaagtgatctgcctgccttggcctcccaaattgctaggtttacaggcatgagccaccacgcccagccttcccttgcacttttaatgagggggttaagttcactgttttctctttctatggtattgggtaaaataggtctgcaagctttatatttgcccagggtatcattcattcttcaggtgttgatttaggagtgttatttggaaggagtattatttgctcttcccctgagaactgaaagaggggaaaggagtacatttgagggcacttaatacaaagttaatgtcagaatgtgtgccttgaaattcttgctttatacatacatctgtcattttcatttcacagggttcacagggtttcacagtctgatgagactgtgcctgttattgttttttatttttactctggattttccttgcatctgacttgccactagcacaggaagctcaggacgaaggcagcgttaggagaatagttgtggtatggtgacttctgtgtttatctgcaggggtgtgaatagccgtaacttgcctgcacctgctgccttaacagtggagttggccaggcgcagtggctcacacctgtaatcccagcactttgggacaccaaggtgggtggatcacctgaggtcaggagttctagaccagcctgaccaacatggtgaaaccccttctctacgtataaaaaaatacaaaattagccaggcatggtggtgcatgcctgtaactccagatacttgggatgctgaggcaggagaatcgcttgaatatgagaggcggagccaagatgatgccattgcactccagcctgggcaacaagagagaaggtccttctc

SEQ ID NO: 273845 - DNA, 1209 bp, Artificial Sequence
  derived and/or modified sequence
aagctttaaaccagcagagacctcagacaaatcatatccctcctggggtgaccaggtgcagatcttccagggagccgtctaatggaatttcctggttaatggacacagagaaccactgctaagaacgatttccttttctctttcaatctgcagtactttttatgaagactggtcttttgtgatggatgaagagaggtccagtatgcttcctaccatggcagcaggtccgaactccatactctttgcgattaacattgacaacaaggatttgaacgggcagagtaagtttgctcccaccgtttcagacctcttaaaggagtcaacgcagaatgtgaccttgctgaaggagtccacgcaaggagtgagcagcgtgttcagggagatcacagcctcctctgccatctccatcctcatcaaacctgaacaggagaccgaccccttgcccgtcgtgtccaggaatgtcagtgctgatgccaaatgcaaaaaggagcggaagaagaaaaagcaagtgaccaacattatctcatttgatgatgaggaagatgagcagaactctggggacatgtttaaaaagacacctggggcaggggagagctcagaggacaactccgaccactcctctgtcaatatcatgtccgcctttgaaagccccttcgggccaaactccaatggaagtcagagcagcaactcgtggaaaattgattccctgtctttgaacagggagtttgggtaccagaagcttgatgtgaaaagcatcgatgatgaagatgtggatgaaaacgaagatgacgtgtatggaaactcatcaggacggaagcacaggggccactcagagtcgcccgagaaaaacggagcacactctgtcacccaggctggagtgcaatggcacgatctcagctcactacaacctctgcctcccgggttcaagtgattctactgcctcagcctcctaagtagctgggattacaggcgcctgccaccacacccagctaatttttgcatttttagtagagaaagggtttcgccatgttggccaggctggtcttgaactcctgacttcaggtgatcctcctcgcctgccttgcctcccaaagtgctgggattacaggcataagccaccacgcccggccctgcctcttgagctggggagttcaagaccagcctgggcaacataatgagatttcagctctattaaaaataataataatt

SEQ ID NO: 273846 - DNA, 6046 bp, Artificial Sequence
  derived and/or modified sequence
agaagggcgctgagaagggagctggaaggaaaagaaggaaacattccttcctcaactggaggaagacacgcggccacacacagaaccagcggccccaggaccgtcaccctgcgtgcccgggcctgtccctcctgaccccaggattatagtggcgaggcagggtgttagccaagcggattgagccaggacacaacaccgcggagccctgcaggcgagtcctccggaggctgagagcaaacggctgcactaggaacccagcagtcagaccggcccccaccctggagtgaacacatcgccactgccaggcatcgcagggaggattaccccaatggcacctggctgggcgacgagaacaaccccgagatgcgggtgcactgcgccatcatcccctccgacatgctgcacatcagcaccaactgccgcacggccgaggagatggtgctcacgctgctggactacctcttccaccgcgaggtgcaggctgtgtccagcctctcggggcagggcaagcacgggaagaagcagctggacccgctcaccatctatggcatccggtgtcaccttttctataaatttggcatcacagaatctgactggtaccgaatcaagcagagcatcgactccaagtgccgcacggcgtggcggcgcaagcagtggggccagagcctggtggtcaagagcttctcgtggagaatgcccaactcatcctcctactgcccctcagagccgatgatgagcaccccacctcctgccagagagctcctgcagccacagctgcagccgcaggccctgcactacgcgctggccaacgtgcagcaggtgcagatccaccagatcggagaagacggacaggtgcaagtaatcccacagggacacctccacatcgccaaggtgccacagggggagcaagtccagatcacgcaggacagcgagagcccgtgttctggtactacgtgaaggaggtcctcaacaagcacgagctgcaagcgcttctactccctgcgccacatcgcctcagacgtgggccggggccgcacctggctgcgctgtgccctcaacgaacactccctggagcgctacctgcacatgctcctggccgaccgctgcaggctcagtactttttatgaagactggtcttttgtgatggatgaagagaggtccagtatgcttcctaccatggcagcaggtccgaactccatactctttgcgattaacattgacaacaaggatttgaacgggcagagtaagtttgctcccaccgtttcagacctcttaaaggagtcaacgcagaatgtgaccttgctgaaggagtccacgcaaggagtgagcagcgtgttcagggagatcacagcctcctctgccatctccatcctcatcaaacctgaacaggagaccgaccccttgcccgtcgtgtccaggaatgtcagtgctgatgccaaatgcaaaaaggagcggaagaagaaaaagcaagtgaccaacattatctcatttgatgatgaggaagatgagcagaactctggggacatgtttaaaaagacacctggggcaggggagagctcagaggacaactccgaccactcctctgtcaatatcatgtccgcctttgaaagccccttcgggccaaactccaatggaagtcagagcagcaactcgtggaaaattgattccctgtctttgaacagggagtttgggtaccagaagcttgatgtgaaaagcatcgatgatgaagatgtggatgaaaacgaagatgacgtgtatggaaactcatcaggacggaagcacaggggccactcagagtcgcccgagaaaaacggagcacactctgtcacccaggctggagtgcaatggcacgatctcagctcactacaacctctgcctcccgggttcaagtgattctactgcctcagcctcccgtgtagctgggattacaggcgcgcaccaacacacccgactaatttttgtatttttagtaaagacagggtttcaccatgttggccaggctggtcttgcactcctgacctcacgtgatctgccccaccttggcctcccaaagtgctgggattacagagtctcgctctgtcgcacagtctggagtgcaatggcgtgatctcggcccactaaaacctccacctcctgaatctaagcaattctcctgtctcagcctcctgagtagctgggactacaggctcacaccaccatgcccggctaatttttgtatttttagtagggacgaggttttgccatattggtcaggctggtcttgaagtcctggcctcaggtgatccaccagcctcagcctcccaaaatgctgggattacaggcatgagtcaccatgcccagcctaaacttggcaagataataaataacctttttaagtgtcgttgggcacttgtctggttgtttttctttaggttaccatgccagcaatgattccttttgagtttctgacagaagatagtggttttcatccaaataagtcaactactctaccccatccctaagccacttgtatggaaagaaaaagaggaagaagccagtactgtgactgcgtaagcttcccccagcatcacccgctatgagatgtgtggcagctgagacccgggaactgctcaagggcaccaggccccatctgtctgcactcactcaccttcctcaggtactcgcatgggcatgtcactgactttacgtgctgctgcagctccttggtgagctggccctggtcatgggacaggaactgtggggtcaggacaatagagagcttcaccatttgcagaatgagaacaggggctcatgatgagtgccaacctattagataatttaaaaaaaaagtgttgaatgagtggaaaaacaaggtgatgtttgagtctatagtggtcaagggcttcagaaaaggacagaaccaagttcaaattcctgtactttgaatttctacttcatgccatgcaaaattactttaccccttttaacctcagttttcttctgtgtgaaacaggaacaatagtttcattcgtcattcagtttctctcaaggtttcacgagatcatacctataaaacatccaagtcatttaaatgtatcatcatttctgtcataattagtgggatccatttcactattattggatatacagttctgtgcctgaaacctacaaaaaaagaaaatgttaagtctaaaaagcattagtgatttctcatttttatattactaattataaccctatttaatcacacaaggccttgtccgtggcaggtgctcaataaacacttgtcgaatcaatgcatgtgggctccggagccacactgtttagattctattctgcctccaccacttatcagctgtgtgatctgggtaagataattcacctctttatgtctgcacttccctctccataaactatatataatgagaatccttagctcattcggttgtggtgaggggtgaatgatttggcacacaggaggggcttgttaaacattagctgtgatgatctccttccaaatcttcattttcagagccacagatgaggccacagtgcaaccaggtgaccttagagtgtaagtacacatgatcgccagctatgctctgtctccaccataggtccaagactgggtagttccggcctggaggtttctgctgcatctgccttctcagtgctcacctaagggcttttgtattttcctcctcgcatccccacagatggggttcaggctgccggacacagctgggtgatgccagggcagtggtcacctgtgccagccctgtgaggtagctggaggatcattgttccttccttctcgggctctgggcagatgccagggctggggtgacccatgccctcaagtttcttgctttggtgggccacattttcccttggcaaagagggtaaaggtcacaggatgccagagagctgtgacttctctgtgccctgggcccaaactatgaagacctgacacactatgctaaaagtccaaggctgggtgctccccagagcttcttgcctcaccgcttctgctgagggaggaatgaatactatgtcctcccagagctttgggagcttgtagcaagcagcctccccagcacaaaatctcttggaaacctctaactgtgtctgaaacattagtgcaaatgttgcatcatatttcccatatgtccgcatgttttaggaaaaaaccctcaatttcctaaatatgcaagaaaaatcgatattgtaggacaatgtgactttttaaaaaatgttatttaaaaatcttccccacctccttttctgccctccaagactgccaaatacttgttgaacaaatattattaaaagcctactacgtgccagccatgattcatggtcttggggacacagcagagaacaaactgacaggattcctctcttatgcaactcacattcttatacgataatgataagggttaacattaattaagccgtcaccacgtgttagtcacggtgcagtcattcccacacattattacacttaaacctgctagcaagcttgcaaggtagttagttgtttttcctttaaaaactgagtctcggaatgatgaagcactctgtccaatgtcacacggctagtaagtgtggagaccttgcatccaatcaatgcccgtctcattctaaaggccatgttatgtgttctccagcccatggagaataattttaacacagtcaatgaaatttctacacaacaatgttcttgtttcaagtccaagaatgcctcctacacctcctataatactggctttctggtgagtaaagatggcattctcatgtgtaatcaggtggcaaatggagatatgaccaaagtaaccatctgcctacactcataaccctgtacacactcttcctgtgtcgattcaattcaagtaccccttttgatcacttagcaaatctgacctttaaaagggttaaggtttttatatccatgtaagtttctgtattgctttggaagtctctggttaaattaatactcttttaatagtgacctgtgattctgttttgatcaagtgttttcaaacttgacgtctttgatgggtttctccagtgtcaaaatcctaaatcaagtctttttggcttaaaactaactttgggattttttcagctgcatcccttggggagtctaaagaatgtatctctcatcttgtagaggtattaagtgattcgatttatttggtagattaaatgggcaggcattgtcaaatgtggcgatactgcatgggagggcactgtcaagtgaggtgacattagatctcatctcagttatatttatgggtatgttgttgatatacgtgttccaaaaattgcatacatttatacaaatttaatatgatttgtaattttgatagttatgctaaatgtttgctaaagttatatttgtataaacacgtcatgaatggctgggcaccgtcactcatgcctgtaatcccagcactttgggagacaaaggcaggtggatcacctgaggtcgggagttccagaccagcctaatagagtgaaaccctgtctccactaaaaatacaaaaattagccatgcctggtggcacatgcctgtagtctcagctactcgggaggctgagacaggagaattgcttgaacccaggaggcggaggttgcagtgagccgagatcatgccactgcactcccgcctgggtgacagaggtagaatctaactaaaaaaaaaaaaaaaagttattaattatttctgaagattgtatgaaatttataaaagtctggtggccctgatatgatgctgccagtcatgattctgattactgtcttaaaatgctgcacgtaagtaattaaatttccttgtgaactgggaagtttcatcagacttctatcataactattgtttccatcatccacagttactattttgaattcttctctaaaaatatttgtaattggcaatagtccaaattttcttttgttttctttcctgtttttgagacacagtctggctctgttgcctaagctggagtgcagtgagccgagatcatgccactgcactcccgcctgggtgacaaaggtagaatctatc

SEQ ID NO: 273847 - DNA, 1857 bp, Artificial Sequence
  derived and/or modified sequence
tcccagctactcatgagcctgaaatgggaagatcgcttgagcccaggagttcaagactgcagtgaactatgatcgtgccactgtgctctagcctgggtgacagagtgagaccttgtccccaccccacccctcaaaaacaaaacaaaacaaaaaaaaacccaaacaaggaaaaggaatgctgtttggtgcacgtgtagtagtgatattaatagttggttttcattgagcaccaattatatgccagagcccgtgttctggtactacgtgaaggaggtcctcaacaagcacgagctgcaagcgcttctactccctgcgccacatcgcctcagacgtgggccggggccgcacctggctgcgctgtgccctcaacgaacactccctggagcgctacctgcacatgctcctggccgaccgctgcaggctcagtactttttatgaagactggtcttttgtgatggatgaagagaggtccagtatgcttcctaccatggcagcaggtccgaactccatactctttgcgattaacattgacaacaaggatttgaacgggcagagtaagtttgctcccaccgtttcagacctcttaaaggagtcaacgcagaatgtgaccttgctgaaggagtccacgcaaggagtgagcagcgtgttcagggagatcacagcctcctctgccatctccatcctcatcaaacctgaacaggagaccgaccccttgcccgtcgtgtccaggaatgtcagtgctgatgccaaatgcaaaaaggagcggaagaagaaaaagcaagtgaccaacattatctcatttgatgatgaggaagatgagcagaactctggggacatgtttaaaaagacacctggggcaggggagagctcagaggacaactccgaccactcctctgtcaatatcatgtccgcctttgaaagccccttcgggccaaactccaatggaagtcagagcagcaactcgtggaaaattgattccctgtctttgaacagggagtttgggtaccagaagcttgatgtgaaaagcatcgatgatgaagatgtggatgaaaacgaagatgacgtgtatggaaactcatcaggacggaagcacaggggccactcagagtcgcccgagaaaaacggagcacactctgtcacccaggctggagtgcaatggcacgatctcagctcactacaacctctgcctcccgggttcaagtgattctactgcctcagcctcccgtgtagctgggattacaggcgcgcaccaacacacccgactaatttttgtatttttagtaaagacagggtttcaccatgttggccaggctggtcttgcactcctgacctcacgtgatctgccccaccttggcctcccaaagtgctgggattacaggtgtgaaccactgcgcccagccccaagtggctttttcaattacatgagccaacatattctcacaagtccattcgagtttggtgtctgttacttgcaaataagggagttctgattggttcccagtgaaacctcatctgtaagacctctgagccaccagtatccacggggcttgtcctataacagctcctgtgcaatccagtaaccttgaacactggaagccactgagcccttctgtgagtagatgcacacctctgaggctaagattactggtgtactcattgggaccagtttggtctcagtgactgaaaactcaacccaaacttgttcatttggaaaggaaaagtcaaccaggcacagtggctcatgcctgtagttccagcactttgggaggctgaggtggacagatcgcttgagcccaggggttcaagaccaacctgggcaacatagcaaaaccctgcctctacaaaaaaaaaaaaaaa

SEQ ID NO: 273848 - DNA, 578 bp, Artificial Sequence
  derived and/or modified sequence
tgaaaacacactttaaagcgttcatgtagattcaaggtcggagggaggtgactgcatttttcaagacaggctgcaaagcccgtgttctggtactacgtgaaggaggtcctcaacaagcacgagctgcaagcgcttctactccctgcgccacatcgcctcagacgtgggccggggccgcacctggctgcgctgtgccctcaacgaacactccctggagcgctacctgcacatgctcctggccgaccgctgcaggctcagtactttttatgaagactggtcttttgtgatggatgaagagaggtccagtatgcttcctaccatggcagcaggtccgaactccatactctttgcgattaacattgacaacaaggatttgaacgggcagagtaagtttgctcccaccgtttcagacctcttaaaggagtcaacgcagaatgtgaccttgctgaaggagtccacgcaaggagtgagcagcgtgttcagggagatcacagcctcctctgccatctccatcctcatcaaacctgaacaggagaccgaccccttgcccgtcgtgtccaggaatgtcagtgctggtg

SEQ ID NO: 273849 - DNA, 81 bp, Artificial Sequence
  derived and/or modified sequence
ttcctgatggacaagagcagcctgactggagccctgtgcagcatcaccctggccagcccctgtggcaccccaggcatctag

SEQ ID NO: 273850 - protein, 1829 aa, Artificial Sequence
  derived and/or modified sequence
MEDTPPSLSCSDCQRHFPSLPELSRHRELLHPSPNQDSEEADSIPRPYRCQQCGRGYRHPGSLVNHRRTHETGLFPCTTCGKDFSNPMALKSHMRTHAPEGRRRHRPPRPKEATPHLQGETVSTDSWGQRLGSSEGWENQTKHTEETPDCESVPDPRAASGTWEDLPTRQREGLASHPGPEDGADGWGPSTNSARAPPLPIPASSLLSNLEQYLAESVVNFTGGQEPTQSPPAEEERRYKCSQCGKTYKHAGSLTNHRQSHTLGIYPCAICFKEFSNLMALKNHSRLHAQYRPYHCPHCPRVFRLPRELLEHQQSHEGERQEPRWEEKGMPTTNGHTDESSQDQLPSAQMLNGSAELSTSGELEDSGLEEYRPFRCGDCGRTYRHAGSLINHRKSHQTGVYPCSLCSKQLFNAAALKNHVRAHHRPRQGVGENGQPSVPPAPLLLAETTHKEEEDPTTTLDHRPYKCSECGRAYRHRGSLVNHRHSHRTGEYQCSLCPRKYPNLMALRNHVRVHCKAARRSADIGAEGAPSHLKVELPPDPVEAEAAPHTDQDHVCKHEEEATDITPAADKTAAHICSICGLLFEDAESLERHGLTHGAGEKENSRTETTMSPPRAFACRDCGKSYRHSGSLINHRQTHQTGDFSCGACAKHFHTMAAMKNHLRRHSRRRSRRHRKRAGGASGGREAKLLAAESWTRELEDNEGLESPQDPSGESPHGAEGNLESDGDCLQAESEGDKCGLERDETHFQGDKESGGTGEGLERKDASLLDNLDIPGEEGGGTHFCDSLTGVDEDQKPATGQPNSSSHSANAVTGWQAGAAHTCSDCGHSFPHATGLLSHRPCHPPGIYQCSLCPKEFDSLPALRSHFQNHRPGEATSAQPFLCCLCGMIFPGRAGYRLHRRQAHSSSGMTEGSEEEGEEEGVAEAAPARSPPLQLSEAELLNQLQREVEALDSAGYGHICGCCGQTYDDLGSLERHHQSQSSGTTADKAPSPLGVAGDAMEMVVDSVLEDIVNSVSGEGGDAKSQEGAGTPLGDSLCIQGGESLLEAQPRPFRCNQCGKTYRHGGSLVNHRKIHQTGDFLCPVCSRCYPNLAAYRNHLRNHPRCKGSEPQVGPIPEAAGSSELQVGPIPEGGSNKPQHMAEEGPGQAEVEKLQEELKVEPLEEVARVKEEVWEETTVKGEEIEPRLETAEKGCQTEASSERPFSCEVCGRSYKHAGSLINHRQSHQTGHFGCQACSKGFSNLMSLKNHRRIHADPRRFRCSECGKAFRLRKQLASHQRVHMERRGGGGTRKATREDRPFRCGQCGRTYRHAGSLLNHRRSHETGQYSCPTCPKTYSNRMALKDHQRLHSENRRRRAGRSRRTAVRCALCGRSFPGRGSLERHLREHEETEREPANGQGGLDGTAASEANLTGSQGLETQLGGAEPVPHLEDGVPRPGERSQSPIRAASSEAPEPLSWGAGKAGGWPVGGGLGNHSGGWVPQFLTRSEEPEDSVHRSPCHAGDCQLNGPTLSHMDSWDNRDNSSQLQPGSHSSCSQCGKTYCQSGSLLNHNTNKTDRHYCLLCSKEFLNPVATKSHSHNHIDAQTFACPDCGKAFESHQELASHLQAHARGHSQVPAQMEEARDPKAGTGEDQVVLPGQGKAQEAPSETPRGPGESVERARGGQAVTSMAAEDKERPFRCTQCGRSYRHAGSLLNHQKAHTTGLYPCSLCPKLLPNLLSLKNHSRTHTDPKRHCCSICGKAFRTAARLEGHGRVHAPREGPFTCPHCPRHFRRRISFVQHQQQHQEEWTVAGSGRGHEGSQEEVGTQWRGKSSPKVGGGARSERREPRGF

SEQ ID NO: 273851 - DNA, 615 bp, Artificial Sequence
  derived and/or modified sequence
atgggctgggactgccggcggaccaccgtggagaaccccagccccataagaaactgcgtcaaccaggagtggcctgagggatcaagccctggcctgaccgaagggaatacagggctggtgagagacctgcggcccgcacaccaggatcgcagcggaacgagggaagatcctgccgggcaggaaaccaccgccatcaccaatcctagccctagcttggcagctgatctggccggcgacgcactccctggatgtctgggcgcagccgctcaccaggggccactgctcgaccggtctagtgagtccaccttaggacctcaggcactagagctggagcattgccacgagaggggctgttgtcgcggatgtgccagtttttcaccattccccgcccccagatgtccgtcagaacgcctgggcgcccactcctctcgttgggctatcagggggcggtctaagattaatccacctccctgggctcccgcatgccttccaggagggttccccgcatgtttgcccgccccaaagtctagcacagactcagcttcctcttgcttcaaaggaggtcgtgagttctctgacccgctcgatattcccggcgcaggtgcgatggggtag

SEQ ID NO: 273852 - DNA, 144 bp, Artificial Sequence
  derived and/or modified sequence
atggccagcgtgctgagccggcggctgggcaagcggagcctgctgggtgcgcgagtgcttgggccttccgcctccgaagggccaagcgccgctcctcccagcgagccactgctggagggggctgccccccagccgtttacttag

SEQ ID NO: 273853 - DNA, 5490 bp, Artificial Sequence
  derived and/or modified sequence
atggaggacaccccccccagcctgagctgcagcgactgccagagacacttccccagcctgcccgagctgagcagacacagagagctgctgcaccccagccccaaccaggacagcgaggaggccgacagcatccccagaccctacagatgccagcagtgcggcagaggctacagacaccccggcagcctggtgaaccacagaagaacccacgagaccggcctgttcccctgcaccacctgcggcaaggacttcagcaaccccatggccctgaagagccacatgagaacccacgcccccgagggcagaagaagacacagaccccccagacccaaggaggccaccccccacctgcagggcgagaccgtgagcaccgacagctggggccagagactgggcagcagcgagggctgggagaaccagaccaagcacaccgaggagacccccgactgcgagagcgtgcccgaccccagagccgccagcggcacctgggaggacctgcccaccagacagagagagggcctggccagccaccccggccccgaggacggcgccgacggctggggccccagcaccaacagcgccagagccccccccctgcccatccccgccagcagcctgctgagcaacctggagcagtacctggccgagagcgtggtgaacttcaccggcggccaggagcccacccagagcccccccgccgaggaggagagaagatacaagtgcagccagtgcggcaagacctacaagcacgccggcagcctgaccaaccacagacagagccacaccctgggcatctacccctgcgccatctgcttcaaggagttcagcaacctgatggccctgaagaaccacagcagactgcacgcccagtacagaccctaccactgcccccactgccccagagtgttcagactgcccagagagctgctggagcaccagcagagccacgagggcgagagacaggagcccagatgggaggagaagggcatgcccaccaccaacggccacaccgacgagagcagccaggaccagctgcccagcgcccagatgctgaacggcagcgccgagctgagcaccagcggcgagctggaggacagcggcctggaggagtacagacccttcagatgcggcgactgcggcagaacctacagacacgccggcagcctgatcaaccacagaaagagccaccagaccggcgtgtacccctgcagcctgtgcagcaagcagctgttcaacgccgccgccctgaagaaccacgtgagagcccaccacagacccagacagggcgtgggcgagaacggccagcccagcgtgccccccgcccccctgctgctggccgagaccacccacaaggaggaggaggaccccaccaccaccctggaccacagaccctacaagtgcagcgagtgcggcagagcctacagacacagaggcagcctggtgaaccacagacacagccacagaaccggcgagtaccagtgcagcctgtgccccagaaagtaccccaacctgatggccctgagaaaccacgtgagagtgcactgcaaggccgccagaagaagcgccgacatcggcgccgagggcgcccccagccacctgaaggtggagctgccccccgaccccgtggaggccgaggccgccccccacaccgaccaggaccacgtgtgcaagcacgaggaggaggccaccgacatcacccccgccgccgacaagaccgccgcccacatctgcagcatctgcggcctgctgttcgaggacgccgagagcctggagagacacggcctgacccacggcgccggcgagaaggagaacagcagaaccgagaccaccatgagcccccccagagccttcgcctgcagagactgcggcaagagctacagacacagcggcagcctgatcaaccacagacagacccaccagaccggcgacttcagctgcggcgcctgcgccaagcacttccacaccatggccgccatgaagaaccacctgagaagacacagcagaagaagaagcagaagacacagaaagagagccggcggcgccagcggcggcagagaggccaagctgctggccgccgagagctggaccagagagctggaggacaacgagggcctggagagcccccaggaccccagcggcgagagcccccacggcgccgagggcaacctggagagcgacggcgactgcctgcaggccgagagcgagggcgacaagtgcggcctggagagagacgagacccacttccagggcgacaaggagagcggcggcaccggcgagggcctggagagaaaggacgccagcctgctggacaacctggacatccccggcgaggagggcggcggcacccacttctgcgacagcctgaccggcgtggacgaggaccagaagcccgccaccggccagcccaacagcagcagccacagcgccaacgccgtgaccggctggcaggccggcgccgcccacacctgcagcgactgcggccacagcttcccccacgccaccggcctgctgagccacagaccctgccacccccccggcatctaccagtgcagcctgtgccccaaggagttcgacagcctgcccgccctgagaagccacttccagaaccacagacccggcgaggccaccagcgcccagcccttcctgtgctgcctgtgcggcatgatcttccccggcagagccggctacagactgcacagaagacaggcccacagcagcagcggcatgaccgagggcagcgaggaggagggcgaggaggagggcgtggccgaggccgcccccgccagaagcccccccctgcagctgagcgaggccgagctgctgaaccagctgcagagagaggtggaggccctggacagcgccggctacggccacatctgcggctgctgcggccagacctacgacgacctgggcagcctggagagacaccaccagagccagagcagcggcaccaccgccgacaaggcccccagccccctgggcgtggccggcgacgccatggagatggtggtggacagcgtgctggaggacatcgtgaacagcgtgagcggcgagggcggcgacgccaagagccaggagggcgccggcacccccctgggcgacagcctgtgcatccagggcggcgagagcctgctggaggcccagcccagacccttcagatgcaaccagtgcggcaagacctacagacacggcggcagcctggtgaaccacagaaagatccaccagaccggcgacttcctgtgccccgtgtgcagcagatgctaccccaacctggccgcctacagaaaccacctgagaaaccaccccagatgcaagggcagcgagccccaggtgggccccatccccgaggccgccggcagcagcgagctgcaggtgggccccatccccgagggcggcagcaacaagccccagcacatggccgaggagggccccggccaggccgaggtggagaagctgcaggaggagctgaaggtggagcccctggaggaggtggccagagtgaaggaggaggtgtgggaggagaccaccgtgaagggcgaggagatcgagcccagactggagaccgccgagaagggctgccagaccgaggccagcagcgagagacccttcagctgcgaggtgtgcggcagaagctacaagcacgccggcagcctgatcaaccacagacagagccaccagaccggccacttcggctgccaggcctgcagcaagggcttcagcaacctgatgagcctgaagaaccacagaagaatccacgccgaccccagaagattcagatgcagcgagtgcggcaaggccttcagactgagaaagcagctggccagccaccagagagtgcacatggagagaagaggcggcggcggcaccagaaaggccaccagagaggacagacccttcagatgcggccagtgcggcagaacctacagacacgccggcagcctgctgaaccacagaagaagccacgagaccggccagtacagctgccccacctgccccaagacctacagcaacagaatggccctgaaggaccaccagagactgcacagcgagaacagaagaagaagagccggcagaagcagaagaaccgccgtgagatgcgccctgtgcggcagaagcttccccggcagaggcagcctggagagacacctgagagagcacgaggagaccgagagagagcccgccaacggccagggcggcctggacggcaccgccgccagcgaggccaacctgaccggcagccagggcctggagacccagctgggcggcgccgagcccgtgccccacctggaggacggcgtgcccagacccggcgagagaagccagagccccatcagagccgccagcagcgaggcccccgagcccctgagctggggcgccggcaaggccggcggctggcccgtgggcggcggcctgggcaaccacagcggcggctgggtgccccagttcctgaccagaagcgaggagcccgaggacagcgtgcacagaagcccctgccacgccggcgactgccagctgaacggccccaccctgagccacatggacagctgggacaacagagacaacagcagccagctgcagcccggcagccacagcagctgcagccagtgcggcaagacctactgccagagcggcagcctgctgaaccacaacaccaacaagaccgacagacactactgcctgctgtgcagcaaggagttcctgaaccccgtggccaccaagagccacagccacaaccacatcgacgcccagaccttcgcctgccccgactgcggcaaggccttcgagagccaccaggagctggccagccacctgcaggcccacgccagaggccacagccaggtgcccgcccagatggaggaggccagagaccccaaggccggcaccggcgaggaccaggtggtgctgcccggccagggcaaggcccaggaggcccccagcgagacccccagaggccccggcgagagcgtggagagagccagaggcggccaggccgtgaccagcatggccgccgaggacaaggagagacccttcagatgcacccagtgcggcagaagctacagacacgccggcagcctgctgaaccaccagaaggcccacaccaccggcctgtacccctgcagcctgtgccccaagctgctgcccaacctgctgagcctgaagaaccacagcagaacccacaccgaccccaagagacactgctgcagcatctgcggcaaggccttcagaaccgccgccagactggagggccacggcagagtgcacgcccccagagagggccccttcacctgcccccactgccccagacacttcagaagaagaatcagcttcgtgcagcaccagcagcagcaccaggaggagtggaccgtggccggcagcggcagaggccacgagggcagccaggaggaggtgggcacccagtggagaggcaagagcagccccaaggtgggcggcggcgccagaagcgagagaagagagcccagaggcttctag

SEQ ID NO: 273854 - DNA, 723 bp, Artificial Sequence
  derived and/or modified sequence
atggaggacaccccccccagcctgagctgcagcgactgccagagacacttccccagcctgcccgagctgagcagacacagagagctgctgcaccccagccccaaccaggacagcgaggaggccgacagcatccccagaccctacagatgccagcagtgcggcagaggctacagacaccccggcagcctggtgaaccacagaagaacccacgagaccggcctgttcccctgcaccacctgcggcaaggacttcagcaaccccatggccctgaagagccacatgagaacccacgcccccgagggcagaagaagacacagaccccccagacccaaggaggccaccccccacctgcagggcgagaccgtgagcaccgacagctggggccagagactgggcagcagcgagggctgggagaaccagaccaagcacaccgaggagacccccgactgcgagagcgtgcccgaccccagagccgccagcggcacctgggaggacctgcccaccagacagagagagggcctggccagccaccccggccccgaggacggcgccgacggctggggccccagcaccaacagcgccagagccccccccctgcccatccccgccagcagcctgctgagcaacctggagcagtacctggccgagagcgtggtgaacttcaccggcggccaggagcccacccagagcccccccgccgaggaggagagaagatacaagtag

SEQ ID NO: 273855 - DNA, 5490 bp, Artificial Sequence
  derived and/or modified sequence
atggaggacactccgccctcactgtcatgttccgactgccagaggcactttccttccttgcccgagttgtcgaggcatcgggagctgttgcaccctagccctaatcaggacagcgaggaagctgattcaatcccccgcccgtatcgttgtcagcagtgcgggcgcggctacagacaccccggctcattagtgaatcacaggagaacccatgagactggactttttccttgtacgacttgcggcaaggacttctccaaccccatggcattgaagtctcacatgcgcacccatgctcccgaagggcgaagaaggcaccggccaccccggcccaaagaagccacacctcatctgcagggcgaaaccgtgagcactgacagctggggccagcgattaggcagcagtgagggatgggaaaatcagacaaagcacacagaagagacccccgattgcgagtcagtcccggatccccgcgccgctagcgggacctgggaagaccttccaacccggcagcgggaaggactggcttctcacccaggtcccgaggatggggccgacgggtggggcccttctaccaactctgcaagagccccacccctccccatccccgccagcagtctgctgtccaacctcgaacagtaccttgcagaatcagtcgtaaattttacggggggacaggagcctacacagtctcctccagccgaggaagagcgccgttacaagtgctcccagtgtgggaagacatacaagcatgccgggtcacttaccaatcaccgtcagagtcatacgttggggatctatccctgcgcgatatgttttaaagagttctcaaacttgatggcccttaagaaccactccaggttgcacgcacagtatcgcccttatcactgcccccactgcccgcgtgtgtttagactacccagggagctattggaacatcagcagtcacacgagggggaacggcaggagcctcgctgggaggaaaagggcatgccaacaacaaatggacacaccgacgagagctcccaggatcaactgcctagcgcccagatgctgaacggctccgccgaattatccacgagtggtgagctggaggactcgggactcgaggaataccggccttttcgatgtggggattgtggcaggacatacaggcatgctggatccttaatcaaccacaggaaaagtcaccagacgggtgtgtacccttgtagcctgtgcagcaaacaattgttcaacgctgctgcattgaagaatcacgtccgcgcacaccacaggcctaggcagggggtaggtgaaaatggccagccgtctgtgccacctgctccactgttactggctgaaacgactcacaaggaagaagaggatcccaccaccacgctggatcacagaccatataagtgctctgaatgcggccgggcctataggcaccgggggtcgctcgtgaaccatagacactctcatagaactggagagtaccagtgtagtctatgcccccgcaagtaccctaatttgatggcacttcgtaaccatgtgcgtgtgcactgtaaagctgcgcgccgttcagccgacatcggggcggaaggtgcccctagccatctgaaagtggagctaccacccgatcccgtagaagccgaagccgcaccacataccgaccaggatcatgtgtgcaagcacgaagaagaagccaccgatatcactcccgctgccgataagaccgccgcccacatatgtagcatctgtggactcttgtttgaggatgctgagtccctggagcgacatggccttacgcatggagccggcgagaaggagaatagcaggactgagacaaccatgtcaccacccagggcttttgcgtgtagagactgtggcaagtcctataggcactccggtagcctgatcaaccatcgccagacacatcaaacaggggatttcagttgcggcgcttgcgccaaacatttccatactatggcagccatgaaaaatcacctgcgccgtcattcccggcgccggagtaggcgacatcggaagcgagccggaggagcgagcggtggtagagaagccaagctattggccgctgagtcttggacccgtgaactagaggacaacgaaggcctggagtccccccaggacccatcgggtgagagcccgcacggagctgagggcaacctggaatccgacggcgattgcctgcaggctgagagcgagggagataagtgcggacttgaaagggacgaaactcactttcagggcgacaaggaatcagggggaactggagagggactggagcggaaagatgcctcactgctcgataacctcgacattcccggagaggagggtggagggactcatttctgcgatagcctgaccggagtggacgaggatcaaaagcctgcaacagggcagcctaattcttccagccactctgccaacgcagttacgggctggcaggctggtgctgcacatacctgttcagattgcggccacagcttcccacatgccactgggttgttgagccacaggccttgccacccccccggaatttatcaatgttctttgtgccctaaggagttcgattctttgcctgctcttcgctcacattttcaaaatcatcgcccgggcgaagcaacatcagctcaaccctttctgtgctgtctgtgcgggatgatctttccaggtcgcgccggttaccggcttcacaggcgccaggcgcactcgtccagcggcatgaccgaagggtccgaggaggagggtgaagaggagggcgtggctgaggctgctcccgcacgcagtccaccactgcagctgagcgaggctgaattactgaaccagctacagcgcgaggtcgaggctctggactccgccgggtatgggcatatctgcggctgttgcggccagacgtatgatgacttgggctcactagagagacatcaccagagccagtcctctggcaccacagccgacaaggctccatcccccttaggagtggccggggatgctatggagatggttgtggacagcgtgctcgaagacatcgtaaacagcgtatcaggagagggaggagacgccaagtcccaggaaggagctggtaccccgctgggcgatagcctgtgcatacagggaggcgaaagcttgctcgaggcacaaccccgaccttttaggtgtaatcagtgcgggaaaacgtatagacacggcggctccctggtgaatcacaggaaaatccaccagacgggggacttcctctgccccgtgtgtagtcgatgctatccaaatttggcggcctataggaaccacctgcgaaaccaccccaggtgcaaaggcagtgagcctcaggtcggtcctattcccgaagccgccggcagctccgaactccaggtggggcctatcccagaagggggctcaaacaaaccccaacacatggccgaagaaggcccaggacaggctgaggtggaaaagctgcaggaggaactcaaagtcgagccactggaagaggtggccagagtgaaagaggaagtttgggaggaaactacggtgaagggtgaggagatcgagccaagactggagactgccgaaaaaggctgccagactgaggcatcttcagagaggccatttagctgcgaggtgtgcgggaggagttataagcacgcaggcagtctgatcaatcatcggcagtcccatcagactggtcacttcgggtgccaggcctgttccaagggcttctctaatcttatgagtcttaaaaatcataggagaattcatgcagacccaaggcgtttccggtgttccgagtgtgggaaggccttccgactgcggaaacagctggcatctcatcagcgggtgcatatggagcgtcggggggggggcggaactagaaaagcaaccagggaggataggccatttaggtgtggccagtgtggaaggacctatcgtcacgcagggtcactgcttaaccaccgacggtcacacgaaacagggcaatacagttgccctacatgccctaagacttacagcaatcggatggctctgaaagatcaccagaggcttcatagcgaaaacagaagaagaagagccggccgatcccgccgcactgcagtgagatgtgctctgtgcggccgcagcttccctgggaggggctccctggaacgtcaccttagggagcacgaggagaccgagcgcgagccggccaacggtcaaggcggactcgatggaacagcagcatctgaggccaacctgacagggagccaaggactcgaaacgcagctaggaggcgcagagcctgttccacacttggaggatggagtccctagacccggggaacggtctcaaagcccaattcgagccgcttcctcggaggctccagagccactgagctggggcgccggaaaagccggtggatggcccgtgggcgggggactcggaaatcattccggcggatgggtgccacaatttctcacaaggtctgaggagcccgaagacagcgtacatagaagtccttgccacgccggcgattgtcagttgaatggcccaacattgagtcacatggattcatgggataatagagacaattcttctcaattacagcccggcagccattcttcatgcagccagtgtggaaaaacctactgccagagtggctctctgcttaaccataatacgaacaagacagaccgtcactattgtctactctgctccaaagaattccttaatcctgtcgcaactaagtcacattcgcacaatcacatcgatgctcagacattcgcatgtcctgattgtgggaaagcatttgagtcccatcaggagctcgccagccacctccaggctcatgcccgcgggcattcccaggtacctgcccagatggaggaagcccgagatcccaaggccggaactggagaggatcaagtggtcctgcctggccaaggtaaggcccaggaagccccaagcgagacacctcgcggacctggcgaaagcgttgagagggcaaggggaggacaggccgttacttctatggcagcggaggacaaggaacggccattcaggtgtacacaatgcgggcggagttatcgccacgccggatccctactcaaccaccagaaagcacatactactggcctctacccttgtagcctgtgtccaaaactcctgcccaacctcctgagcctgaaaaatcactcccgaactcataccgatcctaagcgccactgttgctccatctgcggtaaagcattcagaaccgcggcccggctcgaaggacacggtcgagtacatgcgcctagagagggtccgtttacatgcccccattgccctcgacactttcggcggagaatcagttttgttcagcaccaacagcagcaccaggaggagtggaccgtggccgggtccggacgaggccatgaggggagccaagaggaagttggtactcaatggagggggaaatctagcccgaaagtagggggaggggctcggagtgaaagacgagaaccccgcggcttctag

SEQ ID NO: 273856 - DNA, 723 bp, Artificial Sequence
  derived and/or modified sequence
atggaggatacaccgccatccctttcctgtagtgactgtcagcgccacttcccttcacttccagaactcagccgccatcgtgaactcctccacccgagcccaaatcaggactcagaggaggcagactccatacctagaccttaccggtgtcagcagtgtggccgaggctatcgccatcctggaagtctagtcaatcacaggagaactcatgagactggcctgttcccctgtaccacctgcggaaaggatttctcgaatccaatggcgcttaaaagccatatgcgtactcatgctcctgagggccggcgtcgtcataggccacctaggcccaaggaggctacaccgcacctccagggggagaccgtgtctacagactcttgggggcagcgcctgggctcctccgagggctgggagaatcaaaccaagcacaccgaggaaactcctgattgtgagtctgtgccagacccaagagcggcgtccggcacttgggaggatcttcctaccagacagagagaggggctggcctcccaccctggtccagaggacggtgccgacggatgggggccatctacaaatagcgcccgggctcctcctcttcctatccccgcttccagtctgctgtctaatctagaacagtacctcgctgaatccgttgtgaactttacaggcgggcaggagcccacccagtctcctccggcggaagaagaacgaaggtacaagtag

SEQ ID NO: 273857 - DNA, 5490 bp, Artificial Sequence
  derived and/or modified sequence
atggaggacaccccacccagcctgagctgcagcgactgccagaggcacttccccagcctgcctgagctgagccgccaccgggagctgctgcaccccagccccaaccaggacagcgaggaggccgacagcatcccccggccctaccgctgccagcagtgtggccggggctaccgccaccctggcagcctggtgaaccacaggaggacccatgagaccggcctcttcccctgcaccacctgtgggaaggacttcagcaaccccatggccctgaagagccacatgaggacccacgcccctgagggcagaagaagacacaggcctccccggcccaaggaggccaccccccacctgcagggcgagaccgtgtccacagacagctggggccagaggctgggcagcagcgagggctgggagaaccagaccaagcacacagaggagaccccagactgtgagagcgtgcctgacccccgggccgccagcggcacctgggaggacctgcccacccggcagcgggagggcctggccagccaccctggcccagaagatggagcagatggctggggccccagcaccaacagcgcccgggccccacccctgcccatcccagccagcagcctgctgagcaacctggagcagtacctggccgagagcgtggtgaacttcaccggcggccaggagcccacccagagccccccagctgaggaggagcggcgctacaagtgcagccagtgtgggaagacctacaagcatgctggcagcctgaccaaccaccggcagagccacaccctgggcatctacccctgtgccatctgcttcaaggagttcagcaacctgatggccctgaagaaccacagccggctgcacgcccagtaccggccctaccactgcccccactgccccagggtcttccggctgccccgggagctgctggagcaccagcagagccatgaaggagagcggcaggagccccgctgggaggagaagggcatgcccaccaccaacggccacacagatgagagcagccaggaccagctgcccagcgcccagatgctgaatggcagcgctgagctgagcaccagcggggagctggaggacagcggcctggaggagtaccggcccttccgctgtggggactgtggccgcacctacagacatgctggcagcctcatcaaccacaggaagagccaccagacaggagtgtacccctgcagcctgtgcagcaagcagctgttcaatgctgctgccctgaagaaccacgtgcgggcccaccaccggccccggcagggcgtgggggagaatggccagcccagcgtgcccccagcccccctgctgctggccgagaccacccacaaggaggaggaggaccccaccaccaccctggaccaccggccctacaagtgcagtgaatgtggccgggcctaccgccaccggggcagcctggtgaaccaccgccacagccacaggactggagagtaccagtgcagcctgtgccccaggaagtaccccaacctgatggccctgaggaaccacgtgcgggtgcactgcaaggccgccaggagatctgctgacatcggggctgagggcgcccccagccacctgaaggtggagctgcccccagaccctgtggaggccgaggccgccccccacacagaccaggaccacgtgtgcaagcatgaggaggaggccacagacatcaccccagctgctgacaagacagctgcccacatctgcagcatctgtggcctgctgtttgaagatgctgagagcctggagagacatggcctgacccatggagctggggagaaggagaacagcaggacagagaccaccatgagccccccccgggcctttgcctgccgggactgtgggaagagctaccgccacagcggcagcctcatcaaccaccggcagacccaccagacaggagacttcagctgtggggcctgtgccaagcacttccacaccatggccgccatgaagaaccacctgcggcggcacagcagaagaagaagccgccgccacaggaagagagctgggggcgccagcggcggccgggaggccaagctgctggccgctgagagctggacccgggagctggaggacaatgaaggcctggagagcccccaggaccccagcggggagagcccccatggagctgagggcaacctggagagtgatggagactgcctgcaggccgagagcgagggggacaagtgtggcctggagagagatgagacccacttccagggcgacaaggagagcggcggcactggagagggcctggagaggaaggatgccagcctgctggacaacctggacatccctggagaggagggcggcggcacccacttctgtgacagcctgactggagtggatgaggaccagaagccagccaccggccagcccaacagcagcagccacagcgccaatgctgtgacaggctggcaggccggggccgcccacacctgcagcgactgtggccacagcttcccccacgccaccggcctgctgagccaccggccctgccaccccccaggcatctaccagtgcagcctgtgccccaaggagtttgacagcctgcctgccctgcggagccacttccagaaccacaggcctggagaggccaccagcgcccagcccttcctgtgctgcctgtgtggcatgatcttccctggccgggccggctaccgcctgcaccggcggcaggcccacagcagcagcggcatgacagagggcagcgaggaggagggggaggaggagggcgtggccgaggccgccccagcccggagcccccccctgcagctgtctgaggccgagctgctgaaccagctgcagcgggaggtggaggccctggacagcgctggctacggccacatctgtggctgctgcggccagacctatgatgacctgggcagcctggagcggcaccaccagagccagagcagcggcaccacagctgacaaggcccccagccccctgggcgtggccggagatgccatggagatggtggtggacagcgtgctggaggacatcgtgaacagcgtgtctggagagggcggagatgccaagagccaggagggcgccggcacccccctgggggacagcctgtgcatccagggcggggagagcctgctggaggcccagccccggcccttccgctgcaaccagtgtgggaagacctacagacatggaggcagcctggtgaaccacaggaagatccaccagacaggagacttcctgtgccctgtgtgcagccgctgctaccccaacctggccgcctacagaaaccacctgaggaaccacccccgctgcaagggcagcgagccccaggtgggccccatccctgaggccgccggcagcagcgagctgcaggtgggccccatccctgagggcggcagcaacaagccccagcacatggccgaggagggccctggccaggccgaggtggagaagctgcaggaggagctgaaggtggagcccctggaggaggtggcccgggtgaaggaggaggtgtgggaggagaccaccgtgaagggggaggagattgagccccggctggagacagctgagaagggctgccagacagaggccagcagcgagcggcccttcagctgtgaggtgtgtggccgcagctacaagcatgctggcagcctcatcaaccaccggcagagccaccagacaggccacttcggctgccaggcctgcagcaagggcttcagcaacctgatgagcctgaagaaccaccggcgcatccatgctgacccccggcgcttccgctgcagtgaatgtgggaaggccttccggctgaggaagcagctggccagccaccagagggtgcacatggagaggagaggaggcggcggcaccaggaaggccaccagagaagatcggcccttccgctgtggccagtgtggccgcacctacagacatgctggcagcctgctgaaccaccggcgcagccatgaaacaggccagtacagctgccccacctgccccaagacctacagcaacaggatggccctgaaggaccaccagaggctgcacagcgagaacagaagaagaagagctggccgcagcagaagaacagctgtgcgctgtgccctgtgtggccgctccttccctggccggggcagcctggagcggcacctgcgggagcacgaggagacagagcgggagcccgccaacggccagggcggcctggatggaacagctgccagcgaggccaacctgaccggcagccagggcctggagacccagctgggcggcgctgagcctgtgccccacctggaggatggagtgcccaggcctggagagaggagccagagccccatccgggccgccagcagcgaggcccctgagcccctgtcctggggcgccggcaaggccggcggctggcctgtgggcggcggcctgggcaaccacagcggcggctgggtgccccagttcctgaccaggtctgaggagcctgaggacagcgtgcacaggagcccctgccacgccggggactgccagctgaatggccccaccctgagccacatggacagctgggacaacagagacaacagcagccagctgcagcccggcagccacagcagctgcagccagtgtgggaagacctactgccagagcggcagcctgctgaaccacaacaccaacaagacagacagacactactgcctgctgtgcagcaaggagttcctgaaccctgtggccaccaagagccacagccacaaccacattgatgcccagacctttgcctgcccagactgtgggaaggcctttgagagccaccaggagctggccagccacctgcaggcccacgcccggggccacagccaggtgcctgcccagatggaggaggcccgggaccccaaggccggcaccggggaggaccaggtggtgctgcccggccagggcaaggcccaggaggcccccagcgagaccccccggggccctggagagagcgtggagcgggcccggggcggccaggccgtgacctccatggctgctgaggacaaggagcggcccttccgctgcacccagtgtggccgcagctacagacatgctggcagcctgctgaaccaccagaaggcccacaccaccggcctgtacccctgcagcctgtgccccaagctgctgcccaacctgctgagcctgaagaaccacagcaggacccacacagaccccaagaggcactgctgcagcatctgtgggaaggccttcagaacagctgcccggctggagggccacggccgggtgcacgccccccgggagggccccttcacctgcccccactgccccaggcacttcagaagacgcatcagctttgtgcagcaccagcagcagcaccaggaggagtggacagtggccggcagcggccggggccacgagggcagccaggaggaggtgggcacccagtggaggggcaagagcagccccaaggtgggcggcggggcccggagtgaaagaagagagccccggggcttctag

SEQ ID NO: 273858 - DNA, 723 bp, Artificial Sequence
  derived and/or modified sequence
atggaggacaccccacccagcctgagctgcagcgactgccagaggcacttccccagcctgcctgagctgagccgccaccgggagctgctgcaccccagccccaaccaggacagcgaggaggccgacagcatcccccggccctaccgctgccagcagtgtggccggggctaccgccaccctggcagcctggtgaaccacaggaggacccatgagaccggcctcttcccctgcaccacctgtgggaaggacttcagcaaccccatggccctgaagagccacatgaggacccacgcccctgagggcagaagaagacacaggcctccccggcccaaggaggccaccccccacctgcagggcgagaccgtgtccacagacagctggggccagaggctgggcagcagcgagggctgggagaaccagaccaagcacacagaggagaccccagactgtgagagcgtgcctgacccccgggccgccagcggcacctgggaggacctgcccacccggcagcgggagggcctggccagccaccctggcccagaagatggagcagatggctggggccccagcaccaacagcgcccgggccccacccctgcccatcccagccagcagcctgctgagcaacctggagcagtacctggccgagagcgtggtgaacttcaccggcggccaggagcccacccagagccccccagctgaggaggagcggcgctacaagtag

SEQ ID NO: 273859 - DNA, 5490 bp, Artificial Sequence
  derived and/or modified sequence
atggaggacaccccccccagcctgagctgcagcgactgccagcggcattttccgtctcttcccgagctgagccggcaccgcgagctccttcacccaagccctaatcaagattctgaggaagcggatagtatccctagaccctaccggtgccagcagtgtggccggggatacagacatccagggtctttggtcaatcacaggaggacccacgaaactggactgttcccgtgtactacgtgcggtaaggacttcagcaacccaatggctttaaagtcgcatatgcgaactcatgctcctgagggccgccgaagacataggcctccacgacccaaagaagcgactcctcatctgcagggggaaacggtttccaccgattcctgggggcagagattaggaagtagcgaaggatgggagaaccagacgaaacataccgaagaaacccccgactgcgaaagcgtaccagaccctagggccgcaagcgggacctgggaggacctgccaacacgtcaacgtgagggattggcgagtcatcctggtccagaagacggtgcagacggttggggcccttcaaccaactccgcccgggccccacccctgcctattcctgctagttcactcttatccaatctagaacagtatctcgcagaatctgtggtcaatttcaccggaggccaggaacctactcagtcgccgccagccgaagaagagcgcagatacaaatgctctcagtgcggcaaaacatacaagcatgctggcagcttaacaaaccacaggcagtcccatactctgggtatttatccatgcgcaatctgtttcaaagagttctccaacctcatggccctgaaaaatcactctcgcctgcacgcccagtatcgaccataccattgtccccactgtcccagagtgtttcgcctgcctcgggaactgctggagcatcaacagtctcacgaaggtgagcgacaagagccgcgttgggaggaaaaaggtatgccaaccacaaacggccatactgatgaaagcagtcaggaccagttgcctagtgcccagatgctcaatggcagtgccgagctgtctacgagtggggagttagaggattccggtctggaggagtacagacccttcagatgcggggattgtggccgcacataccgccatgccggctcccttatcaatcataggaaatcccaccagactggcgtctatccctgctctctctgcagcaagcagctctttaatgccgccgcccttaagaaccatgttagagctcaccaccggcccaggcagggcgtgggagagaatggccaaccctctgtgcccccagctcctctcttgctggcagagacgacacataaggaagaggaggacccgaccactacactggatcaccgtccctacaagtgcagcgagtgtggccgagcatatagacatagaggctcactggtcaatcaccggcactcccacaggaccggcgaataccaatgctctttatgtcccagaaagtaccctaacctcatggccttgaggaatcacgtgcgggttcattgtaaggccgcccgacgaagcgctgacattggagcagaaggggccccctcccacctcaaggttgagctgcctcccgaccctgtcgaagcagaggcggccccacataccgaccaggatcatgtatgtaaacacgaagaggaagcaactgatattacccccgcggcggataaaacagccgcccacatatgttccatctgtggcttactgttcgaagatgccgaatcactggagagacatggtcttacacatggggccggagaaaaagaaaactcgcgcaccgagactaccatgagccccccccgggcctttgcctgtcgcgactgtgggaagtcctacagacattccgggtctttgattaaccatcgacagacccatcaaaccggagatttctcctgcggcgcttgtgctaaacattttcacaccatggccgctatgaaaaatcacttgcgccggcatagccggcgcagaagcaggagacacaggaaacgggctggtggagcaagcggcggtagagaggcgaagttactggctgcggagagttggacacgggagctagaggataacgagggcctggaaagcccccaggacccctccggcgagtcccctcacggcgctgagggcaatctggaatccgacggggactgtctgcaagccgaatccgaaggtgataagtgtggactagaacgggatgagacacactttcagggtgacaaagagtccggggggacaggagaggggctcgagcggaaggacgcaagcttactggataacctcgacataccaggggaggaaggcggcggcacccacttctgtgactccttgacaggggttgacgaagatcaaaagcctgccacaggacagcctaacagtagttcacattcggccaatgcggttactggatggcaagccggcgccgcacacacctgttcagattgtggccatagtttccctcacgctaccggactcttatcacaccgcccgtgtcatcctcccggaatctaccagtgctcactgtgccctaaagaatttgattctttgcctgccctaaggtcccatttccagaatcaccgccctggagaggcaacgagtgctcagccatttctgtgctgtttgtgcggcatgatcttcccaggccgcgctggataccggctgcacaggagacaggcccactcctcttccgggatgaccgagggcagcgaggaggaaggggaggaggagggagtagctgaagccgcaccagctcgatcccctccactgcagctctctgaagcagaactcctgaatcagcttcagcgtgaggtcgaggccctggacagcgccggctacggccacatttgtggctgttgcggtcagacctatgacgaccttggatcacttgagcgccaccatcagtctcagtcttctggcaccacagcagacaaagccccaagccctttaggggtagccggggacgcaatggaaatggttgttgattccgtgcttgaggatatagtgaattctgtgtctggcgagggtggggatgctaagtcccaggaaggcgctgggacaccactcggcgattccctctgcatccaaggaggcgagtcactgctggaagctcagccgcgtccctttagatgtaatcagtgcggtaagacataccggcacgggggcagcctagtgaaccataggaaaatccaccagacgggagacttcctgtgcccagtttgttctcgctgctatcctaacctggcagcttatagaaatcatctgcgcaatcaccccaggtgcaagggcagtgagccccaggtcggtcccattcccgaggccgccgggtccagtgaactacaggtcgggccgattcctgaaggaggcagcaacaagccacaacacatggccgaggagggcccgggtcaagcagaggtggaaaaactgcaggaggaacttaaggtggagccactggaggaggtggcccgggtaaaagaggaggtgtgggaagaaaccaccgtgaagggagaagaaattgaaccgagactggaaacggccgaaaaagggtgccaaacggaggcgagttctgaacggccattcagctgtgaggtctgtgggcggagttacaagcacgccggatccctgatcaaccacaggcagtcgcatcagactgggcacttcggatgtcaggcgtgctcgaagggattcagtaatcttatgtcactgaaaaaccatcggcgcattcacgctgacccccgacggttccgctgttccgaatgcggcaaagcatttcggttgcggaagcagctggcctcgcaccagcgcgtgcatatggaaaggagaggcggcggcgggacacgtaaggccactcgggaagaccggccctttaggtgtggccagtgtggacgtacatatcgacatgccggctctcttcttaatcatcgtagaagccacgaaaccggccagtatagctgccccacgtgcccgaagacatatagcaatagaatggctttgaaagatcatcagcgcttgcacagcgagaaccgacggcgccgagccggcaggtctaggcgcactgccgtgcgatgtgccctctgtggtagaagcttcccaggaaggggctccctagagagacatctgcgagagcatgaggagacggagagggaacctgctaatggtcaaggcggcctggacggtaccgccgcctctgaagcaaatctcacagggagccagggactggaaacacagctcggtggcgccgagcccgtgccccacctcgaagatggggtccccaggcccggggaacggagccagtctccaatccgggccgcttcctcagaggcgccggagccgctctcctggggcgctggcaaggcaggaggatggccagtcgggggtggcctggggaaccattccgggggctgggttccccagtttctgacccgctctgaggagccggaggacagtgtgcatcgatcaccatgccatgctggcgactgtcagctgaatggaccaactctttcccatatggactcctgggacaatcgcgataacagttctcagctccaacccggcagccatagctcctgtagtcagtgcggaaagacctattgtcaaagtggaagtttactcaaccataatacaaacaagaccgaccgccattattgtcttctgtgctcaaaagagtttttgaaccccgtggccaccaaatcccactcccacaaccatattgacgctcagacattcgcatgtccagactgcggaaaggcatttgaatcacaccaggaactggcgtctcacctccaggctcacgctcgcggacacagtcaggtgcccgcacagatggaagaggctcgcgatcctaaggccggtacaggcgaggaccaggtcgtgctacctggacagggtaaggcccaggaagccccttccgagacgccacgcggccccggtgaatctgttgaacgggctcgcggtggccaagcagtgaccagcatggcagctgaagataaagagcgcccttttagatgcactcagtgcggtcggtcgtacaggcacgcaggcagtttgttgaatcatcagaaggcccacaccaccggattgtatccctgttccctgtgccctaaattacttcctaatctgctttcacttaaaaatcatagcagaacacacacagacccaaaaagacactgctgctccatctgtgggaaagcgttccggaccgctgccaggctcgagggccacgggagagttcatgcgccaagagaaggaccctttacgtgccctcattgtcccaggcactttcggaggagaatctcgttcgtgcagcaccagcaacagcatcaggaggagtggacagtggctgggagtggacgcgggcatgaaggttctcaggaggaggttggaacccagtggcggggcaagagctctccaaaagtcggaggaggcgctcgatccgagcggcgcgagccgcgcggtttttag

SEQ ID NO: 273860 - DNA, 723 bp, Artificial Sequence
  derived and/or modified sequence
atggaggacaccccccccagcctgagctgcagcgactgccagcggcactttccttcactgcctgagttgtcaaggcatcgggagctgctgcatccctcccccaaccaagactccgaggaggccgatagtatcccacgcccgtataggtgccagcaatgcgggcggggataccgacatcctggctcactggtgaatcatcgtcgtacacatgaaacaggcctgttcccatgtaccacttgcggcaaagatttttctaacccaatggcactcaagtcacatatgagaacccacgctccagaagggcgccggaggcaccgtcctccacggccaaaggaggcgactcctcatttacagggcgagacagtgagtaccgacagctggggccagagactgggatcctctgaaggatgggaaaatcagaccaagcataccgaagaaaccccagactgtgaatccgtgcccgatccccgcgctgcaagcggcacgtgggaggatctgccaacaaggcaacgggagggactggcatcacaccctggtcctgaggatggagccgacggctggggaccttctactaatagcgcaagggccccaccactgcccattcccgcctcatccttgctcagcaacttggaacagtatctggccgaatctgtagtaaactttaccggaggtcaggagccaacccaatccccacccgccgaggaggaaagaagatacaagtag

SEQ ID NO: 273861 - DNA, 5489 bp, Artificial Sequence
  derived and/or modified sequence
atggaggatacccccccttctctgagttgcagcgattgtcagcgacattttccgagcttgccagaactgtcacgacaccgcgagctgctgcatccttctccaaaccaggattcggaggaagcagacagtataccgcgaccctaccgatgtcagcagtgtggcaggggctatcgacatcccggatccctagtaaatcatcgtagaacccacgagaccggcctcttcccgtgtacgacctgcggaaaggactttagcaaccccatggccctcaaatcccacatgagaacccacgccccagaggggcgtaggcgccaccgccctccaagaccaaaagaagctactccacacttacagggagagacagtcagcactgattcttggggccagaggctggggtccagcgagggatgggaaaatcagaccaagcataccgaggaaactcctgactgcgaaagcgtcccggaccccagagccgcaagcggcacttgggaagacctgccaacacgccaacgcgaaggccttgccagccatcctggcccagaggatggggcagatgggtggggcccttctaccaactctgctcgtgcgccacccctccccatccccgcttcttctttgttgagtaacttggagcaatacttagcggagtccgttgtgaatttcaccggagggcaggagcctacccagagtccgcctgccgaggaagaacgcagatataagtgttcacagtgcgggaaaacgtataaacacgctggttccctaacaaatcaccgccagagccacaccttaggcatctatccgtgtgcgatatgctttaaggaattttcaaacctcatggccttaaagaaccactcccgcctgcacgcccagtataggccatatcattgtccacactgccccagggtcttccgcttaccaagagaactactggaacatcagcagtcacacgagggggagcgccaagaaccgcgatgggaagagaaaggcatgcccacaaccaacgggcatactgatgaaagctcccaggaccagctgccatctgcccagatgttgaatgggagcgctgaacttagcacttccggtgagctcgaggattctggcctagaggaatatagacctttccggtgcggagactgtggcaggacgtatagacacgccggaagcttaataaatcacagaaaatctcaccaaaccggggtttacccctgcagcctgtgtagcaagcagctctttaatgccgcagcattgaagaaccacgtgagagctcaccatagaccacggcaaggggtcggagagaatggacagccgagtgtgccacccgcacctctgttgctggctgagacgacacacaaagaagaggaggacccaaccacgaccctcgatcatagaccttacaaatgctccgaatgtggacgggcttataggcaccgcggaagcctggtgaatcaccgccattcccaccgtactggagaataccagtgtagcctctgccccagaaaatatcctaacttgatggccctgaggaatcatgtgagggtacactgtaaagcggctcggcgaagtgccgatataggagcagagggcgctcccagccatcttaaggtggagctccctcccgatcccgtggaggccgaagccgctccccacacagatcaggaccacgtttgcaagcatgaggaggaagcaacagacatcacgccggcagcagacaagaccgccgcacacatatgcagtatttgcggcctgctgtttgaagacgccgaaagtcttgagagacatgggctgacacacggggcaggcgagaaagagaattctcggaccgagacaacaatgtccccgcctcgggctttcgcatgtcgagattgcggtaagtcatataggcattcagggtccctgatcaatcatcgccagacacaccagacgggggacttttcttgtggagcttgcgctaagcactttcacacaatggccgctatgaagaaccacctgaggcgtcatagccgacggaggtcccgcagacatcgcaaacgtgctggcggtgcgtccggcggaagggaagcaaaactcctggctgccgagtcgtggaccagagaattagaggacaatgagggtttggagtccccacaggatccctctggcgaaagcccccatggcgcagaaggaaatctggaaagtgatggtgattgcctccaggctgaaagcgaaggcgataaatgcgggcttgagagagatgaaacccacttccaaggcgacaaagagagcggcggtaccggcgaaggccttgagcgcaaggacgcatcccttctagacaatctcgatatccccggtgaagaagggggtggaacccatttctgcgattcactcactggcgtggatgaggaccagaaacccgctactggccagcccaactcctcctcacactctgcaaatgcagtgacaggatggcaggctggggctgctcacacctgctctgactgcggccacagttttccccacgcaacaggactcctgtcccaccgtccctgccatcccccaggtatctaccaatgcagcctgtgtcccaaggaattcgattctttgcctgcacttaggagtcattttcaaaaccacaggccgggagaggccacatcagcacaaccattcctttgctgtctgtgcggcatgatctttcctgggagagctgggtacaggctgcatcgcagacaagcacattcaagtagcggaatgaccgagggcagtgaggaggagggagaagaggaaggggtggctgaggctgccccagcccgatcaccaccactgcagttatcagaggctgaactcctcaatcagctgcaaagggaggtggaagcccttgattcagccggttatgggcatatctgtgggtgttgcgggcaaacttatgacgacctgggatctctggagagacaccatcagtctcagagctcgggaacaacagccgataaggcaccctctcctctgggcgtcgctggcgacgcaatggagatggtagttgattctgtgttagaggacatcgtgaattcagtgtcgggggaaggcggagatgccaaatcacaagagggtgccggaacacccctcggcgacagtctgtgcattcaagggggagagtccctactagaagcccagccacgacctttccgatgcaaccagtgcgggaagacctatagacatggcggttcgctcgtgaaccacagaaaaattcatcagaccggagactttctgtgtccagtgtgctcaaggtgttaccccaacctggccgcttacagaaaccacctcaggaatcaccctagatgcaaaggctccgagccacaggttggcccaatccctgaggccgcaggctcttctgaactccaggtgggacctataccagaggggggaagtaataagcctcagcatatggcagaagaaggaccaggtcaggcagaggtagaaaagctgcaagaggagctgaaagtggaacccttagaagaggtcgccagggtgaaagaggaagtctgggaggagactacagtcaagggggaagaaatcgaacccagacttgagaccgcagaaaagggctgccagaccgaggcctcctccgagcggcctttctcatgcgaggtttgcgggcgatcctacaaacacgcgggaagtctgatcaaccacaggcagtcccaccaaaccggccactttggatgtcaggcctgttcgaagggattttctaacctgatgtcactcaaaaaccaccggaggatccacgctgaccctcgtcgcttcagatgctcagagtgtggtaaggctttccgcctgaggaaacagctggcctcgcatcagcgagtccatatggaacgcaggggcggaggaggaaccaggaaagccactcgagaggacaggccctttcgctgcggccagtgcggcaggacgtaccggcatgcaggttccctgctgaaccataggaggagccatgaaaccggacagtacagctgtccaacatgtccgaagacatactccaatagaatggctctcaaagaccatcagcgtttacactcggaaaatcggcgtcgcagagctggcaggtcacggaggaccgccgtgagatgcgcgttgtgtggaagatccttcccaggcagagggagcctagagcgccatttaagggagcacgaggagacagagcgggaaccagccaatggacaggggggattggacggaacagcagcatctgaagctaacctaacgggctcccaggggctagaaacacagctgggcggagcggaaccagtgcctcacctcgaggatggagtcccaagacctggcgaaaggtcccagtctcctattagagccgcaagctcagaggcacccgagccgttgtcatggggtgcagggaaagccggtggatggcctgtaggaggcggactaggtaatcactcgggcggatgggtcccgcagttcctgacacgcagcgaggagccagaagacagtgtccacagaagcccttgccacgctggcgattgccagctgaacggtcctaccctctcacatatggactcttgggataaccgggacaactccagccaactgcagcctggttcccactcaagttgcagtcaatgcgggaaaacttattgtcagtcaggctcattgctcaaccacaataccaacaaaactgacagacattattgcctgctttgctctaaagaattcctaaatcccgtggccacaaaatcccactcacacaatcatatcgacgctcagacgtttgcctgcccagattgtggcaaagcctttgagagccaccaggaacttgcctcgcacttgcaggcccacgctaggggacattcccaagtgcctgcgcaaatggaggaagcgcgagatcccaaagcgggtacaggcgaggaccaagtggtgctccccggacaagggaaggcccaggaagcgccaagtgagacgcccaggggaccaggtgaatctgtagaacgggcaagggggggtcaggctgtgacatctatggccgctgaggacaaggagcgtcctttccgctgtacacagtgcgggaggtcctaccggcatgctggcagccttctgaatcaccagaaggcgcacactaccggcctgtacccttgctcactatgtcccaagcttttgcccaaccttttatcactgaaaaaccatagcagaacgcacactgaccccaaacgccattgctgttctatctgtggaaaagctttcaggactgctgcacggctggagggccacgggcgtgttcacgccccaagagaaggacctttcacctgcccgcattgtcccaggcatttcagacgtaggattagcttcgttcagcatcaacagcaacaccaagaggagtggacagtcgccggttcaggacgagggcacgagggctcgcaggaagaggtgggcactcagtggaggggtaagagcagtcctaaggtgggcggaggcgcaaggtctgaacgacgtgagccgaggggtttcta

SEQ ID NO: 273862 - DNA, 723 bp, Artificial Sequence
  derived and/or modified sequence
atggaggacacgccgcctagcctgtcatgctcggattgtcagcgacactttcctagtctcccggagctgtctcggcatcgcgagttgctgcaccctagtcccaatcaagatagcgaagaggccgatagcataccacgaccatacaggtgtcagcagtgcggtagaggctaccggcaccctgggagcctggtgaaccacagaagaacccacgagaccggtctgttcccctgcaccacatgtggaaaggacttttccaaccctatggccctcaaaagccatatgcggacacacgcccctgagggacgacgccgacaccgtcctcctcgccctaaagaggccaccccacatctgcagggagagacagtttctaccgattcctgggggcagagactcggtagctctgaaggatgggaaaaccagaccaagcataccgaagaaacgccagattgcgaatctgtgcccgacccaagagcggcttccggcacgtgggaagatttgcccacacgtcaaagagagggcttggccagccacccaggtcccgaggatggtgctgatgggtggggaccctctaccaatagtgcgagagcccctcctctgccaatccctgcgagttccctgctcagtaatctggagcagtacttggcagaaagtgtcgtgaattttaccggcggacaggaacccacacagagccccccagccgaggaggagcggcgatataagtag

SEQ ID NO: 273863 - DNA, 7604 bp, Artificial Sequence
  derived and/or modified sequence
gagcagattcctactgttcttaaaggacagtaatgccttttgagtctggtctgaagaacataacaggtctgtgatcagaagtaggttgcatctctctcaactttaatttccttagctatacctgtagggatgacttaagcctaggggagctcctatatttgggaagcttgtgcacagggaagccttaaatgatggtgcctgcagattggatctagtagaaattaggtccttgggcatggatgcttggggaacctctcagtgacctcaggtgaacttgttgctcgtagagccaagaggcgaagttaattcaggccttccttttgaccactgccccctcttcctaggccttggcccctccaccagaggaaggtgctgccacgtgtctgctccttctgaacctccaggtttctgctacgttgccccatggaggacacacccccctcactcagctgctccgactgtcagcgccactttcccagcctcccagagctctctcggcaccgagaactgctccatccatctcccaaccaggacagtgaggaggctgacagcatccctcggccctaccgttgtcagcagtgtgggcggggctaccgtcaccccgggagcctggttaaccatcgtcggacccacgagactggccttttcccctgtaccacctgtggcaaggacttctccaatcccatggctctcaagagccatatgaggacacatgctcctgagggccgccgcaggcacaggcccccacgccccaaggaagccactccacacctccagggtgagacggtgtccactgactcctggggccaaaggcttggctctagtgaaggctgggaaaaccagacaaaacatacagaagagacacctgactgtgaatctgtacctgaccccagggcagcttcgggtacgtgggaagatctgcccaccagacaaagagaaggcttggcaagccacccaggtcctgaggatggtgcagacggctggggaccctccactaactctgccagagcccctcctctccccatcccagccagcagccttcttagcaacttggaacagtatctggctgaatcagtagtgaacttcacagggggccaggagcccacccagtcccctcctgctgaggaggagcggcggtacaaatgtagtcagtgtggcaagacctacaagcacgccgggagcctcaccaaccaccgccagagccacacgctgggcatctacccctgtgccatctgtttcaaggagttctctaacctcatggctctgaagaaccactctcgactgcatgcccagtatcggccttaccactgtccccactgcccccgtgtcttccggctcccccgggagctgctggaacaccagcagtcccatgagggtgaaaggcaggagccacgctgggaggagaaagggatgcccaccaccaatgggcacacagatgagagcagccaggaccagctccccagtgcacagatgctgaatggctctgcggagctcagcacctctggggagctggaggacagtggcctggaggaataccggcctttccgctgtggggactgtggccgtacttaccgccatgctgggagcctcatcaaccatcgaaagagccaccagacaggtgtctacccctgctcactctgttctaagcagctgttcaatgcggctgccctcaaaaaccatgtgcgggctcatcacaggcccaggcaaggagttggggaaaatgggcagccatcagtcccaccagctcccctgctgctggctgagaccacccacaaagaggaagaggaccccaccaccaccctggaccatcggccctataagtgcagtgagtgtggtcgtgcttaccgccaccgggggagcctggtgaaccatcgccacagccatcggactggagagtaccagtgctcactctgtccccgcaagtaccccaatctcatggccctgcgcaaccacgtgcgggtacattgcaaggctgctcgccgaagtgcagacatcggggctgagggtgcccccagccacctcaaggtagaactcccgcctgacccagtggaggcagaggcagccccgcacacagatcaggaccatgtgtgcaaacatgaagaagaggccacggacatcaccccagcagcagacaagacagcagcacatatctgtagcatctgtgggctgctctttgaagacgctgagagccttgaacgtcatggcctgactcatggggcaggggaaaaggaaaatagcagaacagagaccacaatgtcacctcctagggcctttgcctgccgagactgtggaaagagctatcgccactcaggcagccttatcaaccacaggcagacccaccagacaggagacttcagttgtggggcctgtgccaagcacttccacaccatggctgccatgaagaaccacttgcgccggcacagtcggcggcggagcaggcggcatcggaagcgggctggcggtgccagcggtgggagagaagccaaactcctggcagcggagagctggacccgggagctagaagacaatgaaggcctggagtctccccaagacccttcaggggaaagtcctcatggggctgaaggcaacctggaaagtgatggggactgtttgcaggctgaatctgaaggggacaaatgtgggcttgagagggatgagacccatttccagggtgataaagagagcggaggcactggggaaggactggaaaggaaggatgccagtttacttgacaacttggacatcccaggtgaggaaggtggtggcactcacttctgcgatagcctcactggggtggatgaagaccagaagccagccactggccaacccaactcctcttcccactctgccaatgctgtcactggctggcaggctggggccgctcacacatgctctgactgtgggcattctttcccccatgccactggcctgctgagccacaggccctgccacccaccaggcatctatcagtgctccctctgcccgaaggagtttgactctctgcctgccctccgcagccacttccagaaccataggcctggggaggcgacctcagcacagcctttcctctgctgcctctgtggcatgatcttccctgggcgggctggctacaggcttcaccggcgccaggcccacagctcctctggcatgactgagggctcagaggaggagggggaagaggaaggagtggcagaggcagcccctgcacgcagtccaccactgcagctctcggaagcagagctgctgaatcagctgcagcgggaggtggaagcgctggacagtgcagggtatgggcacatctgtggctgctgtggtcagacctacgatgacctggggagcctggagcgtcaccaccaaagtcagagttctgggactactgcagacaaggctcccagccccttgggagtggcaggtgatgccatggagatggtcgtggacagtgtcttggaggacatagtgaattctgtctctggagagggtggagatgccaagtctcaagagggagcaggcacccccttgggagacagcctctgcatccagggtggggaaagtttgttggaggctcagccccgccccttccgctgcaaccagtgtggcaagacctatcgccatgggggcagcctggtgaaccaccgcaagatccaccagactggagactttctctgccctgtctgctcccgctgctaccccaacctggctgcctaccgtaatcatctgcggaaccaccctcgctgcaaaggctctgagccccaggttgggcccatcccagaggcagcaggtagcagtgagctgcaggttgggcccatcccagaaggaggcagcaacaagccccagcacatggcagaggaggggccggggcaagcagaagtcgagaagctccaggaagaacttaaagtggagcccctggaggaagtggccagggtgaaagaagaggtgtgggaggagaccactgtgaagggggaggagatagagcccaggctggagactgccgagaagggctgccagactgaagccagctctgagcggcccttcagctgcgaggtgtgtggccgatcctacaagcacgccggcagcctcatcaaccaccggcagagccaccagaccggccactttggctgtcaggcctgctccaagggcttctcaaacctcatgtccctcaagaaccaccggcgcatccatgcagatccccgacgtttccgctgcagcgagtgtgggaaggccttccgcctgcggaaacagctggccagccaccagcgggtccacatggaacggcgtgggggtgggggcacccgaaaggcgactcgggaagatcggcccttccgctgtgggcagtgcgggcggacctatcgccacgccggcagcctcctgaaccaccggcgcagccacgagacgggccagtacagctgccccacctgccccaagacctactccaaccgcatggccctgaaggaccaccagaggctgcactcagagaatcggcggcgacgggctggacggtccaggcgcacagctgtgcgttgcgccctctgtggccgcagcttccctggccggggatctttggagcggcacctgcgggagcatgaggagacagaaagggagccagccaatggccagggaggcctggatggcacagcggccagtgaggcgaacctgactggcagccagggactagagacccaattgggtggtgctgagccagtaccccacttggaggatggagtcccaaggccaggggagcgcagtcagagccccatcagggcagcaagctcagaagccccagagccactgtcctggggtgcagggaaggcaggtgggtggccggtaggtgggggactggggaatcatagtggaggctgggttcctcagttcctaactaggtcagaggagccagaggacagtgtccacaggagtccttgccacgctggtgactgccagctcaatggacctactctgagtcacatggatagctgggacaacagagacaacagctctcagctgcagccagggagccactcctcttgcagccagtgtggcaagacttactgccagtcaggcagcctcttgaaccacaacaccaacaagacagaccgacactattgcctgctctgctccaaggagttcttaaatcctgtggccacaaagagccacagccacaaccacatagacgcccagacctttgcctgtcctgactgtggcaaagcctttgagtcccaccaggaactggccagccacctgcaggctcatgcccggggccacagccaggtgccagcccagatggaggaggccagagatcccaaagccgggactggggaggaccaggtggttctccctggtcaagggaaagcccaggaggccccatcagaaacccccagaggcccaggagagagtgtggagagagccaggggaggacaagcggtgacgtccatggcggctgaggacaaggagcggcccttccgctgcacccagtgcgggcgctcctaccgccatgctggcagcctgctgaaccaccagaaggcccacaccacagggttgtacccgtgctccctctgtcccaaacttctccctaacctgctgtctcttaagaaccacagcaggacccacacggaccccaagcgccactgctgcagcatctgtggcaaggcctttcggacagctgcccggctggagggccacgggcgggtccatgcaccccgggaggggcctttcacctgcccccattgtccccgccacttccgccgccgaatcagcttcgtgcagcaccagcagcagcaccaggaggagtggacggtggccggctccggtagggggcatgaagggtcccaggaggaggtgggcacacagtggagggggaagtccagccccaaagtcggtgggggagcaaggagtgagaggagagagccccggggattctaagaggtgggtgggggcttggctatggggtgagagaagtagcttgaggatgtgctgagctgagcacccgcaagtcaggtataacaaatagcagggtgggttgggcagcacgtgggggcgtggtcaggccgaggctgctacctgggctcctccattacactgtagccagaatggaatggtctttctgttcaggggaaggtcactgggtaccccctggctgctgtgtctggaaaccctcctgagtcagccagtaaagtaatgacttccagagaaaaagaggaagccattggtttggtctaggttccattctttcctggagcaggccgggtgccagggaacaagggatggggcatgggctccacggcttccctgctgacttggccacggaaactggttcactggttggcaccctactccctgtccctctttccctgcgccttgtctctgctgctcctctccttggaaactagacctctggtccttccctgtcagtgttgctcccatctcttctctaacctttattcagccccttttccctctgctgccaacggcctttttaggatccaaccaaaccaccctttctacctgcgcaccctgccaccctctgcacacctttaactggaggactgagtcacagataattgtttccttgaagtccaggcccagctgcagcaacaacagtcattagcccgtgtcacatccctgatcagagggcatctccgtggggaatcgcctccacccagcactgctggaagccgcagctgccagggagtggggcggccggttccctcagcaggacctgggctggcctctccacctcccctagtagaggcggacccattccatctagtggccaccgagggtgggtggccctgagatggtgggcccttgacaggccttgtcagagcagagggcaggtgggagtcacctgaaagctgaaggaatggctttaaggatagaagatttctcatgacctcaagggatatgagggaggagccagtttgccagggctgggaaaataattaggaggcctagaatccctgttctcatctgggcctccggggccaggggcaggggaatggcctgcagggctgggagggggtacacgctgtgcggggtctgcccctcagttggtgacctcctctctctctccccccaggagccccagtggcaccagtgacgggcagaggggacttgccattgccccctccacccacccccacgaccccactcctggatccttcaccccagtggcctgcagacctcagcttctccctctgaacttcaagtctccaaagatcagaatctgggggagggagcgcgtgcagggaggggcttgatctccacattttctcaggagtagttcgggcatccccatatcttctcctctccccttgtgaagaggacccagatctggcttctttcccaaggagggggtggggtgttcctcgcgtccctgtccttgaaggacctccttcccccagcctcatcaccgtgctcttctcagcgccaccctcagcagccagattgcaacaccagggagaggcggatgcagagccccaccggtgggaaagttgcctgtggaagggagccttttgctacaatttgtaacttattttctaaagtctattttgtaacaatttatttaagtttaaaaaaaggaaaactgctgccccccaaaaaaagaaattttc

SEQ ID NO: 273864 - DNA, 1077 bp, Artificial Sequence
  derived and/or modified sequence
tagagctgggagtagactcctggctcatgccagctgcgccctcttttctctacctccttcctcttccccccttctcctttccctctttcccttccctcccacctcccgggaaccctggctgagtgtgcgtgtgtgggagcgcgagagccccccgacagccaccccttggggcgcgcggctgcagttagggtaagggtcccagtgcgcaggcgcgctcttgttcgcggtccccaactgacgcgcccgcggcgggaaggagagggggccgccggtgcgaggccttggcccctccaccagaggaaggtgctgccacgtgtctgctccttctgaacctccaggtttctgctacgttgccccatggaggacacacccccctcactcagctgctccgactgtcagcgccactttcccagcctcccagagctctctcggcaccgagaactgctccatccatctcccaaccaggacagtgaggaggctgacagcatccctcggccctaccgttgtcagcagtgtgggcggggctaccgtcaccccgggagcctggttaaccatcgtcggacccacgagactggccttttcccctgtaccacctgtggcaaggacttctccaatcccatggctctcaagagccatatgaggacacatgctcctgagggccgccgcaggcacaggcccccacgccccaaggaagccactccacacctccagggtgagacggtgtccactgactcctggggccaaaggcttggctctagtgaaggctgggaaaaccagacaaaacatacagaagagacacctgactgtgaatctgtacctgaccccagggcagcttcgggtacgtgggaagatctgcccaccagacaaagagaaggcttggcaagccacccaggtcctgaggatggtgcagacggctggggaccctccactaactctgccagagcccctcctctccccatcccagccagcagccttcttagcaacttggaacagtatctggctgaatcagtagtgaacttcacagggggccaggagcccacccagtcccctcctgctgaggaggagcggcggtacaaa

SEQ ID NO: 273865 - protein, 801 aa, Artificial Sequence
  derived and/or modified sequence
MASAPPASPPGSEPPGPDPEPGGPDGPGAAQLAPGPAELRLGAPVGGPDPQSPGLDEPAPGAAADGGARWSAGPAPGLEGGPRDPGPSAPPPRSGPRGQLASPDAPGPGPRSEAPLPELDPLFSWTEEPEECGPASCPESAPFRLQGSSSSHRARGEVDVFSPFPAPTAGELALEQGPGSPPQPSDLSQTHPLPSEPVGSQEDGPRLRAVFDALDGDGDGFVRIEDFIQFATVYGAEQVKDLTKYLDPSGLGVISFEDFYQGITAIRNGDPDGQCYGGVASAQDEEPLACPDEFDDFVTYEANEVTDSAYMGSESTYSECETFTDEDTSTLVHPELQPEGDADSAGGSAVPSECLDAMEEPDHGALLLLPGRPHPHGQSVITVIGGEEHFEDYGEGSEAELSPETLCNGQLGCSDPAFLTPSTDPLAAKLHSILTDEAFEFYCSQCHKQINRLEDLSARLSDLEMNSPTKRLSSKKVARYLHQSGALTMEALEDPSPELMEGPEEDIADKVVFLERRVLELEKDTAATGEQHSRLRQENLQLVHRANALEEQLKEQELRACEMVLEETRRQKELLCKMEREKSIEIENLQTRLQQLDEENSELRSCTPCLKANIERLEEEKQKLLDEIESLTLRLSEEQENKRRMGDRLSHERHQFQRDKEATQELIEDLRKQLEHLQLLKLEAEQRRGRSSSMGLQEYHSRARESELEQEVRRLKQDNRNLKEQNEELNGQIITLSIQGAKSLFSTAFSESLAAEISSVSRDELMEAIQKQEEINFRLQDYIDRIIVAIMETNPSILEVK

SEQ ID NO: 273866 - DNA, 2406 bp, Artificial Sequence
  derived and/or modified sequence
atggccagtgctccaccagccagcccgcccggttcagaacctccaggtcctgaccccgaacctggcggtccggacggtcctggtgctgcacaattggcgcctggtccagctgaattaaggctgggtgcacccgttggcgggccagatccccagtcaccaggtctagacgagccagctcctggagcagcggcagacgggggggctaggtggagtgctgggcccgcacctgggttagaaggcggacctagagatcctggaccatctgcccccccaccccgcagtggtcctagagggcagctggcttccccagacgcaccaggccctgggcctagatctgaggccccactacctgagctggatccgctttttagttggactgaagaacccgaggaatgcgggcctgcgtcctgtccggagagcgcccccttccggctgcaaggttcctcatcgtctcacagggcacggggggaggtggatgtcttcagcccatttccagccccaactgctggagaattggccttggagcagggccctggcagtccaccacagcctagcgacttatcccagactcatcctttgccaagcgagcctgtaggatcacaagaagacggcccgcgactcagggcggtttttgacgcactcgatggtgatggtgacggttttgtgagaattgaggacttcatccagttcgccactgtgtacggagcagagcaggtaaaggacctgaccaagtacttggacccaagtggcctcggggtgatcagttttgaagacttttaccaaggtattactgcgatacgcaatggcgaccccgacggacagtgctatggtggggttgccagtgcccaggacgaggagcccttggcgtgccctgacgaatttgacgatttcgtgacttatgaagccaatgaggtgacggacagtgcttacatggggtccgagtcaacgtactctgagtgcgagacttttaccgatgaggatacctcaaccctcgtccaccctgagctgcagccagagggtgacgccgactctgcaggcggatctgctgtgccgagcgaatgtctggatgccatggaggagcctgatcacggtgccctcctcttgctgcctgggcgccctcatccccatgggcagtccgtcataaccgtgatcgggggcgaagaacattttgaggattatggagaggggtctgaagctgagctgtcccccgaaacattatgtaacggtcagctaggctgctctgacccggcatttctcaccccctcaacagaccccctggctgccaaactgcacagcattctcacagatgaggcgttcgagttttattgcagtcagtgtcataaacaaattaatcgcttagaggacctttccgcccggttgtccgatttggaaatgaattctccgaccaaaagattgtcttctaagaaagtcgcgcggtacctccatcagtccggcgcgctcactatggaggccttggaagatccttcaccggagctgatggaaggaccagaggaagacatagcggataaggttgtgttcctcgaaagaagagttcttgagctggaaaaggatacagcagccacaggggagcagcatagccgactccgtcaagagaatctacagctggttcaccgggccaatgccctggaagaacagctgaaagagcaggagttacgagcttgcgagatggtgttagaggaaaccaggcggcagaaagagctgctctgcaaaatggaacgggagaagtctatcgaaatcgaaaatttacaaacgaggctgcagcaactggacgaggaaaactccgaactcagaagttgtaccccctgcttgaaggcaaatattgagagattggaagaggagaagcagaaactgctcgatgaaattgagagcctcactctcaggctttccgaggagcaggagaataagcggcggatgggcgaccggttatcccatgagcgccatcagtttcagcgggataaagaggccactcaagagctcatcgaggatctgagaaaacaactggaacacctgcagctcctgaaattagaagccgagcagaggcgcggaaggtctagctccatgggcttgcaagaatatcattccagagctcgggagagtgagctcgaacaggaggtgagacgcctgaaacaggacaatcgcaacctgaaagagcagaatgaggagctaaacggacagattatcacactgtccattcagggggccaagtctctattcagcaccgcgttttctgagtcgcttgcagcggagatctcatctgtgtcgagggacgagctgatggaagcgatccaaaagcaggaagaaattaactttagactgcaggactacattgatagaattattgtggcaatcatggaaacgaaccccagcattctggaggtgaagtag

SEQ ID NO: 273867 - DNA, 2406 bp, Artificial Sequence
  derived and/or modified sequence
atggccagcgcccccccagccagccccccaggcagcgagcccccaggccctgaccctgagcccggcggcccagatggccctggagctgcccagctggcccctggccctgctgagctgcggctgggcgcccctgtgggcggccctgacccccagagccctggcctggatgagcccgcccctggagctgctgctgatggaggagcccgctggagcgctggccctgcccctggcctggagggcggcccccgggaccccggccccagcgcccccccacccaggagcggcccccggggccagctggccagcccagatgcccctggccctggccccaggtctgaggcccccctgcctgagctggaccccctcttctcctggacagaggagccagaagaatgtggccctgccagctgcccagagagcgcccccttccggctgcagggcagcagcagcagccaccgggcccggggggaggtggatgtgttcagccccttccctgcccccacagctggggagctggccctggagcagggccctggcagccccccccagcccagcgacctgagccagacccaccccctgcccagcgagcctgtgggcagccaggaggatggcccccggctgcgggctgtgtttgatgccctggatggagatggagatggctttgtgagaattgaggacttcatccagtttgccaccgtgtatggagctgagcaggtgaaggacctgaccaagtacctggaccccagcggcctgggcgtcatcagctttgaggacttctaccagggcatcacagccatcagaaatggagaccctgatggccagtgctacggcggcgtggccagcgcccaggatgaggagcccctggcctgcccagatgaatttgatgactttgtgacctatgaggccaatgaggtgacagacagcgcctacatgggcagcgagagcacctacagtgaatgtgagaccttcacagatgaggacaccagcaccctggtgcaccctgagctgcagccagaaggagatgctgacagcgctgggggcagcgctgtgcccagtgaatgtctggatgccatggaggagccagaccatggagccctgctgctgctgcccggccggccccacccccacggccagagcgtcatcaccgtcatcggcggggaggagcactttgaagattatggagagggcagcgaggccgagctgagccctgagaccctgtgcaatggccagctgggctgcagcgaccctgccttcctgacccccagcacagaccccctggccgccaagctgcacagcatcctgacagatgaggcctttgagttctactgcagccagtgccacaagcagatcaaccggctggaggacctgagcgcccggctgagtgacctggagatgaacagccccaccaagaggctgagcagcaagaaggtggcccgctacctgcaccagagcggggccctgaccatggaggccctggaggaccccagccctgagctgatggagggcccagaagaagatattgctgacaaggtggtgttcctggagcggcgggtgctggagctggagaaggacacagctgccaccggggagcagcacagccggctgcggcaggagaacctgcagctggtgcaccgggccaatgccctggaggagcagctgaaggagcaggagctgcgggcctgtgagatggtgctggaggagacccggcggcagaaggagctgctgtgcaagatggagcgggagaagagcattgaaattgagaacctgcagacccggctgcagcagctggatgaagaaaattctgagctgcggagctgcaccccctgcctgaaggccaacatcgagcggctggaggaggagaagcagaagctgctggatgaaattgagagcctgaccctgcggctgtctgaggagcaggagaacaagaggaggatgggagaccggctgagccatgagcggcaccagttccagagggacaaggaggccacccaggagctgattgaggacctgaggaagcagctggagcacctgcagctgctgaagctggaggccgagcagaggcggggccgcagcagctccatgggcctgcaggagtaccacagccgggcccgggagagcgagctggagcaggaggtgcggcggctgaagcaggacaacagaaacctgaaggagcagaatgaggagctgaatggccagatcatcaccctgagcatccagggcgccaagagcctcttcagcacagccttcagcgagagcctggccgctgagatcagctctgtgtccagagatgagctgatggaggccatccagaagcaggaggagatcaacttccggctgcaggactacatcgaccgcatcatcgtggccatcatggagaccaaccccagcatcctggaggtgaagtag

SEQ ID NO: 273868 - DNA, 2406 bp, Artificial Sequence
  derived and/or modified sequence
atggccagcgccccccccgccagcccccccggcagcgagccccccggcccagaccctgaacctggaggaccggacgggcctggggctgctcagttggcccctggtcccgctgagctgcgccttggagcgccagtcgggggccctgatccgcagtcccccggcctcgacgagcctgctccaggcgctgccgctgacgggggggcccgctggagtgcaggcccggccccaggactcgagggtggccccagagacccagggcctagtgcccctcctcccaggagcggccccagggggcaacttgctagtccggacgcaccaggccccggcccacgctctgaagcccctctccctgagttggaccctctgtttagctggacggaagagcccgaggaatgtggtcccgcatcttgccccgaatctgcccctttcagacttcagggttcttcttcctctcaccgggctaggggtgaggtcgatgtcttttccccttttccagcacccactgcaggagagttggctctggaacagggacctggtagtccgccccagccatccgatttgagccaaacgcatccactgccgagtgagcccgtcggatcccaagaagatggcccccgacttagggccgtgttcgacgccttggatggtgatggcgacggcttcgtcagaattgaggacttcatccagtttgcaaccgtgtacggcgccgaacaggtcaaagacttgaccaaatatctggacccttcaggccttggggtgatcagctttgaagatttttaccagggtattactgccatcaggaacggcgaccctgacggtcagtgttatggcggagtcgcctcagcccaggatgaggaacccctggcctgccctgacgaattcgacgacttcgtaacttatgaggccaatgaggtcaccgacagtgcctatatgggctccgagagtacctatagtgagtgtgagactttcaccgatgaggataccagcacgctggtgcacccagagctgcagcccgagggtgatgcagactcagccggcggctctgccgtgcctagcgagtgtttggatgctatggaagaacccgaccacggcgccctactcttactacctgggcgacctcatcctcatggacagtcagtcattactgtcatcggcggagaggagcactttgaggattatggggaagggtcagaggcggagttatcccccgagacactgtgcaatggtcaactgggctgctcagaccccgcttttttaacacctagcacggaccctttagccgccaaattacactccatactcacggatgaggctttcgagttttactgttcacagtgtcacaagcagattaatagattggaagatttgagtgcacgactctctgatctggaaatgaattcaccaactaaacggctgagtagcaagaaggtggcaagatacctgcatcaatcaggagcgcttacaatggaggccctggaggatcctagccccgagctgatggagggccccgaggaggatattgcggacaaggtggtgttcttagagcggagggtgctagagctggaaaaagataccgcagcgactggcgagcagcattctaggttgcgacaagagaatctgcagctggtccatcgagccaacgcactggaggagcagctgaaagagcaggaactgagggcgtgcgaaatggtgctggaggagacccgcaggcagaaggagctactctgtaaaatggagagagagaagtcaatcgaaattgaaaatctccagacgcggttacagcaactggacgaagagaattcggagttgaggtcgtgcaccccatgtctaaaggcgaatattgagcggctagaagaagagaagcaaaaactcctggacgaaatcgaatccctcaccctaagactgagcgaggaacaagaaaacaagagacgaatgggagaccggctctcccacgagcgccatcagttccagcgcgataaggaagctacacaggagctcatcgaagatctccggaagcagctggaacatctgcagctgttgaagctggaagcagagcagcggaggggtaggtcatcaagcatggggctgcaggagtaccactcgagggcacgcgaatccgagctcgaacaagaagtccgacgtctaaaacaggataaccgcaacctgaaggaacagaacgaagaacttaacgggcaaattattaccctgtccatccagggagccaagtccttgttctccaccgcctttagtgagtcacttgctgctgaaatttcctccgtctctcgggacgagctgatggaagctatacaaaaacaagaggagatcaactttcgactgcaggactacatagatagaatcattgttgccattatggagaccaacccaagcatactcgaggtgaagtag

SEQ ID NO: 273869 - DNA, 2406 bp, Artificial Sequence
  derived and/or modified sequence
atggccagcgccccaccagctagccccccaggaagtgagcctcctggtccagatcccgagcccggaggaccggatggtccaggcgcagcgcaattggctccaggacctgccgagttgagactaggcgcacccgttgggggtccggacccccagagccctgggttagacgagccagcccctggggctgcagcagatgggggtgctcggtggtcagccggaccggcacccggactggagggaggcccacgggatcctggcccaagcgctccacccccacgtagcggcccaaggggccagctggcttctcccgacgcaccaggtcctgggccacgatccgaagcgcctctgccagagttggatccactgttttcttggacagaggaacctgaagagtgtggtcccgcaagctgtcccgagagcgctcccttccggctgcagggatctagctcctcgcaccgagctcgcggagaagtcgacgtgtttagtccctttcccgcaccaaccgccggtgagctggcactcgagcagggacccggatcaccaccccagccttccgatctatcccagactcacccattgcccagtgaacctgtgggcagccaggaggacggacctagactgcgagcggtgtttgacgcccttgacggggacggtgatggtttcgtccgaatcgaggactttattcaatttgctaccgtttatggcgcagagcaggtcaaggaccttacgaagtacttagatccctccgggttgggagtcatcagcttcgaggatttctatcagggcattacagccatcaggaatggggacccagacgggcaatgttacggtggcgtggcatctgcccaggacgaggaacccctcgcctgccccgacgagttcgatgattttgttacctacgaagcgaatgaagtgactgactcagcgtatatgggaagcgaatctacttactccgaatgcgaaacttttacagatgaagacacctccactctggtacaccccgaattgcaaccggagggcgacgcggactccgctggcggaagcgctgttccttccgagtgccttgacgctatggaagaacctgatcatggggctctgctgttgttacctggccgaccacacccccatggccagagtgtcatcactgtgatagggggtgaggaacatttcgaggattatggagagggatccgaagcagaattatctcccgagactctctgcaatgggcagcttggttgctccgatcccgcatttctcacaccttctacagatccactggctgccaagctgcactctattctgactgacgaagccttcgagttttactgcagtcagtgtcacaagcagatcaaccgtcttgaggatctgagcgcccgactgtccgacctcgagatgaattcccctaccaagcgcctttcatccaaaaaggtggcccgttacctgcaccagtctggcgctttgacaatggaagccctggaggatccgagccctgagctgatggaggggccagaagaggacatcgctgataaggttgtgtttcttgaaaggcgggtgcttgagcttgagaaagacactgcagccaccggagagcaacattctcgcctgagacaagagaacctgcaacttgtgcacagagccaatgctttagaagaacagctcaaggaacaagagctgcgagcttgtgaaatggtcctcgaggaaactagacgtcagaaggaattgctgtgtaagatggaaagagagaaatccatcgagatcgaaaatctgcaaacgcgccttcagcagcttgacgaggaaaactcagagcttaggtcttgcactccttgcctcaaagctaacatagaacgcctcgaagaagagaaacagaaactgctcgacgagatcgagagcctgacactccgactctcagaggagcaagaaaacaaaaggcgcatgggggaccggctgtctcatgagagacaccagtttcagagagacaaggaagctacacaggaacttatcgaggacctccgcaagcagttggaacacctgcagctccttaagctggaagccgaacagcggagagggaggtccagtagcatgggtctgcaggaataccactcccgggctcgagaatccgagctggagcaggaagtgcgaaggctgaagcaggataatcgtaaccttaaggaacaaaacgaggagctgaacggccagatcatcactctgagcatccagggagccaagtccctgttctctactgccttttcagagtctcttgccgctgagatcagtagcgtgagcagggacgaactgatggaggctatccagaaacaggaagagattaactttagacttcaggactacatagacagaattatcgtagccattatggagacgaacccctccatcttggaggtaaagtag

SEQ ID NO: 273870 - DNA, 4384 bp, Artificial Sequence
  derived and/or modified sequence
tcctgcttcacaggctccgcggcctccggcctcctcggcccccgtcccccggcctcctcggcccccgtcccccgccatccgccgcccggatcctcgccgccctccctaggccgccccgccgccatgggcctgcgcccgccgcgccgccgggccgagggcagctgaggcgcggtgcgaagatgggcgaggacagagcagggcccgagcgccagccccagcagcccgggcgccccgcgcgcgcccgcccgcgccgccgaggggatgcccgcgcccgccgccgcgccctgagcgcctttgtctgccgcccgcgcccttccgcaccactagcctctcgggagcatggcgtcggccccgccggcctcgcccccgggctcggagccgccggggcccgacccggagccgggcgggccggacgggccgggggcggcacaactggctccgggccctgcggagctacgcctcggagcgcccgtcggcggccccgacccgcagtccccgggcctggatgagcctgcgcccggggccgctgcagatggcggggcgcgttggagcgccgggccggccccggggctggagggaggcccgcgagaccccgggccgtccgccccgccgccgcgctccggcccgcgggggcagcttgcgagccccgacgccccgggcccagggccgcgctccgaagcgccgcttccagaactcgacccgttgttctcctggactgaggagcccgaggagtgtggccccgcgagctgcccggagagcgcgcctttccgcttgcaggggtccagcagcagccaccgagcgcggggcgaggtcgacgtcttctctcccttccccgcgcccacggcgggcgagctggcgctggagcaaggtcccgggtccccgccgcagccctcggacctcagccagacccacccccttccgagcgagcccgtggggagtcaggaggacggcccccgcctccgagccgtgttcgatgccctggacggggatggggacggtttcgtccgcatcgaggacttcatccagtttgctacggtctacggggcagagcaggtgaaggacttaactaagtacttggatcccagtgggctcggcgtgatcagctttgaagacttctaccaagggatcacagccatcagaaacggagatcctgatggccagtgctacggtggtgtcgcttctgcccaagatgaggagcccctggcctgcccggacgagttcgatgacttcgtcacctatgaggccaacgaggtgacggacagcgcgtacatgggctccgagagcacctacagtgagtgtgagaccttcacggacgaggacaccagcaccctggtgcaccctgagctgcaacctgaaggggacgcagacagtgccggcggctcggccgtgccctctgagtgcctggacgccatggaggagcccgaccatggtgccctgctgctgctcccaggcaggcctcacccccatggccagtctgtcatcacggtgatcgggggcgaggagcactttgaggactacggtgaaggcagtgaggcggagctgtccccagagaccctatgcaacgggcagctgggctgcagtgaccccgctttcctcacgcccagcactgaccctcttgccgcaaagctgcacagcatcctcactgatgaggcgtttgagttttactgtagccagtgccacaaacaaatcaaccgccttgaggatctttctgcccgcctgagtgatcttgaaatgaatagtccgacaaagcggctctccagcaagaaggtggcaaggtacctgcaccagtcaggggccctgaccatggaggccctggaggacccttcccccgagctcatggagggcccagaggaggacattgctgacaaggttgtcttcctggaaaggcgtgtgctggagctggaaaaggacacggcagccaccggtgagcaacacagccgcctgaggcaggagaacctgcagctggtgcacagagcaaacgccctggaggagcagctgaaggagcaggagctgagagcctgcgagatggtcctggaagagacccggcgtcagaaggagctcctgtgcaagatggagagggagaagagcattgagatcgagaacctgcagaccaggctacagcaactggacgaggagaacagtgaactccggtcctgcacgccctgtctgaaggccaacattgagcgtctggaggaggagaagcagaagctgttggatgagatagagtcgctgacgctgcggctcagtgaagagcaggagaacaagaggagaatgggggacaggctgagtcacgagaggcaccagttccagagggacaaggaggccacccaggagctgatcgaggacctccgaaagcagctggagcacctgcagctcctcaagctggaggccgagcagcggcggggccgcagcagcagcatgggcctgcaggagtaccacagccgcgcccgggagagcgagctggagcaggaggtccgcaggctgaagcaggacaaccgcaacctgaaggagcagaacgaggagctgaacgggcagatcattaccctcagcatccagggcgccaagagcctcttctccacagccttctctgagtccctggctgcagagatcagctccgtctcccgagatgagctcatggaggcgattcagaagcaggaggagatcaacttccgcctgcaggactacatcgacaggatcatcgtggccatcatggagaccaacccgtccatcctggaggtcaagtagaggcaggaaggtccagcctgagctggattcgggactccaacaccctggagtggttccgtcagaccatgaggagccaagaccagcaggtcccacagccgacagtgcccagagcatgcagggaaccctcgtgcagctgagctggggccgccaaagaccggggctgccaaaggggcagagggtggtggagaggagagggagaaagggaagtcccagggcccggggtccacagaggatgagggttgtggcagggccgtccatcagcgctgaccttccgggggcccagagcttcccagccctgagtcaagctggccatgaacgcgtacacttcagttcagcaggatgggctggagagcctctctgtgcagcggtgtggggtgagccctgctgtggcctccttgtggtggtccctcttcccacgtgcagccctgttgggaagaaaggaagaaaacaggtccctccaggggtgctgctgcctaagccacccacataagtacgctggtgccgtgtcacccatgttgagccgctcctgatggctgacgggctcccagaccctcacctcggacatggtggtgggggaaggacgggtgggcaaggctggtgcgttccccagctctccctacgctgctcgggccattgcccagccagatgtggtcacctcagtccagctctggggcctccaggccatgtggctgttcccacggcccagtcctcgctgcagtaacccctgggggctctgaccacctatgggggccgggcaggagcctctggggcctccactccgacatcaggacctgagatgaccgctgtgtggcgctctctccctgggcagggtggatgccacaggcccctctggctcccaggtgctgcttctccacaggtgcggcctggcccggcctcctaaaggccacaccctccccacgcacttcccaggccagaatccaaacatcgggaaccctgttttcttctgggtgtgtctcacttagaaatcgtggttcttccccgagggtgcatgttgcaggagggagagggcagggaagactcacagcagagcaggagggggcctgtgcttctcggggtctgcaccccaggcacagcggtgtcaccccgcaggaccgcgggcctgccccaacccccagcattcccgggtgggcccagaccccatcaccaagactggccacccgctgcgtgtgtgtgcgcgcgcgtgtacgtgtggccccacatccgccgccttccacgctaggatgtaagaggtcgcctcctattgtacatttggggaaagccttgggtgtaaatcagtgtaaacttggaggagagatttttctatcatgtagagtaggtattttttatagattgaaggttgatcaattttttaatactttcaagagaaaactgtgtatacacatgaaatatatatatatatatatatatatatatgtataatatataaagactggcaccctgcctctctgtgcccaggcccagccctggtgacatggcaccactcagcagtgctgtcactgtaagcatggactcccaggagacagtgtgggaaacgctcctgctttaattccccgagaaacggctcttcctgcctggatgcaggagggcaggggccaccacagattaaagctgttactgc

SEQ ID NO: 273871 - DNA, 2406 bp, Artificial Sequence
  derived and/or modified sequence
atggccagcgccccccccgccagcccccccggcagcgagccccccggccccgaccccgagcccggcggccccgacggccccggcgccgcccagctggcccccggccccgccgagctgagactgggcgcccccgtgggcggccccgacccccagagccccggcctggacgagcccgcccccggcgccgccgccgacggcggcgccagatggagcgccggccccgcccccggcctggagggcggccccagagaccccggccccagcgcccccccccccagaagcggccccagaggccagctggccagccccgacgcccccggccccggccccagaagcgaggcccccctgcccgagctggaccccctgttcagctggaccgaggagcccgaggagtgcggccccgccagctgccccgagagcgcccccttcagactgcagggcagcagcagcagccacagagccagaggcgaggtggacgtgttcagccccttccccgcccccaccgccggcgagctggccctggagcagggccccggcagccccccccagcccagcgacctgagccagacccaccccctgcccagcgagcccgtgggcagccaggaggacggccccagactgagagccgtgttcgacgccctggacggcgacggcgacggcttcgtgagaatcgaggacttcatccagttcgccaccgtgtacggcgccgagcaggtgaaggacctgaccaagtacctggaccccagcggcctgggcgtgatcagcttcgaggacttctaccagggcatcaccgccatcagaaacggcgaccccgacggccagtgctacggcggcgtggccagcgcccaggacgaggagcccctggcctgccccgacgagttcgacgacttcgtgacctacgaggccaacgaggtgaccgacagcgcctacatgggcagcgagagcacctacagcgagtgcgagaccttcaccgacgaggacaccagcaccctggtgcaccccgagctgcagcccgagggcgacgccgacagcgccggcggcagcgccgtgcccagcgagtgcctggacgccatggaggagcccgaccacggcgccctgctgctgctgcccggcagaccccacccccacggccagagcgtgatcaccgtgatcggcggcgaggagcacttcgaggactacggcgagggcagcgaggccgagctgagccccgagaccctgtgcaacggccagctgggctgcagcgaccccgccttcctgacccccagcaccgaccccctggccgccaagctgcacagcatcctgaccgacgaggccttcgagttctactgcagccagtgccacaagcagatcaacagactggaggacctgagcgccagactgagcgacctggagatgaacagccccaccaagagactgagcagcaagaaggtggccagatacctgcaccagagcggcgccctgaccatggaggccctggaggaccccagccccgagctgatggagggccccgaggaggacatcgccgacaaggtggtgttcctggagagaagagtgctggagctggagaaggacaccgccgccaccggcgagcagcacagcagactgagacaggagaacctgcagctggtgcacagagccaacgccctggaggagcagctgaaggagcaggagctgagagcctgcgagatggtgctggaggagaccagaagacagaaggagctgctgtgcaagatggagagagagaagagcatcgagatcgagaacctgcagaccagactgcagcagctggacgaggagaacagcgagctgagaagctgcaccccctgcctgaaggccaacatcgagagactggaggaggagaagcagaagctgctggacgagatcgagagcctgaccctgagactgagcgaggagcaggagaacaagagaagaatgggcgacagactgagccacgagagacaccagttccagagagacaaggaggccacccaggagctgatcgaggacctgagaaagcagctggagcacctgcagctgctgaagctggaggccgagcagagaagaggcagaagcagcagcatgggcctgcaggagtaccacagcagagccagagagagcgagctggagcaggaggtgagaagactgaagcaggacaacagaaacctgaaggagcagaacgaggagctgaacggccagatcatcaccctgagcatccagggcgccaagagcctgttcagcaccgccttcagcgagagcctggccgccgagatcagcagcgtgagcagagacgagctgatggaggccatccagaagcaggaggagatcaacttcagactgcaggactacatcgacagaatcatcgtggccatcatggagaccaaccccagcatcctggaggtgaagtag

SEQ ID NO: 273872 - DNA, 224 bp, Artificial Sequence
  derived and/or modified sequence
tcgggttctgtggacacaggcaggaagcttaagaggctctgctgagcagggacctggggaagaggagaggagaggcagcagcatggcgagtgtcctgtcccgacgccttggaaagcggtccctcctgggagcccgggtgttgggacccagtgcctcggaggggccctcggctgccccaccctcggagccactgctagaaggggccgctccccagcctttcacca

SEQ ID NO: 273873 - DNA, 2406 bp, Artificial Sequence
  derived and/or modified sequence
atggccctgtactacgaccaccagatcgaggcccccgacgccgccggcagccccagcttcatcagctggcaccccgtgcaccccttcctggccgtggcctacatcagcaccaccagcaccggcagcgtggacatctacctggagcagggcgagtgcgtgcccgacacccacgtggagagacccttcagagtggccagcctgtgctggcaccccaccagactggtgctggccgtgggctgggagaccggcgaggtgaccgtgttcaacaagcaggacaaggagcagcacaccatgcccctgacccacaccgccgacatcaccgtgctgagatggagccccagcggcaactgcctgctgagcggcgacagactgggcgtgctgctgctgtggagactggaccagagaggcagagtgcagggcacccccctgctgaagcacgagtacggcaagcacctgacccactgcatcttcagactgcccccccccggcgaggacctggtgcagctggccaaggccgccgtgagcggcgacgagaaggccctggacatgttcaactggaagaagagcagcagcggcagcctgctgaagatgggcagccacgagggcctgctgttcttcgtgagcctgatggacggcaccgtgcactacgtggacgagaagggcaagaccacccaggtggtgagcgccgacagcaccatccagatgctgttctacatggagaagagagaggccctggtggtggtgaccgagaacctgagactgagcctgtacaccgtgccccccgagggcaaggccgaggaggtgatgaaggtgaagctgagcggcaagaccggcagaagagccgacatcgccctgatcgagggcagcctgctggtgatggccgtgggcgaggccgccctgagattctgggacatcgagagaggcgagaactacatcctgagccccgacgagaagttcggcttcgagaagggcgagaacatgaactgcgtgtgctactgcaaggtgaagggcctgctggccgccggcaccgacagaggcagagtggccatgtggagaaaggtgcccgacttcctgggcagccccggcgccgagggcaaggacagatgggccctgcagacccccaccgagctgcagggcaacatcacccagatccagtggggcagcagaaagaacctgctggccgtgaacagcgtgatcagcgtggccatcctgagcgagagagccatgagcagccacttccaccagcaggtggccgccatgcaggtgagccccagcctgctgaacgtgtgcttcctgagcaccggcgtggcccacagcctgagaaccgacatgcacatcagcggcgtgttcgccaccaaggacgccgtggccgtgtggaacggcagacaggtggccatcttcgagctgagcggcgccgccatcagaagcgccggcaccttcctgtgcgagacccccgtgctggccatgcacgaggagaacgtgtacaccgtggagagcaacagagtgcaggtgagaacctggcagggcaccgtgaagcagctgctgctgttcagcgagaccgagggcaacccctgcttcctggacatctgcggcaacttcctggtggtgggcaccgacctggcccacttcaagagcttcgacctgagcagaagagaggccaaggcccactgcagctgcagaagcctggccgagctggtgcccggcgtgggcggcatcgccagcctgagatgcagcagcagcggcagcaccatcagcatcctgcccagcaaggccgacaacagccccgacagcaagatctgcttctacgacgtggagatggacaccgtgaccgtgttcgacttcaagaccggccagatcgacagaagagagaccctgagcttcaacgagcaggagaccaacaagagccacctgttcgtggacgagggcctgaagaactacgtgcccgtgaaccacttctgggaccagagcgagcccagactgttcgtgtgcgaggccgtgcaggagacccccagaagccagccccagagcgccaacggccagccccaggacggcagagccggccccgccgccgacgtgctgatcctgagcttcttcatcagcgaggagcacggcttcctgctgcacgagagcttccccagacccgccaccagccacagcctgctgggcatggaggtgccctactactacttcaccagaaagcccgaggaggccgacagagaggacgaggtggagcccggctgccaccacatcccccagatggtgagcagaagacccctgagagacttcgtgggcctggaggactgcgacaaggccaccagagacgccatgctgcacttcagcttcttcgtgaccatcggcgacatggacgaggccttcaagagcatcaagctgatcaagagagcctag

SEQ ID NO: 273874 - DNA, 2406 bp, Artificial Sequence
  derived and/or modified sequence
atggccctgtactatgaccatcaaattgaggcccctgatgcagccgggtcgccatcattcatctcttggcatcctgtacacccattcttagccgtggcctacatctcaactacaagtacaggctcagttgacatttacctggagcagggcgaatgcgtcccagacacgcatgtggagaggccatttcgcgtcgcatctctctgctggcaccccacccggctggtgctggcagtcggctgggagacaggcgaggtaactgtgttcaataagcaggacaaggaacagcacaccatgcctctcacacacacggcagacatcacggttctgcgatggtccccctcaggtaactgtctgctttccggggacaggctgggcgtgttgcttttgtggcggcttgatcaacgggggcgagtacaagggacgccccttctcaagcacgagtatgggaagcatctaacgcactgcatctttcgactccctccccccggggaggatctcgtgcagctggccaaggctgctgtctctggtgatgaaaaggcactcgacatgttcaattggaaaaaaagctcgtccgggtcgctgcttaagatggggagccatgaagggctcctgttctttgtgagccttatggatgggactgtccactatgtggacgagaaaggaaaaaccacacaagttgttagcgccgattcgacgattcaaatgttattttatatggagaagagggaggctttggttgtagtgacggagaacttgcggctgtccttatatacagtgcccccagaaggcaaggcagaggaggttatgaaggtcaaactctctggaaaaacaggtagacgagccgacattgccctgatcgaggggagtctgctcgtgatggcagtgggggaggctgccctgcgcttctgggatatcgaacggggggagaattatatcctcagccctgatgagaaattcggattcgaaaagggcgaaaatatgaactgtgtttgctactgcaaagtgaagggactcctggccgcgggcacagacagaggtcgcgtggccatgtggcgtaaggtgcccgatttcctgggcagtcccggcgccgagggcaaggacaggtgggcgctgcaaacgccaaccgagctgcaaggcaacatcacgcaaatccagtggggaagccgcaaaaatcttctggccgtcaactcagttatttctgttgcaatcctctctgagcgcgcaatgagtagccatttccaccagcaggttgccgcaatgcaggtgtctccatctctcctgaacgtctgttttctcagtaccggggtcgctcactcactgcgaaccgacatgcatatttcaggagtgttcgctacgaaagatgcggtggccgtatggaatggccgtcaggttgctattttcgagctttcaggagcagcaatcaggagcgcaggcacttttctctgtgagacccccgtcctggccatgcacgaagagaatgtatacacagttgaaagcaaccgagtgcaggtgagaacatggcaagggactgtaaaacaactactgttgttcagtgaaactgagggcaatccttgttttttggacatttgcggaaattttctggtggtcggcaccgacctggcccatttcaagtccttcgacctaagccgtagagaagccaaggcccactgctcttgtcgcagcttggccgagcttgtgcccggcgttggaggtattgcctctttacgctgtagctcgagtgggtccactatcagcatcttacctagcaaagccgataacagtcccgatagcaagatttgtttctatgatgttgaaatggacacggttactgtctttgacttcaagactgggcagatcgacaggcgggagaccctgtcatttaatgaacaggagactaataagagtcacctttttgtcgacgagggtctgaaaaattatgtcccggtgaaccatttctgggatcaaagcgaaccgaggttgttcgtttgcgaggcagtccaggagactcccaggtcacagccccagagcgcaaatggacagcctcaggatggccgagctgggccggcagcggacgtgttaattctgtctttttttataagcgaagagcacggttttctgctgcacgagagcttcccgagacctgcaacttctcactccctgctgggtatggaggttccatattactatttcacacgaaagcccgaagaggctgatcgagaggacgaagttgaaccaggctgtcaccacattccccagatggtgtcccggaggccccttagggacttcgtggggctggaagactgtgataaggccaccagggatgccatgctacacttcagctttttcgttacaattggtgatatggacgaggcctttaagtccatcaaactgatcaaacgcgcctag

SEQ ID NO: 273875 - DNA, 2406 bp, Artificial Sequence
  derived and/or modified sequence
atggccctgtactatgaccaccagatcgaggccccagatgctgctggcagccccagcttcatctcctggcaccctgtgcaccccttcctggccgtggcctacatcagcaccaccagcacaggctctgtggacatctacctggagcagggagaatgtgtgcctgacacccacgtggagcggcccttccgggtggccagcctgtgctggcaccccacccggctggtgctggccgtgggctgggagaccggggaggtgaccgtcttcaacaagcaggacaaggagcagcacaccatgcccctgacccacacagctgacatcaccgtgctgcgctggagccccagcggcaactgcctgctgagcggggaccggctgggcgtgctgctgctgtggaggctggaccagaggggccgggtgcagggcacccccctgctgaagcatgaatatggcaagcacctgacccactgcatcttccggctgcccccacctggagaggacctggtgcagctggccaaggctgctgtgtctggagatgagaaggccctggacatgttcaactggaagaagagcagcagcggcagcctgctgaagatgggcagccatgagggcctgctcttctttgtgtccctgatggatggcaccgtgcactacgtggatgagaagggcaagaccacccaggtggtgtctgctgacagcaccatccagatgctgttctacatggagaagcgggaggccctggtggtggtgacagagaacctgcggctgagcctgtacacagtgcccccagagggcaaggccgaggaggtgatgaaggtgaagctgagcggcaagacaggaagaagagctgacatcgccctgattgagggcagcctgctggtgatggctgtgggggaggccgccctgcgcttctgggacatcgagagaggagagaactacatcctgagcccagatgagaagtttggatttgagaagggggagaacatgaactgtgtgtgctactgcaaggtgaagggcctgctggccgccggcacagaccggggccgggtggccatgtggaggaaggtgcctgacttcctgggcagccctggagctgagggcaaggaccgctgggccctgcagacccccacagagctgcagggcaacatcacccagatccagtggggcagcaggaagaacctgctggccgtgaacagcgtcatctctgtggccatcctgtctgagcgggccatgagcagccacttccaccagcaggtggccgccatgcaggtgagccccagcctgctgaatgtgtgcttcctgagcactggagtggcccacagcctgaggacagacatgcacatctctggagtgtttgccaccaaggatgctgtggccgtgtggaatggccggcaggtggccatctttgagctgagcggggccgccatccgctctgctggcaccttcctgtgtgagacccctgtgctggccatgcatgaggagaatgtgtacacagtggagagcaacagagtgcaggtgaggacctggcagggcaccgtgaagcagctgctgctcttcagcgagacagagggcaacccctgcttcctggacatctgtggcaacttcctggtggtgggcacagacctggcccacttcaagagctttgacctgagccggcgggaggccaaggcccactgcagctgccgcagcctggccgagctggtgcctggggtgggcggcatcgccagcctgcgctgcagcagcagcggcagcaccatcagcatcctgcccagcaaggctgacaacagcccagacagcaagatctgcttctatgatgtggagatggacacagtgacagtgtttgacttcaagacaggccagattgacagaagagagaccctgtccttcaatgagcaggagaccaacaagagccacctgtttgtggatgagggcctgaagaactacgtgcctgtgaaccacttctgggaccagagcgagccccggctgtttgtgtgtgaggccgtgcaggagacccccaggagccagccccagagcgccaacggccagccccaggacggccgggccggccctgctgctgatgtgctgatcctgtccttcttcatcagcgaggagcacggcttcctgctgcacgagagcttccccaggcctgccaccagccacagcctgctgggcatggaggtgccctactactacttcaccaggaagccagaggaggccgaccgggaggatgaggtggagcccggctgccaccacatcccccagatggtgtcccggcggcccctgcgggactttgtgggcctggaggactgtgacaaggccaccagagatgccatgctgcacttctccttctttgtgaccatcggggacatggatgaggccttcaagagcatcaagctgatcaagagggcctag

SEQ ID NO: 273876 - DNA, 2580 bp, Artificial Sequence
  derived and/or modified sequence
aacgcgcggcggctcagcggcctggcagaggtttcagcgctgaggaggcctgagttccgtcatggccctctattatgaccaccagatagaagccccggatgcagcagggtcaccctcatttatcagctggcaccctgtccatccattcttggcagttgcttacatcagcacaacctcaacaggcagcgtggatatttacctggagcaaggggagtgcgtgccagatacacacgtcgagaggccgttccgggttgcttccctgtgctggcacccgacgcggctggtgctggctgtgggctgggagactggagaagtgacggtgtttaacaagcaggacaaggagcagcacacgatgcccctgacacacacagccgacatcaccgtgctccgttggagccccagtggaaactgcctgctgtctggggacaggcttggtgtcttgctcttgtggaggttggaccaaaggggccgagtgcaagggacgcctctgctgaaacacgagtatgggaaacacctcacgcactgcatcttccggctcccccctcctggcgaggacctggttcagttggcaaaggcagctgtgagcggtgatgagaaagccctggacatgtttaactggaagaagagcagttctggaagtttgctgaagatggggtctcacgaggggctgttgttctttgtcagtctgatggacgggacagtgcactatgtggatgagaagggcaagaccactcaggtggtgtccgcagacagcacgattcagatgctgttctacatggagaagagggaggcactggtggtggtcacagagaacctccggctgtccctgtacacggtgcctcctgagggcaaagcagaagaagtgatgaaggtcaagctgagcgggaaaaccggccgccgggcagacatcgctttgattgaaggcagccttctcgtgatggccgtcggggaggctgccctcagattctgggacatagaacgaggagagaattatatactgagtccagatgagaagtttggctttgagaaaggagagaatatgaactgtgtgtgttactgtaaagtcaaaggtcttctggccgctggtaccgacagagggcgagtagccatgtggaggaaagtaccagacttcctgggcagccccggggcagagggcaaggacaggtgggcccttcagacccctaccgagctccaaggaaacatcacgcaaatccagtggggttccaggaagaacctgctggcagtgaacagcgtcatctccgtggccatcctcagcgagcgggccatgtcgtcacacttccaccagcaagtggccgccatgcaggtctccccgagtctgctgaatgtgtgcttcctgtccacgggggtcgcacacagcctgcgcaccgacatgcacatcagtggagtgtttgccaccaaggatgctgtcgcagtctggaacggaaggcaggtggcgatcttcgagctttctggagccgcgatacggagtgcagggaccttcttgtgtgagacgcctgtgttagcaatgcatgaagaaaacgtttacacggtggagtcaaaccgagttcaagttcgaacctggcaggggactgtcaaacaactcctccttttctcggagactgaggggaatccctgcttcttggacatctgtgggaatttcctggttgtagggacagacttggctcactttaaaagctttgatctttcccgaagagaggccaaagcacactgtagctgcaggagcctggcggagctggtccctggggtggggggcatcgcttctctgcggtgcagcagcagcgggagcaccatcagcatcctccccagcaaggctgacaacagccctgattccaaaatctgcttctacgatgttgaaatggacacagtgaccgtctttgacttcaagactggacaaattgatcggagagagacgctgtcctttaatgagcaagagactaataagagccacctctttgtggatgagggactgaaaaattatgttcccgtgaaccacttctgggaccagagtgagccccggctgtttgtatgcgaagccgtgcaggagacgccgcgctcccagcctcagtctgcaaacgggcagccccaagatgggcgcgctggccctgcggcagatgttttgatcctgtccttcttcatttccgaagagcacggcttcctgcttcatgagagcttcccccggcctgccacctcccacagtctcctggggatggaagtgccttattactacttcacaagaaagcccgaagaagcagacagagaagacgaggtggagcctgggtgccaccacatccctcagatggtgtccaggagacccctgcgagactttgtggggctggaggactgcgacaaggccacccgggacgccatgctccacttcagcttctttgtcaccataggagacatggacgaagccttcaaatccatcaagctcatcaaaagagcctgaaaccagagaaggagaggtgggccgtgagcaacccttggttggcgcagcttgttcccgtctagttagtcgctgatgctacagtttcacttacagttttatctttgaggagctcc

SEQ ID NO: 273877 - DNA, 2406 bp, Artificial Sequence
  derived and/or modified sequence
atggccctgtactacgaccaccagatcgaggcccccgacgccgccggctctccctcttttatctcttggcaccctgtccatccctttctcgctgtagcctacatctctaccacctctaccggctccgtggatatctatcttgagcagggagagtgcgtgcccgacacccatgtagagcgtcctttccgcgtcgcttcgctgtgctggcaccctactcgactcgtgctggctgtgggctgggaaaccggcgaagtgaccgtgttcaacaagcaggacaaagaacagcacactatgcctttgacccacactgcagatattacagttctgagatggagtccctctggtaactgtctgctgtccggggaccggttaggggtgctactattatggcgcctggatcagcgaggacgcgtgcagggcacacccctactaaaacatgagtatggtaaacatctcacgcactgcatctttcgcctccccccgcctggggaggacctcgttcagttagccaaggctgccgtctctggcgatgagaaggctctggatatgtttaactggaagaaaagtagttccggttcccttctcaaaatgggctctcatgaggggctgctgttcttcgtctcgttgatggatggaacagtgcactatgtggacgagaagggcaagacaacccaggtcgtgtcggcggattcaaccattcagatgctgttctacatggagaagagagaagcactggtggttgtcaccgaaaacttgcgactaagcctgtacactgtgccaccagagggcaaggctgaagaagtaatgaaggtcaagctgagcggcaaaaccggcaggagagccgacattgctctgatcgaggggtctctgctcgtgatggccgtgggggaagccgcactgcggttttgggacatcgagcgcggcgaaaactatattctgtcacccgacgagaagtttggtttcgagaaaggagaaaatatgaactgcgtgtgctactgtaaagttaaggggctgctcgcagccggaacagataggggaagagtggctatgtggcggaaggtgcctgatttccttggctccccgggggccgagggcaaagatcggtgggctttgcagactccgacagagctgcaggggaatattacccagatacagtggggatctcgaaagaacctcctagctgtgaatagcgtgataagtgtggccatcctaagcgaacgggcaatgtcgtcccactttcaccagcaggtggcagctatgcaggtttcgccttcactgctgaatgtgtgcttcctgagtaccggagtggcccactcattgaggaccgacatgcatatctcaggggtgttcgccactaaggatgccgtcgccgtctggaacggcaggcaggtcgctatttttgagttaagcggagcagctatacgctcagccggcacattcttgtgtgaaactcctgtgttagcgatgcacgaggagaacgtgtataccgtggaaagcaatcgcgtccaggttagaacgtggcaggggactgtcaagcaactcctcctcttttccgaaacggaaggtaacccatgctttctggacatctgtggaaacttcctcgtagttggtacagacctagcccacttcaaatcctttgatctcagcagacgagaggctaaagcccactgctcctgccgaagtctggccgagctggtacctggcgttggtggtatcgcctcattacggtgtagttctagtggaagcaccatatccatcctccccagtaaggcggacaatagccccgactctaagatttgtttctacgacgtggagatggacacggtaactgtctttgattttaagactggtcagatcgaccgacgagaaactttgtccttcaatgaacaggagaccaacaaatcccacctatttgtcgacgagggccttaaaaactacgtgcctgtgaaccatttttgggaccagagcgagccacgactcttcgtctgcgaggccgttcaggaaacaccaagatcgcaacctcaaagcgccaacgggcagccgcaggacggccgtgcgggaccagctgcagatgtcctcattttgtctttcttcatctctgaggaacatggctttctacttcacgaaagcttcccccggccagcaacttctcactccctgctcgggatggaggtgccttactattacttcaccagaaagccagaggaagctgatagagaggatgaagtggaaccagggtgccatcacatcccacaaatggtgtcacggcggcctctgagggattttgtaggcttagaagactgtgacaaggccacacgagacgccatgcttcatttttctttctttgtgactataggcgacatggacgaagcttttaagagtatcaagctaattaagagggcgtag

SEQ ID NO: 273878 - DNA, 2406 bp, Artificial Sequence
  derived and/or modified sequence
atggctctctattacgaccatcagatcgaagcccctgacgcggctgggagcccgtccttcataagttggcacccagtccacccttttcttgctgtggcctacatcagcacaaccagtacaggcagcgtggacatctatttggagcagggggagtgtgtgcccgacacacatgtagagaggcccttcagggtggcttccctctgttggcaccctaccagactggttctggctgttgggtgggagaccggtgaggtcaccgtatttaataagcaggacaaagagcagcatacaatgcctctaactcacactgcagacatcacagtgctgcgctggtcgccctccggaaactgtttgttgagcggcgacagactgggagtgttactgctgtggcgattggaccagcgtggtcgtgtccagggtactcccctcttgaagcatgaatacgggaaacatctaactcactgcattttccgtctccctccaccaggggaagacctcgtgcaactcgccaaggctgccgtctcaggtgatgaaaaggccttagatatgttcaactggaagaaaagttccagtgggtcattgcttaaaatgggttcccatgaggggctcctcttcttcgtatcgctgatggatggaaccgtacactacgtggacgagaagggaaagaccacccaagttgtttctgccgacagcacaatacagatgttgttttacatggagaaaagggaagccttggtagtagtcacagaaaatctccggcttagcttgtatacagtacctcccgaggggaaagctgaggaagtgatgaaagtgaaactgagcgggaaaaccggcaggagagccgacatcgccttgattgaaggatccctgctcgtgatggccgtgggagaagccgctctccgtttttgggatattgaaaggggtgaaaactacatcctgtcaccggacgaaaagtttgggttcgagaagggggagaatatgaactgcgtatgttactgcaaggtcaaaggcttgctcgcagctgggacggaccgcggtcgggtcgctatgtggaggaaagtgcccgacttcctgggctctcccggtgctgaagggaaggaccgctgggcacttcagaccccgacagagctgcaggggaacatcacacagatacaatgggggtccagaaaaaatcttttggccgtgaactccgttatatcagtggcaatactgtctgaacgggcaatgagcagtcatttccaccagcaggtcgccgctatgcaggtctctccttctctgctcaatgtgtgttttctgtcaacaggtgtagcccactcactgaggaccgacatgcacatttccggcgttttcgctaccaaggatgccgtggcagtgtggaatggacgccaagtggccatttttgaactctctggcgctgccattcgcagcgccggaacatttctctgtgaaactccagttctggccatgcatgaggagaatgtttataccgttgagagcaaccgggtccaggtcagaacttggcaggggactgtgaagcagctgctgctattctcagagactgaaggtaatccctgcttcctagacatctgcgggaatttcctcgtggtaggcacagatttggcacacttcaagtccttcgatctgagtaggagagaagcgaaagcacactgctcttgcaggagcttagccgaactggtgccgggagtcgggggaatcgctagtctgcgctgctcgagctctggaagcacaattagcattttgcccagtaaggccgataattcccccgactcaaaaatctgcttctacgacgtggagatggacacagttactgtcttcgacttcaagacagggcagattgaccgtcgagagactctgtccttcaacgagcaggagaccaacaagtctcacctgtttgttgacgaaggcctcaagaattacgtacccgtcaatcatttctgggaccagtcagagcccagactcttcgtgtgcgaggcagttcaggaaactcctcgtagccagcctcagtcagccaacggccagccacaggatggtcgggcaggtcctgcggcagacgtgcttatcctgtcgtttttcatttcggaagaacacggtttcctgttacacgagtcattcccccgacccgcaacctcacattccttgctaggtatggaggtcccctattactattttacacggaagccagaagaagctgaccgcgaggacgaagtcgagccagggtgtcaccatatcccacagatggtcagtcggaggccactgcgagactttgtggggcttgaagattgtgataaggctacacgcgatgctatgctgcactttagctttttcgtgaccattggtgatatggacgaagcttttaaatcgattaagttaatcaagagggcctag

SEQ ID NO: 273879 - protein, 127 aa, Artificial Sequence
  derived and/or modified sequence
MGDKPIWEQIGSSFIQHYYQLFDNDRTQLGAIYIDASCLTWEGQQFQGKAAIVEKLSSLPFQKIQHSITAQDHQPTPDSCIISMVVGQLKADEDPIMGFHQMFLLKNINDAWVCTNDMFRLALHNFG

SEQ ID NO: 273880 - DNA, 2321 bp, Artificial Sequence
  derived and/or modified sequence
gggcttgccccggcagcctccctccctggcttagcctcacctcccgcgctgcgggccgtgtctgggcctccgcgcatagcacgccgggaattgtagttttctctcggcgcgctcatgccggaaagggggggcggtgggactgcgtctcccagagtgcagcggggcgggcgaaggaaggcaggggggaagggacagtcggccgcagaccgcgctgggttgccgctgccgctgccgccatcgtgccagcccctcgggtctccgtgaggccgggtgacgctccagaatgggagacaagccaatttgggagcagattggatccagcttcattcaacattactaccagttatttgataatgatagaacccaactaggcgcaatttacattgacgcgtcatgccttacgtgggaaggacaacagttccaggggaaagctgccattgtggagaagttgtctagccttccgttccagaaaattcagcacagcatcaccgcgcaggaccatcagcccactccagatagctgcatcatcagcatggttgtgggccagcttaaggcggatgaagaccccatcatggggttccaccagatgttcctattaaagaacatcaacgatgcttgggtttgcaccaatgacatgttcaggctcgccctgcacaactttggctgacctcctctcagctaggcactcacgctgtttcctcctccctcctcttcccaatactattcccactcctccagatgctccaaatatcatgcacaaatgagcagggccgcggtgggagtgggcgcagtgcgctgctgccactgaggtgttgtgcatgatgtttggatgctagactagttgcatctgacgggagaagtttgtgttgtaccagcgcatgccttggaaagacttaagtaatgcaaaaggttgtccttttttttttttttttttttttaatctactgacaagttgctctagtaacccaaagaagtgaaggagaaagcagctgcctcaccgcccagacattgatttgttcagatgtttcaatgcctcatgatacaataaaaccacaaaaattttcttaacagtttaaattgttttaattagtttactagttggctgggcatcagaagctacccagacccgttgtctctctcatgtttcaccctcccacttctgccccaactctgaatacctgttgcagggagaaactgctgaagcagcactcccagctagcctctcagaagccgtgtagggcagttctctcccactccacagggcgactggtctttggaaagcaggcaggaagagctcaggtctggcctgaagcttctctcactgaagcctgtgcagtcagttctgatacctcctgtgacttctgctctgggtaggttcagggccctagtagcaggagagatgatcctgaatcctgttgaagctggagaggccttggcaaaatggctcatcacgttcaggccctccgggctgagttgtcagcagtatcaagggaggggcctgctctatccccagaaggatcaggatcatatccaggatgccccacatacaccaagccaggcagagggcagctcagctcctgtcccatctgctttggatatctttacccaaaggcaggtaacccgaagagccagcctccactgcccacagagccaggcccagttgtgttggagtataggtcaggagctgtggaaggaggcagtctgtgagggactcatgctttaggagtcctcacccctcagactgctgcaggacattgccaggcctctctccacttccttcctcagcatacagacttcatgctatcttccaattccggggagtcttagctattagggcagtttctgcttctccattttggggacaaaggccttgcccagtacaaatctagccccttgtcccacagacttctggatggtataaacctagtggcaatgtagcaaccataggctagaaccaaacccaagatttgggtcagtgccctgttaagggttttaggattggtaaggacaccacagctaaatctgacatgtaaaaggatacccttcccctgtcccactacgggtggaggctaaggacctcctcagatcccacagattgcctggtgacattgggcacagggctggatggtgtgctgtttgagaggacagcatgctcaggagatttcagtgggaatgatctctaggctgatgtgtatttggggaagtgggggtggggaagaggtaggtgcctgctgcctcaaaccaccttgtgtaaaatctgcaatacggcttcttccatgtacctgtgcctgaactgtctgcaataaagaagaatttgtaaa

SEQ ID NO: 273881 - DNA, 384 bp, Artificial Sequence
  derived and/or modified sequence
atgggagacaagcccatctgggagcagatcgggagtagttttatccaacattattatcagttatttgataatgacaggactcaacttggagccatttacattgacgcgtcctgcctcacatgggagggtcagcagtttcagggaaaagcagccattgtcgagaagttaagcagcctgccattccagaagatccagcactccatcactgcccaggatcatcagcccacccccgattcgtgtataattagtatggtggtgggtcagcttaaggccgacgaagacccaatcatgggatttcaccagatgtttctgctgaagaacattaacgatgcctgggtctgcacaaacgatatgttcaggctggccctgcacaactttggctag

SEQ ID NO: 273882 - DNA, 384 bp, Artificial Sequence
  derived and/or modified sequence
atgggagacaagcccatctgggagcagatcggcagcagcttcatccagcactactaccagctgtttgacaatgacaggacccagctgggcgccatctacattgatgccagctgcctgacctgggagggccagcagttccagggcaaggccgccatcgtggagaagctgagcagcctgcccttccagaagatccagcacagcatcacagcccaggaccaccagcccaccccagacagctgcatcatctccatggtggtgggccagctgaaggcagatgaggaccccatcatgggcttccaccagatgttcctgctgaagaacatcaatgatgcctgggtgtgcaccaatgacatgttccggctggccctgcacaactttggatag

SEQ ID NO: 273883 - DNA, 384 bp, Artificial Sequence
  derived and/or modified sequence
atgggcgacaagcccatctgggagcagatcggcagcagcttcatccagcattattatcaacttttcgacaacgacaggactcagctcggagcgatctatatcgacgcttcctgcctgacgtgggagggccagcagttccagggaaaagctgctatcgtagaaaagctctcatcccttccgttccaaaaaatccagcattctattaccgcacaggatcatcagcccaccccagactcctgcataatcagtatggtggtggggcagcttaaggcagatgaggacccaatcatgggctttcatcaaatgttccttcttaaaaacatcaacgacgcctgggtttgcactaacgatatgttcaggttagccctgcataattttggatag

SEQ ID NO: 273884 - DNA, 384 bp, Artificial Sequence
  derived and/or modified sequence
atgggcgacaaacccatctgggaacagatcggcagctcttttatccaacactactaccaattatttgataacgatcgtacacagctgggtgccatctacatagacgctagctgcctgacgtgggagggccagcagttccagggaaaggctgctatcgtagagaagctttcatccttgccttttcagaagatacagcactccataaccgcccaggatcatcagcccacgcccgactcttgtattatttcaatggtggtcggtcagctcaaggcagacgaagatccaatcatgggcttccaccagatgttcctgctgaagaatatcaacgatgcatgggtctgcactaacgacatgttcagattagcgcttcacaatttcggttag

SEQ ID NO: 273885 - DNA, 384 bp, Artificial Sequence
  derived and/or modified sequence
atgggcgacaagcccatctgggagcagatcggcagcagcttcatccagcactactaccagctgttcgacaacgacagaacccagctgggcgccatctacatcgacgccagctgcctgacctgggagggccagcagttccagggcaaggccgccatcgtggagaagctgagcagcctgcccttccagaagatccagcacagcatcaccgcccaggaccaccagcccacccccgacagctgcatcatcagcatggtggtgggccagctgaaggccgacgaggaccccatcatgggcttccaccagatgttcctgctgaagaacatcaacgacgcctgggtgtgcaccaacgacatgttcagactggccctgcacaacttcggctag

SEQ ID NO: 273886 - protein, 433 aa, Artificial Sequence
  derived and/or modified sequence
MPAKGRYFLNEGEEGPDQDALYEKYQLTSQHGPLLLTLLLVAATACVALIIIAFSQGDPSRHQAILGMAFLVLAVFAALSVLMYVECLLRRWLRALALLTWACLVALGYVLVFDAWTKAACAWEQVPFFLFIVFVVYTLLPFSMRGAVAVGAVSTASHLLVLGSLMGGFTTPSVRVGLQLLANAVIFLCGNLTGAFHKHQMQDASRDLFTYTVKCIQIRRKLRIEKRQQENLLLSVLPAHISMGMKLAIIERLKEHGDRRCMPDNNFHSLYVKRHQNVSILYADIVGFTQLASDCSPKELVVVLNELFGKFDQIAKANECMRIKILGDCYYCVSGLPVSLPTHARNCVKMGLDMCQAIKQVREATGVDINMRVGIHSGNVLCGVIGLRKWQYDVWSHDVSLANRMEAAGVPGRVHITEATLKHLDKALLLQVR

SEQ ID NO: 273887 - protein, 734 aa, Artificial Sequence
  derived and/or modified sequence
MPAKGRYFLNEGEEGPDQDALYEKYQLTSQHGPLLLTLLLVAATACVALIIIAFSQGDPSRHQAILGMAFLVLAVFAALSVLMYVECLLRRWLRALALLTWACLVALGYVLVFDAWTKAACAWEQVPFFLFIVFVVYTLLPFSMRGAVAVGAVSTASHLLVLGSLMGGFTTPSVRVGLQLLANAVIFLCGNLTGAFHKHQMQDASRDLFTYTVKCIQIRRKLRIEKRQQENLLLSVLPAHISMGMKLAIIERLKEHGDRRCMPDNNFHSLYVKRHQNVSILYADIVGFTQLASDCSPKELVVVLNELFGKFDQIAKANECMRIKILGDCYYCVSGLPVSLPTHARNCVKMGLDMCQAIKQVREATGVDINMRVGIHSGNVLCGVIGLRKWQYDVWSHDVSLANRMEAAGVPGRVHITEATLKHLDKAYEVEDGHGQQRDPYLKEMNIRTYLVIDPRSQQPPPPSQHLPRPKGDAALKMRASVRMTRYLESWGAARPFAHLNHRESVSSGETHVPNGRRPKSVPQRHRRTPDRSMSPKGRSEDDSYDDEMLSAIEGLSSTRPCCSKSDDFYTFGSIFLEKGFEREYRLAPIPRARHDFACASLIFVCILLVHVLLMPRTAALGVSFGLVACVLGLVLGLCFATKFSRCCPARGTLCTISERVETQPLLRLTLAVLTIGSLLTVAIINLPLMPFQVPELPVGNETGLLAASSKTRALCEPLPHLHTVFSRLNELTS

SEQ ID NO: 273888 - DNA, 2205 bp, Artificial Sequence
  derived and/or modified sequence
atgccggcgaagggcagatattttctgaatgaaggcgaggaggggcctgaccaagacgccctatacgaaaagtaccagctgacctcacagcacgggccactcctcctcacgctcttacttgtggccgcaaccgcttgtgtcgccttaatcataatagcctttagtcagggggacccatcccggcaccaggccatccttggaatggcgttcctggtgctcgcagtctttgccgcgctgagcgttctgatgtacgtcgagtgtttattaagaagatggcttcgggcgctcgctctactgacctgggcctgcttggttgcactggggtatgtcctcgttttcgacgcatggactaaagccgcctgtgcctgggaacaggtcccgtttttcctttttatcgttttcgtcgtgtacaccctgctgcccttcagcatgaggggcgccgtggccgtgggagccgtctcgaccgcctcacacctgcttgtccttggcagcctcatgggtggcttcactacccccagcgtcagagtaggtttacagctgctagcaaacgctgtgatatttctctgtggcaacctcacaggtgcgttccacaagcatcaaatgcaggatgcctctcgggacctattcacatataccgtgaagtgcatccagatccgtcgaaaactccggatcgaaaaaaggcaacaagagaacctactgcttagcgtgcttcctgcccacatttcaatgggcatgaaactcgccatcattgaaaggctgaaagaacacggcgaccggaggtgcatgcccgataataatttccacagcctgtacgttaagcgccaccagaatgtgtcaattctgtacgccgacattgttgggttcacccagctcgcgtcggattgctcaccaaaggagctggtcgtggtcttaaatgaactatttggcaagtttgatcagatcgccaaggccaacgaatgcatgcggataaagatcctgggcgactgctattattgcgtgagcggattacccgttagcctgcccacacatgcgaggaattgcgtcaagatggggctcgacatgtgccaggcaataaagcaggtgagggaggcaacgggtgtggatatcaatatgagggttggaatacattctggtaatgtactgtgtggcgtaattgggttaaggaagtggcagtacgatgtttggtcgcacgatgtttcactcgccaaccgaatggaggcagctggtgtaccgggccgggtccacataacagaagctactctgaagcacctggataaagcctacgaagtggaggacgggcatggccagcaaagggacccttatctcaaagaaatgaacatccggacttatctggtcattgatccccgtagccagcaacccccaccaccgagccagcacttaccccggcccaaaggcgatgcggctctgaaaatgcgcgcatcagttcgaatgacccggtatctggagtcctggggggctgctaggccttttgcccatctcaaccaccgagagtctgtttcgagcggtgagacacacgttccaaatgggcgaaggcccaagtccgtgccccagcggcacaggaggaccccggatcgatctatgtcccctaagggccgcagcgaggacgattcctatgatgatgagatgctctctgcaattgaggggctctctagcacccggccatgttgtagcaaatctgatgatttctacacatttggctccatctttttggaaaaggggttcgaacgcgaataccgcttggcacccatcccgagagcccggcacgatttcgcttgcgcttctttgattttcgtgtgcatactgcttgttcatgtcttgctaatgccgaggacagccgccctgggagtttcttttggcttggtggcttgtgtgcttggcctggtgctgggtctatgtttcgccacaaagttctcacgatgttgccccgctaggggaaccctgtgcaccataagcgaaagagtggagacacagccattgctgagactgaccctcgccgtgcttactattggtagtctgctgaccgtggcaattatcaacctgcccttaatgcccttccaggttccggaacttcctgtgggcaatgagacaggccttctggctgcatccagtaagacgcgggcactttgtgagcctctgccccacttgcacactgtcttctcccggctgaacgagctgacatcctag

SEQ ID NO: 273889 - DNA, 2496 bp, Artificial Sequence
  derived and/or modified sequence
actctcattaggtagcgtggaaggagccttcggatggagctgaggaactgcgtgtggagtcagcccagtctggatgcacaggaggatgctggcggcacagtgagtgaggcctggtgccagagctgtgcggaccccttgttggccatggagcagcaggcccagaggccctctccccagccctgcttgcctgcctcggagaggacagaggcctaggccctggggcctccttaacggccccttaacgacacgcgtgccaagggtggaggatgccagccaaggggcgctacttcctcaacgagggcgaggagggccctgaccaagatgcgctctacgagaagtaccagctcaccagccagcatgggccgctgctgctcacgctcctgctggtggccgccactgcctgcgtggccctcatcatcattgccttcagccagggggacccctccagacaccaggccattctgggcatggcgttcctggtgctggcggtgtttgcggccctctctgtgctgatgtacgtcgagtgtctcctgcggcgctggctcagggccttggcgctgctcacctgggcctgcttggtggcgctgggctatgtgctggtgttcgacgcatggacaaaggcggcctgtgcgtgggagcaggtgcccttcttcctgttcattgtcttcgtggtgtacacactactgcccttcagcatgcggggcgctgtcgccgttggggccgtctccactgcctcccacctcctggtgctcggttctttgatgggaggcttcacgacacccagtgtccgggtggggctgcagctgctggccaacgcagtcatcttcctgtgtgggaacctgacaggcgccttccacaagcaccaaatgcaggatgcatcccgggacctcttcacctacactgtgaagtgcatccagatccgccggaagctgcgcatcgagaagcgccagcaggagaacctgctgctgtcagtgcttccggcccacatctccatgggcatgaagctggccatcatcgaacggctcaaggagcatggtgaccgtcgctgcatgcctgacaacaacttccacagcctctacgtcaagaggcaccagaatgtcagcatcctctatgcggacatcgtgggcttcacgcagctggccagcgactgttctcccaaggagctggtggtggtgctgaatgagctctttggcaagttcgaccagatcgccaaggccaacgagtgcatgcgaatcaagatcctcggcgactgctactactgtgtatcgggcctgcccgtgtcgctgcctacccacgcccggaactgcgtgaagatggggctggacatgtgccaggccatcaagcaggtgcgggaggccacgggcgtggacatcaacatgcgtgtgggcatacactcggggaatgtgctgtgcggggtcatcgggctgcgcaagtggcagtatgacgtgtggtcccacgacgtgtccctggccaaccggatggaggcagccggagtacccggccgggtgcacatcacggaggccacgctaaagcacctggacaaggcgtacgaggtggaggatgggcacgggcagcagcgggacccctacctcaaggagatgaacatccgcacctacctggtcatcgacccccggagccagcagccacccccgcccagccaacacctccccaggcccaagggggacgcggccctgaagatgcgggcgtcagtgcgcatgacccggtacctcgagtcctggggggcggcacggccctttgcacatctcaaccaccgtgagagcgtgagcagtggtgagacccacgtccccaacgggcggaggcctaagagcgttccccagcgccaccgccggaccccagacagaagcatgtcccccaaggggcggtcggaggatgactcgtacgatgacgagatgctgtcagccattgaggggctcagctccacgaggccctgctgctccaagtccgatgacttctacacctttgggtccatcttcctggagaagggctttgagcgcgagtaccgcctggcacccatcccccgggcccgccacgactttgcctgcgccagcctgatcttcgtctgcatcctgctcgtccatgtcctgctcatgcccaggacggcggcactgggtgtgtccttcgggctggtggcctgtgtactggggctggtgctgggcctgtgctttgccaccaagttctcgaggtgctgcccagctcgggggacgctctgcactatctctgagagggtggagacacagcccctgctgaggctgaccctggccgtcctgaccatcggcagcctgctcactgtggccatcatcaacctgcccctgatgcctttccaagttccagagctgcctgttggcaatgagacaggcctactggccgcgagcagcaagacaagagccctgtgtgagcccctcccgcacctgcatactgttttttcccgtttaaatgagctcacttcataagaaataaaactacagtgaaaacaac

SEQ ID NO: 273890 - DNA, 2205 bp, Artificial Sequence
  derived and/or modified sequence
atgcctgccaagggccgctacttcctgaatgaaggagaggagggccctgaccaggatgccctgtatgagaagtaccagctgaccagccagcacggccccctgctgctgaccctgctgctggtggccgccacagcctgtgtggccctgatcatcatcgccttcagccagggcgaccccagccgccaccaggccatcctgggcatggccttcctggtgctggccgtgtttgctgccctgtctgtgctgatgtatgtggagtgcctgctgcggcgctggctgcgggccctggccctgctgacctgggcctgcctggtggccctgggctacgtgctggtgtttgatgcctggaccaaggccgcctgtgcctgggagcaggtgcccttcttcctgttcatcgtgtttgtggtgtacaccctgctgcccttctccatgagaggagctgtggccgtgggcgctgtgtccacagccagccacctgctggtgctgggcagcctgatgggcggcttcaccaccccatctgtgcgggtgggcctgcagctgctggccaatgctgtgatcttcctgtgtggcaacctgactggagccttccacaagcaccagatgcaggatgccagccgggacctcttcacctacacagtgaagtgcatccagatccggaggaagctgcgcatcgagaagaggcagcaggagaacctgctgctgtctgtgctgcctgcccacatctccatgggcatgaagctggccatcatcgagcggctgaaggagcacggggaccggcgctgcatgccagacaacaacttccacagcctgtatgtgaagaggcaccagaatgtgtccatcctgtatgctgacatcgtgggcttcacccagctggccagtgactgcagccccaaggagctggtggtggtgctgaatgagctgtttgggaagtttgaccagatcgccaaggccaatgaatgcatgaggatcaagatcctgggggactgctactactgtgtgtctggcctgcctgtgtccctgcccacccacgccaggaactgtgtgaagatgggcctggacatgtgccaggccatcaagcaggtgcgggaggccactggagtggacatcaacatgagggtgggcatccacagcggaaatgtgctgtgtggggtgattggcctgaggaagtggcagtatgatgtgtggagccatgatgtgtccctggccaacaggatggaggccgccggcgtgcccggccgggtgcacatcacagaggccaccctgaagcacctggacaaggcctatgaggtggaggatggccacggccagcagagggacccctacctgaaggagatgaacatccgcacctacctggtgattgaccccaggagccagcagcccccaccacccagccagcacctgccccggcccaagggagatgctgccctgaagatgagggcctctgtgaggatgacccgctacctggagagctggggcgccgcccggccctttgcccacctgaaccaccgggagagcgtgagcagcggggagacccacgtgcccaatggaagaagacccaagtctgtgccccagaggcacaggaggaccccagaccgctccatgagccccaagggccgctcagaagatgacagctatgatgatgagatgctgagcgccatcgagggcctgagcagcacccggccctgctgcagcaagagtgatgacttctacaccttcggcagcatcttcctggagaagggctttgagcgggagtaccgcctggcccccatcccccgggcccggcatgactttgcctgtgccagcctcatctttgtgtgcatcctgctggtgcacgtgctgctgatgcccaggacagctgccctgggcgtgtcctttggcctggtggcctgtgtgctgggcctggtgctgggcctgtgctttgccaccaagttcagccgctgctgcccagcccggggcaccctgtgcaccatcagcgagcgggtggagacccagcccctgctgcggctgaccctggccgtgctgaccatcggcagcctgctgactgtggccatcatcaacctgcccctgatgcccttccaggtgcctgagctgcctgtgggcaatgaaacaggcctgctggccgccagcagcaagacccgggccctgtgtgagcccctgccccacctgcacacagtgttcagccggctgaatgagctgaccagctag

SEQ ID NO: 273891 - DNA, 2205 bp, Artificial Sequence
  derived and/or modified sequence
atgcccgccaagggccggtacttcctgaacgagggcgaggagggcccggaccaggacgccctgtacgagaagtatcagctgacaagccagcacgggccacttttgttgactttgctgcttgttgccgcaacggcttgcgttgctctgatcatcatagcattttcccagggcgatccttcaagacatcaggcgatccttggcatggcctttctggtgctcgctgtgttcgctgctttatcggtgttgatgtacgtggaatgtcttctgcgccggtggctgagagctctagctcttctgacctgggcttgcttggtggcactggggtacgtgttggtctttgacgcttggacgaaagccgcatgcgcctgggagcaagtgccgtttttcctgttcatagtctttgtggtatacacactgttaccattctctatgcggggagcagtggcggttggtgccgtgtcgacagcctcacacctgctagtgctcgggagccttatgggcggattcaccactccctccgtgagggtgggtctacagcttctcgccaatgctgtaatctttctgtgcgggaatctaacaggagcttttcataaacatcagatgcaagatgcatctagggacctgttcacctatacagtaaaatgtatccaaattcgccgcaagctgcgaatcgagaaaaggcaacaggagaacttactcctgtctgtcctgccagctcacattagcatgggcatgaagctggctatcattgagagactgaaggagcacggagatagacggtgtatgccagataacaatttccactccctgtatgtaaagagacatcaaaacgtttccattctttatgctgacattgttggattcacccagctcgcatccgattgttcccccaaagagctcgtggtagttcttaatgaattgtttggaaaatttgatcagatcgccaaggccaatgagtgtatgagaatcaagatactgggagactgctactattgtgtctccggcctgcctgtgtccctccctacccacgctaggaattgtgtgaagatgggtctcgacatgtgtcaggcaataaagcaggtgcgcgaagcgactggggtggacataaacatgcgggtgggaatccactcgggcaatgtgttgtgcggcgtgattgggctgcgaaagtggcaatacgacgtctggagccatgatgtttccttggcaaaccggatggaggccgcaggcgtgcctggcagagtgcatatcaccgaagccacactgaaacatctggataaggcgtacgaggttgaggacggccacgggcaacagcgcgatccatatctgaaggagatgaacatccgaacatacttggtgatcgatcctagatcacagcagcctccaccacccagtcaacatctgccgaggccaaaaggtgatgctgcactgaaaatgcgcgctagtgtgcgcatgaccagatacctggaatcttggggcgccgcccgacccttcgctcacctcaatcacagggagagtgtgtccagtggcgagactcacgttcctaacggaaggagaccaaagtccgtgccccaaagacatcggaggacccctgacaggtctatgtctcccaagggacgcagcgaggacgattcatatgacgacgagatgctgagcgccatcgagggcctgtcaagtactaggccctgttgcagcaaatcagacgacttctacactttcgggtctattttcctcgaaaagggcttcgagcgggaatacaggctagcacccatacctagagcacggcatgatttcgcatgtgcctcgttgatattcgtgtgcattctgctggtgcatgtgctgcttatgccccggaccgctgctctgggcgtgtctttcggcctggtcgcctgcgtactgggactcgtgctgggactgtgttttgcgacaaaatttagcagatgttgtccagcgcgcgggaccctgtgtacaattagcgagcgggtagaaacccagccgctgctcagacttacccttgctgttctcacaattgggagtttgctcaccgttgccatcattaacttgcctctcatgccattccaggtgcctgagctgcccgttggcaatgagaccggcctcctggcagcgagctcgaaaaccagggctctgtgtgaacccctgccccacctgcacaccgtcttctccaggctgaacgagttgacaagttag

SEQ ID NO: 273892 - DNA, 2205 bp, Artificial Sequence
  derived and/or modified sequence
atgccggcaaaagggcgttatttcctaaatgagggcgaagagggaccggatcaggacgcgctgtacgaaaaataccagctgacctcccagcacgggcctttattgctaactctgctgttggtggctgcaaccgcatgcgttgccctcataataattgcgttctctcaaggggacccttcccgacaccaggcaatactcggaatggcattcctcgtccttgcagtgtttgccgcactgagtgtcctgatgtatgttgaatgtctcctgcggaggtggctgagggcgctcgctctgctgacatgggcctgtctcgttgcacttggttacgtgctggtgtttgacgcctggacaaaggccgcttgtgcgtgggagcaggtgccttttttcctgttcattgtgtttgttgtctacactctgctcccgttttccatgagaggcgcagtggcggtgggcgctgtgtcgactgcttctcatcttctggtactgggaagcctgatgggtggctttaccacaccgtccgttagggttggattacagctgctggccaacgccgtgatcttcctctgcggcaatttgacaggcgctttccacaaacatcagatgcaagatgcttctcgcgatcttttcacctataccgtaaagtgcatacagatccggaggaagcttcggattgaaaaaagacagcaggagaatctgctgctctcagtgctgcccgctcatatcagcatgggtatgaagctggctattatcgagcgcctgaaagagcacggagataggcgctgcatgccagacaataatttccactctctgtatgtcaagcggcatcaaaatgtgtctatcttgtacgcagacatcgtgggctttacgcagttggcttccgactgctccccaaaggaattagtcgtggtgctgaacgagctgttcggtaaatttgatcagatcgccaaggccaacgaatgcatgcggattaagattctgggcgattgctactactgcgtctcaggtttgcccgtaagcctgcctacacacgccaggaactgcgtgaagatgggcctagacatgtgccaggctattaaacaggtgagagaggccaccggcgtcgatatcaacatgcgcgtaggcattcacagcgggaacgtcctctgcggagtcattggactcagaaaatggcaatatgatgtttggagccatgatgtctctttagcgaatcgcatggaggcagcgggtgtgcctggaagggtgcacattaccgaggcaacactgaaacatctggacaaggcatacgaagtggaggatggccacgggcagcagcgggacccatatttgaaagagatgaatattcgtacttacctagtgattgaccctcgctctcaacaacctccacccccttcccagcacctgccgagacccaagggcgacgctgcactgaagatgagagcaagcgtacggatgactcgatatttggaatcctggggcgcagcccgaccattcgctcacctgaaccacagagaatctgtaagctctggcgagacccacgttcctaacggaagacgtcctaagagtgtcccacagcggcatcgcagaacacccgaccggtccatgtcacccaaaggacgatccgaagatgactcttacgatgacgagatgctgagtgctatagagggattaagctccactcgaccatgctgctcgaagtctgatgacttttacactttcggttccatatttctcgaaaaggggttcgaaagggaatacagactcgcacctattccacgggctcgccacgacttcgcctgcgcgtccttgatctttgtttgcattctacttgtccacgtgctcctgatgcctaggactgccgctctgggagtgtcatttggcctggttgcctgcgtccttggtctggttctggggctgtgcttcgctacaaaattctccagatgctgcccagcccgagggaccctgtgcactatatccgagagagtcgaaactcagcccctgctccggttaacgctcgctgtgcttaccatcggaagcctgctgacagttgccattattaacctgccactgatgccctttcaggtgcccgagcttccggttggcaatgagactggacttctcgccgctagcagcaaaacaagggcactctgtgaaccactgccacatctgcacactgttttttctcgcctcaatgagctgacgtcctag

SEQ ID NO: 273893 - DNA, 2205 bp, Artificial Sequence
  derived and/or modified sequence
atgcccgccaagggcagatacttcctgaacgagggcgaggagggccccgaccaggacgccctgtacgagaagtaccagctgaccagccagcacggccccctgctgctgaccctgctgctggtggccgccaccgcctgcgtggccctgatcatcatcgccttcagccagggcgaccccagcagacaccaggccatcctgggcatggccttcctggtgctggccgtgttcgccgccctgagcgtgctgatgtacgtggagtgcctgctgagaagatggctgagagccctggccctgctgacctgggcctgcctggtggccctgggctacgtgctggtgttcgacgcctggaccaaggccgcctgcgcctgggagcaggtgcccttcttcctgttcatcgtgttcgtggtgtacaccctgctgcccttcagcatgagaggcgccgtggccgtgggcgccgtgagcaccgccagccacctgctggtgctgggcagcctgatgggcggcttcaccacccccagcgtgagagtgggcctgcagctgctggccaacgccgtgatcttcctgtgcggcaacctgaccggcgccttccacaagcaccagatgcaggacgccagcagagacctgttcacctacaccgtgaagtgcatccagatcagaagaaagctgagaatcgagaagagacagcaggagaacctgctgctgagcgtgctgcccgcccacatcagcatgggcatgaagctggccatcatcgagagactgaaggagcacggcgacagaagatgcatgcccgacaacaacttccacagcctgtacgtgaagagacaccagaacgtgagcatcctgtacgccgacatcgtgggcttcacccagctggccagcgactgcagccccaaggagctggtggtggtgctgaacgagctgttcggcaagttcgaccagatcgccaaggccaacgagtgcatgagaatcaagatcctgggcgactgctactactgcgtgagcggcctgcccgtgagcctgcccacccacgccagaaactgcgtgaagatgggcctggacatgtgccaggccatcaagcaggtgagagaggccaccggcgtggacatcaacatgagagtgggcatccacagcggcaacgtgctgtgcggcgtgatcggcctgagaaagtggcagtacgacgtgtggagccacgacgtgagcctggccaacagaatggaggccgccggcgtgcccggcagagtgcacatcaccgaggccaccctgaagcacctggacaaggcctacgaggtggaggacggccacggccagcagagagacccctacctgaaggagatgaacatcagaacctacctggtgatcgaccccagaagccagcagccccccccccccagccagcacctgcccagacccaagggcgacgccgccctgaagatgagagccagcgtgagaatgaccagatacctggagagctggggcgccgccagacccttcgcccacctgaaccacagagagagcgtgagcagcggcgagacccacgtgcccaacggcagaagacccaagagcgtgccccagagacacagaagaacccccgacagaagcatgagccccaagggcagaagcgaggacgacagctacgacgacgagatgctgagcgccatcgagggcctgagcagcaccagaccctgctgcagcaagagcgacgacttctacaccttcggcagcatcttcctggagaagggcttcgagagagagtacagactggcccccatccccagagccagacacgacttcgcctgcgccagcctgatcttcgtgtgcatcctgctggtgcacgtgctgctgatgcccagaaccgccgccctgggcgtgagcttcggcctggtggcctgcgtgctgggcctggtgctgggcctgtgcttcgccaccaagttcagcagatgctgccccgccagaggcaccctgtgcaccatcagcgagagagtggagacccagcccctgctgagactgaccctggccgtgctgaccatcggcagcctgctgaccgtggccatcatcaacctgcccctgatgcccttccaggtgcccgagctgcccgtgggcaacgagaccggcctgctggccgccagcagcaagaccagagccctgtgcgagcccctgccccacctgcacaccgtgttcagcagactgaacgagctgaccagctag

SEQ ID NO: 273894 - protein, 1167 aa, Artificial Sequence
  derived and/or modified sequence
MIGDGCDLGLGEEEGGTGLPYPCQFCDKSFIRLSYLKRHEQIHSDKLPFKCTYCSRLFKHKRSRDRHIKLHTGDKKYHCHECEAAFSRSDHLKIHLKTHSSSKPFKCTVCKRGFSSTSSLQSHMQAHKKNKEHLAKSEKEAKKDDFMCDYCEDTFSQTEELEKHVLTRHPQLSEKADLQCIHCPEVFVDENTLLAHIHQAHANQKHKCPMCPEQFSSVEGVYCHLDSHRQPDSSNHSVSPDPVLGSVASMSSATPDSSASVERGSTPDSTLKPLRGQKKMRDDGQGWTKVVYSCPYCSKRDFNSLAVLEIHLKTIHADKPQQSHTCQICLDSMPTLYNLNEHVRKLHKNHAYPVMQFGNISAFHCNYCPEMFADINSLQEHIRVSHCGPNANPSDGNNAFFCNQCSMGFLTESSLTEHIQQAHCSVGSAKLESPVVQPTQSFMEVYSCPYCTNSPIFGSILKLTKHIKENHKNIPLAHSKKSKAEQSPVSSDVEVSSPKRQRLSASANSISNGEYPCNQCDLKFSNFESFQTHLKLHLELLLRKQACPQCKEDFDSQESLLQHLTVHYMTTSTHYVCESCDKQFSSVDDLQKHLLDMHTFVLYHCTLCQEVFDSKVSIQVHLAVKHSNEKKMYRCTACNWDFRKEADLQVHVKHSHLGNPAKAHKCIFCGETFSTEVELQCHITTHSKKYNCKFCSKAFHAIILLEKHLREKHCVFDAATENGTANGVPPMATKKAEPADLQGMLLKNPEAPNSHEASEDDVDASEPMYGCDICGAAYTMEVLLQNHRLRDHNIRPGEDDGSRKKAEFIKGSHKCNVCSRTFFSENGLREHLQTHRGPAKHYMCPICGERFPSLLTLTEHKVTHSKSLDTGTCRICKMPLQSEEEFIEHCQMHPDLRNSLTGFRCVVCMQTVTSTLELKIHGTFHMQKLAGSSAASSPNGQGLQKLYKCALCLKEFRSKQDLVKLDVNGLPYGLCAGCMARSANGQVGGLAPPEPADRPCAGLRCPECSVKFESAEDLESHMQVDHRDLTPETSGPRKGTQTSPVPRKKTYQCIKCQMTFENEREIQIHVANHMIEEGINHECKLCNQMFDSPAKLLCHLIEHSFEGMGGTFKCPVCFTVFVQANKLQQHIFAVHGQEDKIYDCSQCPQKFFFQTELQNHTMSQHAQ

SEQ ID NO: 273895 - DNA, 2850 bp, Artificial Sequence
  derived and/or modified sequence
atggccagcaaccaccccgccttcagcttccaccagaagcaggtgctgagacaggagctgacccagatccagagcagcctgaacggcggcggcggccacggcggcaagggcgcccccggccccggcggcgccctgcccacctgccccgcctgccacaagatcacccccagaaccgaggcccccgtgagcagcgtgagcaacagcctggagaacgccctgcacaccagcgcccacagcaccgaggagagcctgcccaagagacccctgggcaagcacagcaaggtgagcgtggagaagatcgacctgaagggcctgagccacaccaagaacgacagaaacgtggagtgcagcttcgaggtgctgtggagcgacagcagcatcaccagcgtgaccaagagcagcagcgaggtgaccgagttcatcagcaagctgtgccagctgtaccccgaggagaacctggagaagctgatcccctgcctggccggccccgacgccttctacgtggagagaaaccacgtggacctggacagcggcctgagatacctggccagcctgcccagccacgtgctgaagaacgaccacgtgagaagattcctgagcaccagcagccccccccagcagctgcagagccccagccccggcaaccccagcctgagcaaggtgggcaccgtgatgggcgtgagcggcagacccgtgtgcggcgtggccggcatccccagcagccagagcggcgcccagcaccacggccagcaccccgccggcagcgccgcccccctgccccactgcagccacgccggcagcgccggcagcgccctggcctacagaacccagatggacaccagccccgccatcctgatgcccagcagcctgcagaccccccagacccaggagcagaacggcatcctggactggctgagaaagctgagactgcacaagtactaccccgtgttcaagcagctgagcatggagaagttcctgagcctgaccgaggaggacctgaacaagttcgagagcctgaccatgggcgccaagaagaagctgaagacccagctggagctggagaaggagaagagcgagagaagatgcctgaaccccagcgccccccccctggtgaccagcagcggcgtggccagagtgccccccaccagccacgtgggccccgtgcagagcggcagaggcagccacgccgccgagctgagagtggaggtggagcagccccaccaccagctgcccagagagggcagcagcagcgagtacagcagcagcagcagcagccccatgggcgtgcaggccagagaggagagcagcgacagcgccgaggagaacgacagaagagtggagatccacctggagagcagcgacaaggagaagcccgtgatgctgctgaaccacttcaccagcagcagcgccagacccaccgcccaggtgctgcccgtgcagaacgaggccagcagcaaccccagcggccaccaccccctgcccccccagatgctgagcgccgccagccacatcacccccatcagaatgctgaacagcgtgcacaagcccgagagaggcagcgccgacatgaagctgctgagcagcagcgtgcacagcctgctgagcctggaggagagaaacaagggcagcggccccagaagcagcatgaaggtggacaagagcttcggcagcgccatgatggacgtgctgcccgccagcgccccccaccagcccgtgcaggtgctgagcggcctgagcgagagcagcagcatgagccccaccgtgagcttcggccccagaaccaaggtggtgcacgccagcaccctggacagagtgctgaagaccgcccagcagcccgccctggtggtggagaccagcaccgccgccaccggcacccccagcaccgtgctgcacgccgccagaccccccatcaagctgctgctgagcagcagcgtgcccgccgacagcgccatcagcggccagaccagctgccccaacaacgtgcagatcagcgtgccccccgccatcatcaaccccagaaccgccctgtacaccgccaacaccaaggtggccttcagcgccatgagcagcatgcccgtgggccccctgcagggcggcttctgcgccaacagcaacaccgccagccccagcagccaccccagcaccagcttcgccaacatggccaccctgcccagctgccccgcccccagcagcagccccgccctgagcagcgtgcccgagagcagcttctacagcagcagcggcggcggcggcagcaccggcaacatccccgccagcaaccccaaccaccaccaccaccaccaccaccagcagccccccgcccccccccagcccgccccccccccccccggctgcatcgtgtgcaccagctgcggctgcagcggcagctgcggcagcagcggcctgaccgtgagctacgccaactacttccagcaccccttcagcggccccagcgtgttcaccttccccttcctgcccttcagccccatgtgcagcagcggctacgtgagcgcccagcagtacggcggcggcagcaccttccccgtggtgcacgccccctacagcagcagcggcacccccgaccccgtgctgagcggccagagcaccttcgccgtgccccccatgcagaacttcatggccggcaccgccggcgtgtaccagacccagggcctggtgggcagcagcaacggcagcagccacaagaagagcggcaacctgagctgctacaactgcggcgccaccggccacagagcccaggactgcaagcagcccagcatggacttcaacagacccggcaccttcagactgaagtacgccccccccgccgagagcctggacagcaccgactag

SEQ ID NO: 273896 - DNA, 2850 bp, Artificial Sequence
  derived and/or modified sequence
atggccagtaaccacccagcgttctctttccaccagaaacaggtgctgaggcaggagttgacacagattcagtcatccctgaacggaggcggtggtcacggaggcaagggcgcccccgggccaggtggagctcttccaacatgcccggcctgtcataaaatcaccccccgaacggaggcccctgtgtctagcgtgagtaactccctcgaaaatgcactgcacaccagtgctcattctactgaggagagtctgcctaagcgtccactaggaaaacattcaaaagtgtcagtggaaaaaatcgacttaaaagggctgagccatacgaaaaacgaccgcaatgttgaatgcagctttgaggttctgtggtctgacagctctatcactagtgtgacaaagtcttcctccgaagtcacagagtttatcagcaagctgtgtcagctctatccagaggagaatctcgaaaagttaattccatgccttgcaggacccgatgctttctacgttgaaaggaaccatgttgacctggatagcggcctacggtacctcgcctccctcccctcccatgtgctaaaaaatgaccacgttagaaggttcctgagcacttcgtctcctccacaacagctgcagtcaccctcccccggcaacccaagcttgtcaaaggtgggaaccgtaatgggcgtgtctggaagaccagtgtgcggggtggcaggcattccttcaagccagagcggagcgcagcaccacggccaacacccggccggtagtgctgccccactgcctcactgcagtcacgccggttctgccgggtctgccctggcctatcgtactcagatggataccagtccagctatccttatgccaagttctctgcagacaccccagacacaggaacaaaacgggatactggattggctgaggaagcttagactgcacaagtactaccccgttttcaaacagctgtcaatggagaaattcttaagcctcacggaagaggatttgaacaagttcgagtccctgacgatgggagcaaagaagaaacttaagacgcagctggagctcgagaaggagaagagcgagaggcgctgcttgaatccctcagcgcctcccctcgttacctcatctggggttgcaagagtaccccctacctcccatgtggggccggttcagagcggcagagggagtcacgctgctgaattgagggtggaagttgaacagcctcatcaccagctgccaagggaaggctcttcttctgagtatagctcctcctcaagcagccccatgggggtacaggctcgggaggaaagcagcgactccgctgaagagaatgatagacgcgtggagatacacttggagtcgtcggataaggaaaaacctgtgatgctgctgaaccacttcacatcatcaagcgcccggccgactgcgcaggtgttaccggtccagaacgaggcctccagcaatccaagtggccatcatccacttcctccgcaaatgcttagcgctgcaagccatattacaccgatcagaatgttgaactccgtacacaaacctgaacgaggctcagcagacatgaagttactgtcttcatcagtgcattccctgctgagcctcgaagagaggaacaaaggctccgggccgaggtcgtccatgaaagtcgataagtccttcggatccgccatgatggatgtgctaccagcaagcgctccccaccagcccgtccaagtcctctctgggttgtccgaaagctcttcaatgtctccgacagtgtcattcggccccagaacgaaggtggtacacgcctcgacgttagatcgagttctgaagacggcacagcagcctgccctggtagtggagacatccaccgcagctactggtacgccctcaacggtcctgcatgcagctcggcctccaatcaaactgttactttcctcttccgtcccagctgattctgctatctctggccagacttcttgccccaataacgtacagattagcgtgccacccgccattatcaaccccagaaccgctctgtacaccgctaacacgaaggtcgcttttagcgccatgtcgagtatgcccgtgggacctctgcagggtggattctgcgccaacagcaataccgccagtcctagtagccatccttctacaagcttcgcgaatatggccactctgccttcatgcccggccccgtcttcttctcctgctcttagcagtgtccccgaatcttcattttattcatcatctggcggaggtggcagtaccggaaatattcctgccagtaaccctaaccatcaccatcatcatcaccatcaacaacccccagcacccccccaacccgccccaccgccaccagggtgcattgtttgtacaagctgtgggtgcagcgggtcttgcggtagctctggactgacagtttcatatgccaattattttcagcacccgttctccgggccgtccgtattcaccttcccctttctccctttctcacctatgtgcagtagcggatacgttagtgctcagcagtatggtggtgggtcgaccttccctgtggtgcacgccccatactcttcctctggtacccccgatccagttctgtccggtcagagcacctttgccgtccctccgatgcagaatttcatggccggcactgccggggtgtatcagacccagggcctggtaggctcgtctaatggatcttcccacaaaaagagcgggaatctgtcgtgttataattgcggtgccactggccatagagcccaggattgtaagcagccctcaatggacttcaacagaccaggaacttttcgtctcaaatacgcgcctcccgccgagtctttggactctactgattag

SEQ ID NO: 273897 - DNA, 2850 bp, Artificial Sequence
  derived and/or modified sequence
atggccagcaaccacccagccttctccttccaccagaagcaggtgctgcggcaggagctgacccagatccagagcagcctgaatggaggcggcggccatggaggcaagggggcccctggccctggaggagccctgcccacctgcccagcctgccacaagatcacccccaggacagaggcccctgtgtcctctgtgagcaacagcctggagaatgccctgcacaccagcgcccacagcacagaggagagcctgcccaagaggcccctgggcaagcacagcaaggtgtctgtggagaagattgacctgaagggcctgagccacaccaagaatgacagaaatgtggagtgcagctttgaggtgctgtggagcgacagcagcatcacctctgtgaccaagagcagcagcgaggtgacagagttcatcagcaagctgtgccagctgtacccagaggagaacctggagaagctgatcccctgcctggccggcccagatgccttctacgtggagaggaaccacgtggacctggacagcggcctgcgctacctggccagcctgcccagccacgtgctgaagaatgaccacgtgcggcgcttcctgagcaccagcagccccccccagcagctgcagagccccagccctggcaaccccagcctgagcaaggtgggcaccgtgatgggcgtgtctggccggcctgtgtgtggggtggccggcatccccagcagccagagcggggcccagcaccacggccagcaccctgctggcagcgctgcccccctgccccactgcagccatgctggcagcgctggcagcgccctggcctaccgcacccagatggacaccagccctgccatcctgatgcccagcagcctgcagaccccccagacccaggagcagaatggcatcctggactggctgaggaagctgcggctgcacaagtactaccctgtgttcaagcagctgtccatggagaagttcctgagcctgacagaggaggacctgaacaagtttgagagcctgaccatgggcgccaagaagaagctgaagacccagctggagctggagaaggagaagtctgagcggcgctgcctgaaccccagcgccccacccctggtgaccagcagcggcgtggcccgggtgccccccaccagccacgtgggccctgtgcagagcggccggggcagccacgccgctgagctgcgggtggaggtggagcagccccaccaccagctgccccgggagggcagcagcagcgagtacagcagcagcagcagcagccccatgggcgtgcaggcccgggaggagagcagtgacagcgcagaagaaaatgaccggcgggtggagatccacctggagagcagtgacaaggagaagcctgtgatgctgctgaaccacttcaccagcagcagcgcccggcccacagcccaggtgctgcctgtgcagaatgaggccagcagcaaccccagcggccaccaccccctgcccccccagatgctgtctgctgccagccacatcacccccatccgcatgctgaacagcgtgcacaagccagagcggggcagcgctgacatgaagctgctgagcagctctgtgcacagcctgctgagcctggaggagagaaataaaggaagtggccccaggagctccatgaaggtggacaagagctttggaagtgccatgatggatgtgctgcctgccagcgccccccaccagcctgtgcaggtgctgagcggcctgtctgagagcagctccatgagccccaccgtgtcctttggccccaggaccaaggtggtgcacgccagcaccctggacagagtgctgaagacagcccagcagcctgccctggtggtggagaccagcacagctgccaccggcacccccagcacagtgctgcacgccgcccggccccccatcaagctgctgctgagcagctctgtgcctgctgacagcgccatcagcggccagaccagctgccccaacaacgtgcagatctctgtgcccccagccatcatcaaccccaggacagccctgtacacagccaacaccaaggtggccttcagcgccatgagctccatgcctgtgggccccctgcagggcggcttctgtgccaacagcaacacagccagccccagcagccaccccagcaccagctttgccaacatggccaccctgcccagctgcccagcccccagcagcagccctgccctgagctctgtgcctgagagcagcttctacagcagcagcggcggcggcggcagcactggaaacatcccagccagcaaccccaaccaccaccaccaccaccaccaccagcagcccccagccccaccccagcctgcccctcctcctcctggctgcatcgtgtgcaccagctgtggctgcagcggcagctgtggcagcagcggcctgactgtgtcctatgccaactacttccagcaccccttcagcggccccagcgtcttcaccttccccttcctgcccttcagccccatgtgcagcagcggctacgtgtctgcccagcagtatggaggcggcagcaccttccctgtggtgcacgccccctacagcagcagcggcaccccagaccctgtgctgagcggccagagcacctttgctgtgccccccatgcagaacttcatggccggcacagctggggtgtaccagacccagggcctggtgggcagcagcaatggcagcagccacaagaagagcggcaacctgagctgctacaactgtggggccaccggccaccgggcccaggactgcaagcagcccagcatggacttcaacagacctggcaccttccggctgaagtatgcccccccagctgagagcctggacagcacagactag

SEQ ID NO: 273898 - DNA, 2850 bp, Artificial Sequence
  derived and/or modified sequence
atggccagcaaccaccccgccttcagcttccaccagaagcaggtgctgcggcaggaactaacccagatacagagtagcctcaatggcggcggcgggcacgggggtaagggtgctccaggccccggtggggcccttccaacttgccctgcttgccataagatcacccctagaacagaggcccccgtgagctccgtcagcaacagtttggaaaatgctctccacacctccgcacacagcaccgaagagagcctccccaagcgaccactaggaaaacactctaaggtgtctgttgaaaagatcgatctaaagggcctgtcacacaccaagaacgaccgcaacgtggaatgttctttcgaggtgctctggagcgactcatctatcacttcagtcactaagtctagctcagaagtcacagaattcatcagcaaattatgtcagctgtatccagaggaaaacttggagaagctcataccatgcttagcaggacctgacgctttttacgttgagagaaaccacgtagaccttgattcgggccttagatacttggcgagtctcccaagccatgttctgaaaaatgatcacgtgagaaggttcctgtcaactagttctccaccccagcagctgcagagcccttccccaggtaaccccagcctctctaaagtgggaacagtgatgggggtaagcgggcggcccgtgtgcggggtggctggaatcccctcttcccaatccggcgctcagcatcacggccagcatcctgcgggcagcgcagcgcctcttccgcattgcagccatgccggcagcgcggggtcagcactggcttaccgcacccagatggatacaagcccagctatcctgatgccttcttccctacaaacaccacaaacgcaggagcaaaacggcatcttagactggctgcgaaagttgcggctgcacaagtactatcccgtattcaagcagctcagcatggagaaatttctcagcttaacagaggaggatctgaacaaatttgaatccctgactatgggcgcaaaaaagaaactgaaaactcaactcgagctggagaaagagaagtccgaaaggaggtgtcttaacccctcggcccctcctctcgtcacctcatccggagtggcccgggtgcctccaacgtctcacgttggaccagtacagagcggcaggggaagtcacgccgccgagcttcgcgtggaggtcgagcagccccatcatcagcttcccagagagggctcttcatcagagtattccagctctagctcatcccccatgggcgtgcaggccagggaagagtcttctgactcagccgaagaaaacgatcgcagagtagaaattcatctcgagtcctctgacaaggagaaacccgtgatgctgctaaatcattttaccagtagcagcgcccggcccacagcgcaggtgcttcctgtccagaacgaggccagctcaaacccttctggccaccatcctctacctcctcagatgctctccgctgccagccatattacaccaattagaatgctgaacagtgtgcacaaaccagaacgtggatcagctgatatgaagctgctgtcttcttcagtccactctctcctcagcctggaggaacggaacaaaggcagcgggcctcgctcgagcatgaaagttgataaaagctttggatcagccatgatggacgtgcttcccgcaagtgccccgcatcagcctgttcaggtcctgtcaggcctaagtgagtcctctagcatgtctccaacggtctcctttgggccgcggaccaaagtggtccatgcctctacgctagatcgggtgttaaaaactgctcagcagcctgctctggttgtggaaacgtcgactgccgcaacgggcacacccagtactgtgctccacgccgcccgaccaccaatcaaactcctgctctcctcttctgtgcccgctgatagcgccatatcggggcagaccagctgtccaaacaacgtccagattagcgtgccgcccgctattattaaccctcggaccgcactttatacagcaaacaccaaggtggctttctcagcgatgagttccatgccagtgggaccgttacaagggggcttttgtgctaacagtaacactgctagcccctcttcacatcccagcactagttttgctaatatggctacccttccttcctgtccagccccttcaagtagcccggcattatcaagcgtgcccgagtcctcattctattccagttccggcggtgggggatccactgggaacatcccggcgagcaatcctaaccatcaccaccatcaccaccaccagcaaccacccgctcccccccagcctgctccacctccaccagggtgtatcgtatgcacatcctgcggctgctccgggtcatgcgggtcctcagggctaactgtcagctacgccaactacttccagcacccattcagtggcccctcagtgtttacttttccattcttgcccttttctccgatgtgttcctccggatatgtctcggcccaacagtacggtggcgggtctacatttcccgtggtccatgctccatactcgagtagtgggacccctgatcccgtgctatccggccagtccaccttcgccgtgcccccgatgcagaatttcatggcgggcactgcaggcgtctaccagacccagggccttgtgggcagttcgaacggcagtagccataagaaatccggaaatctgtcttgctataattgtggagcgaccggtcaccgtgcacaggactgcaaacagcctagcatggatttcaatagaccaggcacttttaggctgaaatacgcaccacccgccgagagcctggactccactgattag

SEQ ID NO: 273899 - DNA, 2850 bp, Artificial Sequence
  derived and/or modified sequence
atggcctcaaatcaccccgcttttagcttccaccagaagcaggttcttcggcaagaattaacccagatccaatcctcactgaatggtgggggtgggcatggcggaaagggggctcctgggccagggggagccttgccaacctgccctgcatgtcataaaatcacccctcgcaccgaggccccagtgagcagcgtgagtaattctctcgaaaatgccctgcacacatctgcccactcaaccgaggagtcattgccaaagagaccactgggtaagcattccaaggtgtctgtcgaaaaaatcgacctcaaggggctgtcacatacaaagaatgatcggaacgtggagtgcagtttcgaggtcctctggtccgattcttccatcacttctgtgaccaagtcctctagcgaggttactgagtttatatcaaagctttgccagctgtaccctgaggaaaacctggaaaagttgattccttgcttggctggccctgacgctttctacgtagagcgaaatcatgtcgacctcgatagcgggctaaggtatctagcgagcttaccatctcacgtgttgaagaatgatcatgtgcgcaggttcctctccacaagtagccctcctcagcagctccagtcacccagtcctggtaatccttccctgagtaaggtaggcaccgtaatgggggtgtccggccgacctgtctgtggtgtggccggtatcccatcctctcagagcggagcccagcatcatggccagcacccagccggatccgccgctcctctcccgcactgcagccacgccggatctgccggatccgcgctcgcataccggacccagatggataccagccctgccatccttatgccttcctcattacaaacacctcagactcaggagcagaacggcatcttggactggttaaggaagttgcgcctgcataaatattatcccgtttttaagcagctctcaatggaaaagtttctctctctgacggaggaggatctgaataagttcgagtccctcactatgggtgctaaaaagaaactgaagacccagctggaactagagaaagagaaaagcgagcgccgatgcctgaacccttctgccccacctttggtgaccagctccggggtggccagagtcccaccaaccagccacgtgggccctgtgcagtccggaagaggctcacatgcggctgagcttagggtagaagtggagcagccccaccatcaacttcccagggaaggctcatcctcagagtattccagcagctccagttcccctatgggtgttcaggcacgggaagaatctagtgattcggccgaggaaaacgacagacgcgtggagatccacctggaatccagcgacaaggaaaaacctgtcatgctcctgaaccatttcacatcttcttcggccaggccaacggcgcaggtgctgccagtccagaatgaagcctcctctaacccttctggccatcatccactccccccacagatgctgagcgcggcatcacacattacccctattagaatgttaaattctgtgcacaaacccgaacggggttcagccgatatgaaactcctgagctcttctgtgcacagcttactctccctagaggaaaggaacaagggcagtggcccaaggtcatccatgaaggttgataagtccttcggttcggccatgatggatgttctgccagcctcagcaccccatcaaccagtgcaggttttaagcgggctgtccgaatccagctccatgtcacctacggtcagctttggccctcgcaccaaagtcgtccatgcaagcaccttggatcgcgttctcaagactgctcagcaaccagcgctcgtagttgaaactagcacggccgcaactggcacaccgtccacagttcttcatgccgctaggcctcctataaagctcctactgtcctcctcagtgcctgctgattccgccatttcaggtcagaccagctgccccaataacgtgcagatctccgtgcctccagctattattaatcccagaacagctctttacacagctaatactaaggtcgcgttcagcgccatgtccagcatgccagtgggccctctacaggggggtttttgcgctaattccaacaccgctagccctagtagtcatccctctacttcgtttgccaatatggcgaccctgccaagctgtcctgctccttcctcaagtccggcactgtccagcgtccccgagagcagcttttactcctcctctgggggtggcggatctaccggcaatatcccagccagcaatcctaatcaccaccaccatcaccatcatcagcaaccgccagcccctccccagcccgcacccccaccccctgggtgtatcgtttgcacaagttgtggttgttcaggctcctgcgggtcctctggtctaaccgtctcttatgctaattatttccaacacccattcagcggaccctcggtgttcacgtttcctttccttcctttctccccaatgtgttcctctggttatgtgagcgcccagcagtacgggggaggatccactttcccagtggtccacgctccctacagctcatccggcacgcctgaccctgtccttagcgggcaaagcacatttgcggtgccacctatgcagaattttatggcgggtaccgccggtgtctaccagacacaggggctggtaggaagctccaacggctcatcccacaaaaagtctggaaacctgtcttgttataattgcggcgctaccggacacagagctcaagattgcaagcaaccctccatggacttcaatcgccctggaacgttccgccttaaatacgcaccacccgctgagtccctggatagcaccgactag

SEQ ID NO: 273900 - DNA, 7102 bp, Artificial Sequence
  derived and/or modified sequence
aggccaacaacccggccgacctgggcagcctcaccaacctgacggacgaggtggtgcgcagcaagctgctggtgtcgctggcgctgctgggctcggagcagcgcgaggcggcgggcgtgctctaccgcacgctcacgcacatcgactccatcatccacaactacgggctgcagcttaacgagggccgcacgggcgatgagttcctgctgctgttcaccatggcctccaaccacccggccttcagcttccaccagaagcaggtgctgcgccaggagctcacgcagatccagagcagcctgaacggcggcgggggccacggcggcaagggcgcgcccgggccgggcggcgcgctgcccacttgcccagcctgccacaagatcactccaagaactgaggcccctgtcagcagtgtcagtaatagtttggagaatgccctgcacacatcagcacattccacggaggagtcgctgcccaagaggcccttaggaaaacacagcaaagtgagtgttgaaaagatagacctgaagggattatcacacacaaaaaatgacagaaatgttgaatgttcctttgaggtcttgtggtctgattcttcaataacatcagtaaccaaatcttcctctgaagtgacggaatttatttcaaagctatgtcagctctatcctgaagagaacttggagaaactcattccttgcttagctggtccggacgcattttatgtggagcgaaaccacgtggatctggactcaggcctgaggtacctggcctcattaccttctcacgtgttgaaaaatgaccatgtcaggaggtttctcagcacttcctctcccccacagcagcttcagagtccaagtcctggcaatccctccctttctaaagtaggtaccgtgatgggcgtgtctggaaggcctgtgtgtggagtggctggtatcccgtcctcgcagagcggagcccagcaccacgggcagcacccggccggctccgccgcccccttgcctcactgctcccatgcgggcagcgcgggctcagccctggcctaccggacccagatggacacatcacctgccatcctcatgccttccagtctgcagacccctcagacccaggagcagaatgggattctagactggcttaggaaactgcgtttgcacaagtattaccccgtctttaagcagctctccatggagaagtttttgagccttactgaagaagatctgaataaatttgagtctcttaccatgggggcaaagaagaagctcaagacccagctggagctggaaaaggagaagtcagagagacggtgcctgaacccctcggccccgccgctggtcaccagcagtggtgtggctcgagtgccccccaccagccacgtcgggcccgtgcagtcggggcggggcagccatgcagcagagctgcgggtggaagtggagcagccccatcaccagctgccccgggaaggcagttcctcggagtactccagctcctcctccagccccatgggggtacaggcccgggaagagagctccgacagcgctgaggagaatgacagacgtgtggagattcacttggagagctctgacaaggagaagccggtgatgctgctgaatcacttcacttccagttccgccagacccacggcccaggttctccctgtgcagaatgaggccagctccaatccatcaggccaccaccccctgcccccgcagatgctgagcgcagcctcacacatcacacccatccgcatgctgaattccgtgcacaagccggaaagagggagcgcggacatgaagctcctctcgtcttctgtgcactcacttttgtctctagaagaaaggaataaaggatctggaccaagaagcagcatgaaagtggacaagagctttggcagcgccatgatggacgtgctgcccgcgtccgcaccccaccagcctgtgcaggtcctctctgggctttcggagagcagctccatgtcacccacagtctcctttggtccccggaccaaagtcgtgcatgcatccacgctggacagggtgctgaagacagcacagcaaccggccctggtcgtggagaccagcacggccgccacggggacgcccagcacagtcctccacgccgcccgtccgcccatcaaactgctgctgtcgtcatctgttcctgctgattctgccatttctgggcaaacttcctgtcctaataatgtgcaaataagtgtgccccctgcaataataaacccccggactgctctgtacacagccaacaccaaagttgccttttctgcaatgagcagtatgccagtgggccccctgcagggtggcttctgtgcaaacagcaacactgcctctcccagcagccacccctccacgtcctttgccaacatggccacgttgcccagctgcccagcccccagctccagcccggcgctgtcctccgtccctgaaagcagtttctatagcagcagtggcggtggcggctccacaggaaacattcctgcctcgaatccgaaccaccaccaccaccaccaccatcagcagcccccggcacccccgcagcccgccccacccccgccaggctgcattgtgtgcacgtcctgtggctgcagcggcagctgcggctcgagtggcctgactgtcagctacgccaactacttccagcacccgttctccggtccgtccgtgttcaccttccccttcttgcccttcagtcccatgtgcagcagcggctacgtcagcgcccagcagtacggcggcggctccaccttccccgtcgtgcacgccccttacagcagcagcgggaccccagaccctgtcctgagtgggcagtccacgtttgccgtgccacccatgcagaacttcatggcagggacagcaggggtgtaccagacccaaggactggtgggcagtagcaatggttccagtcacaaaaagagcgggaacctatcttgttacaactgcggggccactggtcaccgcgcccaggactgcaaacagccgtccatggacttcaaccggccaggtacttttaggttgaaatacgcccctccagcagaaagtctggactccacagattgatatttttctctggcaacagaacgttattaagccatggagacataaggaaaattaaatacaaaactgagaagtctagttgctgttgagcttaatctttttaatccaaaggtgctttacttttcctagactggatagaaaatctagcgtagaagtgcatcaaactcgatttattgccaaaaccctagattggagcttggtgtcagaactcgcctagtgggcatctctgtggctggtgagatcggccacctccacttttggttgcagtgcagagacgccatgtctcccgaagagcattgccatcactggccctcctaggctcacacgtcaattccagggcagctacacgtggtctgaatcgagaaccgagcttggagttctccaagtggagttccacccgccggactcctgacacccctgggctagggaaaatgtcgactttgttttgttctgttcctaaagtgattagcactaatctctgggatttttaaggattgcactacagaagaatgtaccctgatgtaaatctctgcggttctgggagccaaactcctctgagaacagtcagtgcaagagactccaataatccatattgaaagagtcagcaccagcagaggctactcgacttaggacgcaacagaggttttagtatttccttccctcctccaagcacttgtagcagtttcaggtttttaatttttttctgcaaataaatctaaactacgttattaaatagaaatagtttactcgcaacaacttaatttctaagggtccaagtcccagagaatccatagtcgtcaaagctttgagagtatctttcttcccagccagtcagtggctttgagccctatcttccactacaaatgacctctcgaggggggacggcgacagcgcggctctgtgagtggctgtgaggatgctgcacgtcctcagcagagtttgcaagttgctttatctcccacgggctccccaagaacctccaaccccgaggcttatcgctagcggattcacacctgagacagacatttcaacaatgatacagtcctgtcatttatcagcaaaagattgggaattttctcctgtcaacttcttttgtattaggctgtgtattgatagttaattccgttaaaaattacttggaaaacagtgggaagtggtaggactctggaagaggccacacacccgagagctgcgagatctgtgcaagtctggttttggttaggtagtaataaaagtcctcactgtagatctctaaatttcaacccacggaaatgaaagccttttgtctgaaatttacggacttaaatcttcaaggttaaagggaattttctgctcaaataatactcttatcgaaaatgctaaagtcttcaatgttaaaatactgattggtaaaatcttgcagttgggattttgcagttggatatttattttaaaaaaaattataatattcagactattcttaaaatgggacaatcagcctcatgaaaaattgatgtaaatcagaagaataccctagaatgaggccttgtgatgtgagcgttcaatttgaagagcagttcctaacttcatagaaactaaagcagaaagttgttacattttttttatgacaggcttttagtagaattttttagttttattttagttgaattttatttctatgcaatgcagaattaacagacctcttctcctcatggtacacagtattacagtgttgaagtaatggtgatgcttattacaacagctatttaggggaatgttacgttgatctcttaaattgtaaacactacaaaatgtcaaaataatgagaactgacacaactttgccttaaagagtactagactggaccttctcatattacgtttaaggaagacttagagtgttcattgatgtttacgattttaatatttctgaaggccattacagtggcctggatatgtgctgaaagccaaacttttaaattttttggtttttttaagcaaagaaatattttaaataaatcctatttcaacactgaaattgttgaaaaccgtctcataacaaaaggaaaaaacattggaatttttgttttagtggtcagtataggggaatgaaagcgtctgttgttacccacgtaactattttgataagtattagaggttaaccttaaatccagcaaaacattaaaacagaaacttttcaacttggagcctgccattcagcgttgaggtagatgagttccgacactgtcacggctgtgttcccagcagcgaaggcctctgcggagctgccagtcgtcttgaacgtgcatgggcggcgtgtgacatctccagggaggccgtccgaagtcgagaatcgtcagctgtaagtaggagctacacagcgcagagaaaatggaaccacccatccgtgaggcctctttccggagggagccgcacacttggacttgagagtttgccagcagcgagctcggatgcatctctccaaaagccaccaaggtcggcgcgtctgaagagcgttttgcggtcatcagacttcctcatctgaaaacacagaacatactgaccctttcaagtacttagtcattttcctgaaagtgtggtctgtttcagaatgctgtggcaaccaggtaggtgtggcactggccatgtgccacgtctttgccctttgtagtctgtcagatattaaagtttctaaccctgtttttttaatctccaagaatggggaaagtggaatgtagagatggaagcagaacgtgatgtttggatacaacagctatttaatccttttttattttttaagcaaaacactcagttttctaccttattttctaatgttgatttcatggtaatactgacagttggaagtgtttaacataaaaactcattgctaaagagcactgaggaaatgggagctagcgcacttgtaataaaaataaagacaaaatattttcttgaatgcatatatgtgattgggtattttaaaaaccagtatcatctgtcatctccaaaagattacaggagtcagcttgttaatacagtagtgttagtaggttctgtatttttaattcagtacttagaattctaggtcctttattgcccaaagtcagcacagttagtttataccacagactctgtcttggggcacagtagtggggcggggtagtgactttgcctaaacatcacccagctggaacagaggctgagcggggctttaggcacttgccagatgggaactgggttgcaccctccttgctccctgtcattttcttgtcactcttcctgcttcccagtgttttattttatgccttgctcgttgtacatcatgatgactgatggtcttcaaggttgtgaggaaagccgtctccctgcttgactcgactgctgtcccagaggagagtcctgtgcgacctgagcgggggtggctgccatttccagcatgcaggtgacttccaaagaatgagtcaggtggcactgaaagccatgggttctgaagaggcgaatttgttgaaaagtcccaagggtctgaatgaaagcatctttaatcaacactcaacactcgcaatattctagaaaaccatatactgtgctggttgaggccaaaggttaacattgctccactgttcaccaaggaagggggcagtggccatccgccgcggcctcacgtgcgttgtaacaagccctcatcacatgtgtgagtcttacgtgcacaaaaagagaaggctttggtactgaaactggacaccttgtgtactcgataccttcacagcttctattggacatattttctttttaggaatgaaggaaaattctcccatttttgagccattcttttgtcaattctacaaaattgcatgtaactttataaatatttttaaaagatatagttttgtaaatatttaatattccgctaatttgattttgaattgtaaatgtcaagtattctgtttttggggtttttatgttttattatactttgttaaaaaggacaaattgtacatttttagaatgtttttatgagtaaatttaatgtactgaaaataaaaattttaaaaaaggctg

SEQ ID NO: 273901 - protein, 1113 aa, Artificial Sequence
  derived and/or modified sequence
MGPIIVPPGGHSVPSTPPVVTIAPTKTVNGVWRSESRQDAGSRSSSGGRERLIVEPPLPQEKAGGPAIPSHLLSTPYPFGLSPSSVVQDSRFPPLNLQRPVHHVVPPSTVTEDYLRSFRPYHTTDDLRMSSLPPLGLDPATAAAYYHPSYLAPHPFPHPAFRMDDSYCLSALRSPFYPIPTPGSLPPLHPSAMHLHLSGVRYPPELSHSSLAALHSERMSGLSAERLQMDEELRREREREREREREREADREREKEREREREKEREQEKEREREKERERELERQREQRAREKELLAAKALEPSFLPVAELHGLRGHATEERGKPSEQLTPTRAEKLKDAGLQAPKPVQHPLHPVPTPHHTVPSLISNHGIFSLPSSSAATALLIQRTNEEEKWLARQRRLRQEKEDRQSQVSEFRQQVLEQHLDMGRPPVPAEAEHRPESTTRPGPNRHEPGGRDPPQHFGGPPPLISPKPQLHAAPTALWNPVSLMDNTLETRRAESHSLHSHPAAFEPSRQAAVPLVKVERVFCPEKAEEGPRKREPAPLDKYQPPPPPPREGGSLEHQPFLPGPGPFLAELEKSTQTILGQQRASLPQAATFGELSGPLKPGSPYRPPVPRAPDPAYIYDEFLQQRRRLVSKLDLEERRRREAQEKGYYYDLDDSYDESDEEEVRAHLRCVAEQPPLKLDTSSEKLEFLQLFGLTTQQQKEELVAQKRRKRRRMLRERSPSPPTIQSKRQTPSPRLALSTRYSPDEMNNSPNFEEKKKFLTIFNLTHISAEKRKDKERLVEMLRAMKQKALSAAVADSLTNSPRDSPAVSLSEPATQQASLDVEKPVGVAASLSDIPKAAEPGKLEQVRPQELSRVQELAPASGEKARLSEAPGGKKSLSMLHYIRGAAPKDIPVPLSHSTNGKSKPWEPFVAEEFAHQFHESVLQSTQKALQKHKGSVAVLSAEQNHKVDTSVHYNIPELQSSSRAPPPQHNGQQEPPTARKGPPTQELDRDSEEEEEEDDEDGEDEEEVPKRKWQGIEAVFEAYQEHIEEQNLERQVLQTQCRRLEARHYSLSLTAEQLSHSVAELRSQKQKMVSERERLQAELDHLRKCLALPAMHWPRGYLKGYPR

SEQ ID NO: 273902 - protein, 317 aa, Artificial Sequence
  derived and/or modified sequence
MRDSACWQRKDELLQQARKRFLNKSSEDDAASESFLPSEGASSDPVTLRRRMLAARNGGFRSSRPPSAPLPSSAASCALCPTDWRRPVPIPLHGKAGLTALPLYKACGLIVFGQLINLILLCNTFYVTFLFPLETLQILTVGMISSGVDWTAWGGGRSGGSEVACLQQAASTPASCVRPTNAGVLSTTPSGKSVGEAHSVSPPPRRGVTSVIKLLSLLWKHVDCARRPTGSCTPQQGILEKELLVRYLEQRRGKSRAIGCDEVTPFCPTTSGTDFPSLQSKAGLISVNSGAPASHECAPWVPSPLSISLSRLDLGSG

SEQ ID NO: 273903 - DNA, 954 bp, Artificial Sequence
  derived and/or modified sequence
atgagagattcagcatgttggcagcgaaaggacgaattacttcaacaggcgcggaagagattcttgaataaatcctctgaggacgatgcagcgagtgagtctttcctccccagtgagggcgccagtagcgatccagtcacactgcggagacgaatgctggccgctcgaaacggaggattccgcagctcccgccctccatctgcccctctaccctcctctgccgcgagctgcgctctgtgtcccacagactggcgtcggccggtgcccattccactgcatggaaaagcaggactgaccgccctgccactgtacaaggcttgtggccttatagtcttcggacagctgataaacctcatcttgctgtgtaataccttttatgtgacattcctgtttccactggaaactctgcaaatactgaccgtgggcatgatttcttctggggtcgactggactgcctggggcggcggcagatcaggaggctctgaggtggcgtgcttgcagcaagccgcaagcacacctgcaagttgcgttaggcccaccaatgcgggtgtgttaagcaccacacctagtggcaagtctgtcggcgaagctcactcagtgtcacctcccccaagaagaggcgttacttctgtgattaagctactcagcctgctctggaaacacgttgattgtgctaggcgcccaacgggatcctgtacaccgcagcagggcatcctcgagaaggagctgttagtgagatatctggaacagaggcgggggaaaagcagagctatcggatgcgatgaggtcactcctttttgtcctaccacttctggaactgatttcccttctcttcaatctaaagccggtcttatttcagtcaattcaggtgccccagccagccatgagtgcgcgccgtgggtgccctcccccctcagtattagcttgtcccgactggatctgggctcagggtag

SEQ ID NO: 273904 - DNA, 954 bp, Artificial Sequence
  derived and/or modified sequence
atgagggacagcgcctgctggcagaggaaggatgagctgctgcagcaggccaggaagcgcttcctgaacaagagcagtgaagatgatgctgccagcgagagcttcctgcccagcgagggcgccagcagtgaccctgtgaccctgcggcggaggatgctggccgccagaaatggaggcttccgcagcagcaggcctccttctgcccccctgcccagcagcgctgccagctgtgccctgtgccccacagactggaggaggcctgtgcccatccccctgcacggcaaggccggcctgacagccctgcccctgtacaaggcctgtggcctcatcgtgtttggccagctgatcaacctgatcctgctgtgcaacaccttctacgtgaccttcctgttccccctggagaccctgcagatcctgactgtgggcatgatcagcagcggcgtggactggacagcctggggcggcggccgcagcggcggcagcgaggtggcctgcctgcagcaggccgccagcaccccagccagctgtgtgcggcccaccaatgctggggtgctgagcaccacccccagcggcaagtctgtgggggaggcccacagcgtgagccccccaccaagaagaggagtgaccagcgtcatcaagctgctgagcctgctgtggaagcacgtggactgtgcccggcggcccaccggcagctgcaccccccagcagggcatcctggagaaggagctgctggtgcgctacctggagcagaggcggggcaagagccgggccatcggctgtgatgaggtgacccccttctgccccaccaccagcggcacagacttccccagcctgcagagcaaggccggcctcatctctgtgaacagcggggccccagccagccatgaatgtgccccctgggtgcccagccccctgagcatcagcctgagccggctggacctgggcagcggctag

SEQ ID NO: 273905 - DNA, 954 bp, Artificial Sequence
  derived and/or modified sequence
atgcgggacagcgcctgctggcagcggaaggacgagctgctgcagcaggcccgtaaaagatttctcaacaagagttcagaagacgacgccgcctccgagtcgtttctcccctccgaaggtgcctcaagtgaccccgtgacactcaggaggaggatgctggccgcccgcaacggggggttcagatcttctcgacccccctctgctccactcccctcctccgcagcttcctgcgccctctgtcctaccgactggcgccgccccgtaccaatcccgctgcatggcaaggccggcctgaccgccctgcccctatacaaagcttgtgggttgattgtgttcggacagttgatcaatctcatccttctatgcaacaccttttatgtgacgtttttgtttcctcttgagactctccagattctgacagtcggaatgatctcctccggcgtcgactggaccgcttggggtggcggtaggagcggaggctctgaggtggcctgcctgcaacaggcggctagtacaccggctagttgtgtgcggcccactaacgcaggtgtgttatccaccacccctagtgggaagtccgttggtgaagctcacagcgtaagcccaccgccccgacgaggggtgacgtcggttattaagctcttatcacttttgtggaaacacgtggactgcgcacggcgcccaacaggatcatgtacacctcagcaggggattcttgagaaagaactgttagtgcgttacctagagcaacgtagggggaagagtagagccattggctgcgatgaggtgacccccttttgtcccactactagcggaactgattttccctctttacagtcaaaggctggcctaatatccgtaaattccggtgctccagcttcacatgagtgtgcaccttgggtgcctagtcctctaagcatctctctgagtaggctcgaccttggatccggctag

SEQ ID NO: 273906 - DNA, 954 bp, Artificial Sequence
  derived and/or modified sequence
atgcgcgactcagcctgttggcagcgaaaggacgagctgcttcagcaggcgaggaagagattcttgaacaaatcctctgaagacgacgctgcctccgaatccttccttccctcagaaggcgcttcatcagacccggttaccctgagacgcagaatgctcgcagccaggaatggtggctttcggtcttccaggccaccctcggccccacttccatcttcagcggcttcttgcgcattgtgcccaacggactggcgccgtccggtgcccatcccactccacggtaaggctggtctgacggcgctgcccctgtataaggcttgcgggcttatcgtatttggacagctgatcaacctgatactcctgtgtaacaccttttatgtcaccttcctctttcccctggagacacttcagatcctcaccgttggtatgatttcatccggtgtagattggaccgcttgggggggtggtagatccggcggaagtgaggttgcctgtctacagcaggcagcaagtaccccagcaagctgtgtgcgcccaaccaacgccggagtactgagcacaactccatccggcaagtcggtgggcgaggcgcactccgtcagccctccacctcggaggggcgtgaccagcgtcatcaagctcctgtcactcctgtggaagcacgtcgattgtgccagaaggcccaccgggagttgcacgccccaacagggtatactggagaaggagctcctggtgcgctatcttgaacagagaagaggcaaatcgagggccatcgggtgtgacgaggtgaccccattttgccccacaacttcaggaacagactttccaagtctccaaagcaaagcaggccttataagtgtaaattccggagcgcctgctagccatgaatgtgccccatgggtgccctcccccctgagcatatccctgtctaggctggacctgggaagcgggtag

SEQ ID NO: 273907 - DNA, 954 bp, Artificial Sequence
  derived and/or modified sequence
atgagagacagcgcatgctggcagcgtaaggacgaactcctccagcaagctcgcaaacgtttcttgaacaaaagttctgaagatgatgcggcctcagagagcttcctcccctcggaaggtgcgtcctctgaccccgtgaccctgcgtcgaaggatgctggctgcccggaacggaggcttcagaagcagcagacctcctagcgctcccttgccttcctcagctgcctcctgcgccctgtgcccgactgactggaggaggcctgtcccaattccgctccatggaaaagcgggcttgactgcattgccgctgtataaagcatgtggtcttatagtgtttggacagctgataaatttaatccttctttgtaatactttctatgtgacatttctcttccccttagaaacactgcaaattttaactgtaggtatgatctcttctggtgttgactggactgcttggggtgggggacgatcaggaggaagtgaggtcgcctgcctgcagcaggcagcttctactcctgcctcatgcgtacgtcccacaaatgcaggtgtcctgagcaccacacccagtgggaagagtgtgggggaggcgcacagtgtgagcccgcccccacgtcgtggggtaacatctgttatcaaactgctgtcgttgttgtggaagcatgtagactgtgccagaagacccacgggctcatgcacccctcagcagggcatcttggaaaaggaactcttggttcgatacctggagcagaggaggggaaagtccagggctatagggtgtgatgaagtcacccctttctgtcccactacatctgggactgactttccgagcctccagtccaaagccggcttgatttccgtgaactctggtgctcctgcatctcatgagtgtgccccatgggtcccctcccctctcagcatttccttgtcccgtctggacctggggagtggttag

SEQ ID NO: 273908 - DNA, 954 bp, Artificial Sequence
  derived and/or modified sequence
atgagagacagcgcctgctggcagagaaaggacgagctgctgcagcaggccagaaagagattcctgaacaagagcagcgaggacgacgccgccagcgagagcttcctgcccagcgagggcgccagcagcgaccccgtgaccctgagaagaagaatgctggccgccagaaacggcggcttcagaagcagcagaccccccagcgcccccctgcccagcagcgccgccagctgcgccctgtgccccaccgactggagaagacccgtgcccatccccctgcacggcaaggccggcctgaccgccctgcccctgtacaaggcctgcggcctgatcgtgttcggccagctgatcaacctgatcctgctgtgcaacaccttctacgtgaccttcctgttccccctggagaccctgcagatcctgaccgtgggcatgatcagcagcggcgtggactggaccgcctggggcggcggcagaagcggcggcagcgaggtggcctgcctgcagcaggccgccagcacccccgccagctgcgtgagacccaccaacgccggcgtgctgagcaccacccccagcggcaagagcgtgggcgaggcccacagcgtgagccccccccccagaagaggcgtgaccagcgtgatcaagctgctgagcctgctgtggaagcacgtggactgcgccagaagacccaccggcagctgcaccccccagcagggcatcctggagaaggagctgctggtgagatacctggagcagagaagaggcaagagcagagccatcggctgcgacgaggtgacccccttctgccccaccaccagcggcaccgacttccccagcctgcagagcaaggccggcctgatcagcgtgaacagcggcgcccccgccagccacgagtgcgccccctgggtgcccagccccctgagcatcagcctgagcagactggacctgggcagcggctag

SEQ ID NO: 273909 - DNA, 1184 bp, Artificial Sequence
  derived and/or modified sequence
gcccctccagcctgctggagccggagccggagccggagccggagccggagccggagccagagccagagctcgaggactcaccggcccagtctccgtccgggatggggccccgctcccgggcgcgttgccgcccagtcccggggaccgtccctaccgcgagggtctgaggcgcggctgccccggggagggtggaaggccaggcgtggggcccgaacctctggctgactttggcagggcccatctggcacggcctccgcggcgcgcagctgttttcaagtcagcaaacatttactgaggatctactatgtacaagatgaacatctgcaacaagccctccaacaagacggcccctgagaagagtgtgtggacggcaccggcacagcccagcggaccctcccctgagctgcagggccagcgatcccgccggaatgggtggagctggccccctcacccgctccagattgtggcctggctgctgtacctcttctttgctgtgatcggctttgggatccttgttcccctcctgcctcaccactgggtgcccgctggctacgcttgcatgggcgccatctttgctggccaccttgtggtgcacctgaccgccgtctccatcgatccagcagatgccaacgtgcgggacaagagctatgcggggcccctgcccatcttcaaccgaagccagcacgcacatgtcattgaagacctgcactgcaacttgtgcaacgtggatgtgagcgctcgctccaagcactgcagcgcctgcaacaagtgcgtgtgcggtttcgaccaccactgcaagtggctcaacaactgtgtgggcgagcggaactaccggctctttctacacagtgttgcatccgctttactgggcgtcctgctcctggtgctggtggccacatatgtcttcgtggagttctttgtcaaccccatgcgtctgcgcaccaaccgacactttgaagtcctgaagaatcacacggatgtgtggttcgtgttcctgcctgccgcccccgtggagacccaggcccctgccatcctggccctggccgccctgctcatccttctgggcctcctgtccacagccctcctggggcacctgctctgcttccacatttatctcatgtggcacaagctcaccacctatgagtacatcgtgcagcaccgcccaccacaggaggccaaggggg

SEQ ID NO: 273910 - DNA, 2729 bp, Artificial Sequence
  derived and/or modified sequence
gaatcagctgcattccctctggccaagctggtcagagctctgcgggctgccgtccttggccaagagcgtgtgggctagctccggtctctgcccaggctggtaaacaagggcgtggaaaagataccccagtctgcggtgacgaggactccagtgcccgaagtgcagctcgcccagccctagctcagtgccgagcccttagcgtggactgggctggccccggaagcccccacgggctctacctgaccctgcaggtgggcgtctctttggcagcaggaggtgctcgagcttgtcggggccaccaggtgcggcccccatggtgcttaggatggtggaggccatgtcccagctccaggacgagaagacccagctacaggaggagctggtggtcctacaggagaggctggccctccgcgacagtgaccagcaggccacgtccacccagctgcagaaccaggtagaacacctgaaggagaagctcattagccaggcccaggaagtgagccgactgcgatctgagctggggggcaccgacttggagaagcaccgggacctgctgatggtggagaatgagcgactgaggcaggagatgcggcgctgtgaggccgagctgcaagagctgcgcacaaagccagcaggtccctgcccaggttgtgagcacagccaggagagcgcccagctccgtgacaagctgtcccagctgcagctggagatggcggaaagcaaaggcatgctgtcagagctgaacctagaggtgcagcagaagaccgaccggctggctgaggtggagctgcgactcaaggactgcctggctgagaaggcacaggaggaggagcggcttagtcggcgcctgcgtgacagccacgagaccattgccagcctgcgggcccagtccccacctgtcaagtatgtcatcaagacagtggaggtggagtcgtccaagaccaagcaggccctcagcgagtcccaggcccggaaccagcacctgcaggagcaggtggctatgcagaggcaggtgctgaaggagatggaacagcagctgcagagctcacaccagctgaccgcgcggctccgggcgcagattgccatgtacgagtcagagctggagcgggcccatgggcagatgctggaggagatgcagtccctggaagaggacaagaaccgggccattgaggaggcctttgccagagcccaggtggagatgaaggctgtgcacgagaatctagcaggcgtccggaccaacttgctgaccttgcagccggcactgcggaccctcaccaacgactacaatgggctcaagcggcaggtgcgcggcttcccactgctgctgcaggaggccctcaggagtgtcaaggccgagataggccaggccatcgaggaggtcaacagcaacaaccaggagctgctgcgcaagtaccgccgcgagctgcagctgcgtaagaagtgccacaatgagctcgtgcggctgaaagggaacatccgagtgattgctcgtgtccggccagtcaccaaagaggatggggaaggacctgaggccaccaatgctgtgactttcgatgccgacgacgactccatcatccacctgctgcacaagggcaagcctgtgtccttcgagctggacaaggtcttctccccacaggcctcgcagcaggacgtgttccaggaggtgcaggccctggtcacctcttgcattgatggcttcaatgtctgcatctttgcgtacggccagacgggcgccggcaagacgtacacgatggaggggaccgctgagaacccaggtatcaaccagcgggccctgcagctgctcttctccgaggtgcaggagaaggcgtctgactgggagtacaccatcaccgtcagcgctgcggagatctacaatgaggtcctcagggacctgctagggaaagagcctcaggaaaaactggagatccggctgtgcccagacggcagtgggcagctgtatgtaccagggctgactgagttccaagtgcagagcgtggacgacatcaacaaggtgtttgagtttggccacactaatcgcacgaccgagttcaccaacctgaacgagcacagctcccgctcgcacgcgctgctcatcgtgacggtgcgaggcgtggactgcagcacaggcctccgcaccacggggaagctgaacctggtggacttggctggctcggagcgcgtgggcaagtcgggggccgagggcagccgcctgcgggaggcgcagcacatcaacaagtcgctgtcggctctgggggacgtcattgctgccctgcgctcccgccagggccacgtgcccttccgcaactccaagctcacctacctgctgcaggattcgcttagtggtgacagcaagaccctcatggtggtacaggtgtcccccgtggagaagaacactagcgagacgctctattccctcaagtttgctgagagggtgcgctctgtggagctggggcctgggctacgcagggcagagcttgggtcctggtcaagccaggagcatctagagtgggagccggcttgtcagacgccacagccctcggcacgggcccactcagcccccagctctgggaccagtagccgccctggatccatccggaggaagctgcagccctcggcctgacggctggggctgcagagtctctagggaagtcgcggccactgcctgtgtgacggatgtgaccccgctgggcctgaagctgggccctcactggcctgtccctgctgcagcg

SEQ ID NO: 273911 - protein, 40 aa, Artificial Sequence
  derived and/or modified sequence
MDPNYSCTTGGSCTCAGSCKCKECKCTSCKKSCCFCCPMG

SEQ ID NO: 273912 - protein, 127 aa, Artificial Sequence
  derived and/or modified sequence
MDPNCSCATGGSCTCAGSCKCKECKCTSCKKSECGAISRNLGLWLRLGGNSRLALSASFWGTGLSLPSLPVSFPLQAFCPKFRWGRTAFFSWDTNPNCTPYGFRTELCQTKKSILWVWVLSSSQACY

SEQ ID NO: 273913 - DNA, 384 bp, Artificial Sequence
  derived and/or modified sequence
atggatcctaactgctcctgcgccaccggcggatcctgcacttgcgcgggctcatgcaagtgcaaggaatgcaaatgtacaagttgcaagaagagtgagtgtggggccatctcgcggaacttgggactgtggctgcgtctagggggcaactcacgcctggccctctctgcgagcttttgggggacagggcttagcctgcctagcttgccggtgtctttccccctgcaggccttttgcccaaagttccggtggggccgcacggctttcttcagttgggacaccaaccccaactgtactccttacggctttcggactgaattgtgtcagactaaaaaaagtatcctctgggtgtgggttctgagctcttcccaggcttgctactag

SEQ ID NO: 273914 - DNA, 384 bp, Artificial Sequence
  derived and/or modified sequence
atggaccccaactgcagctgtgccactggaggcagctgcacctgtgccggcagctgcaagtgcaaggagtgcaagtgcaccagctgcaagaagtcagaatgtggggccatcagcaggaacctgggcctgtggctgcggctgggcggcaacagccggctggccctgagcgccagcttctggggcaccggcctgagcctgcccagcctgcctgtgtccttccccctgcaggccttctgccccaagttccgctggggccgcacagccttcttctcctgggacaccaaccccaactgcaccccctacggcttcagaacagagctgtgccagaccaagaagagcatcctgtgggtgtgggtgctgagcagcagccaggcctgctactag

SEQ ID NO: 273915 - DNA, 721 bp, Artificial Sequence
  derived and/or modified sequence
cttgttcgtctcactggtgtgagctccagcatcccctttgctcgaaatggaccccaactgctcttgcgccactggtggctcctgcacgtgcgccggctcctgcaagtgcaaagagtgcaaatgcacctcctgcaagaagagtgagtgcggggccatctccaggaatctggggctgtggctcaggttgggagggaactcaaggctggccctgagtgcatccttctggggaactgggctttctttgccctcattgcccgtgtcattccctctccaggctttctgccctaaattcagatggggcaggacagcatttttctcgtgggacacaaaccccaactgtaccccctatggtttcagaacagagctgtgccagacgaaaaaaagcatcctctgggtctgggttctgagctcgagccaggcttgctattagggcagggaggtgcccggtcaagtctactgccacctctcactctccccttcttccccaggctgctgttcctgctgccccgtgggctgtgccaagtgtgcccagggctgcgtctgcaaaggggcatcggagaagtgcagctgctgtgcctgatgtgggaacagctcttctcccagatgtaaatagaacaacctgcacaacctggatttttttaaaaatacaacactgagccatttgctgcatttctttttatactaaatatgtgactgacaataaaaacaattttgactttaa

SEQ ID NO: 273916 - DNA, 384 bp, Artificial Sequence
  derived and/or modified sequence
atggaccccaactgcagctgcgccaccggcggcagctgcacctgcgcagggagctgcaagtgtaaagaatgcaagtgtacatcctgtaaaaagtctgagtgtggagcgatttcccggaacctgggactatggctccgactcggcggcaattctcgactggccctctccgcctctttctggggcactggcctcagcctgccgtcactgccggtgtcttttcctctgcaggccttctgtccaaaatttcgatggggtagaaccgcattcttcagttgggacaccaacccgaactgtactccctacggttttcggacagaactttgtcagacgaagaaaagtattctgtgggtctgggtgctttcctccagtcaggcttgctactag

SEQ ID NO: 273917 - DNA, 384 bp, Artificial Sequence
  derived and/or modified sequence
atggatcccaactgctcctgtgctaccgggggatcgtgcacctgcgcaggttcttgcaaatgcaaggaatgcaagtgtacatcttgtaagaagtctgagtgcggtgccatcagcagaaacctgggattgtggctcagattggggggaaactcacgtttagccctctcagcctctttttggggaacaggcttgagtctccctagtctgcccgtgagcttccccctgcaggccttctgccccaagtttaggtggggtaggacagcctttttttcgtgggataccaatcccaactgcacgccatacggctttcgtactgagttatgtcaaaccaaaaagagcattctctgggtctgggtgctttccagttcgcaagcatgttactag

SEQ ID NO: 273918 - DNA, 384 bp, Artificial Sequence
  derived and/or modified sequence
atggaccccaactgcagctgcgccaccggcggcagctgcacctgcgccggcagctgcaagtgcaaggagtgcaagtgcaccagctgcaagaagagcgagtgcggcgccatcagcagaaacctgggcctgtggctgagactgggcggcaacagcagactggccctgagcgccagcttctggggcaccggcctgagcctgcccagcctgcccgtgagcttccccctgcaggccttctgccccaagttcagatggggcagaaccgccttcttcagctgggacaccaaccccaactgcaccccctacggcttcagaaccgagctgtgccagaccaagaagagcatcctgtgggtgtgggtgctgagcagcagccaggcctgctactag

SEQ ID NO: 273919 - protein, 1086 aa, Artificial Sequence
  derived and/or modified sequence
MACSPDAVVSPSSAFLRSGSVYEPLKSINLPRPDNETLWDKLDHYYRIVKSTLLLYQSPTTGLFPTKTCGGDQKAKIQDSLYCAAGAWALALAYRRIDDDKGRTHELEHSAIKCMRGILYCYMRQADKVQQFKQDPRPTTCLHSVFNVHTGDELLSYEEYGHLQINAVSLYLLYLVEMISSGLQIIYNTDEVSFIQNLVFCVERVYRVPDFGVWERGSKYNNGSTELHSSSVGLAKAALEAINGFNLFGNQGCSWSVIFVDLDAHNRNRQTLCSLLPRESRSHNTDAALLPCISYPAFALDDEVLFSQTLDKVVRKLKGKYGFKRFLRDGYRTSLEDPNRCYYKPAEIKLFDGIECEFPIFFLYMMIDGVFRGNPKQVQEYQDLLTPVLHHTTEGYPVVPKYYYVPADFVEYEKNNPGSQKRFPSNCGRDGKLFLWGQALYIIAKLLADELISPKDIDPVQRYVPLKDQRNVSMRFSNQGPLENDLVVHVALIAESQRLQVFLNTYGIQTQTPQQVEPIQIWPQQELVKAYLQLGINEKLGLSGRPDRPIGCLGTSKIYRILGKTVVCYPIIFDLSDFYMSQDVFLLIDDIKNALQFIKQYWKMHGRPLFLVLIREDNIRGSRFNPILDMLAALKKGIIGGVKVHVDRLQTLISGAVVEQLDFLRISDTEELPEFKSFEELEPPKHSKVKRQSSTPSAPELGQQPDVNISEWKDKPTHEILQKLNDCSCLASQAILLGILLKREGPNFITKEGTVSDHIERVYRRAGSQKLWSVVRRAASLLSKVVDSLAPSITNVLVQGKQVTLGAFGHEEEVISNPLSPRVIQNIIYYKCNTHDEREAVIQQELVIHIGWIISNNPELFSGMLKIRIGWIIHAMEYELQIRGGDKPALDLYQLSPSEVKQLLLDILQPQQNGRCWLNRRQIDGSLNRTPTGFYDRVWQILERTPNGIIVAGKHLPQQPTLSDMTMYEMNFSLLVEDTLGNIDQPQYRQIVVELLMVVSIVLERNPELEFQDKVDLDRLVKEAFNEFQKDQSRLKEIEKQDDMTSFYNTPPLGKRGTCSYLTKAVMNLLLEGEVKPNNDDPCLIS

SEQ ID NO: 273920 - DNA, 3261 bp, Artificial Sequence
  derived and/or modified sequence
atggcctgcagccccgacgccgtggtgagccccagcagcgccttcctgagaagcggcagcgtgtacgagcccctgaagagcatcaacctgcccagacccgacaacgagaccctgtgggacaagctggaccactactacagaatcgtgaagagcaccctgctgctgtaccagagccccaccaccggcctgttccccaccaagacctgcggcggcgaccagaaggccaagatccaggacagcctgtactgcgccgccggcgcctgggccctggccctggcctacagaagaatcgacgacgacaagggcagaacccacgagctggagcacagcgccatcaagtgcatgagaggcatcctgtactgctacatgagacaggccgacaaggtgcagcagttcaagcaggaccccagacccaccacctgcctgcacagcgtgttcaacgtgcacaccggcgacgagctgctgagctacgaggagtacggccacctgcagatcaacgccgtgagcctgtacctgctgtacctggtggagatgatcagcagcggcctgcagatcatctacaacaccgacgaggtgagcttcatccagaacctggtgttctgcgtggagagagtgtacagagtgcccgacttcggcgtgtgggagagaggcagcaagtacaacaacggcagcaccgagctgcacagcagcagcgtgggcctggccaaggccgccctggaggccatcaacggcttcaacctgttcggcaaccagggctgcagctggagcgtgatcttcgtggacctggacgcccacaacagaaacagacagaccctgtgcagcctgctgcccagagagagcagaagccacaacaccgacgccgccctgctgccctgcatcagctaccccgccttcgccctggacgacgaggtgctgttcagccagaccctggacaaggtggtgagaaagctgaagggcaagtacggcttcaagagattcctgagagacggctacagaaccagcctggaggaccccaacagatgctactacaagcccgccgagatcaagctgttcgacggcatcgagtgcgagttccccatcttcttcctgtacatgatgatcgacggcgtgttcagaggcaaccccaagcaggtgcaggagtaccaggacctgctgacccccgtgctgcaccacaccaccgagggctaccccgtggtgcccaagtactactacgtgcccgccgacttcgtggagtacgagaagaacaaccccggcagccagaagagattccccagcaactgcggcagagacggcaagctgttcctgtggggccaggccctgtacatcatcgccaagctgctggccgacgagctgatcagccccaaggacatcgaccccgtgcagagatacgtgcccctgaaggaccagagaaacgtgagcatgagattcagcaaccagggccccctggagaacgacctggtggtgcacgtggccctgatcgccgagagccagagactgcaggtgttcctgaacacctacggcatccagacccagaccccccagcaggtggagcccatccagatctggccccagcaggagctggtgaaggcctacctgcagctgggcatcaacgagaagctgggcctgagcggcagacccgacagacccatcggctgcctgggcaccagcaagatctacagaatcctgggcaagaccgtggtgtgctaccccatcatcttcgacctgagcgacttctacatgagccaggacgtgttcctgctgatcgacgacatcaagaacgccctgcagttcatcaagcagtactggaagatgcacggcagacccctgttcctggtgctgatcagagaggacaacatcagaggcagcagattcaaccccatcctggacatgctggccgccctgaagaagggcatcatcggcggcgtgaaggtgcacgtggacagactgcagaccctgatcagcggcgccgtggtggagcagctggacttcctgagaatcagcgacaccgaggagctgcccgagttcaagagcttcgaggagctggagccccccaagcacagcaaggtgaagagacagagcagcacccccagcgcccccgagctgggccagcagcccgacgtgaacatcagcgagtggaaggacaagcccacccacgagatcctgcagaagctgaacgactgcagctgcctggccagccaggccatcctgctgggcatcctgctgaagagagagggccccaacttcatcaccaaggagggcaccgtgagcgaccacatcgagagagtgtacagaagagccggcagccagaagctgtggagcgtggtgagaagagccgccagcctgctgagcaaggtggtggacagcctggcccccagcatcaccaacgtgctggtgcagggcaagcaggtgaccctgggcgccttcggccacgaggaggaggtgatcagcaaccccctgagccccagagtgatccagaacatcatctactacaagtgcaacacccacgacgagagagaggccgtgatccagcaggagctggtgatccacatcggctggatcatcagcaacaaccccgagctgttcagcggcatgctgaagatcagaatcggctggatcatccacgccatggagtacgagctgcagatcagaggcggcgacaagcccgccctggacctgtaccagctgagccccagcgaggtgaagcagctgctgctggacatcctgcagccccagcagaacggcagatgctggctgaacagaagacagatcgacggcagcctgaacagaacccccaccggcttctacgacagagtgtggcagatcctggagagaacccccaacggcatcatcgtggccggcaagcacctgccccagcagcccaccctgagcgacatgaccatgtacgagatgaacttcagcctgctggtggaggacaccctgggcaacatcgaccagccccagtacagacagatcgtggtggagctgctgatggtggtgagcatcgtgctggagagaaaccccgagctggagttccaggacaaggtggacctggacagactggtgaaggaggccttcaacgagttccagaaggaccagagcagactgaaggagatcgagaagcaggacgacatgaccagcttctacaacaccccccccctgggcaagagaggcacctgcagctacctgaccaaggccgtgatgaacctgctgctggagggcgaggtgaagcccaacaacgacgacccctgcctgatcagctag

SEQ ID NO: 273921 - DNA, 3261 bp, Artificial Sequence
  derived and/or modified sequence
atggcttgcagcccggatgccgtcgtgagcccttcaagtgcattcctccgcagcggaagcgtctacgagccgctgaagtctattaacctgcctcgccccgataatgagaccctatgggataagttggatcattattataggatcgtgaaaagtaccctgctcctataccagagtcctactacaggcctcttccccacgaagacatgtgggggagatcagaaagcaaaaatacaagactctctgtattgcgccgcaggggcgtgggcactcgcactggcctacagaaggatcgacgatgataaaggtcggactcacgagctggaacatagtgcgatcaaatgcatgagaggtattctttattgttacatgcgacaggcagataaagttcagcagtttaaacaagatcctagacctaccacatgtcttcattcagtattcaatgtccacacaggcgacgagctcctcagctacgaggagtatggccatctgcagattaacgccgtgagcctctatctcctatatctggtggagatgatctcatccggcctccaaatcatctacaacacagacgaggtcagttttatccaaaacctggtgttttgcgtggagcgtgtgtaccgggttcccgattttggggtgtgggagcgcggcagcaagtacaataacggcagcacagagctgcacagttcctcagtggggttggccaaagcagctctcgaagctatcaacgggtttaatctttttggaaaccaagggtgcagttggtcagtcatcttcgtggacttggacgcacacaatagaaatagacagacactctgcagcttactgcctcgcgagtcacgctcccacaataccgatgccgctttactgccttgcatcagttacccggccttcgctcttgacgatgaggtgctcttcagccaaactctggacaaggtcgttcgaaaacttaagggtaaatatggctttaagagattcctgcgagatggctacaggacttcactggaggatcctaaccggtgttactacaagcctgctgagataaaattatttgacgggattgaatgtgagtttcctattttttttctgtacatgatgatagacggggtgttccggggtaaccccaagcaagtgcaagaatatcaagacctgctgactccagtgctgcaccacaccactgagggatatcctgtagtccccaagtactactatgtccccgctgacttcgttgaatacgagaaaaataacccagggagtcaaaaacgcttcccgtcaaattgtggaagggacggcaagctgtttttatggggccaggctctctatatcatcgctaagttgctagcagatgagctgataagtccgaaggacatcgacccggtgcaaaggtacgtcccactgaaagatcagagaaatgtgagcatgagattcagcaaccaggggcctctggagaacgatctggttgtccatgtagctctgatcgctgaaagtcagaggctgcaagtttttctcaacacttatggcattcaaacacagacaccgcagcaggtggagcccattcagatatggccacaacaggaacttgttaaggcttacttacagttaggcataaacgaaaagctcggcttatcaggcaggcccgaccgacctatcgggtgcctgggtacgagcaagatatatcggattttgggaaaaacagtcgtgtgttacccaatcatttttgatctcagcgatttttacatgtcacaggacgtgttcctgttgatcgacgacatcaaaaatgcccttcagttcataaaacagtactggaagatgcacgggaggccactctttctagtcttgattcgtgaggataatatccgtggctctaggtttaaccccattctggacatgctggcagctctcaagaagggcatcataggaggcgtgaaagttcacgttgaccgactgcagaccctgatttctggggccgtcgtggaacaactggatttcctgcgaatatctgatacagaagagctcccggaattcaagtcgtttgaagaattggaaccccctaaacacagtaaggtgaagaggcagtcatccactccatcagcccccgaactgggacagcaaccggacgtcaatattagtgagtggaaggataagcctacccatgaaatccttcagaaattgaacgattgtagctgcctggcatcccaggctattctgttaggcatactcctgaaacgggaagggcccaacttcataaccaaggaaggcaccgtcagtgaccacatcgaacgggtttacaggagagccgggtcccagaaactgtggtcagtggtgaggagagccgccagcctgctgagtaaggtggtcgattctcttgctccaagtatcacgaacgtcctggttcagggcaagcaagtgacactgggtgccttcggacatgaagaagaggtcatctccaaccctctttcgcctagggttatacagaacattatctactataaatgcaacactcatgatgagcgtgaggcagtgatccagcaagagcttgtgatacacatcggctggattatttctaataaccctgagctcttttcgggaatgctgaaaattaggatcggctggatcatccatgctatggagtatgaattgcaaatccgcgggggtgacaaacctgcactggacctataccagttgagccccagcgaggttaaacagctcctgcttgacatcctccaaccacagcagaacggcaggtgttggctcaacaggcggcagatcgacggctcccttaataggacccccactgggttctacgacagagtttggcagatactggagagaacacctaatgggatcatagtggcgggtaagcacctgccccagcagccaacactctccgacatgaccatgtacgagatgaatttctccttgttagtagaggataccctcggtaacattgaccaaccgcaatacagacagatcgttgtggagctgctgatggtggtgtcgatcgtcttagaacgtaaccccgagctggaatttcaggataaggtggatctggatcgcttagtaaaggaggccttcaacgaattccagaaagaccagagccgtctcaaggagatcgagaaacaagacgacatgacctctttctacaatacccctccactcgggaagaggggcacatgtagttatttaaccaaagccgtgatgaatttgcttctggagggagaagtgaagccaaacaacgatgacccatgccttatttcctag

SEQ ID NO: 273922 - DNA, 3261 bp, Artificial Sequence
  derived and/or modified sequence
atggcctgttctccagacgccgtggtatcacctagctcagccttccttagatcagggtccgtgtatgagccccttaaatctatcaatttgccacgcccggataacgagaccctttgggacaaactggatcactactaccggattgtcaagtccactcttttactgtaccaaagccctactactggtctcttccccactaaaacttgtggcggcgaccaaaaggcaaagattcaggacagcctatactgcgccgcaggtgcatgggccttggcgctggcctataggcggattgatgacgacaaaggtaggactcacgaacttgaacactcagcgattaaatgcatgcgtggcatcctctactgctatatgagacaggcagacaaggtgcagcagtttaagcaggatccacggccaactacctgcttgcactccgtgttcaatgttcatacaggcgacgagctcctgtcttatgaggaatatggccacctccagataaatgccgtgtccttgtatctgctctacctggtggagatgataagcagcgggctgcaaattatctataacactgacgaagtaagctttatccagaacctagtgttctgcgtggaaagagtctacagagttccagatttcggagtatgggaacgcggaagtaaatataataatggctccaccgagcttcactcctcttctgtagggctagctaaggcggctcttgaagcaatcaatggcttcaatctctttggaaatcaggggtgctcctggtctgtcatttttgtggatctcgatgcccacaaccgcaaccgacagacactctgcagcctcctgccacgagagtctcgatcccataacacggatgcagccttactcccatgtatctcatatcctgcttttgctctggacgacgaggtcctatttagtcagactcttgataaagtggtaaggaagctgaagggaaagtatggatttaagagattcctcagagacggatacaggaccagtctggaagacccgaatcgttgttactataaaccagccgaaattaagctgtttgacggaattgagtgtgaatttccgatctttttcctctacatgatgatcgacggagtttttcgtggcaacccaaagcaggttcaggagtatcaggatctgctcaccccagtgctgcaccacacaacggaaggttatcccgtagtccccaagtactactacgtccctgccgactttgtggagtacgagaaaaataacccagggagtcagaagcgcttcccatctaattgcggccgggacggaaagctgtttctgtgggggcaggcactctacattattgccaagctgctggccgatgaactcatctccccgaaagacatcgatcctgtccagaggtacgtacctctaaaggaccaaagaaacgtctcgatgcgtttttcaaaccagggccctctggagaatgatctggtggtccacgtggcattgatcgccgagtctcagcggctccaagtgtttctcaacacttatggcattcagacacaaacccctcagcaggtagagcctatccagatttggcctcagcaagagcttgtaaaggcctacctgcaactagggattaatgaaaaactgggtctatccggcaggccggaccgcccaattggctgcctcgggacaagtaaaatttatcgaattcttggaaagactgtggtgtgctaccctatcatctttgatctctcagatttctacatgagtcaagacgtgttcctgctgatcgacgatataaagaatgccctgcagttcattaagcagtactggaagatgcatggccgccctttgttccttgttctgattcgcgaggacaacatcagggggtctcggttcaaccctattttggacatgctcgctgcactgaaaaaagggatcattggcggagttaaagtccacgtggatcgtctgcagacgctgatttcaggagccgtcgttgaacagcttgattttctccgaattagcgacacagaggagttgcctgaatttaaatctttcgaagaactggagccccccaaacattccaaagtaaagcgacaatctagtaccccctctgccccggaattgggccagcagcccgatgtaaatatctcagaatggaaggacaagccgacccatgagatactccagaagcttaacgactgttcttgtctggcctctcaggcaatattgctcggcattttactgaaaagagagggcccaaattttatcaccaaggagggaaccgtgagtgaccacattgaacgcgtgtaccggcgggctggaagccagaaactctggagtgttgttcgtagagcagcatcattgctgtccaaggtcgtggatagcctggcccccagcattacgaacgtcctagtgcagggaaagcaggtgaccctcggcgcctttggccatgaggaagaggttataagtaatcccctgtcccctcgggtgattcagaacataatttactataagtgtaacacccacgacgaaagggaggctgtgatccagcaggaactggttattcacattggctggatcatctcaaacaaccctgagctcttctccggaatgctgaaaatccgaatcgggtggataatccacgccatggagtatgaacttcagatcagagggggagataagcctgccctagatctctatcagctatcgcctagcgaggtgaagcagttgcttctggacatccttcaaccacaacaaaacggcagatgttggttaaaccggcgacagatcgatggaagcctaaaccgtactccaactgggttctacgaccgggtgtggcaaattctcgaacgcacgcctaacggcattatagtcgctggcaaacatcttcctcagcagccaacgcttagtgatatgaccatgtatgaaatgaattttagcctgctggtcgaggacacactcggtaacatagaccagccacaataccggcagatcgttgtggaactgttgatggtggtaagcattgtgcttgagaggaatccggagctggagtttcaggataaggtggacttggaccgcctggtgaaagaggccttcaatgagttccagaaagatcagagccgactgaaagagattgagaagcaggacgatatgacctctttctacaacaccccccccttgggcaaacgtggcacttgcagctatcttactaaagccgtgatgaatctgctcctggagggcgaggtgaagccgaacaacgatgacccatgcctgataagctag

SEQ ID NO: 273923 - DNA, 3261 bp, Artificial Sequence
  derived and/or modified sequence
atggcctgcagcccagatgctgtggtgagccccagcagcgccttcctgcggagcggctctgtgtatgagcccctgaagagcatcaacctgcccaggccagacaatgagaccctgtgggacaagctggaccactactaccgcatcgtgaagagcaccctgctgctgtaccagagccccaccaccggcctcttccccaccaagacctgtggcggggaccagaaggccaagatccaggacagcctgtactgtgccgccggggcctgggccctggccctggcctacagaagaattgatgatgacaagggccgcacccatgagctggagcacagcgccatcaagtgcatgaggggcatcctgtactgctacatgaggcaggccgacaaggtgcagcagttcaagcaggacccccggcccaccacctgcctgcacagcgtcttcaacgtgcacactggagatgagctgctgtcctatgaggagtatggccacctgcagatcaatgctgtgtccctgtacctgctgtacctggtggagatgatcagcagcggcctgcagatcatctacaacacagatgaggtgtccttcatccagaacctggtgttctgtgtggagcgggtgtacagagtgcctgactttggagtgtgggagcggggcagcaagtacaacaacggcagcacagagctgcacagcagctctgtgggcctggccaaggccgccctggaggccatcaatggcttcaacctgtttggaaaccagggctgctcctggagcgtcatctttgtggacctggatgcccacaacagaaaccggcagaccctgtgcagcctgctgccccgggagagccgcagccacaacacagatgctgccctgctgccctgcatctcctacccagcctttgccctggatgatgaggtgctcttcagccagaccctggacaaggtggtgaggaagctgaagggcaagtatggcttcaagcgcttcctgagagatggctaccgcaccagcctggaggaccccaaccgctgctactacaagccagctgagatcaagctgtttgatggcattgaatgtgagttccccatcttcttcctgtacatgatgattgatggagtcttccggggcaaccccaagcaggtgcaggagtaccaggacctgctgacccctgtgctgcaccacaccacagagggctaccctgtggtgcccaagtactactacgtgcctgctgactttgtggagtatgagaagaacaaccctggcagccagaagcgcttccccagcaactgtggcagagatggcaagctgttcctgtggggccaggccctgtacatcatcgccaagctgctggctgatgagctgatcagccccaaggacattgatcctgtgcagagatatgtgcccctgaaggaccagagaaatgtgtccatgaggttcagcaaccagggccccctggagaatgacctggtggtgcacgtggccctgattgctgagagccagaggctgcaggtgttcctgaacacctacggcatccagacccagaccccccagcaggtggagcccatccagatctggccccagcaggagctggtgaaggcctacctgcagctgggcatcaatgagaagctgggcctgagcggccgcccagaccggcccatcggctgcctgggcaccagcaagatctaccgcatcctgggcaagacagtggtgtgctaccccatcatctttgacctgagtgacttctacatgagccaggatgtgttcctgctgattgatgacatcaagaatgccctgcagttcatcaagcagtactggaagatgcacggccggcccctcttcctggtgctgatccgggaggacaacatccggggcagccgcttcaaccccatcctggacatgctggccgccctgaagaagggcatcattggaggagtgaaggtgcacgtggaccggctgcagaccctcatcagcggggctgtggtggagcagctggacttcctgcgcatcagtgacacagaggagctgcctgagttcaagagctttgaggagctggagccccccaagcacagcaaggtgaagaggcagagcagcaccccatctgcccctgagctgggccagcagccagatgtgaacatcagcgagtggaaggacaagcccacccatgagatcctgcagaagctgaatgactgcagctgcctggccagccaggccatcctgctgggcatcctgctgaagcgggagggccccaacttcatcaccaaggagggcaccgtgtctgaccacatcgagcgggtgtaccgccgggccggcagccagaagctgtggagcgtggtgcggcgggccgccagcctgctgagcaaggtggtggacagcctggcccccagcatcaccaacgtgctggtgcagggcaagcaggtgaccctgggcgccttcggccacgaggaggaggtgatcagcaaccccctgagccccagggtcatccagaacatcatctactacaagtgcaacacccatgatgagcgggaggccgtcatccagcaggagctggtgatccacatcggctggatcatcagcaacaaccctgagctgttcagcggcatgctgaagatcagaattggctggatcatccacgccatggagtatgagctgcagatccggggcggggacaagccagccctggacctgtaccagctgagccccagcgaggtgaagcagctgctgctggacatcctgcagccccagcagaatggccgctgctggctgaacagacggcagattgatggcagcctgaacagaacacccaccggcttctatgacagagtgtggcagatcctggagaggaccccaaatggcatcatcgtggccggcaagcacctgccccagcagcccaccctgagtgacatgaccatgtatgagatgaacttcagcctgctggtggaggacaccctgggcaacatcgaccagccccagtaccggcagatcgtggtggagctgctgatggtggtgtccatcgtgctggagagaaatcctgagctggagttccaggacaaggtggacctggaccggctggtgaaggaggccttcaatgagttccagaaggaccagagccggctgaaggagattgagaagcaggatgacatgaccagcttctacaacaccccacccctgggcaagaggggcacctgcagctacctgaccaaggctgtgatgaacctgctgctggagggggaggtgaagcccaacaatgatgacccctgcctgatctcctag

SEQ ID NO: 273924 - DNA, 3261 bp, Artificial Sequence
  derived and/or modified sequence
atggcctgcagccccgacgccgtggtgagccccagcagcgccttcttgaggagcggctccgtctatgagccactgaaatccatcaacctgcctaggccagataacgaaactttatgggacaaactcgaccactattaccggatcgtcaagtccaccttgttactgtatcagtcacccacaaccggcctctttccaacaaaaacatgtggtggggatcagaaagccaagattcaggattctttgtattgcgcggctggggcctgggccctggcactggcatatcggagaatagacgacgacaagggcaggacacacgagttagagcacagcgccatcaagtgtatgcgagggatcctgtattgctacatgcgacaggccgataaagtgcagcagttcaaacaggatccacgtcccacaacttgcctgcattccgtgttcaatgtccatactggagacgagttgctttcctacgaggagtatgggcacctgcagattaacgcagtctccctgtacctgctttatctcgtggaaatgattagctcagggctccagattatatacaacactgacgaagtgagcttcattcagaacctggtgttctgtgttgagagggtgtatcgcgtccccgatttcggtgtgtgggaaagaggctccaagtacaacaatggatccaccgagctgcactcgtcctctgtgggccttgccaaggccgccctcgaagccattaatggctttaatctctttggaaaccagggttgcagctggtctgtcatttttgtggacctcgacgctcacaaccggaacaggcagactctgtgcagtctcctgcctcgtgaatctagaagtcacaacactgatgcggccttgctcccttgcatctcctacccagctttcgctctggatgacgaagtgcttttttcacaaactttagacaaagtcgttaggaaactgaagggaaagtacggctttaagagattcttgagagacggataccggacctcattagaggaccccaacagatgttactacaagcccgctgagatcaagttattcgacggcattgagtgtgaattccccatattcttcttgtatatgatgattgacggcgttttcagaggtaacccaaagcaggtgcaggagtaccaggacttgctaacgccagttctgcaccacacgacggagggttacccggtcgtacccaaatattactacgtccctgcggattttgtagaatatgaaaaaaacaatccaggaagccagaaacgtttcccctctaactgcgggcgagacggcaagctcttcttgtggggtcaagccctttacatcattgccaagcttcttgccgacgagttgatctctcccaaggatatcgacccggtgcagcgatacgtgcctctaaaagaccagcgcaacgtttctatgaggttctccaatcagggacctctcgaaaacgacctcgttgtgcatgttgcactgattgccgaaagccaacgtcttcaagtctttctaaatacctacgggattcagacccagactccccagcaggttgaacctattcagatttggcctcagcaggaactggtgaaagcatatctgcaattgggtatcaacgagaaactagggctaagtggacgacccgaccgacccattggatgcctgggaacatccaagatctataggattctgggaaaaaccgtagtctgttatcctattatcttcgacctgtcagacttttacatgtctcaggatgtattcctgctgattgatgacatcaagaatgccctccaattcattaagcagtattggaagatgcacggccggccgctgtttctggtcttaatacgcgaagacaacatcaggggctcccgattcaatccgattctggatatgctcgcagcactcaagaaaggaatcatcggcggggtaaaagtccatgtcgatcggttacagaccctcatctctggtgccgtcgtcgaacagctggactttctacgtatttccgatacagaagagctgccagagtttaagagttttgaggagcttgagccccctaaacattctaaggttaagaggcagtcatccacgccctccgcccccgagctcggacaacagcccgatgtgaacatcagcgaatggaaggataaacccactcacgagattctccagaagcttaatgattgcagctgtcttgccagtcaagctatcctgctggggatcctgctgaagcgagagggcccaaattttatcactaaggaggggaccgtgtcagatcacatcgagagggtgtaccgtcgcgcaggttcacaaaagctgtggagcgtcgtgcgtagagcagccagcctgctgagcaaagtggtggattccctggccccctccatcactaatgtactagtacaagggaagcaggtgacactcggcgcttttggccatgaggaggaggttatctctaatcctctttctccgcgggtgatccagaatatcatatattataaatgcaatacccatgatgaacgcgaggcagtgatccagcaggaactcgtgatacacattggctggatcatcagtaataatcctgaactgttttcagggatgctgaaaattaggatcggctggataatacatgcgatggagtacgaacttcaaattaggggtggagacaagcccgctttggatttataccagctctctccttccgaagtaaaacagctgctgctggatattttacagcctcaacagaatggtcgttgttggctaaaccgacggcaaatcgacggcagcttgaataggacccccaccgggttttatgatcgggtatggcagattctggaacggacccccaacgggataattgtcgctggcaaacacctcccacagcagcccactctctcggacatgactatgtatgaaatgaatttcagcctcttagtggaggatactctggggaacattgaccaaccccagtatagacagatagtggtggagctgttgatggtggtctcgatcgtcctggaaaggaatcctgagctcgagtttcaggataaggttgacctggaccggctggtgaaagaagcctttaatgaattccagaaggaccagagtcgcctgaaggagatcgaaaaacaggatgacatgactagcttttacaacactcccccgctgggaaagcgtggcacctgcagctatttgacaaaagctgtcatgaacttgctgcttgagggcgaggttaaaccaaacaacgatgatccctgtttgatcagctag

SEQ ID NO: 273925 - DNA, 3261 bp, Artificial Sequence
  derived and/or modified sequence
atggcctgcagccccgacgccgtggtgagccccagcagcgccttcctaaggagcgggtctgtttacgagcccttgaaatccataaacctgccgagacccgataacgaaaccctgtgggacaaactggaccattactaccgtatagtgaagtcgacgcttctcttataccagagtccaaccacaggcttgtttccaaccaaaacgtgtgggggcgaccagaaggctaaaattcaggactcgctctactgtgcggcaggagcatgggcactggcacttgcgtatcgccggattgacgacgataagggtcggacccatgaactggagcactcggctattaagtgcatgcggggaatactctactgttatatgaggcaggccgataaagttcagcagttcaaacaggatccgcggcctacaacgtgcttgcattccgtcttcaacgtgcatacgggcgatgagctgttaagctatgaggaatacggccacctgcagataaacgccgtaagcctgtatttgctctacctcgtcgagatgatcagctcagggctgcagatcatctacaatacggatgaagtgtcttttattcagaatcttgtgttttgcgtggaaagagtgtaccgggtccccgactttggagtgtgggaaagaggcagtaagtataacaacggaagcacggaactacacagcagctcggtcggacttgccaaggccgcgctggaagccatcaatggattcaacctttttggcaaccaaggatgctcttggtcggtgatattcgtcgatctcgacgcccacaaccggaacaggcaaactttgtgcagtctactacctcgcgaatctcgctcacataacaccgacgcagcactgcttccttgcatttcttatcccgcttttgctctggacgatgaagtacttttttcccagacgctggataaagtagtgcgcaagttgaaagggaagtacggctttaaaaggttcctgagagatggctacaggacatctctggaggaccctaaccggtgttattataagcccgcagaaattaagctgtttgatggaattgaatgcgagtttcctattttcttcctgtacatgatgattgatggagtgtttcggggcaacccaaagcaggttcaggaatatcaagatctgcttacccccgtgttgcaccatacaaccgagggatatccagtggtgccgaagtattactacgtccccgctgactttgtcgagtacgagaagaacaatccagggtcccagaaacgcttcccatcgaactgcggcagagacggcaaactgttcctctggggtcaggccctctacatcatcgccaaactgctcgcggacgaactgattagtcctaaggatattgatcctgtgcaacgatatgtgcccttgaaagatcagaggaacgtttccatgaggttcagtaaccagggcccactggaaaatgatctggttgtgcacgtcgccctcatcgctgagtcccagcgcctccaggtctttttgaatacctatggaatacaaacccaaaccccacagcaggtcgaacctattcagatatggccacagcaggagctggtgaaagcatatcttcaactgggcattaatgaaaaactgggcctttccggtaggccagacagacccataggttgcctcggaacgtcaaagatctatcgaatcctgggtaaaaccgtggtctgctacccaattatttttgacctgtccgatttttacatgagtcaggacgttttcttgttgattgacgacatcaaaaatgcactgcagtttattaagcagtactggaaaatgcacggtcgtccccttttcctcgtcctcatcagagaagacaatattagaggtagccgatttaacccgatccttgatatgcttgccgcattgaagaaaggcatcattggcggagttaaggtgcacgtagacaggctccaaacactcataagcggtgccgtggtggaacaactggatttcctaagaataagcgacaccgaggagctcccagaatttaaatctttcgaggaactcgagccgccgaagcattctaaagtgaagcggcagtcgtctactccgtccgccccagaattgggacagcagcctgacgtaaatattagcgaatggaaagacaagccaacgcatgagattctgcagaaactcaacgactgttcttgtctcgccagtcaggctattctgctcgggatattgttgaagcgggagggacccaattttattacaaaagaaggcacggtaagcgaccacatagagcgcgtgtaccggagggctggatcccagaaactatggagtgtggtgcggcgggccgcttctctactgagcaaagtggtggacagcctagcaccctctatcacaaacgttctggtgcaaggcaagcaagtaaccctcggcgcattcggccacgaggaggaggtgattagtaaccctctgtcccccagagtgattcagaacatcatctattacaaatgcaacacacatgatgagagggaggcagtgatacagcaggaattggtgatccatatcggttggattattagcaataaccccgaactcttttctgggatgttgaagatccgaatcgggtggatcattcatgcaatggagtacgagcttcagatccgcggaggcgataaaccagccctggatctctatcagcttagcccatctgaagtaaagcagctgctgctggacatacttcagccacagcagaacggaaggtgctggttaaataggaggcaaattgacggttctctgaacagaacccccaccggattttatgacagagtatggcaaatcctagaacgtacccctaacggtatcatagttgccgggaaacatctcccacaacagcctaccctgtctgacatgacaatgtacgaaatgaacttcagcttgctggtggaagatacactggggaacatcgatcagccgcaatatcgacagattgtggtggagctccttatggtggtgtccattgtcctggagcgaaatccagaactggagttccaagacaaggtggaccttgatcgacttgtgaaggaagcctttaacgaattccagaaggatcagtcgagactcaaagaaatagaaaagcaagatgacatgaccagcttttataacacaccaccactcgggaagcggggaacatgttcttatctgaccaaggcggtcatgaaccttttgctggagggcgaggtcaaacctaataacgacgacccttgcctgatttcttag

SEQ ID NO: 273926 - DNA, 3261 bp, Artificial Sequence
  derived and/or modified sequence
atggcatgcagccccgacgccgtcgtgagcccctccagtgcttttctgcgctcgggctccgtatacgagccactgaagtccattaacctccccaggccggataacgagaccctgtgggacaaattagaccattattatcggatcgtgaaatctacactcctgctttaccagtcccccacaaccggactgttccccaccaagacgtgtggcggagatcaaaaggctaaaatccaggactccctctactgtgcagcaggagcgtgggccctggccctggcatatcggagaatcgatgacgataaagggaggactcacgaactggagcatagtgcaatcaagtgtatgcggggtatactgtactgctacatgcgacaagctgacaaggtacaacagttcaaacaagatccgaggcccacaacttgtctgcactcagtgtttaatgttcacacaggcgatgaacttctcagctacgaagaatatgggcacctgcagatcaacgcagtgtccctgtacctgttgtacctcgtcgaaatgatatctagcggactccaaatcatttacaacaccgacgaagtttcattcatccagaacctggtgttttgcgtcgagcgggtatatcgagtccctgattttggtgtgtgggaacgaggatcaaagtataacaatggttcaaccgaacttcactcatcttccgtcggactggctaaggccgcattggaggccattaatgggtttaacttgtttggtaaccagggttgcagttggtccgtgatatttgtggacttggacgcccataacaggaataggcagacgctgtgctccctgctgcctagagaatcacgctcccacaacaccgacgcggctctgttaccctgcataagctacccagcattcgccctcgatgatgaagtgcttttctcccagacactggacaaggtcgtcaggaaattgaaggggaagtacgggtttaaaagattcctgcgggatggttaccggacttctttagaggacccaaaccgatgttactacaagccagcagagataaagctctttgatgggattgagtgcgagttccccattttttttttgtacatgatgatcgatggagtgttcagaggaaaccccaaacaggtccaggagtaccaggacctattgacccctgtgctgcaccataccacagaagggtatccagtcgtgccaaaatattattatgtgccagctgacttcgtggagtacgaaaagaacaaccccggatctcagaagagatttccgtccaattgtggtcgtgatggcaagctctttttgtggggacaggctctatacattatcgctaaactgctagctgacgagcttattagtcctaaggacatcgaccctgtgcagcgctacgttcctctcaaagatcagagaaatgtctccatgagatttagtaaccagggcccactggaaaatgatcttgttgtccatgtcgcgttaatcgcggagtcacagcggctgcaggtattcctcaatacatatggaattcagactcagacacctcagcaggtggagccaatccagatatggccgcaacaggaactcgtcaaggcctatttacaactgggcatcaatgagaagctagggttgtccggcagacccgacaggccaataggttgtcttgggacctccaaaatctacaggattctaggcaaaacagtcgtgtgttatcctattatttttgacctgtccgatttctatatgagccaggacgttttcttgcttatcgatgacatcaaaaatgccttacagttcattaaacagtactggaaaatgcacggaagacccctgttcctcgtgctgatcagggaggacaacattcgcggaagcagatttaaccctatactggacatgctggccgctttgaagaaaggcatcataggaggagtgaaagtgcacgtggatcgcctgcaaacgctcatctctggcgcagtggtggagcagctcgatttcctgaggatctcagatacagaggagcttcctgaatttaagtccttcgaggagctggagcctcccaaacatagcaaggtgaaaagacaatcctccacaccatctgctcccgaactcggccagcagcctgatgtcaacatttctgagtggaaagataagcctacacacgaaattctccagaagcttaatgattgtagctgcctggcatcccaggctatcctgctgggtatcttgttaaaaagggagggccctaacttcatcaccaaggagggcacagtgtccgaccatatcgagcgagtgtaccgccgagccggaagccagaagttatggagcgtcgttcggagagctgcttctcttctatctaaggtggtggactcccttgcaccttccattacgaacgtactcgtccagggaaagcaggttacactcggagcctttgggcatgaggaggaggtgatcagtaatcctctgtcccccagggtcatccagaatattatctactacaagtgtaatactcacgatgaacgagaagccgtaattcaacaggagctggtgatccacattggctggataatatccaacaacccagagcttttcagcggtatgttaaagatcagaatcgggtggatcattcacgccatggaatatgaactccagatcagaggaggggacaagcctgccttagacctttatcaattgtcaccgagcgaagtaaaacaactactcttagatatactccagcctcagcaaaatggtcgttgttggttgaaccggaggcaaatagatgggagcctcaaccgcacacctactgggttttatgatcgggtgtggcaaattctggaacggacaccaaatggtatcatcgtggccggtaaacatttgcctcaacaacccactctcagcgacatgaccatgtatgagatgaacttctctttgttagttgaagatacactcgggaatatcgatcaaccgcagtaccgtcagatcgtggttgagttacttatggtggtgagtattgtcctggaaaggaacccggagctcgagttccaggacaaagtcgacctggaccgtctggtcaaggaggctttcaacgagttccagaaagatcagagccggctcaaggaaatcgaaaaacaggatgatatgacttcgttctacaacacaccgcctctaggcaagcgaggcacctgttcctaccttacgaaggccgtgatgaacctgttactggagggagaagttaagccgaacaatgacgacccatgtctgatcagctag

SEQ ID NO: 273927 - DNA, 3261 bp, Artificial Sequence
  derived and/or modified sequence
atggcgtgtagtcccgacgcagtggtctctccttcatctgctttcctgcgttccggttcagtgtatgaacctctgaagtccatcaacctgcccaggccagataacgaaaccctgtgggacaaactagatcattactacagaatcgtcaagtctacacttctactgtatcagtccccaaccaccggcctgttccctacgaagacatgcggaggagatcaaaaggccaaaatccaggattctctttattgcgcggcaggggcatgggccctcgctcttgcctaccgcaggattgacgacgataaaggcaggacgcacgaactggaacatagcgcaattaaatgcatgaggggaatcctgtattgctacatgaggcaggctgacaaggtgcaacaatttaagcaggatccccgtccaacaacatgtctgcattccgtcttcaatgttcacactggcgacgagctgctgtcctacgaggagtacggccaccttcagattaacgccgttagtctctacctgctgtatctggtggagatgatctcctccggtttgcagattatttataatacagatgaagtttcattcattcagaatctggtcttctgcgtggagcgtgtctaccgggtccctgatttcggtgtttgggaacggggatcaaaatataataacggcagcaccgagctgcactcatccagcgtaggtctggccaaagcggctctggaggcaattaacgggttcaatctgttcggcaatcaaggctgtagctggagcgtaatttttgtggatctggacgcccataaccgaaatcgccaaaccctgtgctctcttctgcccagggaatccagaagtcataacactgacgcagctttgctgccctgcatctcctacccagccttcgcactcgacgacgaggttctgttctctcagacgcttgacaaagttgtacggaaactgaagggcaagtacggatttaagcggtttctccgcgacggttatagaacttccctcgaggacccaaaccggtgctactacaagccagctgagataaagctgtttgacggtattgagtgtgagttccctatcttctttctctatatgatgattgatggggtctttaggggtaaccccaagcaagtccaagaatatcaagatcttctgacccccgtcttacatcacactacagaaggatatcccgtcgtgcccaagtattattatgttcctgccgacttcgtggaatacgaaaagaacaaccccggaagccaaaaacggttccctagtaattgcgggcgagacggcaagctgttcctttggggtcaggctctctacattattgccaagctgcttgcagatgagttaatttcccccaaggacattgatccggtgcagaggtatgtacctctgaaagaccagcgaaacgtgtccatgcggttttctaatcaggggccattggaaaatgacctggttgtgcacgtcgcccttattgccgagtcccagagactgcaggtattcctgaatacatacggtattcagacacagactccgcagcaggttgaaccaatccagatctggccccagcaggaactggtaaaagcgtacctgcagctgggcataaatgagaaactcgggctgtctggccgaccagaccggccaattggctgtctgggtacgtcgaagatctacaggatactggggaaaactgtggtctgctatcccatcatttttgacctctccgatttctacatgtcacaggacgtgttccttctgattgacgatattaagaacgcgctccagtttatcaagcagtactggaagatgcatggtaggcccctgttcctagtgctgatacgagaggacaatatcaggggcagccggtttaatcccatcctggatatgttagctgccctgaagaaggggattatcgggggagttaaggtgcatgttgatcggctccaaactttgattagcggagctgtggtggagcaactcgacttcctccgcatatctgacaccgaggaactgcccgagttcaagtcttttgaggagcttgagccaccgaaacattcaaaagtcaaacgtcaatcctctactccgagcgccccagaactgggccagcaacctgacgtgaatatctcagagtggaaagacaaacctacacacgaaatcctgcagaagctcaacgattgttcctgtctcgccagccaggccatactcctgggcatcctcctcaagagagaaggacccaattttataaccaaggaaggcacagtctccgatcacattgagagagtctatcgccgagctggtagccagaaactttggtcagtggttcgcagggccgcttcactgctgagcaaggtggtggattcactcgccccatccattacaaatgttcttgtgcaggggaagcaagttacacttggagctttcgggcatgaagaagaggtgatctctaaccctttaagcccaagggttatccagaatattatctattacaaatgtaacactcacgatgagcgggaggccgtgatccagcaggagctggtaatacacatagggtggattatctccaataacccagagttatttagtggtatgttgaaaattcgcatcggctggatcatacacgcaatggagtacgaactgcagatccgtggtggagacaaacctgcactagatctgtatcaattaagtccaagtgaagtgaagcagctccttctggacatactgcagccacagcagaacgggcgttgttggcttaacagaagacagattgatgggtcactgaatcgcacgcccacgggcttttatgaccgggtatggcagatcctggaacgtactcccaacggcatcatcgtcgcagggaagcacctgcctcagcagcccactcttagcgacatgaccatgtacgaaatgaatttttccttattggtggaagacaccctgggaaatatcgatcagccgcagtatagacagatcgtggtcgaactcctaatggtggtcagcatcgttctggagcggaacccagagttggaattccaggacaaagtggacctggaccggctggttaaggaggcattcaacgaattccagaaagatcagtcacggctcaaggagatcgagaagcaagatgatatgacctccttctacaataccccacctctggggaaaagaggcacatgctcctacctaactaaagctgtgatgaacttgctactcgagggagaagtaaagcccaataatgacgacccttgcctgatatcatag

SEQ ID NO: 273928 - DNA, 3829 bp, Artificial Sequence
  derived and/or modified sequence
cggcattgctgacaggcggccccgggggcggtggccaaggcggcgaccggagcgcgatggcgggggcggcgggactcacggcagaagtgagctggaaggtcttggagcgaagagctcggaccaagcgctcagttttaaaattgctatagcttagcctgcgacgcttatgattagagccaacaatttgaaatggcctgctcacctgatgcagtcgtctctccgtcttccgctttcttaaggtctggctcagtttatgaacctcttaaaagcattaatcttccaagacctgataatgaaactctctgggataagttggaccattattacagaattgtcaagtcaacattgctgctgtatcaaagtccaactaccggtctctttcccactaaaacatgcggtggtgaccagaaggccaagatccaggacagcctatactgcgctgctggggcctgggctttggctcttgcatacaggcgaattgatgatgacaagggaaggacccatgagctggagcactcagctataaaatgcatgagaggaattctctactgctatatgcgtcaggccgataaggtccagcagtttaagcaggatccacgcccaacaacatgtcttcactctgttttcaatgtgcatacaggagatgagttgctttcctatgaggaatatggtcatcttcagataaatgcagtgtcactttatctcctttaccttgtggaaatgatttcctcaggactccagattatctacaacactgatgaggtctcttttattcaaaaccttgtattttgtgtggaaagagtttaccgtgtgcctgactttggtgtctgggaaagaggaagcaaatataataatggcagcacagagctacattcgagctcggttggtttagcaaaagcagctctagaagcaattaatggattcaacctttttggcaaccagggctgttcgtggtcagttatatttgtggatctcgatgctcacaatcgcaacaggcaaactttgtgctcgctgttacccagagaatcaagatcacataatacagatgctgccctgctcccctgcatcagttatcctgcatttgccctggatgatgaagttctttttagccagacacttgataaagtggttagaaaattaaaaggaaaatatggatttaaacgtttcttgagagatgggtatagaacatcattggaagatcccaacagatgctactacaagccagctgaaattaagctatttgatggcattgaatgtgaatttcccatatttttcctttatatgatgattgatggagtttttagaggcaatcctaagcaagtacaggaatatcaggatcttttgactccagtacttcatcataccacagaaggatatcctgttgtaccaaagtactattatgtgccagctgactttgtagaatatgaaaaaaataaccctggtagtcaaaaacgatttcctagcaactgtggccgtgatggaaaactgtttctttggggacaagcactttatatcatcgcaaaactcctggctgatgaacttattagtcctaaagacattgatcctgtccagcgctatgtcccactaaaggatcaacgtaacgtgagcatgaggttttccaatcagggcccactggaaaatgacttggtagttcatgtggcacttatagcagaaagccaaagacttcaagtttttctgaacacatatggtattcaaactcaaactcctcaacaagtagaacccattcagatatggcctcagcaggagcttgtgaaagcttatttgcagctgggtatcaatgaaaagttaggactctctggaaggccagacaggcccattggctgcctcgggacatcaaagatttatcgcattctaggaaagactgtggtttgttacccgattattttcgacctaagtgatttctacatgtctcaggatgttttcctgctgatagatgacataaagaatgcgctgcagttcattaaacaatattggaaaatgcatggacgtccacttttccttgttctcatccgggaagacaatataagaggtagccggttcaaccccatattagatatgctggcagcccttaaaaaaggaataattggaggagtcaaagttcatgtggatcgtctacagacactaatatctggagctgtggtagaacaacttgatttcctacgaatcagtgacacagaagagcttccagaatttaagagttttgaggaactagaacctcccaaacattcaaaagtcaaacggcaaagcagcacccctagtgctcctgaactgggacagcagccggatgtcaacattagtgaatggaaggacaaacccacccacgaaattcttcaaaaactgaatgattgcagttgtctggctagccaagccatcctgctgggtatactgctcaaaagagaaggccccaacttcatcacaaaggaaggtaccgtttctgatcacattgagagagtctatagaagagctggcagccaaaaactttggtcggttgtacgccgtgcagcaagtcttttaagtaaagtagtggacagcctggccccatccattactaatgttttagtgcagggcaaacaggtaactctgggtgcctttgggcatgaagaagaagttatctctaatcctttgtctccaagagtgattcaaaacatcatctattataagtgtaacacccatgatgagagggaagcggtcattcagcaagaactggtcatccatattggctggatcatctccaataaccctgagttattcagtggcatgctgaaaatacgaatcgggtggatcatccatgccatggagtatgaacttcagatccgtggcggagacaagccagccttggacttgtatcagctgtcacctagtgaagttaaacagcttctgctggatattctgcagcctcaacagaatggaagatgttggctgaacaggcgtcagatcgatgggtctttgaatagaactcccaccgggttctatgaccgagtgtggcagattctggagcgcacgcccaatgggatcattgttgctgggaagcatttgcctcagcaaccaaccctgtcagatatgaccatgtatgagatgaatttctctctccttgttgaagacacgttgggaaatattgaccagccacagtacagacagatcgttgtagagttacttatggttgtatccattgtactggaaagaaaccccgagctagaatttcaagacaaagtagatctagacagactggtcaaagaagcatttaatgaatttcaaaaagatcagagtcggctaaaggaaattgaaaaacaagatgacatgacttccttttacaacactcctcccctgggaaaaagaggaacatgcagctatttgacaaaggcggtgatgaatctgctgctggaaggagaagtcaagccaaacaatgatgacccgtgtctgattagctagtggggaaggtgtaggaagctctgttgagacacatgttctgaagtgtgttgtgtttcatgttcaagcttaatcaaggcagccattaatatacgaactgagcatgctggggaggtgaatgccacatccttggcggggttatggacctcttgcatgtcatagccaatctaacggtaatggtaaatgcttttaatcaagcaggaaaaagttctcatgattatgccaactataatagtaatcctcactgagtgataaaaatagtttatgaattgaaaatttgccgctgcatgttgtatgatcaaatagttcatcaaaatgaatctttgctctttggactgaattcttaccatactgccattaaaataaatttgccaactagtaa

SEQ ID NO: 273929 - DNA, 5603 bp, Artificial Sequence
  derived and/or modified sequence
attgctgacaggcggccccgggggcggtggccaaggcggcgaccggagcgcgatggcgggggcggcgggactcacggcagaagtgagctggaaggtcttggagcgaagagctcggaccaagcgctcagttttaaaattgctatagcttagcctgcgacgcttatgattagagccaacaatttgaaatggcctgctcacctgatgcagtcgtctctccgtcttccgctttcttaaggtctggctcagtttatgaacctcttaaaagcattaatcttccaagacctgataatgaaactctctgggataagttggaccattattacagaattgtcaagtcaacattgctgctgtatcaaagtccaactaccggtctctttcccactaaaacatgcggtggtgaccagaaggccaagatccaggacagcctatactgcgctgctggggcctgggctttggctcttgcatacaggcgaattgatgatgacaagggaaggacccatgagctggagcactcagctataaaatgcatgagaggaattctctactgctatatgcgtcaggccgataaggtccagcagtttaagcaggatccacgcccaacaacatgtcttcactctgttttcaatgtgcatacaggagatgagttgctttcctatgaggaatatggtcatcttcagataaatgcagtgtcactttatctcctttaccttgtggaaatgatttcctcaggactccagattatctacaacactgatgaggtctcttttattcaaaaccttgtattttgtgtggaaagagtttaccgtgtgcctgactttggtgtctgggaaagaggaagcaaatataataatggcagcacagagctacattcgagctcggttggtttagcaaaagcagctctagaagcaattaatggattcaacctttttggcaaccagggctgttcgtggtcagttatatttgtggatctcgatgctcacaatcgcaacaggcaaactttgtgctcgctgttacccagagaatcaagatcacataatacagatgctgccctgctcccctgcatcagttatcctgcatttgccctggatgatgaagttctttttagccagacacttgataaagtggttagaaaattaaaaggaaaatatggatttaaacgtttcttgagagatgggtatagaacatcattggaagatcccaacagatgctactacaagccagctgaaattaagctatttgatggcattgaatgtgaatttcccatatttttcctttatatgatgattgatggagtttttagaggcaatcctaagcaagtacaggaatatcaggatcttttgactccagtacttcatcataccacagaaggatatcctgttgtaccaaagtactattatgtgccagctgactttgtagaatatgaaaaaaataaccctggtagtcaaaaacgatttcctagcaactgtggccgtgatggaaaactgtttctttggggacaagcactttatatcatcgcaaaactcctggctgatgaacttattagtcctaaagacattgatcctgtccagcgctatgtcccactaaaggatcaacgtaacgtgagcatgaggttttccaatcagggcccactggaaaatgacttggtagttcatgtggcacttatagcagaaagccaaagacttcaagtttttctgaacacatatggtattcaaactcaaactcctcaacaagtagaacccattcagatatggcctcagcaggagcttgtgaaagcttatttgcagctgggtatcaatgaaaagttaggactctctggaaggccagacaggcccattggctgcctcgggacatcaaagatttatcgcattctaggaaagactgtggtttgttacccgattattttcgacctaagtgatttctacatgtctcaggatgttttcctgctgatagatgacataaagaatgcgctgcagttcattaaacaatattggaaaatgcatggacgtccacttttccttgttctcatccgggaagacaatataagaggtagccggttcaaccccatattagatatgctggcagcccttaaaaaaggaataattggaggagtcaaagttcatgtggatcgtctacagacactaatatctggagctgtggtagaacaacttgatttcctacgaatcagtgacacagaagagcttccagaatttaagagttttgaggaactagaacctcccaaacattcaaaagtcaaacggcaaagcagcacccctagtgctcctgaactgggacagcagccggatgtcaacattagtgaatggaaggacaaacccacccacgaaattcttcaaaaactgaatgattgcagttgtctggctagccaagccatcctgctgggtatactgctcaaaagagaaggccccaacttcatcacaaaggaaggtaccgtttctgatcacattgagagagtctatagaagagctggcagccaaaaactttggtcggttgtacgccgtgcagcaagtcttttaagtaaagtagtggacagcctggccccatccattactaatgttttagtgcagggcaaacaggtaactctgggtgcctttgggcatgaagaagaagttatctctaatcctttgtctccaagagtgattcaaaacatcatctattataagtgtaacacccatgatgagagggaagcggtcattcagcaagaactggtcatccatattggctggatcatctccaataaccctgagttattcagtggcatgctgaaaatacgaatcgggtggatcatccatgccatggagtatgaacttcagatccgtggcggagacaagccagccttggacttgtatcagctgtcacctagtgaagttaaacagcttctgctggatattctgcagcctcaacagaatggaagatgttggctgaacaggcgtcagatcgatgggtctttgaatagaactcccaccgggttctatgaccgagtgtggcagattctggagcgcacgcccaatgggatcattgttgctgggaagcatttgcctcagcaaccaaccctgtcagatatgaccatgtatgagatgaatttctctctccttgttgaagacacgttgggaaatattgaccagccacagtacagacagatcgttgtagagttacttatggttgtatccattgtactggaaagaaaccccgagctagaatttcaagacaaagtagatctagacagactggtcaaagaagcatttaatgaatttcaaaaagatcagagtcggctaaaggaaattgaaaaacaagatgacatgacttccttttacaacactcctcccctgggaaaaagaggaacatgcagctatttgacaaaggcggtgatgaatctgctgctggaaggagaagtcaagccaaacaatgatgacccgtgtctgattagctagtggggaaggtgtaggaagctctgttgagacacatgttctgaagtgtgttgtgtttcatgttcaagcttaatcaaggcagccattaatatacgaactgagcatgctggggaggtgaatgccacatccttggcggggttatggacctcttgcatgtcatagccaatctaacggtaatggtaaatgcttttaatcaagcaggaaaaagttctcatgattatgccaactataatagtaatcctcactgagtgataaaaatagtttatgaattgaaaatttgccgctgcatgttgtatgatcaaatagttcatcaaaatgaatctttgctctttggactgaattcttaccatactgccattaaaataaatttgccaactagtaatgcatactggaaatcaaaagatactgaaagaatggtgaacttctcttagtggtattgtcatgctaaaagatgttaatatacatcataaaagcaaagtcagccagctgatattttggttctcaaaaactgcattattaataatattttagtatacagagctattctacagtttttacattgtaaacatgactgtggttttgtatttgctaaatataggggttggactaaaatataataaatctgtaccttatcaaacattttctttgagctcctgctaaaaataggacatgtctatgattgttcaaaaatatgttaaatttaggctcagcacagtagctcacacctgaaatcttagcacttcgggaggctgaggcaggtggatcacttgaggttaggagttcaagaccagcccagccaacatggtgaaaaccctgtctctactaaaaatacaaaaattagccaggcatgatggtgcatgcctttaaacccagctactgaggaggctgaggcatgagaattgcttgaaccaggagacggaggttgcagtgagctgaaatcctgccactgcacaccagcctgggtgacagagcgagactccatctcaaaaaaaaaaaaaaaaaagaaaaagaaaaaaatatgttaaatttaaggactgttaacctacgttctactagtaaaaacaacattaagggtcattaaattttatttctgaattaatgaacatatctggacattttttgttcctaggttcacaagattgagcttcaaactcccgagtgttttcatttaattgatttagaggtagaatggaagagaatctgtggtacctaccattatacacatttagttgcccagtttacttaaactttaatgaaagtagaaagtagattaaacatttaaattttatttctttcctaaatagaaaaaaaaaaggcccatgagtttgagcccttgccccaaagagagttgtttttctgatcaatcttactggagtttcacctgagaagatagatttgtcacataaaaaatgcagcttatttgtagtgttttgaaaggatgtaagaaaggatgagtggcttcagtattgagtcaatcgatatcaaatgaatggatgtgtgagcacatggaaaaatctgctgtcagtcacatttctcataacattgaggtacagtgccgagatcttgcataagaaattgtatggatattagttggcaaaattgaaatgaatgagacacagttgggccctaaagaactaaggagggggattgacaaagaatagaattaaactacttgactcaatatgttaagagagtttatgaaaagatagtcgtgaagggtgaagctaatttgtaaaactaatgcctgaaaaaaacgtaagcatgaagtccatggagagggaattgagagctgacacttcataactggagaaactggaaattaaagaaagggaaacaaaagacttaaaatttttgtttgccgaaatttttacgaaagtaaactgtgttgtagttttaagaatttttttaaaaaatctgattagctgagcaaagttaccagaaaactgctatcctagttgaaatcaaacattacttgcaaatgtgttttctgagtgttagcttcctgcttaaatgttacatatgcaaaattctgaagttttcctgtgctactcctgaaagcattcagaatctgtgacacgtattgacttcatgctttgagattcaaaatttattgttctgaaagttatatttagaatcagtaaatcttgatattcaccttta

SEQ ID NO: 273930 - protein, 508 aa, Artificial Sequence
  derived and/or modified sequence
MMSEHDLADVVQIAVEDLSPDHPVVLENHVVTDEDEPALKRQRLEINCQDPSIKSFLYSINQTICLRLDSIEAKLQALEATCKSLEEKLDLVTNKQHSPIQVPMVAGSPLGATQTCNKVRCVVPQTTVILNNDRQNAIVAKMEDPLSNRAPDSLENVISNAVPGRRQNTIVVKVPGQEDSHHEDGESGSEASDSVSSCGQAGSQSIGSNVTLITLNSEEDYPNGTWLGDENNPEMRVRCAIIPSDMLHISTNCRTAEKMALTLLDYLFHREVQAVSNLSGQGKHGKKQLDPLTIYGIRCHLFYKFGITESDWYRIKQSIDSKCRTAWRRKQRGQSLAVKSFSRRTPNSSSYCPSEPMMSTPPPASELPQPQPQPQALHYALANAQQVQIHQIGEDGQVQVIPQGHLHIAQVPQGEQVQITQDSEGNLQIHHVGQDGQVLQGAQLIAVASSDPAAAGVDGSPLQGSDIQVQYVQLAPVSDHTAGAQTAEALQPTLQPEMQLEHGAIQIQ

SEQ ID NO: 273931 - DNA, 1527 bp, Artificial Sequence
  derived and/or modified sequence
atgatgtccgagcatgacttggcagacgtagttcagatcgccgtggaagatctgtccccagatcaccccgtagtgttagagaaccacgtcgttaccgacgaggacgagccggccctgaaaagacaaaggcttgagattaattgtcaggatccttctatcaaatcattcttgtactcgatcaatcagactatctgcctccggcttgattcgattgaggccaagttgcaggccctggaagccacatgcaaatctctggaggagaaactggacctggttaccaataaacagcacagtccgattcaagtgcccatggtggccggtagtccgctcggcgctacccagacctgcaataaggtgcgatgcgtggtgccacagacgaccgtgatcttgaacaatgatcggcaaaacgctattgtcgctaagatggaagaccccctttccaaccgcgctccagactcgctggagaatgtaatctccaacgccgtccctggccgacggcagaacacgatcgttgtcaaagtgcctggtcaagaggacagccaccacgaggacggtgaatctgggtcagaagcctcagacagcgtgtccagctgcgggcaggcaggcagtcaatcgattggcagtaacgtcaccttgatcactctgaacagtgaggaggattatcctaacggcacgtggctgggagatgaaaataaccccgagatgcgggttcgctgtgcgatcattccctctgatatgctccacatctccactaattgtcgcaccgctgaaaagatggctttgaccctgttagactacctgttccatcgtgaagtgcaggcagtctcaaatctgagcggccagggcaaacacggcaaaaaacagttagatccactaactatttacgggattcgatgtcatctgttctacaagttcgggattacggaaagcgactggtataggataaaacagagcatagatagcaaatgccggaccgcgtggcgccggaaacagcggggacagagtctggcagtgaaatcattttcccggcgaactccaaatagttcctcctactgtcccagcgaaccaatgatgtccacaccgccacccgcaagcgagttgccacagcctcagccacagccccaggccctgcactatgccctggccaacgctcaacaagtccaaattcaccagatcggtgaggatggccaggtgcaagtcatccctcagggccatctacacatcgctcaagtgccacagggagagcaagtgcagatcacccaggatagcgagggaaaccttcagattcatcacgtgggtcaggatggtcaagtattgcagggggctcaactcattgccgtcgcaagcagcgacccagccgcagccggagtcgacggtagcccactacagggatccgacattcaggtacagtacgtccagttggcacctgtgtcggaccacactgccggagcccagactgccgaagcacttcagccaaccctgcagccggaaatgcagctggaacacggcgctatccagatccaatag

SEQ ID NO: 273932 - DNA, 1527 bp, Artificial Sequence
  derived and/or modified sequence
atgatgtctgaacatgacctggctgatgtggtgcagattgctgtggaggacctgagcccagaccaccctgtggtgctggagaaccacgtggtgacagatgaagatgagcccgccctgaagaggcagaggctggagatcaactgccaggaccccagcatcaagagcttcctgtacagcatcaaccagaccatctgcctgcggctggacagcattgaggccaagctgcaggccctggaggccacctgcaagagcctggaggagaagctggacctggtgaccaacaagcagcacagccccatccaggtgcccatggtggccggcagccccctgggcgccacccagacctgcaacaaggtgcgctgtgtggtgccccagaccaccgtcatcctgaacaatgaccggcagaatgccatcgtggccaagatggaggaccccctgagcaacagagccccagacagcctggagaatgtcatcagcaatgctgtgcctggaagacggcagaacaccatcgtggtgaaggtgcccggccaggaggacagccaccatgaagatggagagagcggcagcgaggccagtgacagcgtgagcagctgtggccaggccggcagccagagcatcggcagcaatgtgaccctcatcaccctgaacagcgaggaggactacccaaatggcacctggctgggagatgagaacaaccctgagatgagggtgcgctgtgccatcatccccagcgacatgctgcacatcagcaccaactgcaggacagctgagaagatggccctgaccctgctggactacctgttccaccgggaggtgcaggccgtgagcaacctgagcggccagggcaagcacggcaagaagcagctggaccccctgaccatctacggcatccgctgccacctgttctacaagtttggcatcacagaaagtgactggtaccgcatcaagcagagcattgacagcaagtgcaggacagcctggaggaggaagcagaggggccagagcctggccgtgaagagcttcagcaggaggacccccaacagcagcagctactgccccagcgagcccatgatgagcaccccacctccagccagcgagctgccccagccccagccccagccccaggccctgcactacgccctggccaatgcccagcaggtgcagatccaccagatcggggaggatggccaggtgcaggtgatcccccagggccacctgcacatcgcccaggtgccccagggcgagcaggtgcagatcacccaggacagcgagggcaacctgcagatccaccacgtgggccaggacggccaggtgctgcagggcgcccagctgattgctgtggccagcagtgaccctgctgctgctggggtggatggcagccccctgcagggcagtgacatccaggtgcagtatgtgcagctggcccctgtgtctgaccacacagctggggcccagacagctgaggccctgcagcccaccctgcagcctgagatgcagctggagcacggggccatccagatccagtag

SEQ ID NO: 273933 - DNA, 1527 bp, Artificial Sequence
  derived and/or modified sequence
atgatgagcgagcacgacctggccgacgtggtgcagatcgccgtggaggatctgagtccagaccatccggtggtcctggaaaaccatgttgtgacagacgaagacgaacctgctttgaaacgccagcgtcttgagatcaattgtcaggacccctcaatcaagtccttcctgtatagcatcaatcagactatttgtctccgcctcgactctatcgaagctaaactccaagcactggaggctacatgcaagagcttggaagagaaactggacctagtgaccaacaagcagcatagtccgatacaggtacctatggttgcaggctcccctctaggcgcgacccagacatgtaacaaggtcaggtgtgtggtgccgcagactactgtcatcctgaataacgacaggcagaatgccattgtggcaaaaatggaggaccccctcagcaatcgagccccggactccctcgaaaacgtgatctcaaacgccgtcccagggcgccggcaaaacacaatcgttgtgaaggtgccaggacaggaagacagtcaccatgaggatggtgaaagcggttctgaagcctctgacagcgtgagctcatgtggacaggcgggctcccagtcaatcggcagtaatgtgactctaatcacactcaatagcgaagaggattaccccaacggcacatggctgggcgatgagaacaaccccgagatgcgtgtccgctgcgctattatcccatccgatatgctgcacattagcacaaactgtcggactgccgaaaagatggcactcacactactggactatcttttccacagagaggtgcaggccgtgagtaacttgagcgggcaagggaagcatggcaaaaagcaactggacccactgaccatctatgggatcagatgccacttgttctataaatttggaataactgagagcgattggtaccgaatcaaacagtctatcgatagtaagtgccgaacagcctggagaaggaaacaacgcggtcagtctctcgcagtgaagtccttctcacggcgaacccccaacagtagctcttactgtccctccgagccaatgatgtctaccccaccgcccgcttcagaactaccccagccacaacctcagcctcaggctctccattacgccttggcaaacgcacaacaggtgcagattcatcaaattggtgaagacggacaggttcaggtgatccctcaagggcacctccacattgcccaggtgccccagggtgaacaggtccagattacccaggattcagaaggaaatctccagatacaccatgttggtcaagatggacaggtgttgcagggggcacagcttattgccgtggcttcgtccgatccagcagccgctggcgtggacgggagccccttacagggaagcgatatccaggtgcagtacgtccaattggcccctgtgtcagaccacacagccggcgctcagactgctgaagctcttcagcccacacttcagcccgagatgcagcttgaacatggtgctatacagatccaatag

SEQ ID NO: 273934 - DNA, 1527 bp, Artificial Sequence
  derived and/or modified sequence
atgatgtccgaacatgatctggcagacgtggtccagatcgcagtggaggacctatctccagaccacccagtggtgttagaaaaccatgttgtgactgacgaagacgagcccgctctgaagcgacagcggctagagataaactgtcaggatccaagtattaaaagtttcctgtatagcatcaatcagactatctgcttaaggctggatagcatcgaggctaagctccaggctctggaggccacctgcaagtccctggaggagaaactcgacctcgtcacgaacaaacagcacagccccatccaggttccgatggtcgcgggatccccactgggcgctacccagacttgtaataaagtgcgctgtgtcgtccctcagaccaccgtcatcctgaacaatgaccgtcagaatgctatcgttgcgaagatggaggacccgctgtcaaatagggctccggattctctcgagaacgtcatttctaacgccgttccgggaagacggcagaacaccatagtcgtgaaagtgcccggtcaggaggactctcatcacgaagacggtgagtcagggtcagaagcaagcgacagcgtgtcgtcttgtggtcaagcaggatcccagagcatcggatccaatgttactcttatcactctcaatagcgaggaggactatccaaatggcacgtggttaggcgacgagaacaaccctgaaatgagagtccggtgcgcaatcattcctagcgacatgcttcacatttcaacgaactgccggaccgcagagaaaatggccctcacgttgttggactatctgttccacagggaggtgcaagctgtaagcaacctgtcagggcaggggaagcatggaaaaaagcagttggatccgctgaccatatatgggatcaggtgtcatctgttttataagttcggtatcacagagagcgactggtaccgcatcaagcagtctattgactcaaaatgcaggacagcctggcgcagaaaacagaggggtcagtcgctggcagtcaagagcttcagccggaggacccccaattccagtagttactgcccgtctgagcccatgatgagcacacccccaccagcctccgagctgccacagcctcagcctcaaccccaggcactacattatgccctcgctaatgctcagcaggtgcagattcaccagattggagaggatgggcaagttcaagttatcccccaggggcacctccatatcgctcaggtgccacagggggaacaggtccagattacccaggacagtgaaggtaatctccaaatacatcatgtcgggcaggacggccaagtgctccagggagctcagctgattgcagtggcgtccagcgatcccgcagccgcaggagtcgatggctcacctttgcagggcagcgacattcaagttcagtacgtgcaactggccccagtgtctgatcatacagccggagcccagactgccgaagccctgcagccaaccctgcagcctgagatgcaactcgaacacggggcaatccagattcagtag

SEQ ID NO: 273935 - DNA, 2372 bp, Artificial Sequence
  derived and/or modified sequence
agtattcttggggagaaagataacagggaagtgaggagggttcagctgtggaagtgctgggatggctgatccgagtgaccatggcctagacggggtttaaaccctggactgaagaaagtgccggtgaccaaaagccagccccactgtgagttgaactctttcgtgttgaccggccactctccgtgctctggatgatgtcggaacacgacctggccgatgtggttcagattgcagtggaagacctgagccctgaccacccagttgttttggagaatcatgtagtgacagatgaagacgaacctgctttgaaacgccagcgactagaaatcaattgccaggatccatctataaagtcattcctgtattccatcaaccagacaatctgcttgcggttggatagcattgaagccaaattgcaagccctggaggctacttgtaaatccttagaagaaaagctggatctggtcacgaacaagcagcacagccccatccaggtccccatggtggccggctcccctctcggggcaacccagacgtgcaacaaagtgcgatgcgtcgtcccccagactacagtaatactcaacaatgatcggcagaacgccattgtagccaagatggaagaccccttgagcaacagggcaccggattccctggaaaatgtcattagcaacgctgtgcctgggcgtcggcagaacaccattgtggtgaaggtgccgggccaagaagacagccaccacgaggacggggagagcggctcggaggccagcgactctgtgtccagctgtgggcaggcgggcagtcagagcatcgggagcaacgtcacgctcatcaccctgaactcggaagaggactaccccaatggcacctggctgggcgacgagaacaaccccgagatgcgggtacgctgcgccatcatcccctccgacatgctgcacatcagcaccaactgccgcacggccgagaagatggcgctcacgctgctggactacctcttccaccgcgaggtgcaggctgtgtccaacctctcggggcagggcaagcacgggaagaagcagctggacccgctcaccatctacggcatccggtgtcaccttttctataaatttggcatcacagaatccgactggtaccgaatcaagcagagcatcgactccaagtgccgcacggcgtggcggcgcaagcagcggggccagagcctggcggtcaagagcttctcgcggagaacgcccaactcgtcctcctactgcccttcagagccgatgatgagcaccccacctcctgccagcgagctcccgcagccacagccgcagccgcaggccctgcactacgcgctggccaacgcacagcaggtgcagatccaccagatcggagaagacggacaggtgcaagtaatcccacagggacacctccacatcgcccaggtgccgcagggggagcaagtccagatcacgcaggacagcgagggcaacctccagatccatcacgtggggcaggacggtcaggtgctgcagggtgcacagctgatcgccgtggcctcctcggaccccgcggcggcgggcgtggatgggtcgccactccagggcagcgacatccaggttcagtacgtgcagctggcgccagtgagtgaccacacggccggggcacagacggccgaagccctgcagcccacgctacagccggagatgcagctcgagcacggggccatccagattcagtgagcggtgcccatggcaccaggagcccctcgccggctccgcctacggcccggcccccacgcgccctgctctcacggcctcggcacaggcagcggctgcacgtgttctgctgaagtgcgtctgaaggccgctgcctccgcggggaacagcatcctatcaactgaaagagcagccgccgccgcccccagccggagacccctttcgtttgagtcctgctgttggtgtcggagcacgaggggaggcacggtgcggagagcgtcgcatatgcgcgggaaatcaagaactatgatatttttctgtttaaacagctttttttaatttgctatggtgtttataacaaaaaagaaaatttgaaaaaaaaaatcccaggggagtagcaggagccctttgctgtgtgctctgtccagtgtcatgagacgggagccctttgctgtgtgctctgtccagtgtcatgagacgggagccctttgctgtgtgctctgtccagtgtcatgagacgggagccctttgctgtgtgctctgtccagtgtcatgaggcaggtgtttgcaaagccagctctcggttccgatggggtattgctgacctacttttctaggggaaatgctcttaaacactgtaattatgcatttctaatgaaataaaatgtatttatgacc

SEQ ID NO: 273936 - DNA, 1527 bp, Artificial Sequence
  derived and/or modified sequence
atgatgagcgagcacgacctggccgacgtggtgcagatcgccgtggaggacctgagccccgaccaccccgtggtgctggagaaccacgtggtgaccgacgaggacgagcccgccctgaagagacagagactggagatcaactgccaggaccccagcatcaagagcttcctgtacagcatcaaccagaccatctgcctgagactggacagcatcgaggccaagctgcaggccctggaggccacctgcaagagcctggaggagaagctggacctggtgaccaacaagcagcacagccccatccaggtgcccatggtggccggcagccccctgggcgccacccagacctgcaacaaggtgagatgcgtggtgccccagaccaccgtgatcctgaacaacgacagacagaacgccatcgtggccaagatggaggaccccctgagcaacagagcccccgacagcctggagaacgtgatcagcaacgccgtgcccggcagaagacagaacaccatcgtggtgaaggtgcccggccaggaggacagccaccacgaggacggcgagagcggcagcgaggccagcgacagcgtgagcagctgcggccaggccggcagccagagcatcggcagcaacgtgaccctgatcaccctgaacagcgaggaggactaccccaacggcacctggctgggcgacgagaacaaccccgagatgagagtgagatgcgccatcatccccagcgacatgctgcacatcagcaccaactgcagaaccgccgagaagatggccctgaccctgctggactacctgttccacagagaggtgcaggccgtgagcaacctgagcggccagggcaagcacggcaagaagcagctggaccccctgaccatctacggcatcagatgccacctgttctacaagttcggcatcaccgagagcgactggtacagaatcaagcagagcatcgacagcaagtgcagaaccgcctggagaagaaagcagagaggccagagcctggccgtgaagagcttcagcagaagaacccccaacagcagcagctactgccccagcgagcccatgatgagcacccccccccccgccagcgagctgccccagccccagccccagccccaggccctgcactacgccctggccaacgcccagcaggtgcagatccaccagatcggcgaggacggccaggtgcaggtgatcccccagggccacctgcacatcgcccaggtgccccagggcgagcaggtgcagatcacccaggacagcgagggcaacctgcagatccaccacgtgggccaggacggccaggtgctgcagggcgcccagctgatcgccgtggccagcagcgaccccgccgccgccggcgtggacggcagccccctgcagggcagcgacatccaggtgcagtacgtgcagctggcccccgtgagcgaccacaccgccggcgcccagaccgccgaggccctgcagcccaccctgcagcccgagatgcagctggagcacggcgccatccagatccagtag

SEQ ID NO: 273937 - DNA, 675 bp, Artificial Sequence
  derived and/or modified sequence
atgagcgtgggctacgccaacggcatcagagtgatgagcatgacccacaccggcgagcccggcttcatgctgtacatccccatcgagtacgccctgcacgtgtacaacgaggtgatgagcgtgggccagaagtacggcatcagaaacgccggctactacgccctgagaagcctgagaatcgagaagttcttcgccttctggggccaggacatcaacaacctgaccacccccctggagtgcggcagagagagcagagtgaagctggagaagggcatggacttcatcggcagagacgccctgctgcagcagaagcagaacggcgtgtacaagagactgaccatgttcatcctggacgaccacgacagcgacctggacctgtggccctggtggggcgagcccatctacagaaacggccagtacgtgggcaagaccaccagcagcgcctacagctacagcctggagagacacgtgtgcctgggcttcgtgcacaacttcagcgaggacaccggcgaggagcaggtggtgaccgccgacttcatcaacagaggcgagtacgagatcgacatcgccggctacagattccaggccaaggccaagctgtaccccgtggccagcctgttcacccagaagagaagaaaggacgacatggagctgagcgacctgcacggcaagtag

SEQ ID NO: 273938 - DNA, 675 bp, Artificial Sequence
  derived and/or modified sequence
atgtccgtgggctacgcgaatggaattcgggtgatgtccatgacccacacaggagaaccaggtttcatgttgtacattcctatcgagtacgcgctgcatgtgtacaatgaggttatgtccgtggggcaaaagtatggtatccggaatgcaggctactatgctctgaggtctctgcggatcgaaaaattctttgcattttggggtcaagatattaataacctcactacaccactggagtgcggccgagaaagccgagttaaactcgaaaagggtatggacttcatcggccgagacgcattgctccagcaaaagcaaaatggtgtttacaagagacttactatgttcatcctagatgaccatgactcggacctggacctctggccctggtggggagagcctatctatcgaaatgggcagtacgtggggaaaacaactagtagcgcctacagttacagtctggaaagacatgtctgtctcggcttcgtccacaacttttcagaagatactggcgaggagcaggtggtgacagcagacttcatcaaccgcggcgaatatgagattgatatcgctggttatagatttcaggccaaagcgaagctctacccagtcgcttctttatttactcagaagcggaggaaggatgatatggagcttagcgatctgcacgggaagtag

SEQ ID NO: 273939 - DNA, 675 bp, Artificial Sequence
  derived and/or modified sequence
atgtctgtgggctacgccaacggcatccgggtgatgtccatgacccacactggagagcccggcttcatgctgtacatccccatcgagtatgccctgcacgtgtacaatgaggtgatgtctgtgggccagaagtatggcatcagaaatgccggctactatgccctgcggagcctgcgcatcgagaagttctttgccttctggggccaggacatcaacaacctgaccacccccctggagtgtggccgggagagccgggtgaagctggagaagggcatggacttcatcggcagagatgccctgctgcagcagaagcagaatggagtgtacaagaggctgaccatgttcatcctggatgaccatgacagcgacctggacctgtggccctggtggggcgagcccatctacagaaatggccagtatgtgggcaagaccaccagcagcgcctacagctacagcctggagcggcacgtgtgcctgggctttgtgcacaacttctctgaagatactggagaggagcaggtggtgacagctgacttcatcaacagaggagaatatgaaattgatattgctggctaccgcttccaggccaaggccaagctgtaccctgtggccagcctcttcacccagaagaggaggaaggatgacatggagctgagtgacctgcacggcaagtag

SEQ ID NO: 273940 - DNA, 675 bp, Artificial Sequence
  derived and/or modified sequence
atgagcgtgggctacgccaacggcatccgggtgatgagcatgacccacaccggggaaccaggctttatgctctatattccaatcgaatacgcccttcacgtgtacaacgaagttatgtcagtgggtcagaaatatggtattaggaacgcggggtattacgcactgcgcagtttacgtatcgaaaaattttttgctttctggggccaagacattaacaatctgaccacaccactggagtgcggacgggaatctagggtaaaactcgaaaagggtatggatttcattggccgcgacgcgctgctgcaacagaagcagaacggcgtctataaacgcttgaccatgtttatccttgatgatcatgactccgatctggacctgtggccttggtggggcgaacctatctaccgcaatggtcagtatgtagggaagaccacaagcagtgcctactcatactcactggaaagacatgtgtgcctgggcttcgtgcacaacttctctgaagataccggcgaggaacaggttgtcacagctgacttcattaatcgcggcgagtatgagattgacattgccggttaccgattccaggccaaggccaagttgtaccccgtagcttccctcttcacccaaaagcggagaaaggatgacatggaactgagtgatctgcatggcaagtag

SEQ ID NO: 273941 - DNA, 675 bp, Artificial Sequence
  derived and/or modified sequence
atgtccgtgggttacgccaacggaattagggtgatgagcatgacccacacaggcgaaccgggtttcatgttatatattcccatcgaatacgccctgcacgtctacaacgaggttatgtcagttggtcagaagtacggaattcggaacgctgggtactatgctctgcggtccctgaggattgaaaaattcttcgccttttggggccaggatattaataatctcaccacaccgctcgaatgcggtcgcgagagcagggtgaagttagaaaaggggatggattttatcggccgagatgctctcctgcagcagaagcagaacggcgtctataaaagactgactatgtttattctggatgatcacgatagcgatctggatctgtggccctggtggggtgagcctatatatcggaacgggcaatatgttggcaaaaccacttccagcgcgtattcttactcgctggagaggcacgtatgcttgggctttgtccacaatttttctgaggatacaggggaagaacaggtggtgacggccgatttcataaatcgaggcgagtacgagattgatatcgcgggttaccgctttcaagcaaaggctaagctttatcctgtggcttccctgtttacacagaaaagacgcaaagatgatatggagttgtcggacttacatggtaagtag

SEQ ID NO: 273942 - DNA, 2381 bp, Artificial Sequence
  derived and/or modified sequence
aaagtctgtatactttttggttgggcagatctccaccggccctcaatctgattggccctcgagctgtggatgtgctgtctgagttgtcctatgcccctatgactccagaccacttcccaagcctcttttgcaagtggcaaccacagctgagtgaaacaaactgtaaccgaatgaaagcaatgacaacggaatcctccccaggaagctgctgattagagagggccaaacggacagacatcttggccacctgtaacgagcaacttccaggagatgagtgtgggctatgcaaatgggatccgggtgatgagcatgacgcacacaggagagccaggattcatgctctacatccccatagagtacgccctgcatgtatacaatgaagtgatgagtgttggccagaaatacggaatccggaatgctgggtattacgctcttcgcagtctccgaattgagaagttttttgccttctggggtcaggatataaataacctcaccacgcccctggaatgtggacgagagtctcgggtgaaattagagaagggcatggatttcattggtcgcgacgccctcctgcagcagaagcagaatggagtgtataaacgcctcaccatgttcatcctggacgaccatgattcagacctagacctttggccttggtggggagagcccatttaccggaatgggcagtatgttggcaagaccaccagcagtgcctacagctacagcctggagcgccacgtttgcctgggctttgtgcacaatttttctgaggacacgggggaagagcaagtggtgacagcagatttcatcaaccggggagagtatgagattgacatcgcgggataccgcttccaggccaaggccaagctctaccctgtcgcctccctcttcacccagaagcgccgaaaggatgacatggagctgagtgacttacatgggaagtgatgccaccagggcagcctcacctcctccccatcatcttgtcctagagtgggcgtcaccttggagcttctcttccttccgcctctgttcctcttctggagcctttgcctcccatctcttatctccttgatataattttgaacttgacctactttaaacttttttgctctgcagccttccttgcccttccacctcctcctcctaatattcactctgggctcttcttcccttcccacccctcactcagcttctcgtggtggcaggaggtatgtctgacaggacagaagcaagctccactgtggacatgagtgatggtgacagctgctttcaaattctgcatctcaaggcagggcaagccggggtggtgcaggtctcagggcacgagtccctctcccttgggttccattttcttggagcagcctattagttctggtggggttgccgtgtgtcggatgcagccctgaggggcagctcgtgcctgcagcccggcagctcgttctcctgttctgctgtgctgtgggctggcactcgatacctctggcaagaggatgattatctacctcactgataagaggcatcgcatggacgttctctggtctgtagtggagacaagcagttaacctagcaccatcctcatcctccctgcagaagccattagcagacctttgggccagggcagcctccctataattttcttcatctcttgctaatctctataataaggttgctttttctttcttagttgagtaaacaagtaagccacagtgtttgaaagggaaaaaccatattgccttgtgtgttgcttttcccagtcaaaagggtctgaccttagaaagtccccaccagtgatgctgagtgttctgctatggaaacaatgctgcttttctctcagctgtccaaagttcagccgttcctccttccccttctcccagtgcgtttgactttgtcaggtcagcctcacttgtccctttcacagttggcccataaagtcatgtttctctccctttagaatagggaggggaagggatcaggtgtgttgtcctgggcctttcaaccttgcgggctgtgctgagttccagagagctgccggaattccaggtttgactctccagcacagagcagagctacacagaggtgacccacgttagtccactgagagttctgagtccaaagggtgtacgttgcataaggctagagaccgcttttcctcctttccccccaggctctttgtttccctccacccacccttccatatcctctggagcaggagacaatgtgggtgcccagaagtgccctgcgctttcaggcagtgtctctgttttcccaaggtgaaacttagatatcatggactgttgtccagcctcaatgcttcattttccccttgcatatcaactgccctaatctgactttttttaagtgcaaataaactgctataagac

SEQ ID NO: 273943 - protein, 388 aa, Artificial Sequence
  derived and/or modified sequence
MSGTFLIRKPQLLQGVYAMGFNRPSKIQENALPMMLAEPPQNLIAQSQSGTGKTAAFVLAMLSRVEPSDRYPQCLCLSPTYELALQTGKVIEQMGKFYPELKLAYAVRGNKLERGQKISEQIVIGTPGTVLDWCSKLKFIDPKKIKVFVLDEADVMIATQGHQDQSIRIQRMLPRNCQMLLFSATFEDSVWKFAQKVVPDPNVIKLKREEETLDTIKQYYVLCSSRDEKFQALCNLYGAITIAQAMIFCHTRKTASWLAAELSKEGHQVALLSGEMMVEQRAAVIERFREGKEKVLVTTNVCARGIDVEQVSVVINFDLPVDKDGNPDNETYLHRIGRTGRFGKRGLAVNMVDSKHSMNILNRIQEHFNKKIERLDTDDLDEIEKIAN

SEQ ID NO: 273944 - DNA, 1167 bp, Artificial Sequence
  derived and/or modified sequence
atgagcggcaccttcctgatcagaaagccccagctgctgcagggcgtgtacgccatgggcttcaacagacccagcaagatccaggagaacgccctgcccatgatgctggccgagcccccccagaacctgatcgcccagagccagagcggcaccggcaagaccgccgccttcgtgctggccatgctgagcagagtggagcccagcgacagatacccccagtgcctgtgcctgagccccacctacgagctggccctgcagaccggcaaggtgatcgagcagatgggcaagttctaccccgagctgaagctggcctacgccgtgagaggcaacaagctggagagaggccagaagatcagcgagcagatcgtgatcggcacccccggcaccgtgctggactggtgcagcaagctgaagttcatcgaccccaagaagatcaaggtgttcgtgctggacgaggccgacgtgatgatcgccacccagggccaccaggaccagagcatcagaatccagagaatgctgcccagaaactgccagatgctgctgttcagcgccaccttcgaggacagcgtgtggaagttcgcccagaaggtggtgcccgaccccaacgtgatcaagctgaagagagaggaggagaccctggacaccatcaagcagtactacgtgctgtgcagcagcagagacgagaagttccaggccctgtgcaacctgtacggcgccatcaccatcgcccaggccatgatcttctgccacaccagaaagaccgccagctggctggccgccgagctgagcaaggagggccaccaggtggccctgctgagcggcgagatgatggtggagcagagagccgccgtgatcgagagattcagagagggcaaggagaaggtgctggtgaccaccaacgtgtgcgccagaggcatcgacgtggagcaggtgagcgtggtgatcaacttcgacctgcccgtggacaaggacggcaaccccgacaacgagacctacctgcacagaatcggcagaaccggcagattcggcaagagaggcctggccgtgaacatggtggacagcaagcacagcatgaacatcctgaacagaatccaggagcacttcaacaagaagatcgagagactggacaccgacgacctggacgagatcgagaagatcgccaactag

SEQ ID NO: 273945 - DNA, 1113 bp, Artificial Sequence
  derived and/or modified sequence
atgggtttcaaccgaccatcaaaaatccaggagaacgccctgccaatgatgctggccgagcctccccagaatctgatcgcgcagtcgcagtcaggcacgggcaagacggctgcatttgtgctggcaatgctgtcgcgggttgagccctctgaccgctatccacagtgcctttgcttatctcctacttacgaactcgccctgcagaccggcaaggtgatagaacagatgggaaagttttacccggagctgaagttggcctatgctgtccgagggaataagttagagaggggccagaagatttccgagcaaattgtcattgggacaccaggcactgtactggactggtgttcaaaactgaagttcatcgatccgaaaaagatcaaagtcttcgtgctggacgaagccgacgtgatgattgcgacacaagggcaccaggatcagtcaatcaggattcagaggatgctgcctcggaactgccagatgctattgttctccgctactttcgaggactccgtttggaagttcgcccagaaagttgtgccagatcctaacgttattaagctgaaacgagaggaggagacacttgatacaataaagcaatactacgtgctttgctcctccagggatgagaagtttcaggctctgtgtaacctttatggggccatcactattgcacaggcaatgatcttctgccacacgcgaaaaactgccagctggctggccgcagaactgtccaaagaaggtcatcaagtggccctgctttccggtgagatgatggtcgagcagagagccgccgtgattgagaggtttcgagaaggcaaggagaaggtccttgtcaccacaaatgtttgcgctaggggcatcgacgtggagcaggtgtccgttgtcatcaattttgacctccccgttgacaaggacggcaatccagataatgagacatacctgcatcggattgggaggaccggccggtttggcaaacgagggttggccgtgaatatggtagattccaagcatagcatgaacattcttaaccggatccaggaacacttcaataaaaaaattgaaagattagacactgatgacttggacgaaatcgagaaaattgccaactag

SEQ ID NO: 273946 - DNA, 1167 bp, Artificial Sequence
  derived and/or modified sequence
atgtctgggacatttttgatccggaagcctcagttgctgcaaggagtgtacgccatgggattcaaccgaccctcaaagatccaggaaaacgcattacctatgatgttggccgaacctccgcagaacttgatcgcccaaagccagtctgggactgggaaaactgcagcttttgtgcttgccatgttgagtagagtggaaccaagcgacaggtacccccagtgtctgtgtctatccccgacgtatgaattagctctgcagactggcaaagtgattgagcagatggggaagttctatcccgaactgaaactggcctatgccgtacgaggcaataagctggagaggggacagaagattagtgagcagatcgtgattggtacccctggcaccgtgcttgattggtgttcaaaacttaaatttattgaccccaagaaaattaaagtcttcgtactggacgaggccgacgtcatgatcgctactcagggacaccaggaccagtcaattcgcattcaacgtatgctgccccggaactgtcagatgctgcttttttccgcgaccttcgaggattctgtgtggaaattcgcccagaaggtcgtaccagaccccaacgttatcaaactcaagagagaggaggaaacactcgatacgataaaacaatactatgtgctctgctcatcacgcgacgagaaattccaggccctgtgtaatctgtacggagccatcaccatcgctcaggccatgatcttttgtcacacccgtaaaactgcctcatggcttgcagcagagctgagtaaagaaggacaccaggtggccctgttgtcaggtgagatgatggtcgagcagcgcgccgctgtgattgagcggtttagggaagggaaagaaaaagtcctggtcacaactaacgtgtgtgctcgggggatcgacgttgagcaggtgtcagtagtcatcaattttgatctccccgttgataaagacggcaacccggacaacgaaacttatctgcaccggatagggcggaccggacggtttggcaagcgaggtttggcggtaaacatggtggactccaagcattccatgaatattctgaatcggatacaggaacattttaataagaagattgaacgattggatactgacgatctagacgaaattgagaaaatcgccaattag

SEQ ID NO: 273947 - DNA, 1113 bp, Artificial Sequence
  derived and/or modified sequence
atgggcttcaaccggcccagcaagatccaggagaatgccctgcccatgatgctggccgagcccccccagaacctgattgcccagagccagagcggcaccgggaagacagctgcctttgtgctggccatgctgagccgggtggagcccagcgaccgctacccccagtgcctgtgcctgagccccacctatgagctggccctgcagacaggcaaggtgattgagcagatgggcaagttctacccagagctgaagctggcctatgctgtgcggggcaacaagctggagcggggccagaagatcagcgagcagatcgtcatcggcaccccaggcaccgtgctggactggtgcagcaagctgaagttcatcgaccccaagaagatcaaggtgtttgtgctggatgaagcagatgtgatgattgccacccagggccaccaggaccagagcatccgcatccagaggatgctgcccaggaactgccagatgctgctcttcagcgccacctttgaagattctgtgtggaagtttgcccagaaggtggtgcctgaccccaacgtcatcaagctgaagcgggaggaggagaccctggacaccatcaagcagtactacgtgctgtgcagcagcagagatgagaagttccaggccctgtgcaacctgtatggagccatcaccatcgcccaggccatgatcttctgccacaccaggaagacagcctcctggctggccgctgagctgagcaaggagggccaccaggtggccctgctgtctggagagatgatggtggagcagagagctgctgtgattgagcgcttccgggagggcaaggagaaggtgctggtgaccaccaacgtgtgtgcccggggcattgatgtggagcaggtgtctgtggtgatcaactttgacctgcctgtggacaaggatggcaacccagacaatgagacctacctgcaccgcatcggccgcacaggccgctttgggaagaggggcctggccgtgaacatggtggacagcaagcacagcatgaacatcctgaaccgcatccaggagcacttcaacaagaagattgaaaggctggacacagatgacctggatgaaattgagaagatcgccaactag

SEQ ID NO: 273948 - DNA, 1167 bp, Artificial Sequence
  derived and/or modified sequence
atgagcggcaccttcctgatcaggaagccccagctgctgcagggcgtgtatgccatgggcttcaaccggcccagcaagatccaggagaatgccctgcccatgatgctggccgagcccccccagaacctgattgcccagagccagagcggcaccgggaagacagctgcctttgtgctggccatgctgagccgggtggagcccagcgaccgctacccccagtgcctgtgcctgagccccacctatgagctggccctgcagacaggcaaggtgattgagcagatgggcaagttctacccagagctgaagctggcctatgctgtgcggggcaacaagctggagcggggccagaagatcagcgagcagatcgtcatcggcaccccaggcaccgtgctggactggtgcagcaagctgaagttcatcgaccccaagaagatcaaggtgtttgtgctggatgaagcagatgtgatgattgccacccagggccaccaggaccagagcatccgcatccagaggatgctgcccaggaactgccagatgctgctcttcagcgccacctttgaagattctgtgtggaagtttgcccagaaggtggtgcctgaccccaacgtcatcaagctgaagcgggaggaggagaccctggacaccatcaagcagtactacgtgctgtgcagcagcagagatgagaagttccaggccctgtgcaacctgtatggagccatcaccatcgcccaggccatgatcttctgccacaccaggaagacagcctcctggctggccgctgagctgagcaaggagggccaccaggtggccctgctgtctggagagatgatggtggagcagagagctgctgtgattgagcgcttccgggagggcaaggagaaggtgctggtgaccaccaacgtgtgtgcccggggcattgatgtggagcaggtgtctgtggtgatcaactttgacctgcctgtggacaaggatggcaacccagacaatgagacctacctgcaccgcatcggccgcacaggccgctttgggaagaggggcctggccgtgaacatggtggacagcaagcacagcatgaacatcctgaaccgcatccaggagcacttcaacaagaagattgaaaggctggacacagatgacctggatgaaattgagaagatcgccaactag

SEQ ID NO: 273949 - DNA, 1113 bp, Artificial Sequence
  derived and/or modified sequence
atgggcttcaaccggcccagcaagatccaggagaacgccctgcccatgatgttagccgagcctccccagaacctcatcgcccagagccagagtggcacgggcaagactgccgctttcgtgttggccatgttatctcgcgtggagccatcagatagatacccccagtgcctttgtctctcacccacctacgaattggcacttcaaaccggcaaagtgattgaacagatggggaagttctaccctgaattaaagctggcgtacgcagttcgtggaaacaagctggagcgggggcaaaaaattagtgaacagattgtcatcggtaccccagggaccgtcctcgattggtgctcgaaattgaagttcattgaccctaaaaaaatcaaggtgtttgtactcgatgaagctgatgtgatgattgccacgcagggacaccaggatcagtctattaggatacagaggatgctgcctcgcaattgccagatgctactcttctcggcaacatttgaagatagtgtgtggaaattcgcccagaaggtcgtgccagatcctaacgtgattaaattaaaacgtgaagaagagaccctcgacaccataaaacaatactacgtgctgtgctcttcccgagacgaaaaattccaggcgctctgcaacttgtatggcgcaatcacaattgctcaagccatgatcttttgtcacacccgaaagaccgcgtcctggcttgcagccgagctttcaaaagaggggcaccaggtcgcccttctgagcggagaaatgatggtcgaacagagggccgccgtaattgaacgctttagggaaggaaaagagaaagtgctggtgactaccaatgtgtgtgctcgggggattgatgtagagcaagtttccgtcgtgatcaactttgacctaccggtcgacaaggatggaaaccctgacaacgagacgtacctccacaggatcgggaggactggccgttttgggaagcgaggtctggcagtgaacatggtcgattcaaaacatagtatgaacatcctcaaccgtattcaagagcatttcaataagaaaatagaacgcctagacactgatgatctggatgaaatcgagaaaattgcaaattag

SEQ ID NO: 273950 - DNA, 1167 bp, Artificial Sequence
  derived and/or modified sequence
atgagcggcaccttcctgatccggaagccccagctgctgcagggcgtttacgccatggggttcaaccgccccagcaagatacaagagaatgcattgccaatgatgttggcagagccacctcagaacttaatcgcccagagccaatcggggacagggaagaccgccgcattcgtgctggcaatgctgagtcgggtcgagcctagcgaccggtatcctcaatgtctgtgcctgtctcccacttatgaattggccctgcagaccggcaaggtaattgagcagatgggcaagttttatcccgagctcaaactggcatacgctgtgcggggtaataaactcgagcgcggacagaagatcagcgagcagatagtgatcggaaccccaggcacagtcctcgactggtgctcaaagctcaagtttatagaccccaagaaaattaaagtgttcgtgctggatgaggcggacgtcatgattgccacccaaggccatcaggatcagagcattcgaatccaaagaatgctcccgcggaactgccagatgttgttatttagcgcaacttttgaggatagtgtgtggaagttcgcccagaaggtggtgccagatccaaacgtcatcaagttgaaaagggaggaggagactctcgataccattaagcagtattacgtgctgtgttctagcagggacgagaagtttcaggctctgtgcaacctgtatggagccattactatcgcacaggctatgattttctgtcatactcgcaagacagcttcctggctggccgccgaactctcaaaagaaggtcatcaggtcgcactcctttccggagaaatgatggtggaacagagagccgccgtgattgaaaggtttcgggaagggaaagagaaggttttggtgacaaccaacgtgtgcgctaggggaatagacgtggaacaggtgagtgttgtgatcaactttgacttgcctgtcgataaggatggcaatcctgacaatgaaacttacctccataggataggccgcactggtcgctttggcaagagagggttggctgtgaacatggtggacagtaagcacagtatgaacattctcaatcgaatccaagaacactttaacaagaagatcgagcgactagatacggacgacttggacgaaattgagaagatcgcgaactag

SEQ ID NO: 273951 - DNA, 1113 bp, Artificial Sequence
  derived and/or modified sequence
atggggttcaaccgtcccagcaaaatacaagagaatgctctgcctatgatgttggcggagccaccacagaatctgatagcacagtctcaaagcggaactgggaaaaccgcagctttcgttctggcgatgctttcgagggttgaaccaagcgacaggtacccacaatgtttatgcctgagtcctacatatgaactggctctgcagactgggaaagtcatagagcagatgggaaaattctatcctgagttaaaactcgcttatgccgtgagggggaataaactagaaagaggacagaaaattagcgaacagattgtgatcgggactcccggtacggtgctggactggtgcagcaaacttaaatttattgatcccaagaaaattaaagttttcgtcctggatgaggccgatgttatgatagctacacagggccatcaagaccaaagtattagaatacagaggatgctgccacggaactgccagatgctccttttctcggccacttttgaggatagtgtgtggaaatttgcccagaaggtggtgcccgaccccaatgttataaagctgaagcgtgaggaagagactctggatacgatcaagcagtattatgttctgtgttcaagccgggatgagaagtttcaggcactgtgcaacctctatggggctataacaatcgctcaggctatgatcttctgccatacacggaaaaccgcgagttggcttgctgctgagctaagcaaggaaggccatcaggtggcactgttgagcggtgaaatgatggtagagcaacgcgcagctgtcatcgagcggttccgcgagggaaaggaaaaagtattagttacaactaacgtatgcgccaggggtatcgacgtggagcaagtgtcggtagttatcaactttgaccttccggtggacaaggatgggaatcccgacaacgaaacatacttgcatcggattgggagaaccggcagattcggcaagagggggctcgctgtgaatatggtggacagtaagcactccatgaacattctaaacaggatccaggaacacttcaacaagaagatcgaacgcctggatactgacgacctcgatgaaattgagaaaatcgcaaactag

SEQ ID NO: 273952 - DNA, 1167 bp, Artificial Sequence
  derived and/or modified sequence
atgtctggcactttcttaatccgaaaaccccagctgctgcagggcgtctatgccatggggttcaacaggcccagtaaaattcaggagaatgccctcccaatgatgttagcagaacctccccagaacctaatcgcccagtctcaatctggtactggaaaaactgcagcgtttgtacttgctatgctgtctcgcgtggagccctcagaccgatacccccagtgtctgtgccttagtccaacatacgaactcgccctgcaaacaggcaaggtgattgaacaaatgggcaaattctatccagagctgaaactggcctacgccgttagagggaacaagctcgaacgtgggcagaagatcagcgagcagatagtgattggcacccctggaactgtgctggactggtgttccaagctgaagttcattgaccccaaaaaaatcaaggtgttcgttctcgatgaagccgacgtcatgatcgctacacagggccaccaggaccaaagtattaggattcagcgaatgctcccccgtaactgtcagatgctgttattttccgcaacattcgaagattccgtctggaaattcgcccagaaagtagtgccagatccaaacgtgattaagttgaaacgggaagaagagaccctggacactatcaaacagtattatgtgctgtgcagcagcagagacgagaagttccaggccctgtgtaatctgtatggcgctataaccatcgcacaagctatgattttctgtcataccagaaaaactgcttcttggctggccgcagaactaagcaaagagggccaccaggttgccttgctgagcggcgaaatgatggttgagcagcgggctgctgtcattgaaagattccgggagggaaaggaaaaagttctggtgacaactaatgtgtgcgcacgcggaatcgatgtggagcaggtgtccgtggtcattaacttcgatctcccggtcgataaggacgggaacccagacaacgagacttatctgcatagaattgggaggacagggaggtttgggaagcgcggtctcgccgtgaatatggtggatagcaaacatagtatgaacattctgaatcgcattcaagagcattttaataagaagatagagcgcctggacaccgatgacttggacgaaattgagaaaatcgccaactag

SEQ ID NO: 273953 - DNA, 1533 bp, Artificial Sequence
  derived and/or modified sequence
attggctgacaggtgatttctggatgtcaggaacatttctgattaggaaaccacagcttctccagggagtctatgccatgggcttcaatcgaccctccaagatacaagagaacgcattacccatgatgcttgctgaacccccacagaatctgattgcccagtctcagtctggcactggtaaaacagctgcctttgtcttagccatgctcagccgagtggagccatcagacagatacccccagtgtctgtgcctctccccaacatatgagctggcgcttcaaacaggaaaagtgattgagcagatgggcaaattttacccagaactgaagcttgcctatgccgttcgaggcaataaattggaaagaggccagaagatcagtgagcagattgtcattggcacccctgggaccgtgctggactggtgctccaagctcaagttcattgatcccaagaaaatcaaggtgtttgttctggatgaggctgatgtcatgatagccactcagggccaccaagatcagagcatccgcatccagaggatgctgcccaggaactgccagatgctgcttttctccgccacctttgaagactctgtgtggaagtttgcccagaaagtggtcccagacccaaatgttatcaaactgaagcgtgaggaagagaccctggataccatcaagcagtactatgtcctgtgcagcagcagagacgagaagttccaggccttgtgtaacctctacggggccatcaccattgctcaagccatgatcttctgccatactcgcaaaacagctagttggctggcagcagagctctcaaaagaaggccaccaggtggctctgctgagtggggagatgatggtggagcagagggctgcggtgattgagcgcttccgagagggcaaagagaaggttttggtgaccaccaacgtgtgtgcccgcggcattgatgttgaacaagtgtctgtcgtcatcaactttgatcttcccgtggacaaggacgggaatcctgacaatgagacctacctgcaccggatcgggcgcacgggccgctttggcaagaggggcctggcagtgaacatggtggacagcaagcacagcatgaacatcctgaacagaatccaggagcattttaataagaagatagaaagattggacacagatgatttggacgagattgagaaaatagccaactgagaagctccaccagccactgatgccagccctggcactgcccctgcacaggagacaagtgcatttagggcacaggccccgacatcaccccaaggacaacggcagaagtagagagaaactacctacctcacttcaaattatgtttggacttgacaaaaataggtgcaaatgatggggggcaatagaagaaaaaatttgcattttggaaaattgggtcctttccccacttttttaaagccacattcccccatctttataataatctggtcacagtggtagtcgctggccccaggaccccctcctgattttggctaggcatcgtggaaccagctccagcccctgaaga

SEQ ID NO: 273954 - DNA, 1113 bp, Artificial Sequence
  derived and/or modified sequence
atgggcttcaacagacccagcaagatccaggagaacgccctgcccatgatgctggccgagcccccccagaacctgatcgcccagagccagagcggcaccggcaagaccgccgccttcgtgctggccatgctgagcagagtggagcccagcgacagatacccccagtgcctgtgcctgagccccacctacgagctggccctgcagaccggcaaggtgatcgagcagatgggcaagttctaccccgagctgaagctggcctacgccgtgagaggcaacaagctggagagaggccagaagatcagcgagcagatcgtgatcggcacccccggcaccgtgctggactggtgcagcaagctgaagttcatcgaccccaagaagatcaaggtgttcgtgctggacgaggccgacgtgatgatcgccacccagggccaccaggaccagagcatcagaatccagagaatgctgcccagaaactgccagatgctgctgttcagcgccaccttcgaggacagcgtgtggaagttcgcccagaaggtggtgcccgaccccaacgtgatcaagctgaagagagaggaggagaccctggacaccatcaagcagtactacgtgctgtgcagcagcagagacgagaagttccaggccctgtgcaacctgtacggcgccatcaccatcgcccaggccatgatcttctgccacaccagaaagaccgccagctggctggccgccgagctgagcaaggagggccaccaggtggccctgctgagcggcgagatgatggtggagcagagagccgccgtgatcgagagattcagagagggcaaggagaaggtgctggtgaccaccaacgtgtgcgccagaggcatcgacgtggagcaggtgagcgtggtgatcaacttcgacctgcccgtggacaaggacggcaaccccgacaacgagacctacctgcacagaatcggcagaaccggcagattcggcaagagaggcctggccgtgaacatggtggacagcaagcacagcatgaacatcctgaacagaatccaggagcacttcaacaagaagatcgagagactggacaccgacgacctggacgagatcgagaagatcgccaactag

SEQ ID NO: 273955 - protein, 533 aa, Artificial Sequence
  derived and/or modified sequence
MGIGLSAQGVNMNRLPGWDKHSYGYHGDDGHSFCSSGTGQPYGPTFTTGDVIGCCVNLINGTCFYTKNGHSLGIAFTDLPANLYPTVGLQTPGEIVDANFGQQPFLFDIEDYMREWRAKVQGTVHCFPISARLGEWQAVLQNMVSSYLVHHGYCATATAFARMTETPIQEEQASIKNRQKIQKLVLEGRVGEAIETTQRFYPGLLEHNPNLLFMLKCRQFVEMVNGTDSEVRSLSSRSPKSQDSYPGSPSLSPRHGPSSSHMHNTGADSPSCSNGVASTKSKQNHSKYPAPSSSSSSSSSSSSSSPSSVNYSESNSTDSTKSQHHSSTSNQETSNPWLQLERRPNQAAPTTPPGPTPTSTPPHSDSEMEMEAEHYPNGVLGSMSTRIVNGAYKHEDLQTDESSMDDRHPRRQLCGGNQAATERIILFGRELQALSEQLGREYGKNLAHTEMLQDAFSLLAYSDPWSCPVGQQLDPIQREPVCAALNSAILESQNLPKQPPLMLALGQASECLRLMARAGLGSCSFARVDDYLH

SEQ ID NO: 273956 - protein, 594 aa, Artificial Sequence
  derived and/or modified sequence
MAAATADPGAGNPQPGDSSGGGAGGGLPSPGEQELSRRLQRLYPAVNQQETPLPRSWSPKDKYNYIGLSQGNLRVHYKGHGKNHKDAASVRATHPIPAACGIYYFEVKIVSKGRDGYMGIGLSAQGVNMNRLPGIAFTDLPANLYPTVGLQTPGEIVDANFGQQPFLFDIEDYMREWRAKVQGTVHCFPISARLGEWQAVLQNMVSSYLVHHGYCATATAFARMTETPIQEEQASIKNRQKIQKLVLEGRVGEAIETTQRFYPGLLEHNPNLLFMLKCRQFVEMVNGTDSEVRSLSSRSPKSQDSYPGSPSLSPRHGPSSSHMHNTGADSPSCSNGVASTKSKQNHSKYPAPSSSSSSSSSSSSSSPSSVNYSESNSTDSTKSQHHSSTSNQETSNPWLQLERRPNQAAPTTPPGPTPTSTPPHSDSEMEMEAEHYPNGVLGSMSTRIVNGAYKHEDLQTDESSMDDRHPRRQLCGGNQAATERIILFGRELQALSEQLGREYGKNLAHTEMLQDAFSLLAYSDPWSCPVGQQLDPIQREPVCAALNSAILESQNLPKQPPLMLALGQASECLRLMARAGLGSCSFARVDDYLH

SEQ ID NO: 273957 - DNA, 1602 bp, Artificial Sequence
  derived and/or modified sequence
atgggcatagggctctcggcccagggcgtcaatatgaatcggttacccggttgggataaacattcctatggttatcacggcgacgacgggcacagcttttgttcgtccggaaccggacaaccctatggaccaacctttacaaccggtgatgtgatcggttgttgtgtaaatttaattaatggcacctgcttctacaccaaaaacggtcactctctggggattgcgtttaccgacctccctgctaacctgtatcccactgtcggcctgcagacccctggggaaattgtggacgctaatttcggccaacagccttttctcttcgatattgaggactacatgagagagtggcgtgctaaagtccaagggaccgtgcattgcttcccgattagtgcccggctaggggaatggcaggctgttctccagaacatggtcagttcatatctggttcaccatggatactgcgccaccgctacagcatttgcaagaatgactgagacacccatacaggaggaacaagcctcgattaagaacagacaaaaaattcagaaactggtgttagaaggccgtgttggcgaagctatagagaccactcagagattctatcccggcctgctggagcacaatcctaacctccttttcatgctaaaatgcagacagttcgttgaaatggtcaacggtactgattctgaggtgagatccctatcctccagaagccctaagagtcaggactcgtatcccggctccccctctctcagtccgagacacgggccttccagcagtcacatgcacaatactggagcagattccccaagttgctcaaacggggtcgccagcaccaagtccaagcaaaatcattccaagtatcccgctcctagttcttcatcgtcgtcaagtagctctagtagctcttcaagtcctagctcagtaaactactccgagagtaattcaacggactccactaaatctcagcaccacagttcaacatctaatcaagagacttccaatccttggctgcagcttgagcgtcggccaaatcaggcagcacccaccaccccacccggcccaacacccacatccactccaccccactctgactcagagatggaaatggaagcggagcactaccccaatggagtgcttggctccatgtcaactagaatcgttaatggggcctacaaacatgaggacttacaaaccgacgagagcagtatggacgaccggcacccaagacgccagctttgcggaggaaatcaagctgccaccgagagaatcatcctgtttggccgagaacttcaggcgctctcagagcagctcgggcgcgaatacggaaagaacttggctcatacggagatgctgcaggatgccttctcattactcgcttactcagatccatggagctgtccagtgggccagcagctagacccaatccagcgggagcccgtgtgcgccgccctcaactctgctattctcgagagtcagaacctccccaagcagcctccactgatgctggctctcggccaggcctccgaatgcctgcggctaatggctagagccggattgggcagctgctcattcgctagggtggatgactatctccactag

SEQ ID NO: 273958 - DNA, 1602 bp, Artificial Sequence
  derived and/or modified sequence
atgggcatcggcctgagcgcccagggcgtgaacatgaaccggctgcccggctgggacaagcacagctatggctaccatggagatgatggccacagcttctgcagcagcggcaccggccagccctacggccccaccttcaccactggagatgtgattggctgctgcgtgaacctgatcaatggcacctgcttctacaccaagaatggccacagcctgggcatcgccttcacagacctgcctgccaacctgtaccccaccgtgggcctgcagaccccaggagaaattgtggatgccaactttggccagcagcccttcctgtttgatattgaggactacatgagggagtggagggccaaggtgcagggcaccgtgcactgcttccccatcagcgcccggctgggggagtggcaggccgtgctgcagaacatggtgagcagctacctggtgcaccacggctactgtgccacagccacagcctttgccaggatgacagagacccccatccaggaggagcaggccagcatcaagaaccggcagaagatccagaagctggtgctggagggccgggtgggggaggccatcgagaccacccagcgcttctacccaggcctgctggagcacaaccccaacctgctcttcatgctgaagtgccggcagtttgtggagatggtgaatggaacagattctgaggtgcgcagcctgagcagccgcagccccaagagccaggacagctacccaggcagccccagcctgagccccaggcatggccccagcagcagccacatgcacaacacaggagctgacagccccagctgcagcaatggagtggccagcaccaagagcaagcagaaccacagcaagtacccagcccccagcagcagcagcagcagcagcagcagcagcagcagcagcagccccagctctgtgaactacagcgagagcaacagcacagacagcaccaagagccagcaccacagcagcaccagcaaccaggagaccagcaacccctggctgcagctggagcggcggcccaaccaggccgcccccaccaccccacctggccccacccccaccagcaccccaccccacagcgacagcgagatggagatggaggccgagcactacccaaatggagtgctgggctccatgagcaccagaattgtgaatggagcctacaagcatgaggacctgcagacagatgagagctccatggatgacagacacccccggcggcagctgtgtggcggcaaccaggccgccacagagcgcatcatcctgtttggccgggagctgcaggccctgtctgagcagctgggccgggagtatggcaagaacctggcccacacagagatgctgcaggatgccttcagcctgctggcctacagcgacccctggagctgccctgtgggccagcagctggaccccatccagcgggagcctgtgtgtgccgccctgaacagcgccatcctggagagccagaacctgcccaagcagccccccctgatgctggccctgggccaggccagcgagtgcctgcggctgatggcccgggccggcctgggcagctgcagctttgcccgggtggatgactacctgcactag

SEQ ID NO: 273959 - DNA, 1602 bp, Artificial Sequence
  derived and/or modified sequence
atgggcatcggcctgagcgcccagggcgtgaacatgaaccggctgcctggctgggacaaacactcgtacggttatcatggcgatgacggacatagtttctgttcctctggaactggacagccttacggccctacctttaccaccggagacgttatcggatgctgtgtgaacctgataaacggaacttgtttttatactaaaaatgggcacagcctcggaatcgcattcaccgacctgcccgcaaatctctatcccacagtcggactacaaacgcctggagagatagttgacgcaaattttggacagcagccatttttgtttgatatcgaggactacatgagggaatggagagcaaaagttcaagggacagtgcactgctttccaattagtgcccgtctgggcgagtggcaggcagtcctgcagaacatggtctctagttacctggtccatcatggatattgcgcaaccgccacggctttcgccaggatgacggagacccccatccaggaggaacaggcctctataaagaacaggcagaagatccagaaactggtccttgaaggtagggtgggggaggcaattgaaaccacacagcgattctaccccggattgctggagcacaatccgaacctactgttcatgcttaaatgtcgccagttcgtggagatggtaaacggcactgactccgaagtgcgcagcctgagttctagaagccctaaaagtcaggattcataccctggcagcccaagcttgtcccctaggcacgggccttcttcctcacatatgcacaacactggggcagacagtccctcctgctcaaatggagtggcttccactaagagcaaacagaaccattccaagtatccagccccctcttccagctcttccagctcctcctcttcctcaagctcttcgccatctagcgttaattatagcgagagcaacagtaccgattccactaaaagtcaacatcacagcagtacttctaaccaggaaacctccaacccctggttgcagctggagcggagacctaatcaggccgcacccacgacacctcctggaccaacacctacctcaacaccaccacattctgactccgagatggagatggaagccgagcattatcccaatggagttttgggatctatgagcacaagaatcgtgaacggtgcttataaacacgaagacctccagacagacgagtcatcgatggatgaccggcatcctcgacgacagttgtgcggcggtaaccaagctgcaaccgaacgtatcatattattcggacgtgagctgcaggcactctcagaacagctagggagggaatatggcaaaaatctggcccatacagagatgctccaggatgcattttcgctactagcctactcagacccatggtcatgccccgtcggacagcagctggatccaattcagcgtgagcccgtgtgtgcagctctcaatagcgctatattagaaagccagaatctacccaagcagccacccctgatgcttgcccttggccaagcttcagagtgtctacggttgatggccagagccgggctgggcagctgttcctttgcccgcgtggatgactacctgcattag

SEQ ID NO: 273960 - DNA, 1602 bp, Artificial Sequence
  derived and/or modified sequence
atgggtatcggattgtcggctcagggtgtgaatatgaatcgcctgcccggttgggacaagcactcctatggctaccatggcgatgatggccactccttttgttctagcggcacagggcagccctacggcccaacatttaccaccggcgatgtgattgggtgttgcgtcaatcttatcaacgggacatgtttctacactaagaacggacacagcctcggtattgcatttaccgacctcccagctaacctttaccccactgtggggctgcagacccctggcgagatcgtggacgccaattttgggcagcagccctttctgttcgatatcgaggattatatgagggagtggcgagcaaaagtgcagggcaccgttcactgctttcccatctcagccaggctaggggaatggcaggccgtgcttcaaaacatggtctcttcctatctggttcaccacggctactgcgcaacagcaactgcttttgccagaatgaccgagacccctattcaggaagagcaagccagtataaaaaaccggcaaaaaattcagaagctggtgctcgagggacgggttggcgaggcaatcgaaactacacagcggttttacccgggtctactggagcataatcctaacttgctttttatgcttaaatgtcgccagttcgttgaaatggtgaacggtacggattcagaggttagaagcctgtcatctaggtctcctaagtctcaagatagttacccgggttcaccctctctttcccccaggcatggtccatcatccagtcatatgcataacaccggggcagactccccatcttgctctaatggagttgcgtcaactaaatcgaagcaaaaccattcgaaataccccgcaccttcctccagttcatcctcaagctcttcttcaagtagctctagcccctcctcagtcaactattctgaaagcaacagtaccgatagtaccaagagccagcaccatagttccacatcaaatcaggaaacctcaaatccctggctgcagctggagcgtcgccctaaccaggctgcccctaccacccctccaggcccaaccccaacctccacgccccctcactcagattcggaaatggagatggaagccgaacattatccaaacggagtgctgggatccatgtctacccgcatagtgaatggcgcatataagcacgaggatctacagacagacgaaagcagcatggatgacaggcaccctcggagacagctatgcggaggcaaccaggccgcaactgagcgcataatcctgtttggacgcgaactgcaagcactttcagaacagctgggaagggagtacggaaaaaacctggctcatactgaaatgctgcaggacgcctttagtctcttagcatactccgatccttggagttgtcctgtcggacagcagctagatcccatccagagggagccggtgtgcgccgctctgaactcagctattctcgagtctcaaaacctgccaaagcagccccctcttatgctcgctctcgggcaggccagcgaatgcttgcgcctgatggcccgtgctggtctgggcagctgttcatttgctagggtggacgactacctgcattag

SEQ ID NO: 273961 - DNA, 2262 bp, Artificial Sequence
  derived and/or modified sequence
gacacaatagtagctccctccaagatggcggcagcgacggcagacccgggagctgggaacccgcagcctggggactcctccggcgggggcgctgggggcgggctgccgtcccctggggagcaggagctgagccggcgcttgcagcgcctgtatcccgcggtcaaccagcaagagactccgctgccgcgctcctggagccccaaggacaaatacaactacattggtctctcccagggcaacctccgcgtccactacaaagttacatgggaataggactctcggctcaaggcgtcaacatgaacagacttcctggttgggacaaacattcctatggttaccatggtgatgatgggcattcgttctgctcctcggggactggccagccctatggtcccacattcaccacaggagacgtgatcggctgctgtgtcaacctcatcaatggcacctgcttctacaccaagaatggccacagccttggtatagccttcacagacctcccggccaacctctaccccaccgtaggcctgcagacacctggggagattgtggacgccaactttgggcagcagcccttcctgtttgacattgaggactacatgcgggagtggcgtgccaaggtccagggcacggtccactgcttccccatcagtgcccggcttggcgagtggcaggcagtgctgcagaacatggtttcatcttacctcgtgcatcatgggtattgtgccacagccacggcttttgctcgaatgactgaaaccccgattcaggaagaacaggcgtccataaagaacagacaaaagatccagaagctggtgctggagggccgtgtgggcgaggccatcgagaccacccagcgcttctacccagggctgctggagcacaaccccaacctcctcttcatgctcaagtgccggcagtttgtggagatggtgaatgggacggacagtgaggtccgaagtttgagctcccgaagccccaagtcccaggacagctaccctggctcccccagcctcagtccccgacatggccccagtagttcccacatgcacaacacaggagcagacagtcccagctgtagcaatggcgtcgcgtccaccaagagcaaacagaaccacagtaaataccctgcacccagctcctcatcctcgtcctcctcctcctcctcgtcctcttccccatcctccgtcaattactccgagtccaactcaacagactccaccaagtcccagcaccacagcagtaccagtaaccaggagaccagcaacccatggctacagcttgaaaggaggcccaaccaggctgctccaaccacaccccctgggccaactcccacctcaacccctccccacagcgacagtgagatggagatggaggcagagcactaccccaacggtgtgctaggaagcatgtccacacgcattgttaatggtgcctacaagcatgaggacctgcagacggatgagtccagcatggatgacaggcatcctcggcggcagctctgcgggggcaaccaggctgccacagaaaggatcattctgtttggccgcgagttgcaggcattgagtgagcagttgggccgggagtacggcaagaatttggcccacacagagatgctgcaggatgccttcagcctgctggcatactcagacccctggagctgcccagttggccagcagcttgaccccatccagagggaacctgtgtgtgctgccctcaacagcgccattttagagtcccagaacctgccaaagcagccccctctgatgctcgccctgggccaggcatctgagtgtctccggctcatggcccgagcaggcctgggttcttgctcctttgccagagttgatgactacttgcactagctgactgtgctggctggctctggctggccctccactggccccagggctggagctgccctgccctccataggcaactggtgcagggactgggaaaccatagacagagtccactcctcctgcctggcctttccccctctccctttccttccttccttcctttctctgcccaccaccccgctcagtctctctctctctccccttcacgtgcagcggcctgtaacacagtattggctggttactctcatgtagcgccttctattttgaaaggggggttttgttttgaggaggggttggggtttttaaatttttttctcctgactgagccaccagtatttatctctggagagtttgtgctgagctggtttctgctaatttagtgatgaagcctatccaagtt

SEQ ID NO: 273962 - DNA, 1248 bp, Artificial Sequence
  derived and/or modified sequence
gacacaatagtagctccctccaagatggcggcagcgacggcagacccgggagctgggaacccgcagcctggggactcctccggcgggggcgctgggggcgggctgccgtcccctggggagcaggagctgagccggcgcttgcagcgcctgtatcccgcggtcaaccagcaagagactccgctgccgcgctcctggagccccaaggacaaatacaactacattggtctctcccagggcaacctccgcgtccactacaaaggtcatggcaaaaatcacaaagatgcggcctcagtgcgtgccacccaccccatacctgctgcctgtggcatttattactttgaagtgaagattgtcagcaaaggaagagatgggttgggacaaacattcctatggttaccatggtgatgatgggcattcgttctgctcctcggggactggccagccctatggtcccacattcaccacaggagacgtgatcggctgctgtgtcaacctcatcaatggcacctgcttctacaccaagaatggccacagccttggtatagccttcacagacctcccggccaacctctaccccaccgtaggcctgcagacacctggggagattgtggacgccaactttgggcagcagcccttcctgtttgacattgaggactacatgcgggagtggcgtgccaaggtccagggcacggtccactgcttccccatcagtgcccggcttggcgagtggcaggcagtgctgcagaacatggtttcatcttacctcgtgcatcatgggtattgtgccacagccacggcttttgctcgaatgactgaaaccccgattcaggaagaacaggcgtccataaagaacagacaaagtaaggtttattctactttcccctttcccttcctcacctgtccctaactctgctctctggctcatgtcaaccctggttaacctgtcaggagtccattcagctctggtcctcatgaccagcttgcagctcgaggccatgttcctgtcccaccttcaagatggcactgcccagatggacagttggcaggatggagacgtctcagggcagcctccctaatgcacattctgaaggctgggcgcaggccaggccctggcatggctggttccattcctccatttcctccctgcttgtttccttccccctgaatcctggattcctctcaacctcctgttcatggtcttccaggaaggctgtttgcctgccttagtagttctgcttattcctagcc

SEQ ID NO: 273963 - DNA, 1602 bp, Artificial Sequence
  derived and/or modified sequence
atgggcatcggcctgagcgcccagggcgtgaacatgaacagactgcccggctgggacaagcacagctacggctaccacggcgacgacggccacagcttctgcagcagcggcaccggccagccctacggccccaccttcaccaccggcgacgtgatcggctgctgcgtgaacctgatcaacggcacctgcttctacaccaagaacggccacagcctgggcatcgccttcaccgacctgcccgccaacctgtaccccaccgtgggcctgcagacccccggcgagatcgtggacgccaacttcggccagcagcccttcctgttcgacatcgaggactacatgagagagtggagagccaaggtgcagggcaccgtgcactgcttccccatcagcgccagactgggcgagtggcaggccgtgctgcagaacatggtgagcagctacctggtgcaccacggctactgcgccaccgccaccgccttcgccagaatgaccgagacccccatccaggaggagcaggccagcatcaagaacagacagaagatccagaagctggtgctggagggcagagtgggcgaggccatcgagaccacccagagattctaccccggcctgctggagcacaaccccaacctgctgttcatgctgaagtgcagacagttcgtggagatggtgaacggcaccgacagcgaggtgagaagcctgagcagcagaagccccaagagccaggacagctaccccggcagccccagcctgagccccagacacggccccagcagcagccacatgcacaacaccggcgccgacagccccagctgcagcaacggcgtggccagcaccaagagcaagcagaaccacagcaagtaccccgcccccagcagcagcagcagcagcagcagcagcagcagcagcagcagccccagcagcgtgaactacagcgagagcaacagcaccgacagcaccaagagccagcaccacagcagcaccagcaaccaggagaccagcaacccctggctgcagctggagagaagacccaaccaggccgcccccaccaccccccccggccccacccccaccagcacccccccccacagcgacagcgagatggagatggaggccgagcactaccccaacggcgtgctgggcagcatgagcaccagaatcgtgaacggcgcctacaagcacgaggacctgcagaccgacgagagcagcatggacgacagacaccccagaagacagctgtgcggcggcaaccaggccgccaccgagagaatcatcctgttcggcagagagctgcaggccctgagcgagcagctgggcagagagtacggcaagaacctggcccacaccgagatgctgcaggacgccttcagcctgctggcctacagcgacccctggagctgccccgtgggccagcagctggaccccatccagagagagcccgtgtgcgccgccctgaacagcgccatcctggagagccagaacctgcccaagcagccccccctgatgctggccctgggccaggccagcgagtgcctgagactgatggccagagccggcctgggcagctgcagcttcgccagagtggacgactacctgcactag

SEQ ID NO: 273964 - protein, 179 aa, Artificial Sequence
  derived and/or modified sequence
MGWDKHSYGYHGDDGHSFCSSGTGQPYGPTFTTGDVIGCCVNLINGTCFYTKNGHSLGIAFTDLPANLYPTVGLQTPGEIVDANFGQQPFLFDIEDYMREWRAKVQGTVHCFPISARLGEWQAVLQNMVSSYLVHHGYCATATAFARMTETPIQEEQASIKNRQSKVYSTFPFPFLTCP

SEQ ID NO: 273965 - DNA, 540 bp, Artificial Sequence
  derived and/or modified sequence
atgggatgggacaagcactcctacggttatcatggggacgatggccattctttttgcagcagtgggaccggacagccatacggccccacctttacaactggagacgtcattggttgctgtgtgaatttgatcaatgggacgtgtttttataccaagaacggtcattcactgggaattgccttcacggatttgcctgccaacttgtatcctactgtggggctgcaaaccccaggcgaaatcgtagacgcgaacttcggccagcaacctttcctgtttgatatcgaagattatatgcgcgagtggcgggccaaagtgcaaggcaccgtgcattgcttcccaatcagtgcccgcctcggagaatggcaggccgtgctgcagaacatggtgagttcctaccttgttcaccatgggtactgtgccactgccacagccttcgcaaggatgacagagacacccatccaggaggaacaggcatctatcaaaaatcgccaaagtaaggtttactctacctttcccttcccgttcctcacctgcccttag

SEQ ID NO: 273966 - DNA, 1785 bp, Artificial Sequence
  derived and/or modified sequence
atggctgccgcaactgcagaccctggggccggcaatccgcagcccggcgattcaagtggagggggggccggcggtggattgccgtcccctggggagcaggaactgtctcgccggctgcagaggttatacccggcagttaatcagcaggaaacccctctgccacggtcctggtcacccaaagacaaatacaattacattggacttagccagggtaacctgcgtgttcattacaagggacacggaaagaatcataaagacgctgcctccgtacgagcaacccaccccatccctgcggcatgcggcatctattactttgaggttaagatagttagcaaaggcagagacggctatatgggcattgggctctccgctcaaggggtcaatatgaataggctacccggtatcgccttcaccgacttaccggccaatctttaccccacagtgggattacaaactcctggagagattgtggatgcgaacttcggccagcagccctttctgttcgacatcgaagactatatgagggaatggcgggcaaaggtccagggaactgttcattgtttcccgattagtgccaggttgggagagtggcaagccgtgcttcagaacatggtgtcttcatatctagtgcatcatggttactgcgcaaccgccaccgcatttgccagaatgaccgagacaccaatacaggaggaacaggcctctattaagaatcggcaaaaaatccagaagctggttctggaaggccgggtcggagaggctatagaaaccacacaaagattttatcccggattattggaacacaacccaaacctgctgttcatgttaaagtgcaggcagtttgtagagatggtgaacgggaccgattcggaggtacggtctcttagctcaaggtcccccaaatcacaggactcgtatcccggatctccctccctgagtcctaggcacggcccttcttcatctcacatgcataacactggcgcagattctccttcctgtagcaatggagtggcctcaaccaaaagcaaacagaaccatagcaagtatcccgcaccgtccagctccagctcatcttcctcttcttcttcgtcgtcatccccgagctccgtgaattattccgagtctaattcaacagacagcaccaaaagccagcatcatagcagcacttcaaatcaggaaacctcgaatccctggcttcagctcgagcggaggccaaaccaggctgcaccaacaaccccaccaggtccgactcctacctctacaccaccacattccgattctgagatggagatggaagccgagcactatcccaacggcgtgctcggttccatgtcgacgagaatcgtgaacggcgcctataagcacgaggacctacagacagacgagagtagtatggatgacagacatccacgtcggcaattgtgtggcggtaatcaggctgctacagagcggattatcttgttcgggcgcgaactccaggccctgagcgaacagctgggtcgagagtacgggaaaaatcttgcccacacagaaatgctgcaggacgcattcagcttactcgcctacagtgacccatggagttgcccagtcggacaacagttggatccaatccagcgggagcctgtctgtgccgctctgaactcagctatactcgagtcccagaacctaccaaaacaacccccactgatgttggctctgggtcaggccagtgaatgtcttagattgatggcccgcgcaggattgggatcttgtagtttcgctcgagtagatgattatctccattag

SEQ ID NO: 273967 - DNA, 540 bp, Artificial Sequence
  derived and/or modified sequence
atgggctgggacaagcacagctatggctaccatggagatgatggccacagcttctgcagcagcggcaccggccagccctacggccccaccttcaccactggagatgtgattggctgctgcgtgaacctgatcaatggcacctgcttctacaccaagaatggccacagcctgggcatcgccttcacagacctgcctgccaacctgtaccccaccgtgggcctgcagaccccaggagagatcgtggatgccaactttggccagcagcccttcctgtttgatattgaggactacatgagggagtggagggccaaggtgcagggcaccgtgcactgcttccccatcagcgcccggctgggggagtggcaggccgtgctgcagaacatggtgtcctcctacctggtgcaccacggctactgtgccacagccacagcctttgccaggatgacagagacccccatccaggaggagcaggccagcatcaagaaccggcagagcaaggtgtacagcaccttccccttccccttcctgacctgcccctag

SEQ ID NO: 273968 - DNA, 1785 bp, Artificial Sequence
  derived and/or modified sequence
atggctgctgccacagctgaccccggggccggcaacccccagcccggggacagcagcggcggcggggccggcggcggcctgcccagccctggagagcaggagctgagccggcggctgcagaggctgtacccagctgtgaaccagcaggagacccccctgcccaggtcctggagccccaaggacaagtacaactacatcggcctgagccagggcaacctgcgggtgcactacaagggccacggcaagaaccacaaggatgctgcctctgtgcgggccacccaccccatcccagctgcctgtggcatctactactttgaggtgaagatcgtgtccaagggcagagatggctacatgggcatcggcctgagcgcccagggcgtgaacatgaaccggctgcccggcatcgccttcacagacctgcctgccaacctgtaccccaccgtgggcctgcagaccccaggagagatcgtggatgccaactttggccagcagcccttcctgtttgatattgaggactacatgagggagtggagggccaaggtgcagggcaccgtgcactgcttccccatcagcgcccggctgggggagtggcaggccgtgctgcagaacatggtgtcctcctacctggtgcaccacggctactgtgccacagccacagcctttgccaggatgacagagacccccatccaggaggagcaggccagcatcaagaaccggcagaagatccagaagctggtgctggagggccgggtgggggaggccatcgagaccacccagcgcttctacccaggcctgctggagcacaaccccaacctgctcttcatgctgaagtgccggcagtttgtggagatggtgaatggaacagacagcgaggtgcgcagcctgagcagccgcagccccaagagccaggacagctacccaggcagccccagcctgagccccaggcatggccccagcagcagccacatgcacaacacaggagctgacagccccagctgcagcaatggagtggccagcaccaagagcaagcagaaccacagcaagtacccagcccccagcagcagcagcagcagcagcagcagcagcagcagcagcagccccagctctgtgaactacagcgagagcaacagcacagacagcaccaagagccagcaccacagcagcaccagcaaccaggagaccagcaacccctggctgcagctggagcggcggcccaaccaggccgcccccaccaccccacctggccccacccccaccagcaccccaccccacagcgacagcgagatggagatggaggccgagcactaccccaacggggtgctgggctccatgagcacccgcatcgtgaatggagcctacaagcatgaggacctgcagacagatgagagctccatggatgacagacacccccggcggcagctgtgtggcggcaaccaggccgccacagagcgcatcatcctgtttggccgggagctgcaggccctgtctgagcagctgggccgggagtatggcaagaacctggcccacacagagatgctgcaggatgccttcagcctgctggcctacagcgacccctggagctgccctgtgggccagcagctggaccccatccagcgggagcctgtgtgtgccgccctgaacagcgccatcctggagagccagaacctgcccaagcagccccccctgatgctggccctgggccaggcctctgaatgtctgcggctgatggcccgggccggcctgggcagctgcagctttgcccgggtggatgactacctgcactag

SEQ ID NO: 273969 - DNA, 540 bp, Artificial Sequence
  derived and/or modified sequence
atgggctgggacaagcacagctacggctaccacggcgacgacggccactccttttgttcctccgggaccggacagccctacggcccgaccttcacgaccggcgatgtgattggctgttgtgtcaacctcatcaacggaacctgtttttatacaaagaatgggcattcgctcggcatagccttcactgatctccccgccaacctctacccaactgttgggctccagaccccaggggaaatcgtggacgccaactttggccagcaaccatttctgttcgatatagaggattatatgagggagtggcgcgctaaggtccagggcacagtccactgtttcccgatatctgcacgtctgggcgaatggcaagcagttcttcagaacatggtaagctcctacctggttcaccatgggtattgcgccaccgctacagctttcgctcggatgaccgaaacccccattcaggaagagcaggcgagtatcaaaaatcgtcagagcaaggtgtactcgacctttccatttccttttttgacttgtccttag

SEQ ID NO: 273970 - DNA, 1785 bp, Artificial Sequence
  derived and/or modified sequence
atggccgccgccaccgccgaccccggcgccggcaacccccagcccggagattcttcgggggggggtgccggaggagggttgccctcacctggggagcaggaattaagtagacggttacagcggctatacccagccgttaatcagcaagaaacacccctccctcgcagttggagtccgaaagacaagtataactacatcggactttcacaaggcaacctgcgtgtccattataaaggccatggaaagaaccataaggatgccgcgtccgtgcgagccacccaccccattccagcagcctgcgggatttattactttgaggtgaaaattgtgagcaagggaagagacggctacatggggatcggcttgtcggcacagggcgtgaacatgaatagactcccggggattgcttttacggatctcccagcgaacctgtatccgactgtcggactgcagacaccgggcgaaatcgtggacgcaaacttcggacagcagcccttcctattcgatatagaagactatatgagagagtggcgcgccaaggtacagggcaccgtgcactgttttcctatatcagcacgcctgggagagtggcaggccgtactgcagaacatggtctcttcatacttggtgcaccacggttactgtgccacagccacagccttcgcccgcatgaccgagacacccatacaggaggagcaggcctctatcaaaaataggcagaaaatccagaagttagttttggaaggaagggtaggcgaggccatcgagaccacccagcgcttttaccctgggttgttggaacacaacccaaacctgctgtttatgctgaagtgtcgtcaatttgtggaaatggtcaatggaacggatagcgaggtccgcagtttgtcatcaagatcccctaagtcccaggactcgtatcctgggtcacccagccttagtccccgacatggcccgtccagctctcacatgcataataccggggccgacagccccagctgcagcaacggcgtggcttccaccaagtcaaagcaaaatcacagcaaatatcccgcgccaagctcttcatcatcctcttcgtcctccagttcatcttcctcaccatcgtccgttaactattcagagtcaaattctaccgacagcacaaagtctcaacatcactctagcaccagcaatcaggagaccagcaacccttggttgcaactcgagcgacggcccaatcaggctgctccaacgacacctcccgggcccacacccacttcaacccccccacacagtgactctgaaatggaaatggaagctgagcactaccccaatggcgtgcttggctctatgagcacccgtatcgttaatggagcttacaagcatgaagacctccagaccgatgagtcctctatggacgaccggcacccaaggagacagttgtgcggaggtaatcaggctgcaaccgagcgaataattttattcggccgggaattacaggcactttcagagcaactgggacgggaatatggtaagaatttggcacacactgagatgttgcaagatgccttcagtctgttggcctattctgacccttggtcctgccccgtgggacagcaactggaccccatacagagagagcccgtgtgcgcggcgttgaactcagctatcctggagtcccagaatctgccaaaacagccaccgttgatgctggcattaggacaggcaagcgagtgcttgcgtttaatggctagggcgggtttgggcagctgttcatttgcaagagtcgacgactacctgcactag

SEQ ID NO: 273971 - DNA, 540 bp, Artificial Sequence
  derived and/or modified sequence
atgggttgggataagcattcttatggataccatggggacgatggccattccttctgctcttctgggacagggcagccctacgggcctaccttcactaccggggacgttatcggctgctgcgtgaatctgatcaacggcacctgcttctacactaagaacggccacagtttgggaattgcttttactgatcttccggcaaatctgtaccctacggtgggcttgcagacaccaggcgagatcgtagacgcaaattttggccagcagccttttctctttgatattgaagactatatgcgcgagtggcgagccaaggtgcaggggactgtgcactgctttccaatttcagccagattgggggagtggcaggctgtgctgcagaatatggtatctagttatctcgtgcaccatgggtactgtgccaccgctaccgccttcgcccgaatgacagaaacgccaatccaggaggagcaggcctccattaaaaatagacagtccaaggtgtactccacattcccttttccgttcctaacctgtccttag

SEQ ID NO: 273972 - DNA, 1785 bp, Artificial Sequence
  derived and/or modified sequence
atggccgctgctaccgctgaccccggagccggaaacccacagcccggtgacagttctggaggaggcgctggcggtggcctgcccagcccgggagaacaagaactcagtcgtcgcctgcagaggctctatccggctgttaatcagcaggagacacctctcccgaggtcttggagtcccaaagacaaatacaactacatcgggctgtcccaaggcaacctgcgggtccattataagggtcatggaaagaatcataaggacgccgcttctgtgagagcaacacaccctattcccgcagcctgtggcatctattattttgaagtgaagattgtatctaagggtagagacggctacatggggataggtttatccgctcagggtgttaacatgaatagacttcccggtatcgcgttcaccgaccttcctgccaacctgtaccccactgtaggccttcagacaccgggtgaaatagtggacgcgaattttggccagcaaccctttctgttcgatatagaggactacatgcgtgaatggcgtgcaaaggtgcagggcaccgtccactgtttccctatctcagcccgtttaggggagtggcaggcagtgcttcagaacatggtttctagctacttagtgcaccacggctactgcgcgacagccaccgccttcgctaggatgaccgagacgcccattcaggaggagcaagcatccataaagaatcgccaaaagattcagaagctcgttctggaaggaagggtgggagaggccatcgagaccacccagagattctaccctggcctcctggagcacaaccctaacctgctgttcatgttgaagtgccggcagttcgtcgagatggtcaatggtacggattccgaggtgaggagtctctcatcacgaagtccaaaatctcaggactcctatcctggttcgcctagtctgagtcctcggcacggcccatcatcgagtcatatgcataacactggcgctgactctccttcctgctcaaacggggtggcatcgaccaaaagcaagcaaaatcactcgaagtaccccgctccatcctcctcctctagctcctccagcagcagttcttcatcctcccccagctcagtgaattacagtgaatccaattcaactgacagcactaagagccagcaccactcctccacgtcaaatcaggaaacatctaacccatggctccagctcgagagacgtcctaaccaagccgctcctaccacgccgccagggcctacgccgacgtccacccctccacatagtgattctgaaatggagatggaggctgagcactacccgaatggagttctgggatcaatgtcgaccagaatcgttaacggggcttacaagcatgaggacctacagactgacgagagcagtatggatgaccggcatcctagaaggcagttatgtggcggaaaccaggctgcaacagaaaggatcatcctattcgggagagaacttcaggctctctctgagcaactgggtcgagagtacggaaagaatcttgctcacacagagatgttacaggacgcttttagtttgctggcgtattccgacccctggagctgccctgtgggacaacagctggacccaatccagcgggagccagtgtgcgccgcactgaatagcgccattctggagtcgcagaacttgcccaaacagcccccactgatgcttgcccttggacaggcctccgagtgcctgcgcctcatggcccgagcaggtctgggatcatgctctttcgcaagagttgatgactatcttcactag

SEQ ID NO: 273973 - DNA, 2232 bp, Artificial Sequence
  derived and/or modified sequence
gacacaatagtagctccctccaagatggcggcagcgacggcagacccgggagctgggaacccgcagcctggggactcctccggcgggggcgctgggggcgggctgccgtcccctggggagcaggagctgagccggcgcttgcagcgcctgtatcccgcggtcaaccagcaagagactccgctgccgcgctcctggagccccaaggacaaatacaactacattggtctctcccagggcaacctccgcgtccactacaaaggtcatggcaaaaatcacaaagatgcggcctcagtgcgtgccacccaccccatacctgctgcctgtggcatttattactttgaagtgaagattgtcagcaaaggaagagatggttacatgggaataggactctcggctcaaggcgtcaacatgaacagacttcctggtatagccttcacagacctcccggccaacctctaccccaccgtaggcctgcagacacctggggagattgtggacgccaactttgggcagcagcccttcctgtttgacattgaggactacatgcgggagtggcgtgccaaggtccagggcacggtccactgcttccccatcagtgcccggcttggcgagtggcaggcagtgctgcagaacatggtttcatcttacctcgtgcatcatgggtattgtgccacagccacggcttttgctcgaatgactgaaaccccgattcaggaagaacaggcgtccataaagaacagacaaaagatccagaagctggtgctggagggccgtgtgggcgaggccatcgagaccacccagcgcttctacccagggctgctggagcacaaccccaacctcctcttcatgctcaagtgccggcagtttgtggagatggtgaatgggacggacagtgaggtccgaagtttgagctcccgaagccccaagtcccaggacagctaccctggctcccccagcctcagtccccgacatggccccagtagttcccacatgcacaacacaggagcagacagtcccagctgtagcaatggcgtcgcgtccaccaagagcaaacagaaccacagtaaataccctgcacccagctcctcatcctcgtcctcctcctcctcctcgtcctcttccccatcctccgtcaattactccgagtccaactcaacagactccaccaagtcccagcaccacagcagtaccagtaaccaggagaccagcaacccatggctacagcttgaaaggaggcccaaccaggctgctccaaccacaccccctgggccaactcccacctcaacccctccccacagcgacagtgagatggagatggaggcagagcactaccccaacggtgtgctaggaagcatgtccacacgcattgttaatggtgcctacaagcatgaggacctgcagacggatgagtccagcatggatgacaggcatcctcggcggcagctctgcgggggcaaccaggctgccacagaaaggatcattctgtttggccgcgagttgcaggcattgagtgagcagttgggccgggagtacggcaagaatttggcccacacagagatgctgcaggatgccttcagcctgctggcatactcagacccctggagctgcccagttggccagcagcttgaccccatccagagggaacctgtgtgtgctgccctcaacagcgccattttagagtcccagaacctgccaaagcagccccctctgatgctcgccctgggccaggcatctgagtgtctccggctcatggcccgagcaggcctgggttcttgctcctttgccagagttgatgactacttgcactagctgactgtgctggctggctctggctggccctccactggccccagggctggagctgccctgccctccataggcaactggtgcagggactgggaaaccatagacagagtccactcctcctgcctggcctttccccctctccctttccttccttccttcctttctctgcccaccaccccgctcagtctctctctctctccccttcacgtgcagcggcctgtaacacagtattggctggttactctcatgtagcgccttctattttgaaaggggggttttgttttgaggaggggttggggtttttaaatttttttctcctgactgagccaccagtatttatctctggagagtttgtgctgagctggtttctgctaatttagtgatgaagcctatccaagttggtgatagcttattattttcataagt

SEQ ID NO: 273974 - DNA, 540 bp, Artificial Sequence
  derived and/or modified sequence
atgggctgggacaagcacagctacggctaccacggcgacgacggccacagcttctgcagcagcggcaccggccagccctacggccccaccttcaccaccggcgacgtgatcggctgctgcgtgaacctgatcaacggcacctgcttctacaccaagaacggccacagcctgggcatcgccttcaccgacctgcccgccaacctgtaccccaccgtgggcctgcagacccccggcgagatcgtggacgccaacttcggccagcagcccttcctgttcgacatcgaggactacatgagagagtggagagccaaggtgcagggcaccgtgcactgcttccccatcagcgccagactgggcgagtggcaggccgtgctgcagaacatggtgagcagctacctggtgcaccacggctactgcgccaccgccaccgccttcgccagaatgaccgagacccccatccaggaggagcaggccagcatcaagaacagacagagcaaggtgtacagcaccttccccttccccttcctgacctgcccctag

SEQ ID NO: 273975 - DNA, 1785 bp, Artificial Sequence
  derived and/or modified sequence
atggccgccgccaccgccgaccccggcgccggcaacccccagcccggcgacagcagcggcggcggcgccggcggcggcctgcccagccccggcgagcaggagctgagcagaagactgcagagactgtaccccgccgtgaaccagcaggagacccccctgcccagaagctggagccccaaggacaagtacaactacatcggcctgagccagggcaacctgagagtgcactacaagggccacggcaagaaccacaaggacgccgccagcgtgagagccacccaccccatccccgccgcctgcggcatctactacttcgaggtgaagatcgtgagcaagggcagagacggctacatgggcatcggcctgagcgcccagggcgtgaacatgaacagactgcccggcatcgccttcaccgacctgcccgccaacctgtaccccaccgtgggcctgcagacccccggcgagatcgtggacgccaacttcggccagcagcccttcctgttcgacatcgaggactacatgagagagtggagagccaaggtgcagggcaccgtgcactgcttccccatcagcgccagactgggcgagtggcaggccgtgctgcagaacatggtgagcagctacctggtgcaccacggctactgcgccaccgccaccgccttcgccagaatgaccgagacccccatccaggaggagcaggccagcatcaagaacagacagaagatccagaagctggtgctggagggcagagtgggcgaggccatcgagaccacccagagattctaccccggcctgctggagcacaaccccaacctgctgttcatgctgaagtgcagacagttcgtggagatggtgaacggcaccgacagcgaggtgagaagcctgagcagcagaagccccaagagccaggacagctaccccggcagccccagcctgagccccagacacggccccagcagcagccacatgcacaacaccggcgccgacagccccagctgcagcaacggcgtggccagcaccaagagcaagcagaaccacagcaagtaccccgcccccagcagcagcagcagcagcagcagcagcagcagcagcagcagccccagcagcgtgaactacagcgagagcaacagcaccgacagcaccaagagccagcaccacagcagcaccagcaaccaggagaccagcaacccctggctgcagctggagagaagacccaaccaggccgcccccaccaccccccccggccccacccccaccagcacccccccccacagcgacagcgagatggagatggaggccgagcactaccccaacggcgtgctgggcagcatgagcaccagaatcgtgaacggcgcctacaagcacgaggacctgcagaccgacgagagcagcatggacgacagacaccccagaagacagctgtgcggcggcaaccaggccgccaccgagagaatcatcctgttcggcagagagctgcaggccctgagcgagcagctgggcagagagtacggcaagaacctggcccacaccgagatgctgcaggacgccttcagcctgctggcctacagcgacccctggagctgccccgtgggccagcagctggaccccatccagagagagcccgtgtgcgccgccctgaacagcgccatcctggagagccagaacctgcccaagcagccccccctgatgctggccctgggccaggccagcgagtgcctgagactgatggccagagccggcctgggcagctgcagcttcgccagagtggacgactacctgcactag

SEQ ID NO: 273976 - protein, 124 aa, Artificial Sequence
  derived and/or modified sequence
MAVYTHTGYNDHYMYLNHGQQTIPNGLGMGGQHNYFGLWVDVDFGKGHSRAKPTCTTYNSPQLSAQENFQFDKMEVWAVGDPSEEQLAKGNKSILDADPEAQALLEISGHSRHSEGLREVPDDE

SEQ ID NO: 273977 - DNA, 5031 bp, Artificial Sequence
  derived and/or modified sequence
ctggcaacagggaaggggcggctctcgagaggagcccgtgggctgctggaccggaccggacagcaccaggaagcccggcaggagaattctgccagatatcaggacagatggggaacagcagaagccgtgtggggcggagcttttgttcacagtttcttcctgaggaacaggcagagattgatcaattgtttgatgctctgtcatcagataaaaacagcccgaatgtctcatccaaatccttctctctgaaggcactacagaaccacgtcggggaagctcttcccccagagatggtcaccaggctgtatgatggcatgcggagggtcgacctgacagggaaggcgaagggacccagtgagaacgtgtcccaggagcagttcacagcatccatgtcccacctgttgaaaggaaactccgaggagaagagtctcatgattatgaaaatgatttctgccacagaaggtcccgtgaaggccagagaagtccaaaagtttacagaggatctggttggctctgtggtgcacgtgctaagccacagacaggagctgagaggctggactgggaaggaagccccagggcccaacccccgggtgcaggtgctggctgctcagctgctctctgacatgaagctgcaagatggcaagagacttctggggccccagtggctggactatgactgtgaccgagctgtgatcgaggactgggtgttcagggtcccccatgtggccatattcctgagtgtggtcatttgcaagggctttctcatcctgtgctcgtctcttgatctgactaccctggtccctgagcgtcaagtggaccagggcaggggttttgagagcatcctggatgtcctctctgtcatgtacatcaacgcccagctgcctcgggagcagcggcaccgctggtgcctgctcttttcgtctgagctccatggacacagcttctcccagctctgtggccacatcactcaccggggaccctgtgtggctgtcctcgaggaccatgacaagcatgtgttcggtgggtttgcctcttgctcttgggaggtgaagcctcagtttcaaggggacaacagatgcttcctgttctccatctgccccagcatggctgtgtacacacacacgggctacaacgaccactacatgtacttgaaccatggacagcagacgatcccgaacggactgggtatgggggggcagcacaattactttgggctttgggtggatgttgattttgggaaaggacacagcagagccaagcccacgtgcaccacgtacaacagcccgcagctgtcggctcaggagaacttccagtttgataagatggaggtgtgggcggttggagacccctcagaggagcagttggccaagggcaacaagagcatcctggatgcggaccctgaggcccaggccctgctggagatcagtgggcattcgcgccacagcgaagggctccgggaagtcccggacgatgaatgaggagccgcctgagccttcctggagccaggacctggattcctctgggtagagggcaacgcctgcagcccctcttccctcccacatggtttaactgtaatagcgtaccgcacgggtcacagcctggtagtcccacatgtgccaagaagacgccctctgaagccatgtcctgactcatgggtggatctcccagaaatagatgttttttaagttttctttttttccctacagggtcaccctcaggatctctccaagaaatcttgtgtcaaattagtaactcagtcttatactttgttcttttttaccaacgaaatcctaagcagctgagacctttcagacccccgctggcattagggaattccgctggcattagggaattccgctggcattagggaattccgctggcattagggaattccgctggcattagggaattccgctggcattagggaattccgctggcattagggaattccgctggcattagggaattccgctggcattagggaattccgctggcattagcattgctgggatctcaacttctctattgaggagggggttcctcccgctggggttcatatggcctcactcaggccatccctgttagaaggtggtacctgatggtctgttctgacgggtgagggacagaggcatctggatgaaaatctcgacgctttctgggaacagcttccaatggcatgggagttctgtatttaaaagcatgaactgtgtataaaatggggaaatggaggcaggagactttgaggtaacatggtctggtggtggcatgagtcctcagaaggtatttgtaataaggttccacacccagctctctcagctgtttttaaatgaatgtgtgtgaggaacagatgggaaagttgggagatctgtctacagagaagcaaagttgtggttctcttgctaacttcaaggtgagggacattgggcaccctaagtttgggaacttggttgataaatacgtatatggtccattccataaatcagtggtgagtgactggcctgggttctagacctctgggaaccagcacctgagtcacagctgtctaggcctcggtgctggcctgggttctagatctctgggaaccagtgcctgagtcacagctgtcagtgcagccatttgcccagggctgctcccgagggggatgatgggaaattcagcagtgtagactgactttaaacaagctccggtgatcctgaaatgctgaagatcgtgtaggtgggttgtggggtcagcagagctgccatctgcccacgtctggaaaacaacacacggtgagtcaccggttggccatgagatctccccacttaaaggtgctgtgagcttgtctctaagatatatacctcttccttttgtcttttgctgtaagctttgaccttttgcagatctgatgaaaatacaacctcttattgtatagtttgccttgattataagccatagtaaatcgagctgttcgcatttttgcaggccttgcattttctactgggaggttcatcaaaccttccacttagcaatagccctgactcaggcagaatgcctcataaattagccttcgaaagaaaagtgcacgctcagacagtgtgtggaggggcaggagcgtgatgcagacaaggacttagtcatgactgattttccttagccagtttgtaatggcttatggggaacattgtgagcttcctacctgacatgttggcagaagtagaatattaggatcctcaagcatctctaccgtaagtccaaagaatttaggtccctattgtcactttgttttgcaatgttttttataaaaatgcaattaaatacctcactattaaactgccatgatgcctcagttaaaaaaaaaattaaatgtccgtcagtgtctgtgccttggtgaccattgattgctgcttctgcccaggccgctgcaaaggttaggactttgtccactcacatgctttccaccctgagcttgttctaaggagagtgcagatcacgaatgcacctgcttccaggcagtgcacttagagaaaggtcactggcccgggcttgggagcctgggggatgcagctctctctgtgggcttctcttggtgcacggttctgcctctggacactcaaacctttttagggcgtgtgcagggctggggccagtggacctgacagtaccttacctggctctgagaaactcgcaatcctagtttgcacaaatgaatagtttgttcttttgtgaaaccagaatgagaattcaggttctaaggactagaggtctccctacaaatgaagacttatcagggccctagaaagtgctaggaggaaggggttaaaaaaaaaatttgtccgcgttgcaaactattataaatgattgccacattgcaagctattattttctcccaccatattttttaattaaaaaaaagtctggggccgggtgcggtggctcacgcctgtaatcccagcactttgggaggccgaggtaggcggatcacctgaggtcggaagttcgagaccagcctgaccaacatggagaaaccccatctctactaaaaatacaaaattagctgggcatggtggcacatgcctgtaatctcagctactcaggaggctgaggtagtagaattgcttgaaccagggaggcagaggttgtggtgagccgagatcgtgccattgcactctagcctgggcaacaagagtgaaactccgtttcaagaaaaaaaaaaaggctgggtgtgatggctcacgcctgtaatcccagcattttgggagcttgaggcaggccgattgcttgagcccaggagttcaagaccagcctgggcaacatggcgaaaacccatctctacaaaaaaaaatacgaaaattaaccaggcatggtaacacatgcctgtggtcctagctacttgggaggctgaggtgtgaggatcatttaggcctggaaggttgaggctgctataagctgtgattgtgccactgcactccagcctgggcaacacagcaagaccctatgtttaaaaaaaattgtgtacctggtttagaaaaaaaagataaaaggatacaacttaaagtcagtcatcttcctgcctcttctccagctattttccctcctgacaggcaaaggcactgatgcaaaaatcactcaggtctcctccctgtgacttggtgcacacctgggcatcactgtcttttacacactgatgtgtccctcgctttcttttttaaagggaggtccgtaaccacccacctgcctccctcttgtctttatggactgcgtgatgtcccaccatatggatgctctcgggcctagcgttccaccgtctgcagctggggaacattttgtttgcagctaatcattgtcatgaatatcgtttatgtgtgccttgctgtgatggtgtctgtgggataaactcttagaattggaattgttggattgagaggtatatgccttttatttagatatagatgaattaaaaaaacctcttgagctcaatttatactcaatataccggggtgcctgtttgccatgttttcagcaaaactgtattaaaatatgtttttttaa

SEQ ID NO: 273978 - protein, 456 aa, Artificial Sequence
  derived and/or modified sequence
MGNSRSRVGRSFCSQFLPEEQAEIDQLFDALSSDKNSPNVSSKSFSLKALQNHVGEALPPEMVTRLYDGMRRVDLTGKAKGPSENVSQEQFTASMSHLLKGNSEEKSLMIMKMISATEGPVKAREVQKFTEDLVGSVVHVLSHRQELRGWTGKEAPGPNPRVQVLAAQLLSDMKLQDGKRLLGPQWLDYDCDRAVIEDWVFRVPHVAIFLSVVICKGFLILCSSLDLTTLVPERQVDQGRGFESILDVLSVMYINAQLPREQRHRWCLLFSSELHGHSFSQLCGHITHRGPCVAVLEDHDKHVFGGFASCSWEVKPQFQGDNRCFLFSICPSMAVYTHTGYNDHYMYLNHGQQTIPNGLGMGGQHNYFGLWVDVDFGKGHSRAKPTCTTYNSPQLSAQENFQFDKMEVWAVGDPSEEQLAKGNKSILDADPEAQALLEISGHSRHSEGLREVPDDE

SEQ ID NO: 273979 - protein, 429 aa, Artificial Sequence
  derived and/or modified sequence
MGLPSWTRRSRNHDVSGAPLPLECNHVGEALPPEMVTRLYDGMRRVDLTGKAKGPSENVSQEQFTASMSHLLKGNSEEKSLMIMKMISATEGPVKAREVQKFTEDLVGSVVHVLSHRQELRGWTGKEAPGPNPRVQVLAAQLLSDMKLQDGKRLLGPQWLDYDCDRAVIEDWVFRVPHVAIFLSVVICKGFLILCSSLDLTTLVPERQVDQGRGFESILDVLSVMYINAQLPREQRHRWCLLFSSELHGHSFSQLCGHITHRGPCVAVLEDHDKHVFGGFASCSWEVKPQFQGDNRCFLFSICPSMAVYTHTGYNDHYMYLNHGQQTIPNGLGMGGQHNYFGLWVDVDFGKGHSRAKPTCTTYNSPQLSAQENFQFDKMEVWAVGDPSEEQLAKGNKSILDADPEAQALLEISGHSRHSEGLREVPDDE

SEQ ID NO: 273980 - DNA, 1371 bp, Artificial Sequence
  derived and/or modified sequence
atgggcaacagcagaagcagagtgggcagaagcttctgcagccagttcctgcccgaggagcaggccgagatcgaccagctgttcgacgccctgagcagcgacaagaacagccccaacgtgagcagcaagagcttcagcctgaaggccctgcagaaccacgtgggcgaggccctgccccccgagatggtgaccagactgtacgacggcatgagaagagtggacctgaccggcaaggccaagggccccagcgagaacgtgagccaggagcagttcaccgccagcatgagccacctgctgaagggcaacagcgaggagaagagcctgatgatcatgaagatgatcagcgccaccgagggccccgtgaaggccagagaggtgcagaagttcaccgaggacctggtgggcagcgtggtgcacgtgctgagccacagacaggagctgagaggctggaccggcaaggaggcccccggccccaaccccagagtgcaggtgctggccgcccagctgctgagcgacatgaagctgcaggacggcaagagactgctgggcccccagtggctggactacgactgcgacagagccgtgatcgaggactgggtgttcagagtgccccacgtggccatcttcctgagcgtggtgatctgcaagggcttcctgatcctgtgcagcagcctggacctgaccaccctggtgcccgagagacaggtggaccagggcagaggcttcgagagcatcctggacgtgctgagcgtgatgtacatcaacgcccagctgcccagagagcagagacacagatggtgcctgctgttcagcagcgagctgcacggccacagcttcagccagctgtgcggccacatcacccacagaggcccctgcgtggccgtgctggaggaccacgacaagcacgtgttcggcggcttcgccagctgcagctgggaggtgaagccccagttccagggcgacaacagatgcttcctgttcagcatctgccccagcatggccgtgtacacccacaccggctacaacgaccactacatgtacctgaaccacggccagcagaccatccccaacggcctgggcatgggcggccagcacaactacttcggcctgtgggtggacgtggacttcggcaagggccacagcagagccaagcccacctgcaccacctacaacagcccccagctgagcgcccaggagaacttccagttcgacaagatggaggtgtgggccgtgggcgaccccagcgaggagcagctggccaagggcaacaagagcatcctggacgccgaccccgaggcccaggccctgctggagatcagcggccacagcagacacagcgagggcctgagagaggtgcccgacgacgagtag

SEQ ID NO: 273981 - DNA, 1290 bp, Artificial Sequence
  derived and/or modified sequence
atgggcctgcccagctggaccagaagaagcagaaaccacgacgtgagcggcgcccccctgcccctggagtgcaaccacgtgggcgaggccctgccccccgagatggtgaccagactgtacgacggcatgagaagagtggacctgaccggcaaggccaagggccccagcgagaacgtgagccaggagcagttcaccgccagcatgagccacctgctgaagggcaacagcgaggagaagagcctgatgatcatgaagatgatcagcgccaccgagggccccgtgaaggccagagaggtgcagaagttcaccgaggacctggtgggcagcgtggtgcacgtgctgagccacagacaggagctgagaggctggaccggcaaggaggcccccggccccaaccccagagtgcaggtgctggccgcccagctgctgagcgacatgaagctgcaggacggcaagagactgctgggcccccagtggctggactacgactgcgacagagccgtgatcgaggactgggtgttcagagtgccccacgtggccatcttcctgagcgtggtgatctgcaagggcttcctgatcctgtgcagcagcctggacctgaccaccctggtgcccgagagacaggtggaccagggcagaggcttcgagagcatcctggacgtgctgagcgtgatgtacatcaacgcccagctgcccagagagcagagacacagatggtgcctgctgttcagcagcgagctgcacggccacagcttcagccagctgtgcggccacatcacccacagaggcccctgcgtggccgtgctggaggaccacgacaagcacgtgttcggcggcttcgccagctgcagctgggaggtgaagccccagttccagggcgacaacagatgcttcctgttcagcatctgccccagcatggccgtgtacacccacaccggctacaacgaccactacatgtacctgaaccacggccagcagaccatccccaacggcctgggcatgggcggccagcacaactacttcggcctgtgggtggacgtggacttcggcaagggccacagcagagccaagcccacctgcaccacctacaacagcccccagctgagcgcccaggagaacttccagttcgacaagatggaggtgtgggccgtgggcgaccccagcgaggagcagctggccaagggcaacaagagcatcctggacgccgaccccgaggcccaggccctgctggagatcagcggccacagcagacacagcgagggcctgagagaggtgcccgacgacgagtag

SEQ ID NO: 273982 - DNA, 375 bp, Artificial Sequence
  derived and/or modified sequence
atggccgtgtacacccacaccggctacaacgaccactacatgtacctgaaccacggccagcagaccatccccaacggcctgggcatgggcggccagcacaactacttcggcctgtgggtggacgtggacttcggcaagggccacagcagagccaagcccacctgcaccacctacaacagcccccagctgagcgcccaggagaacttccagttcgacaagatggaggtgtgggccgtgggcgaccccagcgaggagcagctggccaagggcaacaagagcatcctggacgccgaccccgaggcccaggccctgctggagatcagcggccacagcagacacagcgagggcctgagagaggtgcccgacgacgagtag

SEQ ID NO: 273983 - DNA, 1371 bp, Artificial Sequence
  derived and/or modified sequence
atggggaattccagaagtcgcgtgggccgctccttctgttctcaattcttgccagaagagcaggccgaaatagaccagctattcgatgccctaagctccgacaaaaactcacccaacgtgtcgtccaaaagtttctctctgaaagccctccagaatcacgttggggaggccctaccccccgagatggtcacccgactatatgatggtatgcgtcgggtcgatttgacaggaaaggctaaaggaccttcagaaaacgtgtctcaggagcaatttacagcaagtatgagccacctgctgaaggggaactcagaggagaagtcactgatgatcatgaaaatgatttccgcaacagagggacccgttaaagctcgcgaggtgcagaaatttaccgaagacctggtggggtccgtagttcacgtgctttcacaccgtcaggaactgcgggggtggactggaaaagaggcacctggccccaaccccagggttcaggtactggcagcccaattgcttagcgatatgaagctccaggatggcaaaagactcctgggtccacagtggctggattatgactgcgaccgggcggtcatagaagattgggtgtttcgcgtgccacacgtcgccattttcttgagcgtcgtgatctgtaaggggttcttgatcctgtgtagctcccttgacctgacgactcttgtgcccgagcgtcaggtcgaccaaggaaggggttttgaatcaatcctcgacgttctaagcgtgatgtatatcaatgcacagcttccccgggagcagcggcacagatggtgtttgcttttttcgtccgaactgcacggacatagcttctcccagctctgcggccacatcacacaccgcggtccatgtgtcgccgtgctcgaggatcacgataagcacgtcttcggcggctttgcgagttgcagttgggaagtgaagccccaattccagggagacaacaggtgcttcttgttctcaatctgtccgagtatggcagtgtacactcacactggctataacgaccactatatgtacttgaaccatggacagcagaccattccaaacgggcttggcatgggcgggcagcacaactattttgggctgtgggtggatgttgacttcggtaagggccatagccgcgccaaaccgacttgtactacctataactcccctcagctcagcgcccaggagaactttcaattcgacaagatggaggtgtgggctgtaggtgatccttcagaggagcagctggccaaaggcaacaagtcaattttggatgccgatcccgaagcccaggctttactggaaataagcggacacagcaggcattccgaaggtctcagagaggtgccagacgatgaatag

SEQ ID NO: 273984 - DNA, 1290 bp, Artificial Sequence
  derived and/or modified sequence
atggggctaccgtcgtggactcggagatcaaggaaccatgatgtttcgggagctccactgcctctggaatgtaaccacgtgggggaggctcttccccctgagatggtgacacgactgtatgacggaatgcggcgcgtcgatctcactggaaaggccaagggaccttcagaaaatgtgtctcaggagcaatttaccgcctccatgtcccatttattgaaaggaaacagtgaggagaaatctttgatgataatgaaaatgattagcgctacagagggccctgtgaaagccagagaggtgcaaaagtttaccgaggacctcgtgggtagtgtggtccatgtccttagtcataggcaggaactgaggggctggacggggaaggaggctcctgggcccaaccctcgagtacaggtgctggctgcgcagctgctgtccgatatgaagctccaggacggaaagcggcttctcggcccccagtggctggactatgattgtgacagggccgttatcgaggactgggtatttagagtaccccatgtggcgatttttctatcagtggtgatctgcaaaggcttcctgattttgtgcagctcactggaccttaccacactggtccccgagaggcaagttgaccaggggagaggcttcgagtcaattctagacgttctgtcggttatgtatatcaatgcccaattgccaagggaacagcgccaccggtggtgcttgttgttctcttcagaactacacggccactcattctctcagctgtgcggccatattactcaccgcgggccatgcgtggccgtccttgaagatcacgataagcatgtgttcggcggctttgcgagttgtagctgggaggtcaaaccccagttccaaggtgacaacagatgcttcctcttttccatatgcccgagtatggctgtatacacacacaccggctacaacgaccactatatgtacctcaatcatgggcagcaaaccattccaaatggcctgggcatgggcgggcagcacaactacttcgggctgtgggtcgatgtggacttcggcaagggacatagcagagcgaaacccacatgcaccacctataattcccctcagctttcagcccaggaaaattttcagttcgacaagatggaggtttgggctgtgggagatccaagcgaggagcagctcgccaagggcaacaagagcatcctggacgcggatcccgaagctcaggcgctgctggaaatttctggccactctaggcactctgaaggccttcgagaggtacctgatgatgagtag

SEQ ID NO: 273985 - DNA, 375 bp, Artificial Sequence
  derived and/or modified sequence
atggcagtctacacgcatactggctataatgatcactacatgtacctgaaccacgggcagcaaactattcctaacgggctaggtatggggggacagcataattactttgggctgtgggtggatgtggatttcggcaaaggccactcccgggccaagccaacatgcacaacatataactctccacagttatcagcccaggagaattttcaatttgacaagatggaggtgtgggcggtgggagacccatccgaggaacagctagccaaagggaacaagagcattctcgatgcagaccctgaggcacaggctctcctggagatatcggggcattcccgccatagtgaaggccttagagaagtgccagacgatgaatag

SEQ ID NO: 273986 - DNA, 1371 bp, Artificial Sequence
  derived and/or modified sequence
atgggcaacagccgcagccgggtgggccgctccttctgcagccagttcctgcctgaggagcaggccgagattgaccagctgtttgatgccctgagcagtgacaagaacagccccaacgtgagcagcaagagcttcagcctgaaggccctgcagaaccacgtgggggaggccctgcccccagagatggtgacccggctgtatgatggcatgagaagagtggacctgaccgggaaggccaagggccccagtgaaaatgtgtcccaggagcagttcaccgcctccatgagccacctgctgaagggcaacagcgaggagaagagcctgatgatcatgaagatgatcagcgccacagagggccctgtgaaggcccgggaggtgcagaagttcacagaggacctggtgggctctgtggtgcacgtgctgagccaccggcaggagctgcggggctggacaggcaaggaggcccctggccccaacccccgggtgcaggtgctggccgcccagctgctgagtgacatgaagctgcaggacggcaagaggctgctgggcccccagtggctggactatgactgtgacagagctgtgattgaggactgggtgttccgggtgccccacgtggccatcttcctgtctgtggtgatctgcaagggcttcctgatcctgtgcagcagcctggacctgaccaccctggtgcctgagcggcaggtggaccagggccggggctttgagagcatcctggatgtgctgtctgtgatgtacatcaatgcccagctgccccgggagcagaggcaccgctggtgcctgctcttcagcagcgagctgcacggccacagcttcagccagctgtgtggccacatcacccaccggggcccctgtgtggccgtgctggaggaccatgacaagcacgtgtttggaggctttgccagctgctcctgggaggtgaagccccagttccagggcgacaaccgctgcttcctgttcagcatctgccccagcatggctgtgtacacccacacaggctacaatgaccactacatgtacctgaaccacggccagcagaccatccccaacggcctgggcatgggcggccagcacaactacttcggcctgtgggtggatgtggactttgggaagggccacagccgggccaagcccacctgcaccacctacaacagcccccagctgagcgcccaggagaacttccagtttgacaagatggaggtgtgggccgtgggggaccccagcgaggagcagctggccaagggcaacaagagcatcctggatgctgaccctgaggcccaggccctgctggagatcagcggccacagccgccacagcgagggcctgcgggaggtgcctgatgatgaatag

SEQ ID NO: 273987 - DNA, 1290 bp, Artificial Sequence
  derived and/or modified sequence
atgggcctgcccagctggacccggcgcagcagaaatcatgatgtgtctggggcccccctgcccctggagtgcaaccacgtgggggaggccctgcccccagagatggtgacccggctgtatgatggcatgagaagagtggacctgaccgggaaggccaagggccccagtgaaaatgtgtcccaggagcagttcaccgcctccatgagccacctgctgaagggcaacagcgaggagaagagcctgatgatcatgaagatgatcagcgccacagagggccctgtgaaggcccgggaggtgcagaagttcacagaggacctggtgggctctgtggtgcacgtgctgagccaccggcaggagctgcggggctggacaggcaaggaggcccctggccccaacccccgggtgcaggtgctggccgcccagctgctgagtgacatgaagctgcaggacggcaagaggctgctgggcccccagtggctggactatgactgtgacagagctgtgattgaggactgggtgttccgggtgccccacgtggccatcttcctgtctgtggtgatctgcaagggcttcctgatcctgtgcagcagcctggacctgaccaccctggtgcctgagcggcaggtggaccagggccggggctttgagagcatcctggatgtgctgtctgtgatgtacatcaatgcccagctgccccgggagcagaggcaccgctggtgcctgctcttcagcagcgagctgcacggccacagcttcagccagctgtgtggccacatcacccaccggggcccctgtgtggccgtgctggaggaccatgacaagcacgtgtttggaggctttgccagctgctcctgggaggtgaagccccagttccagggcgacaaccgctgcttcctgttcagcatctgccccagcatggctgtgtacacccacacaggctacaatgaccactacatgtacctgaaccacggccagcagaccatccccaacggcctgggcatgggcggccagcacaactacttcggcctgtgggtggatgtggactttgggaagggccacagccgggccaagcccacctgcaccacctacaacagcccccagctgagcgcccaggagaacttccagtttgacaagatggaggtgtgggccgtgggggaccccagcgaggagcagctggccaagggcaacaagagcatcctggatgctgaccctgaggcccaggccctgctggagatcagcggccacagccgccacagcgagggcctgcgggaggtgcctgatgatgaatag

SEQ ID NO: 273988 - DNA, 375 bp, Artificial Sequence
  derived and/or modified sequence
atggctgtgtacacccacacaggctacaatgaccactacatgtacctgaaccacggccagcagaccatccccaacggcctgggcatgggcggccagcacaactacttcggcctgtgggtggatgtggactttgggaagggccacagccgggccaagcccacctgcaccacctacaacagcccccagctgagcgcccaggagaacttccagtttgacaagatggaggtgtgggccgtgggggaccccagcgaggagcagctggccaagggcaacaagagcatcctggatgctgaccctgaggcccaggccctgctggagatcagcggccacagccgccacagcgagggcctgcgggaggtgcctgatgatgaatag

SEQ ID NO: 273989 - DNA, 1371 bp, Artificial Sequence
  derived and/or modified sequence
atgggcaacagccggagccgggtgggccggagcttctgcagccagttcctaccagaggagcaggcggaaatcgatcaactcttcgacgcgctgtcatcagataagaattctcccaacgtgagtagcaagagtttcagtctgaaggccttgcaaaatcacgtcggagaggcgctgcctcccgagatggtgacgaggctctacgacggaatgcgaagagtggacctgacgggcaaggccaaagggccttcagagaacgtgagccaagaacaatttaccgctagtatgagccacttgctcaaggggaacagtgaggagaagtctttgatgataatgaagatgatctcagctaccgagggcccagtcaaagcacgggaagtccaaaagtttaccgaagacttggtgggatccgttgtccatgttcttagccacagacaagagctgcggggatggaccgggaaggaggcaccaggcccaaacccaagagtgcaagtcctggccgcacagctgctgagcgacatgaagctgcaagacggtaagcggctactaggacctcagtggcttgactatgactgtgatcgcgctgtgatagaagattgggtgttcagagtgcctcatgtagccattttcctgtctgtcgttatttgcaaggggttcctgatactgtgtagttctttagacctgacgaccctcgtccctgaacggcaggttgaccaaggccgcgggttcgagtcgattttggatgtgctgtctgtgatgtacatcaacgctcaattgccacgagaacagcgtcaccgttggtgcttactctttagttcagaattgcacggtcattccttttctcagctgtgtggtcatataacccatagaggaccctgcgtggccgttctggaagaccatgacaaacacgttttcggcgggttcgcctcttgttcatgggaggtgaaaccacaatttcaaggagataatcgctgttttctgtttagtatctgtccaagcatggcggtttacactcacaccggatataatgatcattacatgtatttgaaccacggacagcagactatcccaaatggcctgggaatgggcgggcagcataattatttcgggctttgggtggatgtggattttggcaagggccactctcgagccaaacccacctgcaccacttataactcccctcagctctccgcccaggaaaactttcaatttgataaaatggaagtgtgggcggtgggcgacccatctgaggagcagctcgcaaagggaaacaaatctatcttagatgcggacccagaagctcaggcactcttagagattagcggccattccagacactcagagggcctcagggaggtgcccgacgatgagtag

SEQ ID NO: 273990 - DNA, 1290 bp, Artificial Sequence
  derived and/or modified sequence
atgggcctgcccagctggacccggcggagccggaaccacgacgtgtccggagccccactgccactcgagtgcaatcacgtgggggaggctctaccccctgaaatggtcacccgactttatgatgggatgcggcgggtcgacctgactggcaaggccaagggcccgagtgaaaacgtctctcaggagcagtttaccgcttccatgtcccacctactgaagggcaattccgaggagaagtctctcatgatcatgaaaatgatcagtgccaccgaggggcctgtaaaagcccgtgaggtacagaagtttaccgaagatctggtcgggtccgtagtgcacgtcctgagccaccggcaggagttgagaggctggaccggaaaggaggcacctgggccgaacccgcgcgtccaagtgcttgccgcccagctgctgtctgacatgaaattgcaggacgggaaacggctgttaggaccccagtggttggactacgactgtgatagagcggtcattgaggactgggttttccgcgtaccccacgtagccattttcctcagcgtggtaatctgcaagggatttctgattctgtgcagttcgttagatctgacgactttggtgcccgaacgtcaagtcgaccaggggagagggttcgagtctatcctggatgtactttcagtaatgtacatcaatgcacagttgcccagagagcagaggcacagatggtgtctgctcttttcctcagagctgcacggccattcattcagtcagttgtgtggacatattacacatcgcggaccatgtgttgcagttctcgaagatcacgacaagcacgtcttcggcggcttcgcatcttgcagctgggaagtcaaacctcagttccaaggggataataggtgttttctcttctctatctgccccagcatggctgtatacacacatactggatacaacgatcattacatgtacttaaatcatggccagcagactatcccgaatggccttggtatgggtggacaacataactattttggactatgggtcgatgtggatttcggaaaaggacattcccgcgcgaaacccacctgtactacctacaacagtccacagctctcggcccaggagaactttcaatttgacaaaatggaggtatgggctgtaggagacccctccgaagaacagctggctaagggcaataagtccatcctggacgctgaccctgaagcacaagcgctgctcgaaatctctgggcactcccgccattcggaaggcttgagggaggtgcctgacgacgagtag

SEQ ID NO: 273991 - DNA, 375 bp, Artificial Sequence
  derived and/or modified sequence
atggccgtgtacacccacaccggctacaacgaccactacatgtaccttaaccatggtcagcaaaccataccgaacggtctggggatgggcggacagcacaattattttggcttatgggttgatgtcgatttcgggaaaggacattcacgcgccaaacccacttgcaccacatataacagcccacaactgtccgctcaggagaactttcaatttgacaagatggaagtctgggccgtgggcgaccctagcgaggagcagctggccaagggcaacaaatccattttagatgctgatcctgaggcgcaggccttactggagatctccgggcattctagacatagtgagggactgcgagaagtccctgacgatgagtag

SEQ ID NO: 273992 - DNA, 1371 bp, Artificial Sequence
  derived and/or modified sequence
atgggtaactcaaggtctcgtgtgggcagatctttctgctcccagttcctccccgaggagcaggcagagattgatcagctcttcgatgcactgtcttccgataaaaactcccctaacgtgagcagcaaaagcttcagcctgaaggcactgcagaaccatgtaggtgaggcactcccgcctgagatggttaccagactgtacgacggtatgaggagagtggatctcaccggcaaggccaagggcccttccgagaacgtgagtcaggagcagtttacagcgtcaatgtctcacctgctgaaggggaacagcgaggagaagtctctcatgattatgaaaatgatcagcgcaactgagggaccagtgaaagcgagagaggtacagaaattcacagaggatctggtgggctccgtggtgcatgtactgtcccacagacaggaactgcggggatggaccgggaaagaggccccaggccctaatccgagggtacaggtcttggcggctcagctactgtctgatatgaaactccaggatgggaagcggctgctcggtcctcagtggctggactacgactgtgatagggccgtcatagaagactgggttttccgcgttcctcacgtggccatctttctaagtgtcgtaatctgcaaggggttccttattctttgttccagcttggacctcactactttagtcccggaaaggcaggtggatcagggacgcggattcgaaagcatcctcgatgtactgagtgtcatgtacataaatgcccagctgcccagggagcagcggcaccggtggtgcctgctgtttagctccgaattgcacggccatagcttttcacagctctgtggacacatcacccatagagggccttgcgttgctgtcctagaagatcacgataagcatgtgttcggcggattcgcctcttgcagttgggaggtcaagcctcaatttcaaggtgacaataggtgtttcttatttagtatctgcccaagtatggcagtatatacacataccggctacaacgaccattatatgtaccttaaccacggccagcagacaatccctaacggcctcgggatggggggacaacataactacttcggactgtgggtggacgtcgactttggaaaaggccattctcgcgcaaaacccacatgtaccacatataatagtccccagctgtctgcacaagagaactttcagtttgataaaatggaggtgtgggcggtaggcgatccctccgaggaacagctagccaagggtaacaagtctattctggacgctgatcccgaggcacaggcactcctcgaaatcagcggtcactcccggcactcagagggattgagagaagttccggacgacgagtag

SEQ ID NO: 273993 - DNA, 1290 bp, Artificial Sequence
  derived and/or modified sequence
atgggcctgccgtcctggactagacggtctcgcaaccacgatgtctccggagcacctctgccgctggaatgtaaccacgtgggcgaagcgcttccacctgagatggtgacgaggctgtacgatggtatgagaagggtggacctgaccggtaaggcaaagggcccaagtgagaacgtcagtcaggagcaatttaccgcctccatgagtcatctgctgaaagggaactcagaagagaagagtctgatgattatgaagatgatctctgctactgagggcccagtaaaggccagggaagtccagaaatttaccgaagatctggtcgggtcagtggttcatgtgctcagtcatcgccaggaattacgcggttggacaggcaaagaggctccgggacccaatccacgtgtacaagttctcgctgctcagctcttaagtgatatgaagctgcaggatggaaaaagactgctgggcccacagtggctggattatgactgtgacagagctgtgattgaagattgggtgtttagagtgccccacgtggcgatttttttatccgtagtcatctgcaaagggtttctgatcctctgttcgtcactggacctgaccactctggtccccgaacgccaggtggatcaggggcgtgggtttgagtcaatcctggacgtactctctgttatgtatatcaacgctcagctgcctagggagcagcggcataggtggtgtctgctattctcttccgagctgcacggccactcattcagccagctatgcggacacatcactcaccgcggtccctgcgtagctgtgctcgaagatcacgataaacacgtgttcgggggatttgccagctgtagttgggaggtgaaaccccaattccagggagacaatcggtgctttttattcagcatctgcccgtcaatggctgtctatactcacacggggtataatgatcactacatgtacctcaaccacggacagcagacaatccccaatggactcggtatgggcggtcagcacaattacttcggcctttgggttgacgtggactttggcaaagggcatagccgcgctaagccaacctgcacaacctataatagtccccagctgagcgcccaggaaaacttccagttcgataagatggaggtctgggccgtgggggatcccagtgaagagcaattggctaaagggaacaaatcaatactggatgccgatccagaggcccaggccttacttgaaatctccggccacagccgccacagcgaggggctgagagaggtgcccgacgacgaatag

SEQ ID NO: 273994 - DNA, 375 bp, Artificial Sequence
  derived and/or modified sequence
atggcagtatatacccatactggctataacgaccactacatgtacttgaatcatggtcaacaaaccatacccaacggattgggtatggggggtcaacacaactacttcggactatgggtggacgtggactttgggaagggtcactccagggccaagccgacatgcactacttacaacagcccacaactgtcagctcaggagaactttcagtttgacaaaatggaggtgtgggctgtcggggacccttccgaagagcaacttgccaagggaaataaaagcattctggacgctgaccccgaggcacaagccctcctcgaaataagcggtcacagtaggcacagcgaagggctgcgggaggttcctgatgatgaatag

SEQ ID NO: 273995 - DNA, 1837 bp, Artificial Sequence
  derived and/or modified sequence
aatgttgcctggcaacagggaaggggcggctctcgagaggagcccgtgggctgctggaccggaccggacagcaccaggaagcccggcaggagaattctgccagatatcaggacagatggggaacagcagaagccgtgtggggcggagcttttgttcacagtttcttcctgaggaacaggcagagattgatcaattgtttgatgctctgtcatcagataaaaacagcccgaatgtctcatccaaatccttctctctgaaggcactacagaaaggaacctggagtagataatgaatgattcacacgacatttggggacatttctaacttgagatgaacatcagaggagagagatagcctgcctcgtgtgtctcttgaaccacgtccctcctgactgccctcccagagatggggagacagacgcggtgatgggtctgccctcctggactcgtcggtccaggaaccatgacgtgtcaggtgcaccgttgcctctagaatgtaaccacgtcggggaagctcttcccccagagatggtcaccaggctgtatgatggcatgcggagggtcgacctgacagggaaggcgaagggacccagtgagaacgtgtcccaggagcagttcacagcatccatgtcccacctgttgaaaggaaactccgaggagaagagtctcatgattatgaaaatgatttctgccacagaaggtcccgtgaaggccagagaagtccaaaagtttacagaggatctggttggctctgtggtgcacgtgctaagccacagacaggagctgagaggctggactgggaaggaagccccagggcccaacccccgggtgcaggtgctggctgctcagctgctctctgacatgaagctgcaagatggcaagagacttctggggccccagtggctggactatgactgtgaccgagctgtgatcgaggactgggtgttcagggtcccccatgtggccatattcctgagtgtggtcatttgcaagggctttctcatcctgtgctcgtctcttgatctgactaccctggtccctgagcgtcaagtggaccagggcaggggttttgagagcatcctggatgtcctctctgtcatgtacatcaacgcccagctgcctcgggagcagcggcaccgctggtgcctgctcttttcgtctgagctccatggacacagcttctcccagctctgtggccacatcactcaccggggaccctgtgtggctgtcctcgaggaccatgacaagcatgtgttcggtgggtttgcctcttgctcttgggaggtgaagcctcagtttcaaggggacaacagatgcttcctgttctccatctgccccagcatggctgtgtacacacacacgggctacaacgaccactacatgtacttgaaccatggacagcagacgatcccgaacggactgggtatgggggggcagcacaattactttgggctttgggtggatgttgattttgggaaaggacacagcagagccaagcccacgtgcaccacgtacaacagcccgcagctgtcggctcaggagaacttccagtttgataagatggaggtgtgggcggttggagacccctcagaggagcagttggccaagggcaacaagagcatcctggatgcggaccctgaggcccaggccctgctggagatcagtgggcattcgcgccacagcgaagggctccgggaagtcccggacgatgaatgaggagccgcctgagccttcctggagccaggacctggattcctctgggtagagggcaacgcctgcagcccctcttccctcccacatggtttaactgtaatagcgtaccgcacgggtcacagcct

SEQ ID NO: 273996 - DNA, 1538 bp, Artificial Sequence
  derived and/or modified sequence
atcaacgcccagctgcctcgggagcagcggcaccgctggtgcctgctcttttcgtctgagctccatggacacagcttctcccagctctgtggccacatcactcaccggggaccctgtgtggctgtcctcgaggaccatgacaagcatgtgttcggtgggtttgcctcttgctcttgggaggtgaagcctcagtttcaaggggacaacagatgcttcctgttctccatctgccccagcatggctgtgtacacacacacgggctacaacgaccactacatgtacttgaaccatggacagcagacgatcccgaacggactgggtatgggggggcagcacaattactttgggctttgggtggatgttgattttgggaaaggacacagcagagccaagcccacgtgcaccacgtacaacagcccgcagctgtcggctcaggagaacttccagtttgataagatggaggtgtgggcggttggagacccctcagaggagcagttggccaagggcaacaagagcatcctggatgcggaccctgaggcccaggccctgctggagatcagtgggcattcgcgccacagcgaagggctccgggaagtcccggacgatgaatgaggagccgcctgagccttcctggagccaggacctggattcctctgggtagagggcaacgcctgcagcccctcttccctcccacatggtttaactgtaatagcgtaccgcacgggtcacagcctggtagtcccacatgtgccaagaagacgccctctgaagccatgtcctgactcatgggtggatctcccagaaatagatgttttttaagttttctttttttccctacagggtcaccctcaggatctctccaagaaatcttgtgtcaaattagtaactcagtcttatactttgttcttttttaccaacgaaatcctaagcagctgagacctttcagacccccgctggcattagggaattccgctggcattagggaattccgctggcattagggaattccgctggcattagggaattccgctggcattagggaattccgctggcattagcattgctgggatctcaacttctctattgaggagggggttcctcccgctggggttcatatggcctcactcaggccatccctgttagaaggtggtacctgatggtctgttctgacgggtgagggacagaggcatctggatgaaaatctcgacgctttctgggaacagcttccaatggcatgggagttctgtatttaaaagcatgaactgtgtataaaatggggaaatggaggcaggagactttgaggtaacatggtctggtggtggcatgagtcctcagaaggtatttgtaataaggttccacacccagctctctcagctgtttttaaatgaatgtgtgtgaggaacagatgggaaagttgggagatctgtctacagagaagcaaagttgtggttctcttgctaacttcaaggtgagggacattgggcaccctaagtttgggaacttggttgataaatacgtatatggtccattccataaat

SEQ ID NO: 273997 - protein, 721 aa, Artificial Sequence
  derived and/or modified sequence
MLLPVFTLKLRHKISPRMVAIGRYDGTHPCLAAATQTGKVFIHNPHTRNQHVSASRVFQSPLESDVSLLSINQAVSCLTAGVLNPELGYDALLVGTQTNLLAYDVYNNSDLFYREVADGANAIVLGTLGDISSPLAIIGGNCALQGFNHEGSDLFWTVTGDNVNSLALCDFDGDGKKELLVGSEDFDIRVFKEDEIVAEMTETEIVTSLCPMYGSRFGYALSNGTVGVYDKTSRYWRIKSKNHAMSIHAFDLNSDGVNELITGWSNGKVDARSDRTGEVIFKDNFSSAIAGVVEGDYRMDGHIQLICCSVDGEIRGYLPGTAEMRGNLMDTSAEQDLIRELSQKKQNLLLELRNYEENAKAELASPLNEADGHRGIIPANTRLHTTLSVSLGNETQTAHTELRISTSNDTIIRAVLIFAEGIFTGESHVVHPSIHNLSSSICIPIVPPKDVPVDLHLKAFVGYRSSTQFHVFESTRQLPRFSMYALTSLDPASEPISYVNFTIAERAQRVVVWLGQNFLLPEDTHIQNAPFQVCFTSLRNGGHLHIKIKLSGEITINTDDIDLAGDIIQSMASFFAIEDLQVEADFPVYFEELRKVLVKVDEYHSVHQKLSADMADHSNLIRSLLVGAEDARLMRDMKTMKSRYMELYDLNRDLLNGYKIRCNNHTELLGNLKAVNQAIQRAGRLRVGKPKNQVITACRDAIRSNNINTLFKIMRVGTASS

SEQ ID NO: 273998 - DNA, 2166 bp, Artificial Sequence
  derived and/or modified sequence
atgctgctgcctgtgttcaccctgaagctccgccataagattagcccacgtatggtggccatcgggcgttacgatggaactcatccatgtttggcagccgccactcagacgggcaaggtgtttattcacaaccctcacactagaaaccagcacgtgtccgcctccagagtctttcaaagcccgttagaatctgacgtgtctctgctgagtatcaaccaggcagttagttgccttacggcaggcgtcctgaaccctgagctcgggtatgacgctctgctggttggaactcaaactaacctgctggcctacgatgtgtataataacagtgacctcttttaccgggaggtggcagatggcgccaatgccatagtgcttggaacactaggagacatctcaagccctctcgccatcatcggtggcaactgcgcactgcaaggtttcaaccatgaggggtcggacttattctggaccgtcacaggagacaatgtcaactcgcttgctctgtgtgattttgacggtgatggtaagaaagaattgctggtggggagtgaagacttcgatatcagggtgttcaaagaagacgagattgtggctgaaatgaccgagaccgagatcgtaacatcgctatgtcctatgtatggctctcgctttggctatgccctgtctaacggaacagtgggagtttacgataaaacctcccggtactggaggattaaatctaaaaatcatgcaatgtccatacatgcatttgacctgaactctgatggcgtcaatgagctgattacaggttggagcaacggtaaggtcgacgctcgtagcgaccgtacaggggaagtcatttttaaggataatttcagttctgccatagccggggtagtggaaggggactaccgaatggatggccatatccaactgatctgttgttcagtcgacggcgagatccgcgggtatctacccgggactgccgagatgcgggggaatctaatggataccagcgcggaacaggatttgatccgtgagctctcccagaaaaaacagaacttacttctggaactgcgcaattacgaggaaaacgccaaagccgagctggccagcccactgaatgaagcggacggacaccggggtatcattcccgctaacacccggctccacaccaccttaagcgtgagtctaggcaacgaaacacaaacagcgcacacagaactgcgcatcagtacaagcaacgatactattattcgcgctgtgcttatctttgctgagggcatcttcactggagaaagtcacgttgtccacccctccattcataatctgtcaagctccatatgtattccaatcgtgccacctaaggacgtccccgtggatctgcacctaaaagccttcgtcggctacaggtcctcaactcagtttcacgtctttgagtcaacgcgccagcttcctaggtttagcatgtatgccctgacctccctcgatccagcttccgaacctatctcctacgtcaacttcaccatagccgagagggcgcagcgcgttgtagtgtggctcggtcagaatttcctcctacccgaagatacccatatccagaacgccccatttcaggtctgttttacaagcttgaggaatgggggacacctgcatattaagatcaaactgagcggcgagattaccataaacacagatgatatcgacctcgctggtgacattatccaaagcatggcatcctttttcgccatcgaggacctacaggtggaggccgactttcctgtgtatttcgaggaactcagaaaggtcctggtgaaggtagacgagtatcatagtgtgcatcagaaactttctgccgatatggccgatcacagcaacttgatccggtccctcctggtaggggccgaggatgcacggctcatgagggacatgaagactatgaagtcgagatatatggaactctatgatcttaaccgggacctcttgaatgggtataaaattcggtgtaacaatcacacagagctgttggggaacctgaaggccgtgaatcaggctattcagagagctggtcgcctacgcgtgggcaagccaaagaaccaggttataactgcctgtcgggacgccatcagatctaacaatattaacactctgtttaagattatgcgtgttgggaccgccagctcctag

SEQ ID NO: 273999 - DNA, 2166 bp, Artificial Sequence
  derived and/or modified sequence
atgctgctgcccgtcttcaccctgaagctgcggcacaagatcagccccaggatggtggccatcggccgctatgatggcacccacccctgcctggccgccgccacccagacaggcaaggtgttcatccacaacccccacaccaggaaccagcacgtgtctgccagcagggtcttccagagccccctggagagtgatgtgtccctgctgagcatcaaccaggccgtgtcctgcctgacagctggggtgctgaaccctgagctgggctatgatgccctgctggtgggcacccagaccaacctgctggcctatgatgtgtacaacaacagcgacctcttctaccgggaggtggctgatggagccaatgccatcgtgctgggcaccctgggggacatcagcagccccctggccatcatcggcggcaactgtgccctgcagggcttcaaccacgagggcagtgacctcttctggacagtgactggagacaacgtgaacagcctggccctgtgtgactttgatggagatggcaagaaggagctgctggtgggcagcgaggactttgacatccgggtcttcaaggaggatgagatcgtggccgagatgacagaaacagaaattgtgaccagcctgtgccccatgtatggcagcagatttggctacgccctgagcaatggaacagtgggcgtgtatgacaagaccagccgctactggaggatcaagagcaagaaccacgccatgagcatccacgcctttgacctgaacagtgatggagtgaatgagctgatcaccggctggagcaatggcaaggtggatgcccggagtgacagaactggagaggtgatcttcaaggacaacttcagcagcgccatcgccggcgtggtggagggggactacaggatggatggccacatccagctgatctgctgcagcgtggatggagagatccggggctacctgcctggaacagctgagatgaggggcaacctgatggacaccagcgctgagcaggacctgatccgggagctgagccagaagaagcagaacctgctgctggagctgagaaattatgaagaaaatgccaaggccgagctggccagccccctgaatgaagcagatggccaccggggcatcatcccagccaacacccggctgcacaccaccctgtctgtgtccctgggcaatgagacccagacagcccacacagagctgcgcatcagcaccagcaatgacaccatcatccgggctgtgctgatctttgctgagggcatcttcaccggggagagccacgtggtgcaccccagcatccacaacctgagcagcagcatctgcatccccatcgtgccccccaaggatgtgcctgtggacctgcacctgaaggcctttgtgggctaccgcagcagcacccagttccacgtgtttgagagcacccggcagctgccccgcttctccatgtatgccctgaccagcctggaccctgccagcgagcccatctcctatgtgaacttcaccatcgccgagcgggcccagagggtggtggtgtggctgggccagaacttcctgctgcctgaggacacccacatccagaatgcccccttccaggtgtgcttcaccagcctgagaaatggaggccacctgcacatcaagatcaagctgtctggagagatcaccatcaacacagatgacatcgacctggccggggacatcatccagagcatggccagcttctttgccatcgaggacctgcaggtggaggccgacttccctgtgtactttgaggagctgaggaaggtgctggtgaaggtggatgagtaccacagcgtgcaccagaagctgtctgctgacatggctgaccacagcaacctgatccgcagcctgctggtgggcgcagaagatgcccggctgatgagggacatgaagaccatgaagagccgctacatggagctgtatgacctgaacagagacctgctgaatggctacaagatccgctgcaacaaccacacagagctgctgggcaacctgaaggctgtgaaccaggccatccagagagctggccgcctgcgggtgggcaagcccaagaaccaggtgatcacagcctgcagagatgccatccgcagcaacaacatcaacaccctcttcaagatcatgagggtgggcacagccagcagctag

SEQ ID NO: 274000 - DNA, 2166 bp, Artificial Sequence
  derived and/or modified sequence
atgctgctgcccgtgttcaccctgaagctgcggcacaagatcagcccccgaatggtggccatcggccgctacgatgggacacatccgtgccttgccgcggctacacagaccggcaaggtgtttatccataacccgcatacgcgcaaccagcacgtctctgcctctcgggtctttcagtccccattggaatccgatgtgagcctcctgtctatcaatcaagctgtatcatgcctgactgcaggggtgctgaacccagagctaggctacgacgcacttctggtgggcacacagactaacttgctggcttacgatgtgtacaacaattctgacctgttctaccgcgaagtggccgacggtgcgaatgcgatcgtgcttggaacgctcggcgatatctctagcccccttgccatcataggcgggaactgcgcccttcagggcttcaaccacgaggggtctgacctgttctggacagtgaccggggataacgtgaattctctggccctctgtgattttgatggggatggtaagaaggagcttttagtcgggtctgaggattttgacattcgggttttcaaggaggacgaaatcgtggctgagatgaccgaaactgaaattgtgacgagcttatgtccaatgtacggttctcgctttggatacgcactgagtaatgggacggtcggcgtgtacgataagactagccgctattggcggatcaaaagcaaaaaccatgccatgagcatccacgcctttgacctgaatagtgacggcgtaaatgaactgattaccggttggagtaatggtaaagtggatgcaagatccgaccggacaggtgaagtaatcttcaaagacaatttttcatccgcaattgccggcgtcgtggagggggattataggatggatggtcatatccaactcatttgctgtagcgtagacggggagattagaggttaccttccaggcactgctgaaatgaggggaaatctcatggatacttctgctgagcaagatcttatcagagaactcagtcagaagaaacaaaacctgctgctggagctgcggaattacgaggaaaacgcaaaggctgaattggcgagcccgctgaacgaggcggatggtcacagggggataatccccgcaaacactaggttacacactaccctatccgttagccttggtaacgagacgcagactgcccatactgagctgcggattagcacctcgaatgatactataattagggcggtcctcattttcgctgaagggattttcacaggggagagccacgtagtacatccatccattcacaacctcagctcttctatctgtataccaattgtccctcctaaggatgtgcccgtcgacctgcacctgaaagcttttgtgggatatcgctcaagtacccagttccatgtgtttgaaagtacccgccagctgccccgcttctcaatgtatgcgctgacttccctggatccggcgtccgagccaattagctatgtcaacttcacaattgcggaacgcgctcaacgggtagttgtgtggttgggccagaatttcctgctgcctgaggacacacatattcagaacgctccgtttcaagtttgttttacctcacttcgaaatggagggcacctccatatcaagatcaagctttctggcgagattactatcaatactgatgatattgatctagcaggggacatcatccagtcgatggcatcttttttcgctatcgaggaccttcaggtggaggccgactttcctgtgtattttgaggaactgaggaaagttcttgtaaaggtggatgaataccactcagtccaccaaaagctttcagccgatatggcggatcacagtaatctgatccggagcctgctggtgggggccgaggatgcacggttgatgagggatatgaaaacaatgaaatcccgctatatggagttatatgacctgaatcgggacctgctgaacggctacaagatccgatgcaataatcataccgagctgctggggaatctgaaggccgtgaatcaggccatccagagagcgggccggctgcgcgttggcaagcccaaaaatcaggtgataactgcttgtagggacgcgataagatcaaacaatattaatactctgttcaagattatgagggtcggaaccgcatctagctag

SEQ ID NO: 274001 - DNA, 2166 bp, Artificial Sequence
  derived and/or modified sequence
atgctactccctgtcttcacactgaagctgcgtcataaaatctcaccaagaatggtggctattggtagatacgatgggacacatccctgcctggctgcagctacccaaaccggcaaagttttcattcataacccgcatacccgcaatcagcatgtgtctgcttcacgcgtcttccagagtcccctcgagtccgatgtttctttgctctctatcaaccaggccgtcagttgtcttacagcaggagtgcttaaccccgagctaggctatgatgcactgcttgtggggacacagacaaatttactggcgtacgacgtgtacaataatagcgatctcttttaccgcgaggtggcagacggagccaatgccatcgttctgggcacgcttggcgacatcagtagccctctggccataattggcggaaactgcgcactccagggcttcaaccacgagggatccgatctgttttggaccgtcaccggcgacaacgttaactctctggcgttatgcgactttgacggtgacggaaagaaagaactactagttggctcagaagactttgatatcagagtgttcaaagaggatgaaatcgtagcggagatgaccgaaacagaaatcgttaccagcctgtgcccgatgtatgggtccagatttggctatgcactgtccaacggcaccgtgggcgtatacgataaaacgtcccgctattggaggatcaagtccaagaaccatgctatgagtattcacgcatttgaccttaactccgatggagttaacgaattgattaccggatggagtaacggcaaggtggatgctcgttctgatagaacaggtgaggtgattttcaaagataattttagcagcgctattgcgggagtggtagagggcgactataggatggacggacacatccagctcatctgctgctctgttgatggggagattcgaggttatctgcccggaactgccgagatgcgcggtaacttgatggacaccagcgccgaacaggatctcattcgggagctctctcagaagaaacagaatctgctgctggagttgcgcaattatgaagagaatgctaaggcagagctggctagcccccttaacgaagccgacgggcatagaggcatcatccctgccaatacaagattgcacaccacactgtctgtttctctgggaaacgagacccaaaccgctcatacagagctccggatatctacctccaatgataccatcatccgggctgtgctgattttcgctgaggggatctttacaggcgaatcacatgttgtacacccttcgatccacaacctatcgtctagcatctgcatccccattgtgcctccaaaagatgtgccggtagatctgcacttaaaggctttcgttggatatcgtagcagcacacagttccatgtgttcgaaagtaccaggcagctgccacgatttagtatgtacgcactgacctcgctggatcctgcgtcggagccgatcagctacgtgaactttacaatcgccgaaagggcacagagggttgtggtttggctaggtcagaattttttgctaccggaagacacgcatatccaaaatgccccttttcaggtgtgtttcacctccctgcggaacggcggacatctacatatcaagatcaagctctccggggagattaccatcaacaccgatgatattgatctggcgggagatatcatccagtcaatggcgtcatttttcgctattgaggacctgcaggtcgaagctgactttcctgtgtactttgaggagcttcgtaaggtgctggtgaaagtggatgaatatcactccgtgcatcagaaactctcggctgacatggcggatcactccaacttgatcaggtctcttctggtcggggctgaggacgcccgactgatgagggacatgaagactatgaaaagccgttacatggagttgtatgatcttaatagagacttactcaacggttataaaatccgttgcaacaatcatacagaactcctgggcaacctgaaagcagtgaaccaagcaatccagcgcgcagggaggctgagagtagggaagcccaaaaatcaggtaattacggcttgcagagatgccattcgtagcaataacatcaacacccttttcaagatcatgagggttggcaccgcttccagctag

SEQ ID NO: 274002 - DNA, 2814 bp, Artificial Sequence
  derived and/or modified sequence
cacagaaggcgccgaggctccaccgcgcagccgcaaaaagagcggacgggtctgcgccgccgcaggaggagcaggcggtacctggacgggttcgtcccgggctgtttcgcgtccggcctgaggcggctggggccgcgcaggtagtgtccctgcacttcttgcccgggcgcgtgaggccagctccgctgcgcttgtctccagcttccagccctcctcccctaagccgccgccatcatgctgctgcctgtgttcaccctgaaactgcgccacaaaatcagcccccgaatggtggccatagggcgctacgacgggactcacccgtgcctggcggccgccacccaaacgggcaaggtttttattcataatcctcatacacggaaccagcatgtcagtgcatccagggtcttccagagccccctggaatctgatgtttctcttctcagcattaaccaggcagtcagctgtctgactgcaggcgtattgaaccctgagcttggctatgatgcccttttagtggggacacagactaatcttttggcttatgatgtctacaataattcggatttgttctacagagaggtagcagatggggcaaatgcaattgtgctggggacattgggagacatttcttcccctcttgcgattattggtggcaattgtgctctgcaaggtttcaatcatgaaggaagtgatctcttttggacggttactggagacaatgttaattccttggccttgtgtgactttgatggtgatggaaagaaagagcttcttgttggatctgaggattttgatatccgagtttttaaggaagatgagattgtggcagaaatgacagaaacagagatagtcacctctctttgtcccatgtatggcagtcgatttggttatgccctttccaatggcacagttggagtttatgacaaaacatcccgatactggagaattaaatcgaaaaatcatgccatgagcattcatgcttttgaccttaattctgatggagtgaatgaactgataactggttggtccaatgggaaggttgatgctcgaagtgaccgaactggggaggtcatctttaaggacaatttttcttctgcaattgccggtgtggtagagggagattaccggatggatggccacatacagttaatctgctgctcagtggatggggaaatccggggctacctgcctggcacggctgagatgaggggcaacctcatggacaccagtgcagagcaggacctgatccgagagctgagtcagaagaagcagaatctgttgctggaactccgtaactatgaggaaaatgccaaggctgaattggccagtccactgaacgaggctgatgggcatcggggcataatcccagccaataccaggctccacaccacgctctcagtcagcctggggaatgagacccaaactgctcatacagaattacgcatttccacttctaatgacaccatcatccgagcagtattgatttttgcagaaggaatttttacaggtgaaagccacgtggtacatcccagcattcacaacctctccagttccatctgcatccctattgtgcctcccaaagatgtccctgtggatctgcacttgaaggcattcgtgggttacagaagcagcacccagtttcatgtatttgaatcgacaagacagctccctcgattctccatgtatgcgctgaccagcctggaccctgccagtgagccaatcagttatgttaactttaccattgcagaacgggcacagagggttgttgtatggctcggtcagaactttctgttaccagaagacactcacattcagaatgctccatttcaagtgtgtttcacatctttacggaatggcggccacctgcatataaaaataaaacttagtggagagatcactataaatactgatgatattgatttggctggtgatatcatccagtcaatggcatcattttttgctattgaagaccttcaagtagaagcggattttcctgtctattttgaggaattacgaaaggtgctagttaaggtggatgaatatcattcagtgcatcagaagctcagtgctgatatggctgatcattctaatttgatccgaagtttgctggtcggagctgaggatgctcgtctgatgagggacatgaaaacaatgaagagtcgttatatggaactctatgaccttaatagagacttgctaaatggatataaaattcgctgtaacaatcacacagagctgttgggaaacctcaaagcagtaaatcaagcaattcaaagagcaggtcgtctgcgggttggaaaaccaaagaaccaggtgatcactgcttgtcgggatgcaattcgaagcaataacatcaacacactgttcaaaatcatgcgagtggggacagcttcttcctaggtgaggaaaatacaggtcatgaagttcctggcaaagattttctgttaaaaacctatgctggtttgctttggatcacaccctggtgaaccccgggtgctaagaatgaaaataaccttggtgagttgtacaaattaaagacaaagaactacatgtgaagatagacttgctttctatttttaaatcagtagtagtactgttgctgaataatactaggtttttatggaataggatgaatgcttttgaagtattagggcttcagagtccaattttgcttatttatggtatataaatacatatttttttcttgaaattgcaattgagtttgtacttttcaaatagattatctactttttcattaaaatgtaaagatgttaaactttgtgttgattgattataaaatcaccaccaaatcag

SEQ ID NO: 274003 - DNA, 2166 bp, Artificial Sequence
  derived and/or modified sequence
atgctgctgcccgtgttcaccctgaagctgagacacaagatcagccccagaatggtggccatcggcagatacgacggcacccacccctgcctggccgccgccacccagaccggcaaggtgttcatccacaacccccacaccagaaaccagcacgtgagcgccagcagagtgttccagagccccctggagagcgacgtgagcctgctgagcatcaaccaggccgtgagctgcctgaccgccggcgtgctgaaccccgagctgggctacgacgccctgctggtgggcacccagaccaacctgctggcctacgacgtgtacaacaacagcgacctgttctacagagaggtggccgacggcgccaacgccatcgtgctgggcaccctgggcgacatcagcagccccctggccatcatcggcggcaactgcgccctgcagggcttcaaccacgagggcagcgacctgttctggaccgtgaccggcgacaacgtgaacagcctggccctgtgcgacttcgacggcgacggcaagaaggagctgctggtgggcagcgaggacttcgacatcagagtgttcaaggaggacgagatcgtggccgagatgaccgagaccgagatcgtgaccagcctgtgccccatgtacggcagcagattcggctacgccctgagcaacggcaccgtgggcgtgtacgacaagaccagcagatactggagaatcaagagcaagaaccacgccatgagcatccacgccttcgacctgaacagcgacggcgtgaacgagctgatcaccggctggagcaacggcaaggtggacgccagaagcgacagaaccggcgaggtgatcttcaaggacaacttcagcagcgccatcgccggcgtggtggagggcgactacagaatggacggccacatccagctgatctgctgcagcgtggacggcgagatcagaggctacctgcccggcaccgccgagatgagaggcaacctgatggacaccagcgccgagcaggacctgatcagagagctgagccagaagaagcagaacctgctgctggagctgagaaactacgaggagaacgccaaggccgagctggccagccccctgaacgaggccgacggccacagaggcatcatccccgccaacaccagactgcacaccaccctgagcgtgagcctgggcaacgagacccagaccgcccacaccgagctgagaatcagcaccagcaacgacaccatcatcagagccgtgctgatcttcgccgagggcatcttcaccggcgagagccacgtggtgcaccccagcatccacaacctgagcagcagcatctgcatccccatcgtgccccccaaggacgtgcccgtggacctgcacctgaaggccttcgtgggctacagaagcagcacccagttccacgtgttcgagagcaccagacagctgcccagattcagcatgtacgccctgaccagcctggaccccgccagcgagcccatcagctacgtgaacttcaccatcgccgagagagcccagagagtggtggtgtggctgggccagaacttcctgctgcccgaggacacccacatccagaacgcccccttccaggtgtgcttcaccagcctgagaaacggcggccacctgcacatcaagatcaagctgagcggcgagatcaccatcaacaccgacgacatcgacctggccggcgacatcatccagagcatggccagcttcttcgccatcgaggacctgcaggtggaggccgacttccccgtgtacttcgaggagctgagaaaggtgctggtgaaggtggacgagtaccacagcgtgcaccagaagctgagcgccgacatggccgaccacagcaacctgatcagaagcctgctggtgggcgccgaggacgccagactgatgagagacatgaagaccatgaagagcagatacatggagctgtacgacctgaacagagacctgctgaacggctacaagatcagatgcaacaaccacaccgagctgctgggcaacctgaaggccgtgaaccaggccatccagagagccggcagactgagagtgggcaagcccaagaaccaggtgatcaccgcctgcagagacgccatcagaagcaacaacatcaacaccctgttcaagatcatgagagtgggcaccgccagcagctag

SEQ ID NO: 274004 - protein, 555 aa, Artificial Sequence
  derived and/or modified sequence
MQSLTKGNDLHWLACALYVACRKSVPTVSKGTVEGNYVSLTRILKCSEQSLIEFFNKMKKWEDMANLPPHFRERTERLERNFTVSAVIFKKYEPIFQDIFKYPQEEQPRQQRGRKQRRQPCTVSEIFHFCWVLFIYAKGNFPMISDDLVNSYHLLLCALDLVYGNALQCSNRKELVNPNFKGLSEDFHAKDSKPSSDPPCIIEKLCSLHDGLVLEAKGIKEHFWKPYIRKLYEKKLLKGKEENLTGFLEPGNFGESFKAINKAYEEYVLSVGNLDERIFLGEDAEEEIGTLSRCLNAGSGTETAERVQMKNILQQHFDKSKALRISTPLTGVRYIKENSPCVTPVSTATHSLSRLHTMLTGLRNAPSEKLEQILRTCSRDPTQAIANRLKEMFEIYSQHFQPDEDFSNCAKEIASKHFRFAEMLYYKVLESVIEQEQKRLGDMDLSGILEQDAFHRSLLACCLEVVTFSYKPPGNFPFITEIFDVPLYHFYKVIEVFIRAEDGLCREVVKHLNQIEEQILDHLAWKPESPLWEKIRDNENRVPTCEEVMPPQNLE

SEQ ID NO: 274005 - DNA, 1668 bp, Artificial Sequence
  derived and/or modified sequence
atgcagagcctgaccaagggcaacgacctgcactggctggcctgcgccctgtacgtggcctgcagaaagagcgtgcccaccgtgagcaagggcaccgtggagggcaactacgtgagcctgaccagaatcctgaagtgcagcgagcagagcctgatcgagttcttcaacaagatgaagaagtgggaggacatggccaacctgcccccccacttcagagagagaaccgagagactggagagaaacttcaccgtgagcgccgtgatcttcaagaagtacgagcccatcttccaggacatcttcaagtacccccaggaggagcagcccagacagcagagaggcagaaagcagagaagacagccctgcaccgtgagcgagatcttccacttctgctgggtgctgttcatctacgccaagggcaacttccccatgatcagcgacgacctggtgaacagctaccacctgctgctgtgcgccctggacctggtgtacggcaacgccctgcagtgcagcaacagaaaggagctggtgaaccccaacttcaagggcctgagcgaggacttccacgccaaggacagcaagcccagcagcgaccccccctgcatcatcgagaagctgtgcagcctgcacgacggcctggtgctggaggccaagggcatcaaggagcacttctggaagccctacatcagaaagctgtacgagaagaagctgctgaagggcaaggaggagaacctgaccggcttcctggagcccggcaacttcggcgagagcttcaaggccatcaacaaggcctacgaggagtacgtgctgagcgtgggcaacctggacgagagaatcttcctgggcgaggacgccgaggaggagatcggcaccctgagcagatgcctgaacgccggcagcggcaccgagaccgccgagagagtgcagatgaagaacatcctgcagcagcacttcgacaagagcaaggccctgagaatcagcacccccctgaccggcgtgagatacatcaaggagaacagcccctgcgtgacccccgtgagcaccgccacccacagcctgagcagactgcacaccatgctgaccggcctgagaaacgcccccagcgagaagctggagcagatcctgagaacctgcagcagagaccccacccaggccatcgccaacagactgaaggagatgttcgagatctacagccagcacttccagcccgacgaggacttcagcaactgcgccaaggagatcgccagcaagcacttcagattcgccgagatgctgtactacaaggtgctggagagcgtgatcgagcaggagcagaagagactgggcgacatggacctgagcggcatcctggagcaggacgccttccacagaagcctgctggcctgctgcctggaggtggtgaccttcagctacaagccccccggcaacttccccttcatcaccgagatcttcgacgtgcccctgtaccacttctacaaggtgatcgaggtgttcatcagagccgaggacggcctgtgcagagaggtggtgaagcacctgaaccagatcgaggagcagatcctggaccacctggcctggaagcccgagagccccctgtgggagaagatcagagacaacgagaacagagtgcccacctgcgaggaggtgatgcccccccagaacctggagtag

SEQ ID NO: 274006 - DNA, 1668 bp, Artificial Sequence
  derived and/or modified sequence
atgcagtcactgacaaagggaaatgatctgcactggcttgcatgcgcgctgtatgtcgcgtgcaggaagagtgtccccaccgtgtctaagggtactgtagagggcaattatgtgtccctcacccgcattctaaagtgctctgaacagtccctcatcgagttttttaataagatgaaaaaatgggaggacatggccaatctccccccacatttccgcgagcggacagaacggcttgaacgcaactttacagtgtccgcggtaatttttaagaaatatgaacctatattccaggatatcttcaagtaccctcaggaggagcagccccgacagcagcgaggccgaaagcaaagaaggcagccttgtactgtgtctgagatcttccatttctgctgggtgctgtttatttacgcgaaaggaaactttccgatgatctcagatgatctggtcaactcataccacctcctactttgcgcactggacctggtctacggaaatgcactgcagtgttcgaacaggaaggaactcgtaaatccaaactttaagggactctctgaggactttcacgcaaaagattctaagcctagtagtgaccccccttgcataatcgagaaactgtgtagtctccacgatggactggtgctggaggccaaggggatcaaagagcatttttggaaaccatacatcaggaaactatatgagaagaagcttctcaaaggcaaagaggaaaatctgaccggcttcctggaaccgggaaacttcggggaatcatttaaggccatcaataaggcatacgaagagtacgtgttatctgtgggcaatttggatgaaaggattttcctgggcgaagatgcggaggaagaaatcggaaccctgtcgcggtgtttgaatgccggatcaggaaccgagacggccgagcgtgtgcagatgaaaaacatactgcagcagcacttcgacaaaagtaaggccctgcgaatttccacacccctgaccggtgtccggtacatcaaggagaattcaccttgtgtgaccccagtcagtacagccacacacagcctctcccggctgcacactatgctaacagggctgcgcaacgcccctagcgaaaaactagaacaaattctcaggacctgttcccgtgaccccacccaggcaatcgcaaatcgcctgaaggaaatgtttgaaatctattctcagcattttcagcccgacgaagacttttctaattgtgcaaaagaaattgccagcaaacattttcggttcgccgaaatgctctactataaagtactcgagtccgtgattgagcaagagcaaaagagactgggagacatggacctttctgggatcttggaacaggatgcattccatcgatccttacttgcctgctgtctggaggtggtcacctttagctacaagccacctggtaatttcccgttcatcacggagatttttgatgtccccctgtaccatttttataaggtgattgaagtatttatccgtgccgaagatgggctgtgccgggaggtcgtgaaacatctgaatcagattgaagagcaaatcttggatcatctggcgtggaagccagaaagtcctctgtgggagaaaataagagataacgaaaaccgcgttccgacctgtgaagaggtgatgccacctcagaatcttgaatag

SEQ ID NO: 274007 - DNA, 1668 bp, Artificial Sequence
  derived and/or modified sequence
atgcagagcctgaccaagggaaatgacctgcactggctggcctgtgccctgtatgtggcctgcaggaagtctgtgcccaccgtgtccaagggcaccgtggagggcaactacgtgtccctgacccgcatcctgaagtgcagcgagcagagcctcatcgagttcttcaacaagatgaagaagtgggaggacatggccaacctgcccccccacttccgggagaggacagagcggctggagaggaacttcaccgtgtctgctgtgatcttcaagaagtatgagcccatcttccaggacatcttcaagtacccccaggaggagcagccccggcagcagaggggcaggaagcagaggcggcagccctgcaccgtgtctgagatcttccacttctgctgggtgctcttcatctatgccaagggcaacttccccatgatcagtgatgacctggtgaacagctaccacctgctgctgtgtgccctggacctggtgtatggaaatgccctgcagtgcagcaacaggaaggagctggtgaaccccaacttcaagggcctgtctgaggacttccacgccaaggacagcaagcccagcagtgaccccccctgcatcatcgagaagctgtgcagcctgcatgatggcctggtgctggaggccaagggcatcaaggagcacttctggaagccctacatcaggaagctgtatgagaagaagctgctgaagggcaaggaggagaacctgaccggcttcctggagcccggcaactttggagagagcttcaaggccatcaacaaggcctatgaggagtatgtgctgtctgtgggcaacctggatgagcgcatcttcctgggggaggatgctgaggaggagatcggcaccctgagccgctgcctgaatgccggcagcggcacagaaacagctgagcgggtgcagatgaagaacatcctgcagcagcactttgacaagagcaaggccctgcgcatcagcacccccctgactggagtgcgctacatcaaggagaacagcccctgtgtgacccctgtgtccacagccacccacagcctgagccggctgcacaccatgctgaccggcctgagaaatgcccccagcgagaagctggagcagatcctgcggacctgcagccgggaccccacccaggccatcgccaaccggctgaaggagatgtttgagatctacagccagcacttccagccagatgaggacttcagcaactgtgccaaggagatcgccagcaagcacttccgctttgctgagatgctgtactacaaggtgctggagagcgtgattgagcaggagcagaagaggctgggggacatggacctgagcggcatcctggagcaggatgccttccacaggagcctgctggcctgctgcctggaggtggtgaccttctcctacaagcccccaggcaacttccccttcatcacagagatctttgatgtgcccctgtaccacttctacaaggtgattgaggtgttcatccgggcagaagatggcctgtgccgggaggtggtgaagcacctgaaccagatcgaggagcagatcctggaccacctggcctggaagccagagagccccctgtgggagaagatccgggacaatgaaaatagagtgcccacctgtgaggaggtgatgccaccccagaacctggagtag

SEQ ID NO: 274008 - DNA, 1668 bp, Artificial Sequence
  derived and/or modified sequence
atgcagagcctgaccaagggcaacgacctgcactggctggcctgcgctctttatgtggcctgcaggaaatccgtcccaactgtgtctaaaggcacagtagagggaaactacgtgtccctgacaaggatactgaagtgtagtgagcaatcattgatcgaattctttaataagatgaaaaaatgggaggacatggctaatttgccaccacacttccgcgaacggacagagcgactggagaggaatttcacagtttcagccgttatattcaagaaatacgagcccatattccaggatattttcaaatacccccaagaggagcaaccacgccagcaaagaggtcggaagcagagaagacagccgtgtaccgtgagtgagatctttcatttttgctgggtgctgttcatctacgctaaggggaattttcccatgatcagtgatgaccttgtgaatagttatcatctgctgctctgtgcactggatttggtttatggcaatgccctgcagtgttctaataggaaagagctggttaatccaaatttcaagggcttgtctgaggatttccacgctaaagattccaagccatcttctgatcctccatgcatcattgagaaactgtgttccctacacgacggcctggttcttgaagctaaaggtattaaagagcatttttggaagccttacattcgtaagttatacgaaaaaaaactccttaagggtaaggaagagaaccttaccgggttcctcgaacccgggaatttcggcgagtctttcaaagccatcaacaaggcttatgaagaatacgtgctcagcgtgggcaacctcgatgagcggatattcttaggtgaagatgccgaagaggaaatcggaactcttagcaggtgccttaatgcaggctctggaacagagacagccgagcgagtccagatgaagaacatattgcagcagcacttcgataagagtaaagctctgcgcatctccactcctttgacaggcgttcgctatattaaagaaaacagcccttgcgtgaccccagtgtccaccgccacccacagcctcagtcgcttgcacacaatgctgactggcctccgcaacgccccttcggaaaagctggagcagatcctccgaacctgcagccgggatcctacccaggccattgcgaaccggctcaaggagatgtttgaaatctattcccagcactttcagccagatgaggatttttctaactgtgccaaagagatcgcttccaagcatttccggttcgctgagatgctctattataaagtgttagagtcagtgatcgagcaggaacagaagcgcttaggcgatatggatctctcggggatcttggagcaggatgcgtttcacaggtctcttttagcctgctgtttggaagtcgtcactttcagttataaaccaccaggtaatttccccttcatcaccgaaattttcgacgtgccactctaccacttttataaagtcatcgaagtgttcatccgagccgaggatgggctgtgtcgcgaggttgtgaagcatctgaatcaaatcgaggagcagatattagaccacctagcctggaagcctgagagtcccctgtgggaaaagatccgagacaatgagaaccgggtcccgacttgcgaggaagtcatgccacctcagaatctcgagtag

SEQ ID NO: 274009 - DNA, 1668 bp, Artificial Sequence
  derived and/or modified sequence
atgcaatcactgaccaaaggcaatgacctgcactggctggcgtgtgccctttatgtggcctgtcgcaagtctgtacccaccgtgtcaaaaggtaccgtggagggaaactacgtaagcctaacgagaattctgaagtgttccgagcaatcactcattgagttttttaataagatgaagaagtgggaagatatggcgaatttacctcctcactttcgggaacgaacggagagactggaaagaaactttactgtcagtgccgttattttcaagaaatacgaacccatctttcaggatatattcaaataccctcaggaggaacaaccccgtcagcaacggggaaggaagcagagacgacagccatgtacagtgtctgagatttttcacttttgctgggtgctgtttatttatgccaaggggaatttcccaatgatctccgacgatctcgtgaacagctaccacctgctattgtgtgcgttagatttggtctatggaaatgcactgcagtgctccaatcgaaaggaacttgtcaacccaaatttcaagggtctgtctgaggacttccacgctaaggattccaagccatcatctgatccgccttgcataattgaaaagttatgctctctacatgatgggctagttctggaggccaaggggattaaagaacacttctggaagccttacatccggaaactgtatgaaaaaaagttgctcaagggtaaggaggagaatctgaccgggttcttggagcctgggaactttggtgaatcctttaaggccatcaataaggcctacgaggaatatgtattgagcgtgggcaatctcgatgagagaatcttcctgggggaagatgccgaggaggagataggaactctctccagatgcctcaacgcaggaagtggaacggagacagccgaaagggtgcaaatgaagaatattcttcagcagcatttcgacaagtcgaaggctctgagaatctccactcccctgacgggcgttagatacataaaggaaaatagtccctgtgtcactccggtttcgacagctactcatagtctgtcaaggctgcacaccatgcttactggactgaggaatgcacccagcgagaagcttgagcagattctgcggacctgttcgagggaccccacgcaggccatcgccaacaggctcaaggagatgttcgaaatctattctcagcacttccaaccagacgaagatttttctaattgcgccaaggagatcgcctcaaagcacttccggtttgctgagatgttatactataaagtactggagtccgtgatcgagcaggagcaaaaaaggctgggggacatggatctatctggaattttggaacaggacgcctttcatagatctctactggcatgttgcctagaggtggtgaccttctcgtacaagccgccaggaaacttcccatttattacagaaatattcgatgtaccgctctatcacttttataaagtgatcgaagtctttattcgcgctgaagacggactctgtcgagaagtcgtgaagcatctgaaccagattgaggaacagattctcgatcacttggcatggaaacccgaaagcccgctgtgggagaaaattcgcgacaacgaaaacagagttccaacctgcgaggaagtcatgccgccacagaacctggaatag

SEQ ID NO: 274010 - DNA, 1995 bp, Artificial Sequence
  derived and/or modified sequence
atttaaacctgaggccatttgatttctcaagtcgttttataattaatttgtagaaagagtcgggcaaataggtccaggatgcaaagcctaaccaagggaaatgatcttcattggttagcatgtgccttatatgtggcttgcagaaaatctgttccaactgtaagcaaagggacagtggaaggaaactatgtatctttaactagaatcctgaaatgttcagagcagagcttaatcgaattttttaataagatgaagaagtgggaagacatggcaaatctacccccacatttcagagaacgtactgagagattagaaagaaacttcactgtttctgctgtaatttttaagaaatatgaacccatttttcaggacatctttaaataccctcaagaggagcaacctcgtcagcagcgaggaaggaaacagcggcgacagccctgtactgtgtctgaaattttccatttttgttgggtgctttttatatatgcaaaaggtaatttccccatgattagtgatgatttggtcaattcttatcacctgctgctgtgtgctttggacttagtttatggaaatgcacttcagtgttctaatcgtaaagaacttgtgaaccctaattttaaaggcttatctgaagattttcatgctaaagattctaaaccttcctctgaccccccttgtatcattgagaaactgtgttccttacatgatggcctagttttggaagcaaaggggataaaggaacatttctggaaaccctatattaggaaactttatgaaaaaaagctccttaagggaaaagaagaaaatctcactgggtttctagaacctgggaactttggagagagttttaaagccatcaataaggcctatgaggagtatgttttatctgttgggaatttagatgagcggatatttcttggagaggatgctgaggaggaaattgggactctctcaaggtgtctgaacgctggttcaggaacagagactgctgaaagggtgcagatgaaaaacatcttacagcagcattttgacaagtccaaagcacttagaatctccacaccactaactggtgttaggtacattaaggagaatagcccttgtgtgactccagtttctacagctacgcatagcttgagtcgtcttcacaccatgctgacaggcctcaggaatgcaccaagtgagaaactggaacagattctcaggacatgttccagagatccaacccaggctattgctaacagactgaaagaaatgtttgaaatatattctcagcatttccagccagacgaggatttcagtaattgtgctaaagaaattgccagcaaacattttcgttttgcggagatgctttactataaagtattagaatctgttattgagcaggaacaaaaaagactaggagacatggatttatctggtattctggaacaagatgcgttccacagatctctcttggcctgctgccttgaggtcgtcactttttcttataagcctcctgggaattttccatttattactgaaatatttgatgtgcctctttatcatttttataaggtgatagaagtattcattagagcagaagatggcctttgtagagaggtggtaaaacaccttaatcagattgaagaacagatcttagatcatttggcatggaaaccagagtctccactctgggaaaaaattagagacaatgaaaacagagttcctacatgtgaagaggtcatgccacctcagaacctggaaagggcagatgaaatttgcattgctggctcccctttgactcccagaagggtgactgaagttcgtgctgatactggaggacttggaaggagcataacatctccaaccacattatacgataggtacagctccccaccagccagcactaccagaaggcggctatttgttgagaatgatagcccctctgatggagggacgcctgggcgcatgcccccacagcccctagtcaatgctgtccctgtgcagaatgtatct

SEQ ID NO: 274011 - DNA, 2098 bp, Artificial Sequence
  derived and/or modified sequence
acacatgaggaaccaagtatattttaatattaaacctctttatagaagaaccaagcaagttggtttggctgtatcaatgcacagtttaatgtgttgattatcgtttgcctctttggcagagaagaatttttttttctctttagttcatttaagttgatttgttgaatgtttccatctatacaaaaaaagaattgctttgtatacgctgaggtaatttccccatgattagtgatgatttggtcaattcttatcacctgctgctgtgtgctttggacttagtttatggaaatgcacttcagtgttctaatcgtaaagaacttgtgaaccctaattttaaaggcttatctgaagattttcatgctaaagattctaaaccttcctctgaccccccttgtatcattgagaaactgtgttccttacatgatggcctagttttggaagcaaaggggataaaggaacatttctggaaaccctatattaggaaactttatgaaaaaaagctccttaagggaaaagaagaaaatctcactgggtttctagaacctgggaactttggagagagttttaaagccatcaataaggcctatgaggagtatgttttatctgttgggaatttagatgagcggatatttcttggagaggatgctgaggaggaaattgggactctctcaaggtgtctgaacgctggttcaggaacagagactgctgaaagggtgcagatgaaaaacatcttacagcagcattttgacaagtccaaagcacttagaatctccacaccactaactggtgttaggtacattaaggagaatagcccttgtgtgactccagtttctacagctacgcatagcttgagtcgtcttcacaccatgctgacaggcctcaggaatgcaccaagtgagaaactggaacagattctcaggacatgttccagagatccaacccaggctattgctaacagactgaaagaaatgtttgaaatatattctcagcatttccagccagacgaggatttcagtaattgtgctaaagaaattgccagcaaacattttcgttttgcggagatgctttactataaagtattagaatctgttattgagcaggaacaaaaaagactaggagacatggatttatctggtattctggaacaagatgcgttccacagatctctcttggcctgctgccttgaggtcgtcactttttcttataagcctcctgggaattttccatttattactgaaatatttgatgtgcctctttatcatttttataaggtgatagaagtattcattagagcagaagatggcctttgtagagaggtggtaaaacaccttaatcagattgaagaacagatcttagatcatttggcatggaaaccagagtctccactctgggaaaaaattagagacaatgaaaacagagttcctacatgtgaagaggtcatgccacctcagaacctggaaagggcagatgaaatttgcattgctggctcccctcgccgaatacagttgtctcaaaatcatcctgtctacatttccccacataaaaatgaaacaatgctttctcctcgagaaaagattttctattacttcagcaacagtccttcaaagagactgagagaaattaatagtatgatacgcacaggagaaactcctactaaaaagagaggaattcttttggaagatggaagtgaatcacctgcaaaaagaatttgcccagaaaatcattctgccttattacgccgtctccaagatgtagctaatgaccgtggttcccactgaggttagtctcttgtattaaactcttcacaaaatctgtttagcagcagcctttaatgcatctagattatggagcttttttccttaatccagctgatgagttacagcctgttagtaacatgaggggacattttggtgagaaatgggacttaactccttccagtgtccttagaacattttaattcatcccaactgtctttttttccctaccattcagtgattactgtcaaggctgcttagaatccaaacttggatttttgactctggcaaagcttttagaaatactgcaagaaaatgatgtgtacccaaacgtgagcatagga

SEQ ID NO: 274012 - protein, 126 aa, Artificial Sequence
  derived and/or modified sequence
MQPSGLEGPGTFGRWPLLSLLLLLLLLQPVTCAYTTPGPPRALTTLGAPRAHTMPGTYAPSTTLSSPSTQGLQEQARALMRDFPLVDGSGQPMCHARPRTGMPCASPWSRLTSYAACVPPILSWSL

SEQ ID NO: 274013 - DNA, 2477 bp, Artificial Sequence
  derived and/or modified sequence
gtggtgctgaggagccgagcgggcggggagcctctagctgctccagcatcccacttgctcactgccccctgatcccgtggacagcgcagtcagaggcaggagcaggagaggaggaagcagaggaaaaggaggaggaggaggcggcttgcaactcctcagatccagagccggactccgagctaatgagggagcagcagacacggcctcccaacccttcccccaaggggaacccaggctgccaatagctacctgcgagaccagtggttccattctctgcaatggaagaaaaagatttacaaatataagaaagtgctgagtaacccaagccgctgggaagttgtcttgaaagagatccggaccctggtggacatggccctgacatcccccctgcaggatgactccatcaaccaggccccactggaaatcgtctcgaaactgctctcagagaacacaaacttgaccacccaggagcatgaaaacatcattgtggcaatcgctcctttgctggaaaacaaccacccaccaccagatctctgtgaattcttttgcaagcactgcagagagcggccccggtccatggtggtcatcgaggtgttcacccccgtggtgcagcgaatcctcaagcataacatggactttgggaagtgcccgcgactgaggctgtttactcaggagtacatccttgccttgaacgagctcaacgcggggatggaagtggtgaagaagttcattcagagcatgcacggccccacagggcactgcccccacccccgggtcctgcccaacctggtggccgtgtgcctggctgccatctactcctgctatgaagagttcatcaacagccgcgacaattccccaagcctgaaggaaatccggaacggctgccagcagccgtgcgaccggaagcccactttacctctgcgccttctgcaccccagcccggacctggtgtctcaggaagccacgctgtctgaggcccggctcaagtcggtggtcgtggcctccagtgagatccacgtggaggtggaacgcaccagcactgccaagccggcgctgacggccagcgcaggcaacgacagcgagcccaacctcatcgactgcctcatggtcagccccgcctgcagcaccatgagcatcgagctgggcccccaggccgaccgcacgctcggctgctacgtggaaatcctcaagctgctgtcagactatgatgactggagaccgtctctggccagtttgcttcaacccattccattccccaaagaagctctcgcacatgagaagttcaccaaggaactgaagtacgtgattcagaggttcgccgaagaccccaggcaagaggtccactcatgcctgctgagcgtgcgggccggcaaagatggctggttccagctctacagccccggaggggtggcctgcgacgatgacggggagctgttcgccagcatggtgcacatcctcatgggctcctgttacaagaccaaaaaattcctgctctccctggcagaaaacaagctgggtccctgcatgctcctggcactgagggggaaccagaccatggtggagatcctgtgcttgatgctggaatacaacatcatcgacaacaacgacacccaactgcagatcatctcaaccctggagagcacagacgtggggaagcgcatgtacgagcagctgtgtgaccggcagcgggagctgaaggagctgcaaaggaaaggcgggcccaccaggctaacactgccctccaagtccacagacgctgacttggctcgtttgctgagctccggctccttcggaaacctggagaacctcagtttggccttcaccaatgtaaccagtgcctgcgccgagcacctcatcaaactgccttcgctcaagcagctgaacctgtggtccactcagtttggagacgctggccttcggctcctgtcggaacacctcaccatgctccaggtgctgaacctgtgcgagaccccggtcacagacgctggcctgctggccctgagctccatgaagagtctctgcagtttaaacatgaacagcaccaagctctcagctgacacctacgaagatctgaaggccaagcttcccaatttgaaggaagtggacgtccgctacaccgaagcctggtgaagctcccagctcaaggcaggaagacgtttgcaaccgcgacaaaataactcttgactaacagccgcagagcagccggtcctggggtcccaccctggtgccctggctgtgagatagatggggagtctttctgggggcggaggggggagggggtggggagggggctcaggctggaggaggagggattaagatccccttgctccactaaggcccaagctctttctctcggcaccttttagacttgaatgggaggctgctaacccgccctctccagtccaccccggtaaaagagctgttccccacccccagggagctcctgtccctgtcagcctttgctgtcccctgtcccc

SEQ ID NO: 274014 - protein, 1866 aa, Artificial Sequence
  derived and/or modified sequence
MDPVGLQLGNKNLWSCLVRLLTKDPEWLNAKMKFFLPNTDLDSRNETLDPEQRVILQLNKLHVQGSDTWQSFIHCVCMQLEVPLDLEVLLLSTFGYDDGFTSQLGAEGKSQPESQLHHGLKRPHQSCGSSPRRKQCKKQQLELAKKYLQLLRTSAQQRYRSQIPGSGQPHAFHQVYVPPILRRATASLDTPEGAIMGDVKVEDGADVSISDLFNTRVNKGPRVTVLLGKAGMGKTTLAHRLCQKWAEGHLNCFQALFLFEFRQLNLITRFLTPSELLFDLYLSPESDHDTVFQYLEKNADQVLLIFDGLDEALQPMGPDGPGPVLTLFSHLCNGTLLPGCRVMATSRPGKLPACLPAEAAMVHMLGFDGPRVEEYVNHFFSAQPSREGALVELQTNGRLRSLCAVPALCQVACLCLHHLLPDHAPGQSVALLPNMTQLYMQMVLALSPPGHLPTSSLLDLGEVALRGLETGKVIFYAKDIAPPLIAFGATHSLLTSFCVCTGPGHQQTGYAFTHLSLQEFLAALHLMASPKVNKDTLTQYVTLHSRWVQRTKARLGLSDHLPTFLAGLASCTCRPFLSHLAQGNEDCVGAKQAAVVQVLKKLATRKLTGPKVVELCHCVDETQEPELASLTAQSLPYQLPFHNFPLTCTDLATLTNILEHREAPIHLDFDGCPLEPHCPEALVGCGQIENLSFKSRKCGDAFAEALSRSLPTMGRLQMLGLAGSKITARGISHLVKALPLCPQLKEVSFRDNQLSDQVVLNIVEVLPHLPRLRKLDLSSNSICVSTLLCLARVAVTCPTVRMLQAREADLIFLLSPPTETTAELQRAPDLQESDGQRKGAQSRSLTLRLQKCQLQVHDAEALIALLQEGPHLEEVDLSGNQLEDEGCRLMAEAASQLHIARKLDLSNNGLSVAGVHCVLRAVSACWTLAELHISLQHKTVIFMFAQEPEEQKGPQERAAFLDSLMLQMPSELPLSSRRMRLTHCGLQEKHLEQLCKALGGSCHLGHLHLDFSGNALGDEGAARLAQLLPGLGALQSLNLSENGLSLDAVLGLVRCFSTLQWLFRLDISFESQHILLRGDKTSRDMWATGSLPDFPAAAKFLGFRQRCIPRSLCLSECPLEPPSLTRLCATLKDCPGPLELQLSCEFLSDQSLETLLDCLPQLPQLSLLQLSQTGLSPKSPFLLANTLSLCPRVKKVDLRSLHHATLHFRSNEEEEGVCCGRFTGCSLSQEHVESLCWLLSKCKDLSQVDLSANLLGDSGLRCLLECLPQVPISGLLDLSHNSISQESALYLLETLPSCPRVREASVNLGSEQSFRIHFSREDQAGKTLRLSECSFRPEHVSRLATGLSKSLQLTELTLTQCCLGQKQLAILLSLVGRPAGLFSLRVQEPWADRARVLSLLEVCAQASGSVTEISISETQQQLCVQLEFPRQEENPEAVALRLAHCDLGAHHSLLVGQLMETCARLQQLSLSQVNLCEDDDASSLLLQSLLLSLSELKTFRLTSSCVSTEGLAHLASGLGHCHHLEELDLSNNQFDEEGTKALMRALEGKWMLKRLDLSHLLLNSSTLALLTHRLSQMTCLQSLRLNRNSIGDVGCCHLSEALRAATSLEELDLSHNQIGDAGVQHLATILPGLPELRKIDLSGNSISSAGGVQLAESLVLCRRLEELMLGCNALGDPTALGLAQELPQHLRVLHLPFSHLGPGGALSLAQALDGSPHLEEISLAENNLAGGVLRFCMELPLLRQIDLVSCKIDNQTAKLLTSSFTSCPALEVILLSWNLLGDEAAAELAQVLPQMGRLKRVDLEKNQITALGAWLLAEGLAQGSSIQVIRLWNNPIPCDMAQHLKSQEPRLDFAFFDNQPQAPWGT

SEQ ID NO: 274015 - protein, 1551 aa, Artificial Sequence
  derived and/or modified sequence
MDPVGLQLGNKNLWSCLVRLLTKDPEWLNAKMKFFLPNTDLDSRNETLDPEQRVILQLNKLHVQGSDTWQSFIHCVCMQLEVPLDLEVLLLSTFGYDDGFTSQLGAEGKSQPESQLHHGLKRPHQSCGSSPRRKQCKKQQLELAKKYLQLLRTSAQQRYRSQIPGSGQPHAFHQVYVPPILRRATASLDTPEGAIMGDVKVEDGADVSISDLFNTRVNKGPRVTVLLGKAGMGKTTLAHRLCQKWAEGHLNCFQALFLFEFRQLNLITRFLTPSELLFDLYLSPESDHDTVFQYLEKNADQVLLIFDGLDEALQPMGPDGPGPVLTLFSHLCNGTLLPGCRVMATSRPGKLPACLPAEAAMVHMLGFDGPRVEEYVNHFFSAQPSREGALVELQTNGRLRSLCAVPALCQVACLCLHHLLPDHAPGQSVALLPNMTQLYMQMVLALSPPGHLPTSSLLDLGEVALRGLETGKVIFYAKDIAPPLIAFGATHSLLTSFCVCTGPGHQQTGYAFTHLSLQEFLAALHLMASPKVNKDTLTQYVTLHSRWVQRTKARLGLSDHLPTFLAGLASCTCRPFLSHLAQGNEDCVGAKQAAVVQVLKKLATRKLTGPKVVELCHCVDETQEPELASLTAQSLPYQLPFHNFPLTCTDLATLTNILEHREAPIHLDFDGCPLEPHCPEALVGCGQIENLSFKSRKCGDAFAEALSRSLPTMGRLQMLGLAGSKITARGISHLVKALPLCPQLKEVSFRDNQLSDQVVLNIVEVLPHLPRLRKLDLSSNSICVSTLLCLARVAVTCPTVRMLQAREADLIFLLSPPTETTAELQRAPDLQESDGQRKGAQSRSLTLRLQKCQLQVHDAEALIALLQEGPHLEEVDLSGNQLEDEGCRLMAEAASQLHIARKLDLSNNGLSVAGVHCVLRAVSACWTLAELHISLQHKTVIFMFAQEPEEQKGPQERAAFLDSLMLQMPSELPLSSRRMRLTHCGLQEKHLEQLCKALGGSCHLGHLHLDFSGNALGDEGAARLAQLLPGLGALQSLNLSENGLSLDAVLGLVRCFSTLQWLFRLDISFESQHILLRGDKTSRDMWATGSLPDFPAAAKFLGFRQRCIPRSLCLSECPLEPPSLTRLCATLKDCPGPLELQLSCEFLSDQSLETLLDCLPQLPQLSLLQLSQTGLSPKSPFLLANTLSLCPRVKKVDLRSLHHATLHFRSNEEEEGVCCGRFTGCSLSQEHVESLCWLLSKCKDLSQVDLSANLLGDSGLRCLLECLPQVPISGLLDLSHNSISQESALYLLETLPSCPRVREASVNLGSEQSFRIHFSREDQAGKTLRLSECSFRPEHVSRLATGLSKSLQLTELTLTQCCLGQKQLAILLSLVGRPAGLFSLRVQEPWADRARVLSLLEVCAQASGSVTEISISETQQQLCVQLEFPRQEENPEAVALRLAHCDLGAHHSLLVGQLMETCARLQQLSLSQVNLCEDDDASSLLLQSLLLSLSELKTFRIQSSQDPGRLLPDLLPFDPHQADLQLCEHRGPRPPGIWSGPLPPLGGAGLV

SEQ ID NO: 274016 - DNA, 5601 bp, Artificial Sequence
  derived and/or modified sequence
atggatcccgtaggcctgcagctgggcaataaaaatctatggtcatgccttgtcaggctgcttaccaaagacccagaatggctcaatgctaagatgaagttcttcttacctaatactgacctggactctcgcaatgaaaccctggaccccgagcaaagagtgatccttcagctcaacaaactgcatgtccagggctccgacacctggcagtctttcattcactgtgtgtgtatgcagctggaggttccacttgacttagaggtgctgcttctaagcaccttcggatacgatgatgggtttacatcacagcttggagctgaaggcaaatcgcagcctgagagtcagctgcaccatggtctgaaacgtccgcaccagtcctgtggtagctccccccgacgcaaacaatgtaagaaacagcagctggaactggctaaaaagtatctgcagctgcttcggacttccgctcagcagaggtaccgctcgcagattcctgggagcggacaaccacatgcattccaccaggtttatgtccctccgattctgcgaagggcaaccgcctctttggacaccccagagggagccatcatgggcgacgtgaaggtcgaagatggcgccgatgtctccatcagcgacttgttcaacaccagagtcaacaaaggaccacgtgtcactgtgttgctggggaaagcaggaatgggcaagaccacactcgctcatcgactgtgtcagaagtgggcagagggccaccttaattgtttccaggcgctgtttctgttcgaatttcggcagttgaatttaatcacccgcttccttacaccgtcagagctcctctttgatttgtacctgtctcctgaaagcgaccatgatacggtcttccagtaccttgagaagaatgccgaccaggtgttactgattttcgatggcctagatgaggcgctgcagcctatggggcccgacggacctgggcctgtactgacactgttctcccacttatgcaacggcactctactgcccggctgtagagtgatggctacatccagacccggaaagctcccggcctgtctacctgctgaggccgccatggttcacatgcttggcttcgatgggccacgtgtggaagaatacgtcaaccatttttttagcgcacagccatctagagaaggggcacttgttgagctacaaactaatggccgtctacgctccctgtgtgcggtgcctgccctgtgtcaggtggcctgtttatgtctgcatcaccttctgcctgaccacgctcctgggcagtctgtcgccctgctccccaacatgactcaactgtatatgcaaatggtgctggccctgagcccccccgggcatttaccaacttcgagcctgctagatctgggcgaagttgccctgagaggcctagagactggaaaggtaatattttatgcaaaggatattgcacctcctcttatcgctttcggcgcgacacactcattgctgaccagtttctgtgtgtgcacagggcctggacatcagcagacaggttacgccttcacgcacctctcgttgcaggagttccttgcagcgctacacctgatggcgtcacctaaggtcaacaaggacaccctgacacaatatgtcacactgcacagtaggtgggtccagagaactaaggcccggttggggttaagtgaccaccttcccactttcctggctggcctggcttcttgcacttgccgcccatttctgtcacatctggcacagggcaacgaagactgtgtgggggcaaaacaagccgccgttgtacaggttctgaaaaaactcgccaccaggaagctcacgggacccaaagtggttgagttatgccactgtgtggatgagacgcaagagccagagttagccagcctcactgcccaatcactcccttaccaacttccctttcataacttcccgctgacttgtacagatcttgctacgctgactaacattttggaacaccgcgaggctccaatccatctcgacttcgacggatgtccccttgaaccacattgccctgaagccctggtcggatgcgggcaaatcgagaacttgtcttttaagagccggaagtgtggagacgccttcgcggaagccctgtctcggtcattgcccactatgggccgccttcagatgctgggactggctggaagcaagatcacggctcgcggcatttcccacctggtaaaggccttgccactgtgcccacagctgaaggaggtatcctttagagataaccagttatccgatcaggtggtgcttaatattgtggaagttctaccccacctacctagactgaggaagctcgatttaagcagcaattccatctgcgtgtctacgctcctttgtcttgctcgcgtggctgtgacgtgtcctaccgttagaatgcttcaggctagagaggccgacctgattttcctgctctctccccctaccgagactactgccgagcttcagcgtgctccagaccttcaggagtcagacgggcaacggaaaggcgctcagtcacggagcctcaccctgaggctgcagaaatgccaactccaggtgcatgacgccgaagctttaattgccctgcttcaagagggccctcaccttgaggaggtcgatctgtccggaaatcagctggaagacgaggggtgcagactaatggccgaagccgcgtcacagctacatatcgcccgcaagctggatctgtccaacaatggcctgtctgtggccggtgttcactgtgtgcttcgcgcagtttcagcttgctggaccctggctgaacttcacatctctctgcagcacaagaccgtcatattcatgtttgcgcaagaaccagaagagcagaaagggcctcaggagcgggctgcgtttctcgactccttgatgctccagatgccctccgagttacctctgagcagtaggaggatgaggttaacacactgcggtctccaagagaagcacttggaacagctatgcaaggctctgggtggctcttgccacctcggccacctccacctggacttttcgggcaatgcacttggcgacgaaggtgctgcccggctcgctcagctgctacctggattgggagccctccagtccttgaatctcagtgagaacgggctttccctcgacgctgtgcttgggttagtccgttgcttctccacactccaatggctgttcaggctcgacatctcgttcgagtcccagcacattctgcttagaggcgacaagaccagccgcgatatgtgggccaccggctccctgcctgactttcctgcggccgcaaaattcttggggtttagacaaaggtgtatcccccggagcctttgcctcagcgaatgcccattagagccgcctagcttgacccgcctgtgcgctaccctcaaagactgtccaggccctttggaacttcagctctcttgtgaattcctctctgatcagtcccttgaaactctgcttgattgcctgccacaactaccacagctgagtctacttcagctcagtcaaaccgggctgagccctaagtcacctttccttcttgccaataccttgagtctgtgcccaagggtgaaaaaagtggacttgaggtccttgcatcatgcgacgctccacttcaggtccaacgaagaggaagagggtgtttgctgcggaaggtttaccggatgtagcctaagtcaggaacatgtggagtccctctgttggttactcagcaagtgcaaggacctttctcaggttgacctttctgccaatcttctaggggatagtggccttcgatgcctgctggaatgcttaccgcaggtgccaatatctggtctgttggacctatcccacaattcaatttcacaggagtcggcgttgtacctcctggaaacactgccaagttgccctcgagtgcgagaggcctctgttaatcttggttctgaacagagttttcggatacacttcagccgcgaggaccaggcgggcaagacactacggttgagcgagtgtagctttcgccctgaacacgtgtctcgtcttgctaccggactctccaaaagcctccaattgacagagttgacattaacccagtgctgcctgggccagaaacagctggccatccttctttccctagttggcaggccagctgggctgttctcgctgagggtgcaggagccttgggccgaccgcgctagagtgttatctcttctggaagtgtgcgcccaggcttccggaagcgtcaccgaaatcagtatctccgaaactcagcagcagctgtgcgtgcagctcgaattcccacggcaggaagaaaacccagaagcagtggccctgaggttggcccactgtgatctcggggcacatcactctctccttgtaggacagctcatggagacttgcgcccgcctgcaacagctgagtctgtcgcaggttaacttgtgtgaggacgatgatgcttcatccctgctattacagagtcttctgttatcccttagcgaactgaagacgtttagactgacgtccagctgcgtgagcacagagggcttagcacacctagcttccgggctggggcactgtcaccatttagaagagctagacctgtctaacaatcagtttgatgaagagggcaccaaggctctgatgagagctctggaaggaaagtggatgctcaagcgtctagatcttagccacctcctgctaaactcatcaaccctggccctgctgacccaccgtctgtctcagatgacatgtcttcagtccctccggctcaatcggaatagtatcggggatgtcggttgctgtcacctgtctgaggccctcagggcggccacatccctggaagagctcgatctttctcacaatcagatcggggatgcaggcgtccagcacttagccaccatccttcccgggctcccagagcttagaaagatcgacttatccggaaacagtataagtagtgccggaggcgtgcagcttgccgagtctcttgtactttgcagaaggctggaggaactcatgttaggttgtaacgcgctcggtgaccccaccgcactggggttagcccaggaactaccccagcatcttagggtacttcacctgccctttagtcatcttggacccggaggagcactgtcgctggcccaggcactggacgggtccccacaccttgaagagatctctttggcagagaacaatcttgcaggaggtgtgcttcgcttctgtatggaactgccactgctccgacagatcgatttagtgtcgtgcaagatcgacaaccaaactgcaaaactcctgacaagtagcttcactagctgtcctgccctggaagtaattctgctgtcctggaacttgttaggagacgaggcagccgccgaactcgctcaagtgctccctcaaatgggcaggctgaaaagagtagatctggaaaaaaatcagataacagctctgggggcctggcttcttgccgaaggccttgcccaaggatcaagtattcaagtgatccggctatggaataatccaattccatgtgatatggcccagcatctcaaatctcaggaaccacgcctggacttcgcattctttgacaatcagccacaggctccctgggggacttag

SEQ ID NO: 274017 - DNA, 5601 bp, Artificial Sequence
  derived and/or modified sequence
atggaccctgtgggcctgcagctgggcaacaagaacctgtggagctgcctggtgcggctgctgaccaaggaccctgagtggctgaatgccaagatgaagttcttcctgcccaacacagacctggacagcagaaatgagaccctggaccctgagcagagggtcatcctgcagctgaacaagctgcacgtgcagggcagtgacacctggcagagcttcatccactgtgtgtgcatgcagctggaggtgcccctggacctggaggtgctgctgctgagcaccttcggctatgatgatggcttcaccagccagctgggcgctgagggcaagagccagcctgagagccagctgcaccacggcctgaagaggccccaccagagctgtggcagcagccccaggaggaagcagtgcaagaagcagcagctggagctggccaagaagtacctgcagctgctgcggaccagcgcccagcagcgctaccgcagccagatccctggcagcggccagccccacgccttccaccaggtgtatgtgccccccatcctgcggcgggccacagccagcctggacaccccagagggcgccatcatgggagatgtgaaggtggaggatggagcagatgtgtccatcagtgacctcttcaacaccagggtgaacaagggcccccgggtgacagtgctgctgggcaaggccggcatgggcaagaccaccctggcccaccggctgtgccagaagtgggccgagggccacctgaactgcttccaggccctcttcctgtttgagttccggcagctgaacctgatcacccgcttcctgacccccagcgagctgctgtttgacctgtacctgagccctgagagtgaccatgacaccgtcttccagtacctggagaagaatgctgaccaggtgctgctgatctttgatggcctggatgaggccctgcagcccatgggcccagatggccctggccctgtgctgaccctcttcagccacctgtgcaatggcaccctgctgcccggctgccgggtgatggccaccagcaggcctgggaagctgcctgcctgcctgcctgctgaggccgccatggtgcacatgctgggctttgatggcccccgggtggaggagtatgtgaaccacttcttcagcgcccagcccagccgggagggcgccctggtggagctgcagaccaacggccgcctgcggagcctgtgtgctgtgcctgccctgtgccaggtggcctgcctgtgcctgcaccacctgctgcctgaccacgcccctggccagagcgtggccctgctgcccaacatgacccagctgtacatgcagatggtgctggccctgagccccccaggccacctgcccaccagcagcctgctggacctgggggaggtggccctgcggggcctggagaccgggaaggtgatcttctacgccaaggacatcgccccacccctgattgcctttggagccacccacagcctgctgaccagcttctgtgtgtgcaccggccctggccaccagcagacaggctacgccttcacccacctgagcctgcaggagttcctggccgccctgcacctgatggccagccccaaggtgaacaaggacaccctgacccagtatgtgaccctgcacagccgctgggtgcagaggaccaaggcccggctgggcctgagtgaccacctgcccaccttcctggccggcctggccagctgcacctgccggcccttcctgagccacctggcccagggcaatgaagactgtgtgggcgccaagcaggccgctgtggtgcaggtgctgaagaagctggccaccaggaagctgaccggccccaaggtggtggagctgtgccactgtgtggatgagacccaggagcctgagctggccagcctgacagcccagagcctgccctaccagctgcccttccacaacttccccctgacctgcacagacctggccaccctgaccaacatcctggagcaccgggaggcccccatccacctggactttgatggctgccccctggagccccactgcccagaggccctggtgggctgcggccagatcgagaacctgtccttcaagagcaggaaatgtggagatgcctttgctgaggccctgagccgcagcctgcccaccatgggccgcctgcagatgctgggcctggccggcagcaagatcacagcccggggcatcagccacctggtgaaggccctgcccctgtgcccccagctgaaggaggtgtccttccgggacaaccagctgagtgaccaggtggtgctgaacatcgtggaggtgctgccccacctgccccggctgaggaagctggacctgagcagcaacagcatctgtgtgtccaccctgctgtgcctggcccgggtggccgtgacctgccccaccgtgaggatgctgcaggcccgggaggccgacctgatcttcctgctgagccccccaacagagaccacagctgagctgcagagggccccagacctgcaggagagtgatggccagaggaagggggcccagagccgcagcctgaccctgcggctgcagaagtgccagctgcaggtgcatgatgctgaggccctgattgccctgctgcaggagggcccccacctggaggaggtggacctgagcggcaaccagctggaggatgagggctgccgcctgatggccgaggccgccagccagctgcacatcgccaggaagctggacctgagcaacaacggcctgtctgtggccggcgtgcactgtgtgctgcgggctgtgtctgcctgctggaccctggccgagctgcacatcagcctgcagcacaagacagtcatcttcatgtttgcccaggagcctgaggagcagaagggcccccaggagcgggccgccttcctggacagcctgatgctgcagatgcccagcgagctgcccctgagcagcaggaggatgaggctgacccactgcggcctgcaggagaagcacctggagcagctgtgcaaggccctgggcggcagctgccacctgggccacctgcacctggacttctctggaaatgccctgggagatgagggcgccgcccggctggcccagctgctgcccggcctgggcgccctgcagagcctgaacctgtctgaaaatggcctgagcctggatgctgtgctgggcctggtgcgctgcttcagcaccctgcagtggctgttccggctggacatcagctttgagagccagcacatcctgctgcggggggacaagaccagccgggacatgtgggccaccggcagcctgcctgacttccctgctgctgccaagttcctgggcttccggcagcgctgcatccccaggagcctgtgcctgtctgagtgccccctggagccccccagcctgacccggctgtgtgccaccctgaaggactgccccggccccctggagctgcagctgagctgtgagttcctgagtgaccagagcctggagaccctgctggactgcctgccccagctgccccagctgagcctgctgcagctgagccagacaggcctgagccccaagagccccttcctgctggccaacaccctgagcctgtgcccccgggtgaagaaggtggacctgcggagcctgcaccacgccaccctgcacttccgcagcaatgaggaggaggagggcgtgtgctgcggccgcttcaccggctgcagcctgagccaggagcacgtggagagcctgtgctggctgctgagcaagtgcaaggacctgagccaggtggacctgagcgccaacctgctgggggacagcggcctgcgctgcctgctggagtgcctgccccaggtgcccatcagcggcctgctggacctgagccacaacagcatcagccaggagagcgccctgtacctgctggagaccctgcccagctgcccccgggtgcgggaggcctctgtgaacctgggcagcgagcagagcttccgcatccacttcagccgggaggaccaggccggcaagaccctgcggctgtctgagtgcagcttccggcctgagcacgtgtcccggctggccaccggcctgagcaagagcctgcagctgacagagctgaccctgacccagtgctgcctgggccagaagcagctggccatcctgctgagcctggtgggccggcctgctggcctcttcagcctgcgggtgcaggagccctgggccgaccgggcccgggtgctgagcctgctggaggtgtgtgcccaggccagcggctctgtgacagagatcagcatcagcgagacccagcagcagctgtgtgtgcagctggagttcccccggcaggaggagaaccctgaggccgtggccctgcggctggcccactgtgacctgggcgcccaccacagcctgctggtgggccagctgatggagacctgtgcccggctgcagcagctgagcctgagccaggtgaacctgtgtgaagatgatgatgccagcagcctgctgctgcagagcctgctgctgagcctgtctgagctgaagaccttccggctgaccagcagctgtgtgtccacagagggcctggcccacctggccagcggcctgggccactgccaccacctggaggagctggacctgagcaacaaccagtttgatgaggagggcaccaaggccctgatgagggccctggagggcaagtggatgctgaagaggctggacctgagccacctgctgctgaacagcagcaccctggccctgctgacccaccggctgagccagatgacctgcctgcagagcctgcggctgaacagaaattccattggagatgtgggctgctgccacctgtctgaggccctgcgggccgccaccagcctggaggagctggacctgagccacaaccagattggagatgctggggtgcagcacctggccaccatcctgcccggcctgcctgagctgaggaagattgacctgagcggcaacagcatcagcagcgctggaggagtgcagctggccgagagcctggtgctgtgccggcggctggaggagctgatgctgggctgcaatgccctgggggaccccacagccctgggcctggcccaggagctgccccagcacctgcgggtgctgcacctgcccttcagccacctgggccctgggggcgccctgagcctggcccaggccctggatggcagcccccacctggaggagatcagcctggccgagaacaacctggccggcggcgtgctgcgcttctgcatggagctgcccctgctgcggcagattgacctggtgtcctgcaagattgacaaccagacagccaagctgctgaccagcagcttcaccagctgcccagccctggaggtgatcctgctgtcctggaacctgctgggagatgaggccgctgctgagctggcccaggtgctgccccagatgggccgcctgaagagggtggacctggagaagaaccagatcacagccctgggcgcctggctgctggccgagggcctggcccagggcagcagcatccaggtgatccggctgtggaacaaccccatcccctgtgacatggcccagcacctgaagagccaggagccccggctggactttgccttctttgacaaccagccccaggccccctggggcacctag

SEQ ID NO: 274018 - DNA, 5601 bp, Artificial Sequence
  derived and/or modified sequence
atggaccccgtgggcctgcagctgggcaacaagaacctgtggagctgcctcgtgcgactgctcaccaaggatcctgagtggctgaatgcgaagatgaaattctttctgccaaacaccgatctggattcaaggaacgagacacttgacccagagcaaagagtgatcctgcagcttaataagttgcacgtgcaaggaagtgatacatggcagagcttcatccactgtgtctgtatgcaactggaggtgccactcgaccttgaagttctgctgctgagcaccttcggctacgacgacggtttcacctctcagttaggcgccgagggaaagagccagcccgaatctcagcttcaccatggcttaaagcggccacaccagtcatgtggtagctcccctcgccggaagcaatgcaagaagcaacagttggaactcgctaagaagtatttacagctcctgcggacatccgctcagcagcggtaccgtagccaaatcccaggcagcgggcaaccccatgctttccaccaggtctacgtgccaccaatccttaggcgggctactgcatctctggatacaccggaaggtgctattatgggcgacgtcaaggtggaggacggggccgacgtgtccatttctgacctgtttaatacaagggtcaacaagggcccccgcgtcaccgtcttgctgggaaaggcaggcatggggaaaaccaccttggctcaccgcttgtgccagaaatgggccgaagggcacctgaattgtttccaagccctcttcctctttgaattcaggcagctgaacctgatcacacgtttcttgaccccctcggaattgttgttcgatctgtatttgtctccagagtcagatcacgacactgtattccagtacctcgagaagaatgccgaccaagtactgctgatcttcgacggcctggatgaggcactgcagccgatggggccagatggtcctggacccgtgttgacattgttttctcacttgtgcaatggaacacttctgcctggctgcagagtgatggctacctctagacccggaaaattgcctgcttgcctccctgctgaggccgctatggtccacatgctcggcttcgatggcccgcgcgtcgaggaatatgtcaatcacttcttttccgcccagccctcccgcgaaggagctctggttgaactccagaccaatggaagactccggagcctttgcgctgtgcccgcgctttgtcaggttgcttgcctctgccttcaccacctcttgcccgaccacgcacctggccagtctgtggccttgttgccaaatatgacccagctctacatgcagatggtgttggccttgagcccacctggtcacctgcccacaagctcactgctcgacctcggagaggtggctctgcgtggtctggagacaggtaaagtaatcttctatgcaaaagacatcgccccccccctgatcgccttcggagcgacacactccctgctgaccagtttctgtgtatgtaccgggccaggtcaccaacagactggttatgcctttacgcatttgtcactgcaggagttcctagccgccctacacctcatggcatccccaaaggttaataaggacacactaacccagtatgtcaccctacactccaggtgggttcagaggacaaaagccagactagggttgagcgatcacctgcctacttttctggcaggtttggcctcctgcacctgtcggccgtttttgtctcatctagcacagggcaacgaagattgcgtgggggctaaacaggccgctgtggttcaggtgttaaaaaagttggcgactcgcaagctcaccgggcctaaagtcgtagagttgtgccactgtgtcgacgagacccaggagccagagctggcttcgctcactgcacagagcttgccttaccaactaccgttccataattttcctctgacctgtacggacctcgcaacacttacgaacatccttgagcatagagaagcgcctatacacctggattttgacgggtgcccgctggagccgcattgtcccgaggctctggtggggtgtgggcagatcgagaatctctcgtttaaatctagaaaatgcggggatgctttcgctgaggctctttcccgaagcttacctacaatgggtaggctacagatgttgggtctggcagggtcgaagataaccgctagaggcatctcccacctcgtgaaggcactgccactgtgtccacagctcaaggaggtcagctttcgcgacaaccagctatcagatcaggtggtactcaatattgtggaagttctgccccaccttccacggttacgtaaactggatttgagtagtaatagtatatgtgtctctaccctcctctgtttggctcgtgttgcagtgacttgccccacggtacgtatgctccaggcacgcgaggcagacctgatatttctcctctcacctccgaccgaaactaccgccgagctgcaaagggcacctgatctacaggaaagtgatggacaacgcaaaggcgcccaaagtcgaagcctgactctgagactccaaaaatgccaattgcaggtacatgatgccgaagcactcatcgctctcctgcaggagggcccacatctggaagaagtggacctttccggtaatcagttggaagatgaggggtgtcggctgatggccgaagcagcctcgcaattacacatagcccggaaactggacctatcaaataacgggttatcagttgccggggtgcactgtgtactccgggctgtgtctgcctgttggaccctggccgagctgcacatcagtcttcagcacaagactgtcatattcatgtttgcgcaagagccagaggagcaaaaaggacctcaggagcgggccgctttcctcgactcacttatgctacagatgccttccgaactaccattgtcctcccgccgtatgcggctgacccactgtggactgcaagagaagcacttggaacagctttgtaaagctctcggcggcagctgccacctgggacatctgcacctggacttctccggtaacgcactgggggatgagggagccgcccgtctggcccagctgcttcctgggctgggagccctccagagcctcaatctttcggagaatgggctctcgctggacgccgtgttgggcctggtgagatgtttttcaactctccagtggttgttcaggctcgatatcagctttgagtctcagcatattctgctacgaggtgacaagacatcccgggacatgtgggctactggcagtctgccagattttcctgctgctgccaagttcctgggattccgtcagcgttgtatccctcgatctttatgcctgagtgaatgtcccctagagccccccagccttactagactgtgtgcaactttaaaagattgccctggccctctggagcttcaattaagctgcgaattcctgtccgatcagtccctcgagacactgctcgactgcctgccccagttaccacaactcagcctgctgcagctctcacagaccgggttgtcgcctaaatccccgttcctgctggccaataccttgtccctatgcccgcgagttaaaaaggtggacctaagaagcttacatcatgctacactccattttcggtcaaacgaagaagaagagggcgtgtgctgtggccgctttaccggttgctcactgtcgcaggaacacgtcgaatccctatgttggttgctgagcaagtgcaaagacttgtcccaggttgacctgagcgctaatctgctcggagatagtggactgcgatgcctgctcgaatgtttacctcaggttcctatatcaggtcttctggatctttcccacaactcaatatcccaggaatcagcactgtacctgctggagaccctgccttcctgtcccagggttagagaagcttcagtgaatctcggcagtgagcagtccttccggattcatttctcaagagaggatcaagcgggtaagaccttgagactgagcgagtgctcgttcaggccagaacatgtgagccgtcttgccacaggtctgtccaagtctctccaactgaccgagttgaccctgactcagtgttgcctgggacagaagcaactcgcaattctgctgagcctggttggacggcctgcagggttgttctccctgagggttcaagagccatgggccgacagggctagagtgctatccctgctagaggtgtgcgcgcaggcaagcggatcagtgaccgaaatcagtatttctgaaacacagcaacagctttgtgtacagcttgagttcccacggcaggaagagaatcctgaagctgtggccttgcgactcgcgcattgcgatttaggagcacatcactccctcctggtgggccaactcatggaaacctgtgcccggctgcaacagttgagcctctcacaagtcaacctgtgcgaagacgacgatgctagtagcctcctgttacagtcgcttcttttaagcttgtcggaactgaaaacattccgtctaaccagcagctgcgtctctacggaaggactcgcgcacctggcctccggcctgggccactgtcatcacttggaggagctggatctgtcaaataaccagttcgacgaggagggtacaaaagccttgatgagagccctcgaagggaagtggatgctaaagcggctggacttgtcgcacctgctcctgaattcttccaccctagcccttttgacccaccgcctaagccaaatgacatgtctgcagtccctcaggctgaacaggaactctataggggatgtcggttgctgccacctgtccgaggcgctcagggccgccacatcccttgaggaactggacctttctcataaccagattggagacgccggagtccagcatctcgcaacaattctgcctggacttcctgagctgagaaagattgatctcagtggtaactccatttcaagcgccggcggggtgcagctggcggaaagccttgtgttatgcagacggcttgaggagttgatgttaggctgtaacgctttgggagatcctacagcgcttggactggcccaggagctgccgcagcacctgcgagtattgcaccttccattcagccacctagggcccggtggagccctgtccttagctcaggcgctcgacggctcaccacatctggaagaaatctccttagccgagaacaacctcgccggcggagtactgcgcttctgtatggaacttcccctgctccgccaaatcgacctggtttcgtgtaagatcgacaaccagactgccaaactccttacctcatcttttacatcctgtccggcgctcgaggtgatcctcctgtcctggaatctgctgggcgacgaggctgcagccgagctggcccaggttctgccccagatgggtaggttgaagagagttgacctggagaagaatcaaatcacggctctaggtgcttggctgttagcagaaggactggctcaggggtcaagcatacaggtcatccgcctctggaataaccccattccctgcgatatggcacagcatcttaagagtcaggagccacgtttggacttcgccttctttgataaccagccacaggcaccttggggcacttag

SEQ ID NO: 274019 - DNA, 5601 bp, Artificial Sequence
  derived and/or modified sequence
atggatcctgttggactgcagctgggaaataagaatttgtggagctgcctcgtgcgcttactgactaaagacccagaatggctgaacgctaagatgaagtttttcctgcccaacactgacctagactccaggaacgagactctggatccagaacaaagggtaattctgcagctgaacaaactccacgtacagggctccgacacctggcagtcttttattcattgcgtgtgtatgcagctcgaagtccctttagacctcgaggtcttgttgctcagcactttcggttacgatgacggcttcacaagccaactaggagccgaaggcaaaagtcaaccagaatcacaactccaccatggcctgaagaggccacatcagagttgtggctctagtccaaggaggaaacaatgcaagaagcaacagctggaattggcaaaaaaatatctgcaactgctgcggacatccgcgcagcagcggtacaggagccaaattccaggatctggtcagccccatgcctttcaccaagtgtacgttccccctattctgagaagggcaaccgcctctcttgataccccggaaggagccatcatgggggacgtgaaggtcgaagacggagccgatgtgagcatttcagatttattcaatactagagtgaacaaggggcctcgagttaccgtgctattgggcaaagctggaatgggcaagacaaccctggctcacaggttatgtcaaaagtgggctgaagggcatttaaattgttttcaagctctgtttctgtttgaattcagacagcttaacctgattacccgctttctaaccccatctgagcttcttttcgatttatatctgagtcctgagtctgatcatgacaccgtgttccagtacctggagaagaacgccgatcaggtcctcctgatcttcgacggtcttgatgaggctctgcagcccatgggacccgacgggccaggacccgtgttgaccttgttctctcacttgtgcaatgggacactgttgccagggtgtcgcgtgatggctacttccaggcccggtaagctgcctgcctgtctgcccgctgaagcggctatggtgcacatgttaggattcgacggaccgcgagtcgaagagtacgtgaatcatttctttagcgcccaaccttccagggagggagcgctggtggagctccagaccaacggacggcttcgttctttgtgcgctgtccctgcattgtgtcaagttgcttgcctctgcctgcatcacttgctgccagaccatgcccctggacagtcagtggccctgctgcccaatatgactcagctttacatgcagatggtgttggcgctgtcccccccaggccacctgccaactagctccctgctggacctcggggaagttgctctcaggggcctggaaaccgggaaggtgattttttatgccaaagacattgctccgcctctcattgcgtttggtgccactcacagcctgctgacttccttttgtgtatgcaccgggcctggccaccagcagacaggatatgctttcacacatttatccttgcaggagttccttgcagcactccacctcatggcatcacccaaagtgaacaaagacacactgacccagtacgtgacactacacagcaggtgggtgcagagaaccaaagcacggttgggactgagtgatcatctcccgacgttccttgcaggcctggccagctgtacatgcaggccctttttgagccatctggctcaaggcaatgaggattgtgtaggcgctaagcaagccgctgtcgtgcaggtactcaagaagttggccactcggaaactgacaggaccaaaggtcgtggagctctgtcattgcgtggacgagacacaggaaccagagttagccagcctgaccgctcaaagtctcccctaccaacttccatttcataatttcccattgacatgtacagatctggctacactgaccaatattttagagcatcgagaggcgccaattcatttggatttcgatgggtgcccccttgaacctcattgtccagaagcactggtgggatgtggtcagattgaaaacctctcatttaaatccagaaaatgtggtgacgcctttgcggaggccctctccagaagccttcctacaatgggcaggttgcagatgttaggactagctggcagcaagattactgctcgcggaatctcccacctggtgaaagcactgcctctttgccctcagttaaaggaggttagcttccgtgataatcagctgtcagatcaggtggttctcaatatcgtggaggtcttgcctcacttgcccagactgcgaaagctcgacctgtccagcaacagtatatgtgtcagtacactgctctgtctggccagggtagctgtgacatgtcctacagtgcgcatgctccaggcacgagaagctgatttgatctttctgctgagccctccaaccgagacaaccgcagaactccagcgtgctcctgatttacaggagtctgatggccaaagaaagggagcacaaagccgttctctgactcttaggctgcagaaatgccagttgcaggtgcacgatgcggaggcgttaatagccctactccaggaagggccacacctggaagaggtggatctcagcggtaaccaactggaagacgagggatgcagactgatggccgaggctgcgagccagctgcacatagccagaaagttagatctttcaaacaacggactttctgtggccggagtccactgtgtcttgcgcgcagttagtgcctgctggactctggcagaacttcacatttccctccagcacaagaccgtcatctttatgtttgcccaagagccggaggagcaaaagggtccccaggaaagagccgcttttctcgacagtcttatgcttcagatgcctagtgagctccccctatcctctcgcaggatgaggctcacacattgcggtctgcaagaaaagcacctggaacagctttgcaaggccctgggagggtcatgccacctgggtcatctccacctggactttagcgggaatgcactgggcgatgagggcgcagcccgattggcgcaactgctgcccggattgggcgcactccagagcctgaatttgtcagaaaatggactgagcctcgacgccgttctgggcctggtgaggtgtttctcaaccctacagtggctttttcgtcttgatattagctttgaatcccagcatattcttttaaggggggataagacctctcgggatatgtgggctacaggctctctgcctgatttcccagcggcagccaagtttctgggcttccgtcagagatgcatccccaggagtttgtgcctgagcgaatgcccactggagccgccatcactgacacggctgtgcgctaccctgaaggattgccccggaccactcgagctgcaactcagctgtgagttcctttcagatcaatctctcgagaccctgttggattgcttaccacaactcccacagctctccttactacagttgtcccaaaccgggctgagtccaaaaagtccattcctcttagctaatacactgtccctttgcccacgggtcaagaaggtggatctccggtctttacaccatgccacgctgcacttccggtccaatgaagaggaggaaggtgtgtgttgcggacgcttcacaggttgctccctgagccaggagcatgtggagagcttatgctggctgcttagcaaatgcaaggatttgtcacaagtggacctgtccgcaaacctgctcggtgactccggactgcgctgtcttttagaatgtctgccacaggtccctatctccgggttgctcgacctaagccacaattcgatttcccaagagagcgcactctacctgcttgagaccctgccctcgtgccccagggtgcgagaagcgtctgttaacttgggttccgagcaatccttcagaatccatttctctcgggaagatcaggcgggtaagacgctgcggctgtctgaatgctcatttagacctgagcacgtctcgagacttgccaccggactgtccaaatcgctccaactcaccgaattaaccctcactcagtgctgtttgggtcagaagcaactggcgatactactgagtctggtgggccgtcctgcaggcttgttttcgcttcgggtccaggaaccatgggctgatagagctcgcgtgctgagtttgctggaagtgtgtgcccaggcatccggctcggtcacggaaatttcaatctccgaaactcagcagcagctgtgcgtccaacttgaatttcccaggcaggaggagaaccctgaggccgttgcgctccgcctcgcccactgcgacctgggtgcccaccattcactgctagtgggccaactgatggaaacttgcgcccgtctccaacagttgtctctgtcacaggtgaacctgtgtgaggacgacgacgctagcagtctgctgctccagtcattgctgttgagcctttcagagctaaagacattcaggcttacgagctcctgtgtgtccactgaaggcctggctcacctggcttcagggcttggtcattgccatcacctggaggaattggacctctctaataaccagttcgacgaggaggggactaaggccctgatgagggctctagagggtaaatggatgcttaaacggttggaccttagccatctcttactgaattcatccacgctggcacttctgacacacaggttgagtcagatgacatgccttcagtccctaagattgaacaggaactctattggagatgttggttgttgtcacctgtccgaagccctacgtgctgccacgtcccttgaagaactcgatttgtctcacaatcagattggggacgccggtgttcagcatctggcgaccatcctcccgggtctacctgagctgaggaaaatcgatctgtctggcaactccatatcctccgccggtggcgtgcagctcgccgagtccttggtcctgtgccggagactagaagagctgatgctgggctgtaatgcactgggggaccccaccgctctgggcctggcacaggagttaccccagcatttacgcgttctgcacttgcccttcagtcacctgggacctgggggtgccctcagtctggctcaagccctcgatggttctccccacctcgaggaaatatctttggccgaaaataaccttgctggcggagtcttgaggttctgcatggaactgccactattgcgccagattgacctggtgagctgtaaaatagataaccaaactgcgaaattactgacttcctccttcacatcttgtcccgctcttgaggtaatactcttgagttggaatctcctgggcgatgaagcagccgcagagctagcccaagtcctgcctcagatggggaggttgaagcgggtggatctcgagaagaaccagattacagcgctgggcgcatggcttctggcagaaggtctggcccagggtagctctattcaagtgatacgcctctggaataaccctattccatgtgacatggcccaacatctgaagtctcaagaacccaggcttgatttcgcctttttcgataatcaaccccaagctccttgggggacataa

SEQ ID NO: 274020 - DNA, 6822 bp, Artificial Sequence
  derived and/or modified sequence
gcagcagccgccagttccatgcactggcggagcagctctaggcggcggcttctactttcagtttcgtgcagagcgcggaggagccgcgagcgctgagggagtctgcactatggaaacaacctgtcaatccagctcaaggcacacatagcccagacacccatgagaccctctccgtggggaccctagagcacctatcatgaacgaggagaccaaggctggctcctcatggaccccgttggcctccagctcggcaacaagaacctgtggagctgtcttgtgaggctgctcaccaaagacccagaatggctgaacgccaagatgaagttcttcctccccaacacggacctggattccaggaacgagaccttggaccctgaacagagagtcatcctgcaactcaacaagctgcatgtccagggttcggacacctggcagtctttcattcattgtgtgtgcatgcagctggaggtgcctctggacctggaggtgctgctgctgagtacttttggctatgatgatgggttcaccagccagctgggagctgaggggaaaagccaacctgaatctcagctccaccatggcctgaagcgcccacatcagagctgtgggtcctcaccccgccggaagcagtgcaagaagcagcagctagagttggccaagaagtacctgcagctcctgcggacctctgcccagcagcgctacaggagccaaatccctgggtcagggcagccccacgccttccaccaggtctatgtccctccaatcctgcgccgggccacagcatccttagacactccggagggggccattatgggggacgtcaaggtggaagatggtgctgacgtgagcatctcggacctcttcaacaccagggttaacaagggcccgagggtgaccgtgcttttggggaaggctggcatgggcaagaccacgctggcccaccggctctgccagaagtgggcagagggccatctgaactgtttccaggccctgttcctttttgaattccgccagctcaacttgatcacgaggttcctgacaccgtccgagctcctttttgatctgtacctgagccctgaatcggaccacgacactgtcttccagtacctggagaagaacgctgaccaagtcctgctgatctttgatgggctagatgaggccctccagcctatgggtcctgatggcccaggcccagtcctcacccttttctcccatctctgcaatgggaccctcctgcctggctgccgggtgatggctacctcccgtccagggaagctgcctgcctgcctgcctgcagaggcagccatggtccacatgttgggctttgatgggccacgggtggaagaatatgtgaatcacttcttcagcgcccagccatcgcgggagggggccctggtggagttacagacaaatggacgtctccgaagcctgtgtgcggtgcccgcactgtgccaagtcgcctgtctctgcctccaccatctgcttcctgaccacgccccaggccagtctgtggccctcctgcccaacatgactcagctctatatgcagatggtgctcgccctcagcccccctgggcacttgcccacctcgtccctactggacctgggggaggtggccctgaggggcctggagacagggaaggttatcttctatgcaaaagatattgctccacccttgatagcttttggggccactcacagcctgctgacttccttctgcgtctgcacaggccctgggcaccagcagacaggctatgctttcacccacctcagcctgcaggagtttcttgctgccctgcacctgatggccagccccaaggtgaacaaagacacacttacccagtatgttaccctccattcccgctgggtacagcggaccaaagctagactgggcctctcagaccacctccccaccttcctggcgggcctggcatcctgcacctgccgccccttccttagccacctggcgcagggcaatgaggactgtgtgggtgccaagcaggctgctgtagtgcaggtgttgaagaagttggccacccgcaagctcacagggccaaaggttgtagagctgtgtcactgtgtggatgagacacaggagcctgagctggccagtctcaccgcacaaagcctcccctatcaactgcccttccacaatttcccactgacctgcaccgacctggccaccctgaccaacatcctagagcacagggaggcccccatccacctggattttgatggctgtcccctggagccccactgccctgaggctctggtaggctgtgggcagatagagaatctcagctttaagagcaggaagtgtggggatgcctttgcagaagccctctccaggagcttgccgacaatggggaggctgcagatgctggggttagcaggaagtaaaatcactgcccgaggcatcagccacctggtgaaagctttgcctctctgtccacagctgaaagaagtcagttttcgggacaaccagctcagtgaccaggtggtgctgaacattgtggaggttctccctcacctaccacggctccggaagcttgacctgagcagcaacagcatctgcgtgtcaaccctactctgcttggcaagggtggcagtcacgtgtcctaccgtcaggatgcttcaggccagggaggcggacctcatcttccttctttccccgcccacagagacaactgcagagctacaaagagctccagacctgcaggaaagtgacggccagaggaaaggggctcagagcagaagcttgacgctcaggctgcagaagtgtcagctccaggtccacgatgcggaggccctcatagccctgctccaggaaggccctcacctggaggaagtggacctctcagggaaccagctggaagatgaaggctgtcggctgatggcagaggctgcatcccagctgcacatcgccaggaagctggacctcagtaacaacgggctttctgtggccggggtgcattgtgtgctgagggccgtgagtgcgtgctggaccctggcagagctgcacatcagcctgcagcacaaaactgtgatcttcatgtttgcccaggagccagaggagcagaaggggccccaggagagggctgcatttcttgacagcctcatgctccagatgccctctgagctgcctctgagctcccgaaggatgaggctgacacattgtggcctccaagaaaagcacctagagcagctctgcaaggctctgggaggaagctgccacctcggtcacctccacctcgacttctcaggcaatgctctgggggatgaaggtgcagcccggctggctcagctgctcccagggctgggagctctgcagtccttgaacctcagtgagaacggtttgtccctggatgccgtgttgggtttggttcggtgcttctccactctgcagtggctcttccgcttggacatcagctttgaaagccaacacatcctcctgagaggggacaagacaagcagggatatgtgggccactggatctttgccagacttcccagctgcagccaagttcttagggttccgtcagcgctgcatccccaggagcctctgcctcagtgagtgtcctctggagcccccaagcctcacccgcctctgtgccactctgaaggactgcccgggacccctggaactgcaattgtcctgtgagttcctgagtgaccagagcctggagactctactggactgcttacctcaactccctcagctgagcctgctgcagctgagccagacgggactgtccccgaaaagccccttcctgctggccaacaccttaagcctgtgtccacgggttaaaaaggtggatctcaggtccctgcaccatgcaactttgcacttcagatccaacgaggaggaggaaggcgtgtgctgtggcaggttcacaggctgcagcctcagccaggagcacgtagagtcactctgctggttgctgagcaagtgtaaagacctcagccaggtggatctctcagcaaacctgctgggcgacagcggactcagatgccttctggaatgtctgccgcaggtgcccatctccggtttgcttgatctgagtcacaacagcatttctcaggaaagtgccctgtacctgctggagacactgccctcctgcccacgtgtccgggaggcctcagtgaacctgggctctgagcagagcttccggattcacttctccagagaggaccaggctgggaagacactcaggctaagtgagtgcagcttccggccagagcacgtgtccaggctggccaccggcttgagcaagtccctgcagctgacggagctcacgctgacccagtgctgcctgggccagaagcagctggccatcctcctgagcttggtggggcgacccgcagggctgttcagcctcagggtgcaggagccgtgggcggacagagccagggttctctccctgttagaagtctgcgcccaggcctcaggcagtgtcactgaaatcagcatctccgagacccagcagcagctctgtgtccagctggaatttcctcgccaggaagagaatccagaagctgtggcactcaggttggctcactgtgaccttggagcccaccacagccttcttgtcgggcagctgatggagacatgtgccaggctgcagcagctcagcttgtctcaggttaacctctgtgaggacgatgatgccagttccctgctgctgcagagcctcctgctgtccctctctgagctgaagacatttcggctgacctccagctgtgtgagcaccgagggcctcgcccacctggcatctggtctgggccactgccaccacttggaggagctggacttgtctaacaatcaatttgatgaggagggcaccaaggcgctgatgagggcccttgaggggaaatggatgctaaagaggctggacctcagtcaccttctgctgaacagctccaccttggccttgcttactcacagactaagccagatgacctgcctgcagagcctcagactgaacaggaacagtatcggtgatgtcggttgctgccacctttctgaggctctcagggctgccaccagcctagaggagctggacttgagccacaaccagattggagacgctggtgtccagcacttagctaccatcctgcctgggctgccagagctcaggaagatagacctctcagggaatagcatcagctcagccgggggagtgcagttggcagagtctctcgttctttgcaggcgcctggaggagttgatgcttggctgcaatgccctgggggatcccacagccctggggctggctcaggagctgccccagcacctgagggtcctacacctaccattcagccatctgggcccaggtggggccctgagcctggcccaggccctggatggatccccccatttggaagagatcagcttggcggaaaacaacctggctggaggggtcctgcgtttctgtatggagctcccgctgctcagacagatagacctggtttcctgtaagattgacaaccagactgccaagctcctcacctccagcttcacgagctgccctgccctggaagtaatcttgctgtcctggaatctcctcggggatgaggcagctgccgagctggcccaggtgctgccgcagatgggccggctgaagagagtggacctggagaagaatcagatcacagctttgggggcctggctcctggctgaaggactggcccaggggtctagcatccaagtcatccgcctctggaataaccccattccctgcgacatggcccagcacctgaagagccaggagcccaggctggactttgccttctttgacaaccagccccaggccccttggggtacttgatggccccctcaagacctttggaatccagccaagtgatgcacccaaatgatccacctttcgcccactgggataattgactcaggaaagaagagcctcggcagggcgctctgcactccacccaggaggaaggatacgtgtgtcctgctgcagtcctcagggagaacttttttgggaaccaggagctgggtctggacaaaggagtaccctgcattacgtgggatatgtgtgatcaattggggacatgcgacacacaatgagggtgtcatgacaatgcatgacacgtacggttatatgtggcagtgtgaccccttgacatgtggcgttacatgaaagtcagtgtggcacgtgttctgtggcatgggtgctggcatcccaagtagcaggatacatgattgttggtctatatatgacacatgacaaatgtccatgtcacaggactcatggctggccagatgacctcaggctggcccaagatctaatttattaatttttaaagcaaatacatatttatagattgtgtgtatggagcagctaagtcaggaaaagtcttccgcccgagctgggaggggagagtgtccatgcactgaccagtccaggggctcaagggccagggctctggaacaagccagggactcagccattaagtcccctcctgcctcaatcctcagcctacccatctataaacttgatgactcctcccttacttacatactagcttccaaggacaggtggaggtagggccagcctggcgggagtggagaagcccagtctgtcctatgtaagggacaaagccaggtctaatggtactgggtagggggcactgccaagacaataagctaggctactgggtccagctactactttggtgggattcaggtgagtctccatgcacttcacatgttacccagtgttcttgttacttccaaggagaaccaagaatggctctgtcacactcgaagccaggcttgatcaataaacacaatggtattccacgtc

SEQ ID NO: 274021 - DNA, 5601 bp, Artificial Sequence
  derived and/or modified sequence
atggaccccgtgggcctgcagctgggcaacaagaacctgtggagctgcctggtgagactgctgaccaaggaccccgagtggctgaacgccaagatgaagttcttcctgcccaacaccgacctggacagcagaaacgagaccctggaccccgagcagagagtgatcctgcagctgaacaagctgcacgtgcagggcagcgacacctggcagagcttcatccactgcgtgtgcatgcagctggaggtgcccctggacctggaggtgctgctgctgagcaccttcggctacgacgacggcttcaccagccagctgggcgccgagggcaagagccagcccgagagccagctgcaccacggcctgaagagaccccaccagagctgcggcagcagccccagaagaaagcagtgcaagaagcagcagctggagctggccaagaagtacctgcagctgctgagaaccagcgcccagcagagatacagaagccagatccccggcagcggccagccccacgccttccaccaggtgtacgtgccccccatcctgagaagagccaccgccagcctggacacccccgagggcgccatcatgggcgacgtgaaggtggaggacggcgccgacgtgagcatcagcgacctgttcaacaccagagtgaacaagggccccagagtgaccgtgctgctgggcaaggccggcatgggcaagaccaccctggcccacagactgtgccagaagtgggccgagggccacctgaactgcttccaggccctgttcctgttcgagttcagacagctgaacctgatcaccagattcctgacccccagcgagctgctgttcgacctgtacctgagccccgagagcgaccacgacaccgtgttccagtacctggagaagaacgccgaccaggtgctgctgatcttcgacggcctggacgaggccctgcagcccatgggccccgacggccccggccccgtgctgaccctgttcagccacctgtgcaacggcaccctgctgcccggctgcagagtgatggccaccagcagacccggcaagctgcccgcctgcctgcccgccgaggccgccatggtgcacatgctgggcttcgacggccccagagtggaggagtacgtgaaccacttcttcagcgcccagcccagcagagagggcgccctggtggagctgcagaccaacggcagactgagaagcctgtgcgccgtgcccgccctgtgccaggtggcctgcctgtgcctgcaccacctgctgcccgaccacgcccccggccagagcgtggccctgctgcccaacatgacccagctgtacatgcagatggtgctggccctgagcccccccggccacctgcccaccagcagcctgctggacctgggcgaggtggccctgagaggcctggagaccggcaaggtgatcttctacgccaaggacatcgccccccccctgatcgccttcggcgccacccacagcctgctgaccagcttctgcgtgtgcaccggccccggccaccagcagaccggctacgccttcacccacctgagcctgcaggagttcctggccgccctgcacctgatggccagccccaaggtgaacaaggacaccctgacccagtacgtgaccctgcacagcagatgggtgcagagaaccaaggccagactgggcctgagcgaccacctgcccaccttcctggccggcctggccagctgcacctgcagacccttcctgagccacctggcccagggcaacgaggactgcgtgggcgccaagcaggccgccgtggtgcaggtgctgaagaagctggccaccagaaagctgaccggccccaaggtggtggagctgtgccactgcgtggacgagacccaggagcccgagctggccagcctgaccgcccagagcctgccctaccagctgcccttccacaacttccccctgacctgcaccgacctggccaccctgaccaacatcctggagcacagagaggcccccatccacctggacttcgacggctgccccctggagccccactgccccgaggccctggtgggctgcggccagatcgagaacctgagcttcaagagcagaaagtgcggcgacgccttcgccgaggccctgagcagaagcctgcccaccatgggcagactgcagatgctgggcctggccggcagcaagatcaccgccagaggcatcagccacctggtgaaggccctgcccctgtgcccccagctgaaggaggtgagcttcagagacaaccagctgagcgaccaggtggtgctgaacatcgtggaggtgctgccccacctgcccagactgagaaagctggacctgagcagcaacagcatctgcgtgagcaccctgctgtgcctggccagagtggccgtgacctgccccaccgtgagaatgctgcaggccagagaggccgacctgatcttcctgctgagcccccccaccgagaccaccgccgagctgcagagagcccccgacctgcaggagagcgacggccagagaaagggcgcccagagcagaagcctgaccctgagactgcagaagtgccagctgcaggtgcacgacgccgaggccctgatcgccctgctgcaggagggcccccacctggaggaggtggacctgagcggcaaccagctggaggacgagggctgcagactgatggccgaggccgccagccagctgcacatcgccagaaagctggacctgagcaacaacggcctgagcgtggccggcgtgcactgcgtgctgagagccgtgagcgcctgctggaccctggccgagctgcacatcagcctgcagcacaagaccgtgatcttcatgttcgcccaggagcccgaggagcagaagggcccccaggagagagccgccttcctggacagcctgatgctgcagatgcccagcgagctgcccctgagcagcagaagaatgagactgacccactgcggcctgcaggagaagcacctggagcagctgtgcaaggccctgggcggcagctgccacctgggccacctgcacctggacttcagcggcaacgccctgggcgacgagggcgccgccagactggcccagctgctgcccggcctgggcgccctgcagagcctgaacctgagcgagaacggcctgagcctggacgccgtgctgggcctggtgagatgcttcagcaccctgcagtggctgttcagactggacatcagcttcgagagccagcacatcctgctgagaggcgacaagaccagcagagacatgtgggccaccggcagcctgcccgacttccccgccgccgccaagttcctgggcttcagacagagatgcatccccagaagcctgtgcctgagcgagtgccccctggagccccccagcctgaccagactgtgcgccaccctgaaggactgccccggccccctggagctgcagctgagctgcgagttcctgagcgaccagagcctggagaccctgctggactgcctgccccagctgccccagctgagcctgctgcagctgagccagaccggcctgagccccaagagccccttcctgctggccaacaccctgagcctgtgccccagagtgaagaaggtggacctgagaagcctgcaccacgccaccctgcacttcagaagcaacgaggaggaggagggcgtgtgctgcggcagattcaccggctgcagcctgagccaggagcacgtggagagcctgtgctggctgctgagcaagtgcaaggacctgagccaggtggacctgagcgccaacctgctgggcgacagcggcctgagatgcctgctggagtgcctgccccaggtgcccatcagcggcctgctggacctgagccacaacagcatcagccaggagagcgccctgtacctgctggagaccctgcccagctgccccagagtgagagaggccagcgtgaacctgggcagcgagcagagcttcagaatccacttcagcagagaggaccaggccggcaagaccctgagactgagcgagtgcagcttcagacccgagcacgtgagcagactggccaccggcctgagcaagagcctgcagctgaccgagctgaccctgacccagtgctgcctgggccagaagcagctggccatcctgctgagcctggtgggcagacccgccggcctgttcagcctgagagtgcaggagccctgggccgacagagccagagtgctgagcctgctggaggtgtgcgcccaggccagcggcagcgtgaccgagatcagcatcagcgagacccagcagcagctgtgcgtgcagctggagttccccagacaggaggagaaccccgaggccgtggccctgagactggcccactgcgacctgggcgcccaccacagcctgctggtgggccagctgatggagacctgcgccagactgcagcagctgagcctgagccaggtgaacctgtgcgaggacgacgacgccagcagcctgctgctgcagagcctgctgctgagcctgagcgagctgaagaccttcagactgaccagcagctgcgtgagcaccgagggcctggcccacctggccagcggcctgggccactgccaccacctggaggagctggacctgagcaacaaccagttcgacgaggagggcaccaaggccctgatgagagccctggagggcaagtggatgctgaagagactggacctgagccacctgctgctgaacagcagcaccctggccctgctgacccacagactgagccagatgacctgcctgcagagcctgagactgaacagaaacagcatcggcgacgtgggctgctgccacctgagcgaggccctgagagccgccaccagcctggaggagctggacctgagccacaaccagatcggcgacgccggcgtgcagcacctggccaccatcctgcccggcctgcccgagctgagaaagatcgacctgagcggcaacagcatcagcagcgccggcggcgtgcagctggccgagagcctggtgctgtgcagaagactggaggagctgatgctgggctgcaacgccctgggcgaccccaccgccctgggcctggcccaggagctgccccagcacctgagagtgctgcacctgcccttcagccacctgggccccggcggcgccctgagcctggcccaggccctggacggcagcccccacctggaggagatcagcctggccgagaacaacctggccggcggcgtgctgagattctgcatggagctgcccctgctgagacagatcgacctggtgagctgcaagatcgacaaccagaccgccaagctgctgaccagcagcttcaccagctgccccgccctggaggtgatcctgctgagctggaacctgctgggcgacgaggccgccgccgagctggcccaggtgctgccccagatgggcagactgaagagagtggacctggagaagaaccagatcaccgccctgggcgcctggctgctggccgagggcctggcccagggcagcagcatccaggtgatcagactgtggaacaaccccatcccctgcgacatggcccagcacctgaagagccaggagcccagactggacttcgccttcttcgacaaccagccccaggccccctggggcacctag

SEQ ID NO: 274022 - DNA, 4656 bp, Artificial Sequence
  derived and/or modified sequence
atggaccccgtgggcctgcagctgggcaacaagaacctgtggagctgcctggtgagactgctgaccaaggaccccgagtggctgaacgccaagatgaagttcttcctgcccaacaccgacctggacagcagaaacgagaccctggaccccgagcagagagtgatcctgcagctgaacaagctgcacgtgcagggcagcgacacctggcagagcttcatccactgcgtgtgcatgcagctggaggtgcccctggacctggaggtgctgctgctgagcaccttcggctacgacgacggcttcaccagccagctgggcgccgagggcaagagccagcccgagagccagctgcaccacggcctgaagagaccccaccagagctgcggcagcagccccagaagaaagcagtgcaagaagcagcagctggagctggccaagaagtacctgcagctgctgagaaccagcgcccagcagagatacagaagccagatccccggcagcggccagccccacgccttccaccaggtgtacgtgccccccatcctgagaagagccaccgccagcctggacacccccgagggcgccatcatgggcgacgtgaaggtggaggacggcgccgacgtgagcatcagcgacctgttcaacaccagagtgaacaagggccccagagtgaccgtgctgctgggcaaggccggcatgggcaagaccaccctggcccacagactgtgccagaagtgggccgagggccacctgaactgcttccaggccctgttcctgttcgagttcagacagctgaacctgatcaccagattcctgacccccagcgagctgctgttcgacctgtacctgagccccgagagcgaccacgacaccgtgttccagtacctggagaagaacgccgaccaggtgctgctgatcttcgacggcctggacgaggccctgcagcccatgggccccgacggccccggccccgtgctgaccctgttcagccacctgtgcaacggcaccctgctgcccggctgcagagtgatggccaccagcagacccggcaagctgcccgcctgcctgcccgccgaggccgccatggtgcacatgctgggcttcgacggccccagagtggaggagtacgtgaaccacttcttcagcgcccagcccagcagagagggcgccctggtggagctgcagaccaacggcagactgagaagcctgtgcgccgtgcccgccctgtgccaggtggcctgcctgtgcctgcaccacctgctgcccgaccacgcccccggccagagcgtggccctgctgcccaacatgacccagctgtacatgcagatggtgctggccctgagcccccccggccacctgcccaccagcagcctgctggacctgggcgaggtggccctgagaggcctggagaccggcaaggtgatcttctacgccaaggacatcgccccccccctgatcgccttcggcgccacccacagcctgctgaccagcttctgcgtgtgcaccggccccggccaccagcagaccggctacgccttcacccacctgagcctgcaggagttcctggccgccctgcacctgatggccagccccaaggtgaacaaggacaccctgacccagtacgtgaccctgcacagcagatgggtgcagagaaccaaggccagactgggcctgagcgaccacctgcccaccttcctggccggcctggccagctgcacctgcagacccttcctgagccacctggcccagggcaacgaggactgcgtgggcgccaagcaggccgccgtggtgcaggtgctgaagaagctggccaccagaaagctgaccggccccaaggtggtggagctgtgccactgcgtggacgagacccaggagcccgagctggccagcctgaccgcccagagcctgccctaccagctgcccttccacaacttccccctgacctgcaccgacctggccaccctgaccaacatcctggagcacagagaggcccccatccacctggacttcgacggctgccccctggagccccactgccccgaggccctggtgggctgcggccagatcgagaacctgagcttcaagagcagaaagtgcggcgacgccttcgccgaggccctgagcagaagcctgcccaccatgggcagactgcagatgctgggcctggccggcagcaagatcaccgccagaggcatcagccacctggtgaaggccctgcccctgtgcccccagctgaaggaggtgagcttcagagacaaccagctgagcgaccaggtggtgctgaacatcgtggaggtgctgccccacctgcccagactgagaaagctggacctgagcagcaacagcatctgcgtgagcaccctgctgtgcctggccagagtggccgtgacctgccccaccgtgagaatgctgcaggccagagaggccgacctgatcttcctgctgagcccccccaccgagaccaccgccgagctgcagagagcccccgacctgcaggagagcgacggccagagaaagggcgcccagagcagaagcctgaccctgagactgcagaagtgccagctgcaggtgcacgacgccgaggccctgatcgccctgctgcaggagggcccccacctggaggaggtggacctgagcggcaaccagctggaggacgagggctgcagactgatggccgaggccgccagccagctgcacatcgccagaaagctggacctgagcaacaacggcctgagcgtggccggcgtgcactgcgtgctgagagccgtgagcgcctgctggaccctggccgagctgcacatcagcctgcagcacaagaccgtgatcttcatgttcgcccaggagcccgaggagcagaagggcccccaggagagagccgccttcctggacagcctgatgctgcagatgcccagcgagctgcccctgagcagcagaagaatgagactgacccactgcggcctgcaggagaagcacctggagcagctgtgcaaggccctgggcggcagctgccacctgggccacctgcacctggacttcagcggcaacgccctgggcgacgagggcgccgccagactggcccagctgctgcccggcctgggcgccctgcagagcctgaacctgagcgagaacggcctgagcctggacgccgtgctgggcctggtgagatgcttcagcaccctgcagtggctgttcagactggacatcagcttcgagagccagcacatcctgctgagaggcgacaagaccagcagagacatgtgggccaccggcagcctgcccgacttccccgccgccgccaagttcctgggcttcagacagagatgcatccccagaagcctgtgcctgagcgagtgccccctggagccccccagcctgaccagactgtgcgccaccctgaaggactgccccggccccctggagctgcagctgagctgcgagttcctgagcgaccagagcctggagaccctgctggactgcctgccccagctgccccagctgagcctgctgcagctgagccagaccggcctgagccccaagagccccttcctgctggccaacaccctgagcctgtgccccagagtgaagaaggtggacctgagaagcctgcaccacgccaccctgcacttcagaagcaacgaggaggaggagggcgtgtgctgcggcagattcaccggctgcagcctgagccaggagcacgtggagagcctgtgctggctgctgagcaagtgcaaggacctgagccaggtggacctgagcgccaacctgctgggcgacagcggcctgagatgcctgctggagtgcctgccccaggtgcccatcagcggcctgctggacctgagccacaacagcatcagccaggagagcgccctgtacctgctggagaccctgcccagctgccccagagtgagagaggccagcgtgaacctgggcagcgagcagagcttcagaatccacttcagcagagaggaccaggccggcaagaccctgagactgagcgagtgcagcttcagacccgagcacgtgagcagactggccaccggcctgagcaagagcctgcagctgaccgagctgaccctgacccagtgctgcctgggccagaagcagctggccatcctgctgagcctggtgggcagacccgccggcctgttcagcctgagagtgcaggagccctgggccgacagagccagagtgctgagcctgctggaggtgtgcgcccaggccagcggcagcgtgaccgagatcagcatcagcgagacccagcagcagctgtgcgtgcagctggagttccccagacaggaggagaaccccgaggccgtggccctgagactggcccactgcgacctgggcgcccaccacagcctgctggtgggccagctgatggagacctgcgccagactgcagcagctgagcctgagccaggtgaacctgtgcgaggacgacgacgccagcagcctgctgctgcagagcctgctgctgagcctgagcgagctgaagaccttcagaatccagagcagccaggaccccggcagactgctgcccgacctgctgcccttcgacccccaccaggccgacctgcagctgtgcgagcacagaggccccagaccccccggcatctggagcggccccctgccccccctgggcggcgccggcctggtgtag

SEQ ID NO: 274023 - DNA, 60 bp, Artificial Sequence
  derived and/or modified sequence
atggaccccgtgggcctgcagctgggcaacaagaacctgtggagctgcctggtgagatag

SEQ ID NO: 274024 - DNA, 4656 bp, Artificial Sequence
  derived and/or modified sequence
atggatccggtcggtctccagctgggcaataaaaatttgtggagttgtcttgtacgactcttaactaaagaccctgaatggctgaacgccaaaatgaagttcttcctccctaacaccgatctcgactcccggaatgagacactggacccagaacagcgcgttatccttcaacttaataagctgcacgttcagggcagcgacacctggcagagctttatccattgcgtctgcatgcagctcgaggtcccactcgatctggaagtgctgctgcttagcacatttggctacgatgacggatttacttcacagttgggggccgagggaaagagccagccagagagtcagctccaccacggtctgaagcgaccgcatcagagctgcggttcaagcccacgcaggaagcaatgcaagaaacaacaactggaactggccaaaaagtacttgcagctgttgcggacctctgcgcaacagcgttatagaagtcagatccccggcagtgggcagcctcacgctttccatcaggtatatgttcccccaatcctgagacgggcaacggcgtctcttgatacccctgagggggcgattatgggcgacgtcaaggtagaggatggggctgacgtcagcatctccgacttattcaataccagagtgaataaaggtcccagagttaccgttctgttgggcaaagccggtatggggaagaccactctggctcacaggctgtgccagaagtgggccgagggtcatctgaactgcttccaggcgctattcctgtttgaattcagacagcttaatcttatcactaggtttctcaccccatccgagctgctgttcgatctgtatctcagccctgaatcagaccacgataccgtcttccagtacctagagaaaaatgcggatcaggttctgcttatctttgacggcctggatgaggccctacaacccatgggtcccgacgggcctggtcctgtcttgactctgtttagccacctctgcaacgggaccctgctgccaggctgccgcgtgatggccacttctcggcctgggaaactgcctgcatgtttgccagctgaggcagccatggttcacatgttaggttttgacggacccagagtcgaggagtatgtcaaccacttcttcagcgcacagccctctagggagggcgcactggtggaactgcagacaaatggccgtctccgcagtttatgcgcagttcccgccctgtgtcaggtcgcctgcctctgtctacaccacctcctgccagatcacgcccctggccagtctgtggctctcctgccaaacatgacccaactctacatgcagatggtgctggcactttcccccccagggcacctaccgacctcttctctgctcgatctcggcgaggtggctctcaggggcctggagacggggaaggtgatattctatgctaaagacattgcccccccactgattgcatttggagcaacgcacagccttttaaccagtttttgcgtttgtacggggcccggtcaccaacagacaggctacgcgttcactcacctgtcgctgcaggaatttctggcagctttgcacctgatggcttcgccaaaggtgaacaaagacacactgacccaatatgtgactctccactctaggtgggtgcagcggacaaaggccaggctgggcctgtcagaccatttgccaaccttcttagcaggactggcctcatgtacatgcagacccttcctctcccaccttgcccagggaaacgaagattgcgtgggtgccaagcaggcagctgtggtccaggtcctcaagaagttagcgacaaggaagttgaccggcccaaaagtcgtggagctttgtcactgcgtcgacgagacgcaggaaccagaactggcgtcccttacagcccagtctctgccctaccagctccctttccataactttccgttgacttgtaccgaccttgctaccctgacaaatatccttgaacaccgggaagcccccattcatctcgattttgatgggtgtccccttgaaccccactgccctgaggcactggttggctgtggacagattgagaacttgagcttcaaatcaaggaaatgtggcgatgcgttcgccgaagctctctcccggtcattgccgactatgggcagactgcaaatgctcggcctcgctggaagcaaaatcacagccaggggcattagccacttggtaaaggccttacctctgtgtccacagctgaaggaggtcagttttagggacaatcagctgtccgaccaagttgtgcttaatatagtcgaagttctaccgcatctcccacgcctgagaaaactggatctgagcagtaacagtatttgcgtcagtacactcctgtgtctggcaagagtagcggtcacctgccccacggtgcgcatgctgcaggcccgggaggccgatctgatcttcctcctgagccctcccaccgaaacaaccgccgagcttcagcgagctcctgacctgcaggagtccgatggccagcggaaaggggcccagtcacggagcctgactctgcgactacaaaagtgtcagctacaggtgcatgacgccgaagcccttatcgcactgctccaggaagggccccacctggaggaggttgatcttagtggcaatcagcttgaagacgaagggtgccggctaatggcagaggctgcttctcagctgcacattgcccggaagcttgacctcagtaacaacggactgtctgtcgcaggcgtgcattgtgtactccgtgctgtgtctgcctgttggacacttgccgagcttcatatctccctgcagcataaaacagtgatattcatgtttgcacaggaaccagaggagcagaagggcccacaagagcgtgccgctttcctcgactcactgatgctgcaaatgcccagtgaacttcccctatcctctcgtagaatgcgccttacacactgcggacttcaggagaagcacctggagcagctgtgcaaagctcttggcggttcatgtcacctgggacacctgcatttggacttcagcggcaatgccttaggagatgagggcgcagctaggctggcccagctcttgcctggtctgggggctctgcagagcctcaacctgtctgaaaacggcttgtccctggatgccgtcctcgggctcgtgaggtgcttcagcaccctgcagtggctgttcaggttagacatctctttcgagagccaacacattctgctccgcggcgataagaccagccgggatatgtgggcgaccggatcactaccagattttcccgctgcagctaagttcctggggttcagacaacgctgtatacctagatcactttgcctctccgagtgccctctggaaccgccttccctgacccgcctgtgtgctaccctcaaggactgccccggacctctggagctgcagctttcctgcgaatttctgtcagatcagtccctggagacactgttggactgtttgcctcagcttccccagcttagccttttgcagctgagccagaccggactctcaccaaagtctccatttctcctggccaacactctgtccctttgtccgagggtgaaaaaagtagatctaagatcactgcatcatgccacacttcactttcgcagtaacgaggaagaggaaggtgtatgttgcgggcgtttcacaggatgcagtctcagtcaggagcatgtcgagtcactatgctggctcttgtctaagtgcaaggatctgtctcaggttgatctgtctgctaaccttctcggtgattccggtctgcggtgcctgctggaatgcctgcctcaggttccgataagcggacttctcgatcttagtcataattctatctcccaggaaagcgcattgtacctcctggaaactctccctagttgccctagagtgcgagaggcatccgtcaacctgggtagtgagcagtcctttcgcatccacttcagccgggaggaccaggccgggaagacactgagactctccgaatgctcattccgccctgagcacgtaagccgccttgccaccgggctgtccaagtctctgcaacttaccgagcttacccttacgcagtgctgtctgggtcagaagcagttggctatattgttaagtttggtgggtcggccagctggtctgttcagtctgcgagtgcaggaaccctgggccgatcgcgctcgtgtgttaagtctgctggaggtatgcgcacaggcatccggaagtgtgactgagattagcatctctgagacacaacaacagctgtgtgtccagttggaatttcctcggcaggaggaaaatcctgaggctgtggccctgagactggctcattgcgatctaggcgcacaccactcccttttggtaggtcagctgatggaaacgtgtgccaggctccagcagcttagcctgtcacaagtgaatttatgcgaggacgatgatgcttcaagcctgcttttgcagagcctgttactgagcctctccgagttgaaaacctttcggatccagagtagtcaggatcccggcaggctgctccctgatttgttacccttcgatcctcatcaggcagacctgcagttgtgtgaacataggggtccaaggccccctggcatatggagtggtcccctcccaccccttggaggagctgggcttgtgtag

SEQ ID NO: 274025 - DNA, 60 bp, Artificial Sequence
  derived and/or modified sequence
atggacccagtgggccttcagttgggaaacaaaaatctctggagctgcctcgttcgctag

SEQ ID NO: 274026 - DNA, 4656 bp, Artificial Sequence
  derived and/or modified sequence
atggaccctgtgggcctgcagctgggcaacaagaacctgtggagctgcctggtgcggctgctgaccaaggaccctgagtggctgaatgccaagatgaagttcttcctgcccaacacagacctggacagcagaaatgagaccctggaccctgagcagagggtcatcctgcagctgaacaagctgcacgtgcagggcagtgacacctggcagagcttcatccactgtgtgtgcatgcagctggaggtgcccctggacctggaggtgctgctgctgagcaccttcggctatgatgatggcttcaccagccagctgggcgctgagggcaagagccagcctgagagccagctgcaccacggcctgaagaggccccaccagagctgtggcagcagccccaggaggaagcagtgcaagaagcagcagctggagctggccaagaagtacctgcagctgctgcggaccagcgcccagcagcgctaccgcagccagatccctggcagcggccagccccacgccttccaccaggtgtatgtgccccccatcctgcggcgggccacagccagcctggacaccccagagggcgccatcatgggagatgtgaaggtggaggatggagcagatgtgtccatcagtgacctcttcaacaccagggtgaacaagggcccccgggtgacagtgctgctgggcaaggccggcatgggcaagaccaccctggcccaccggctgtgccagaagtgggccgagggccacctgaactgcttccaggccctcttcctgtttgagttccggcagctgaacctgatcacccgcttcctgacccccagcgagctgctgtttgacctgtacctgagccctgagagtgaccatgacaccgtcttccagtacctggagaagaatgctgaccaggtgctgctgatctttgatggcctggatgaggccctgcagcccatgggcccagatggccctggccctgtgctgaccctcttcagccacctgtgcaatggcaccctgctgcccggctgccgggtgatggccaccagcaggcctgggaagctgcctgcctgcctgcctgctgaggccgccatggtgcacatgctgggctttgatggcccccgggtggaggagtatgtgaaccacttcttcagcgcccagcccagccgggagggcgccctggtggagctgcagaccaacggccgcctgcggagcctgtgtgctgtgcctgccctgtgccaggtggcctgcctgtgcctgcaccacctgctgcctgaccacgcccctggccagagcgtggccctgctgcccaacatgacccagctgtacatgcagatggtgctggccctgagccccccaggccacctgcccaccagcagcctgctggacctgggggaggtggccctgcggggcctggagaccgggaaggtgatcttctacgccaaggacatcgccccacccctgattgcctttggagccacccacagcctgctgaccagcttctgtgtgtgcaccggccctggccaccagcagacaggctacgccttcacccacctgagcctgcaggagttcctggccgccctgcacctgatggccagccccaaggtgaacaaggacaccctgacccagtatgtgaccctgcacagccgctgggtgcagaggaccaaggcccggctgggcctgagtgaccacctgcccaccttcctggccggcctggccagctgcacctgccggcccttcctgagccacctggcccagggcaatgaagactgtgtgggcgccaagcaggccgctgtggtgcaggtgctgaagaagctggccaccaggaagctgaccggccccaaggtggtggagctgtgccactgtgtggatgagacccaggagcctgagctggccagcctgacagcccagagcctgccctaccagctgcccttccacaacttccccctgacctgcacagacctggccaccctgaccaacatcctggagcaccgggaggcccccatccacctggactttgatggctgccccctggagccccactgcccagaggccctggtgggctgcggccagatcgagaacctgtccttcaagagcaggaaatgtggagatgcctttgctgaggccctgagccgcagcctgcccaccatgggccgcctgcagatgctgggcctggccggcagcaagatcacagcccggggcatcagccacctggtgaaggccctgcccctgtgcccccagctgaaggaggtgtccttccgggacaaccagctgagtgaccaggtggtgctgaacatcgtggaggtgctgccccacctgccccggctgaggaagctggacctgagcagcaacagcatctgtgtgtccaccctgctgtgcctggcccgggtggccgtgacctgccccaccgtgaggatgctgcaggcccgggaggccgacctgatcttcctgctgagccccccaacagagaccacagctgagctgcagagggccccagacctgcaggagagtgatggccagaggaagggggcccagagccgcagcctgaccctgcggctgcagaagtgccagctgcaggtgcatgatgctgaggccctgattgccctgctgcaggagggcccccacctggaggaggtggacctgagcggcaaccagctggaggatgagggctgccgcctgatggccgaggccgccagccagctgcacatcgccaggaagctggacctgagcaacaacggcctgtctgtggccggcgtgcactgtgtgctgcgggctgtgtctgcctgctggaccctggccgagctgcacatcagcctgcagcacaagacagtcatcttcatgtttgcccaggagcctgaggagcagaagggcccccaggagcgggccgccttcctggacagcctgatgctgcagatgcccagcgagctgcccctgagcagcaggaggatgaggctgacccactgcggcctgcaggagaagcacctggagcagctgtgcaaggccctgggcggcagctgccacctgggccacctgcacctggacttctctggaaatgccctgggagatgagggcgccgcccggctggcccagctgctgcccggcctgggcgccctgcagagcctgaacctgtctgaaaatggcctgagcctggatgctgtgctgggcctggtgcgctgcttcagcaccctgcagtggctgttccggctggacatcagctttgagagccagcacatcctgctgcggggggacaagaccagccgggacatgtgggccaccggcagcctgcctgacttccctgctgctgccaagttcctgggcttccggcagcgctgcatccccaggagcctgtgcctgtctgagtgccccctggagccccccagcctgacccggctgtgtgccaccctgaaggactgccccggccccctggagctgcagctgagctgtgagttcctgagtgaccagagcctggagaccctgctggactgcctgccccagctgccccagctgagcctgctgcagctgagccagacaggcctgagccccaagagccccttcctgctggccaacaccctgagcctgtgcccccgggtgaagaaggtggacctgcggagcctgcaccacgccaccctgcacttccgcagcaatgaggaggaggagggcgtgtgctgcggccgcttcaccggctgcagcctgagccaggagcacgtggagagcctgtgctggctgctgagcaagtgcaaggacctgagccaggtggacctgagcgccaacctgctgggggacagcggcctgcgctgcctgctggagtgcctgccccaggtgcccatcagcggcctgctggacctgagccacaacagcatcagccaggagagcgccctgtacctgctggagaccctgcccagctgcccccgggtgcgggaggcctctgtgaacctgggcagcgagcagagcttccgcatccacttcagccgggaggaccaggccggcaagaccctgcggctgtctgagtgcagcttccggcctgagcacgtgtcccggctggccaccggcctgagcaagagcctgcagctgacagagctgaccctgacccagtgctgcctgggccagaagcagctggccatcctgctgagcctggtgggccggcctgctggcctcttcagcctgcgggtgcaggagccctgggccgaccgggcccgggtgctgagcctgctggaggtgtgtgcccaggccagcggctctgtgacagagatcagcatcagcgagacccagcagcagctgtgtgtgcagctggagttcccccggcaggaggagaaccctgaggccgtggccctgcggctggcccactgtgacctgggcgcccaccacagcctgctggtgggccagctgatggagacctgtgcccggctgcagcagctgagcctgagccaggtgaacctgtgtgaagatgatgatgccagcagcctgctgctgcagagcctgctgctgagcctgtctgagctgaagaccttccgcatccagagcagccaggaccccggccgcctgctgcctgacctgctgccctttgacccccaccaggccgacctgcagctgtgtgagcaccggggcccccggcccccaggcatctggagcggccccctgccccccctgggcggggccggcctggtgtag

SEQ ID NO: 274027 - DNA, 60 bp, Artificial Sequence
  derived and/or modified sequence
atggaccctgtgggcctgcagctgggcaacaagaacctgtggagctgcctggtgaggtag

SEQ ID NO: 274028 - DNA, 4656 bp, Artificial Sequence
  derived and/or modified sequence
atggaccccgtgggcctgcagctgggcaacaagaacctgtggagctgtttggttaggctcttgacgaaggaccctgagtggctgaacgccaagatgaagttcttcctgccaaacacagatctggactcgaggaatgaaacactcgatcccgaacagcgcgtgatcctgcagctcaataagttacatgtgcagggctccgatacatggcagagttttatccattgcgtgtgcatgcagctcgaagtaccgctagacctggaggtgttgcttctttctaccttcggctacgacgacggctttacctcacaactcggtgccgaagggaagtcacagcccgagtcccagctgcatcacggactgaagaggccacaccaatcttgtggatcctcgcctcgccgaaaacagtgcaaaaaacaacagttagagttagccaaaaaatacttgcagctgcttaggacctcggcgcagcagaggtaccggagtcagatcccaggcagcgggcagccccatgctttccatcaggtttacgttccaccgattctcaggcgcgctaccgcatctctagataccccagagggagccattatgggcgatgtaaaagtcgaggacggggccgatgtctccatctccgatctcttcaacacccgagttaacaaaggacccagagtaactgtgcttctcggcaaggcaggcatggggaaaacaacactggcacatcgtctgtgccagaaatgggccgagggccatctgaattgctttcaagcactcttcctgttcgagttccgtcaattgaacctgataactcgttttctcacgcccagcgagcttttgtttgatttatacctgagccccgagagcgatcacgacaccgtttttcaatacttggagaaaaacgccgatcaggtactgctgatctttgatggcctagacgaggccctccagcctatgggacctgatgggcctggaccagtgctcacattgttcagccatctttgtaatgggactctcctgcctggctgcagagtcatggccacctctcgccccgggaaattaccggcctgtctgcccgccgaagccgcaatggtccacatgcttggctttgacgggccacgagtagaggagtacgtcaatcacttcttttccgctcagccttcaagagaaggcgctctggtcgagctccagaccaacggccgcctgcggtcactatgcgcggtccccgctctgtgccaagttgcttgcttgtgtctacaccacctgctgcccgatcatgctccaggccaaagtgttgccctcctccctaatatgacccagctgtatatgcaaatggttctggcactaagcccccccggccaccttcccactagcagtctgcttgatctgggggaggtggcactgcggggcttagaaactggcaaggtcatcttctatgccaaagacatagccccaccactgatcgctttcggcgcaacccactcattgttaaccagcttttgcgtatgcacgggacccggccatcagcagacaggttacgcgttcacacacctgtcccttcaagagtttttagcagctctccatctgatggctagccctaaagtaaataaagacacccttacacagtacgtcacgctgcactcaagatgggtacagcgcaccaaggcgcggctgggcttgtccgatcatctgccaacgttcttggcaggtctcgcatcttgcacctgccgacctttcctgtcccaccttgcccagggtaacgaagactgtgtgggggcaaagcaggctgccgtggtgcaggtacttaaaaaactggctacgcggaagctgacgggccccaaggtcgtggaactttgccattgtgttgatgaaacacaggaacctgagcttgctagtttgacagcgcaaagcttgccctatcagctgccttttcacaacttcccgttgacctgtacggacttagcaacattaacaaacattcttgagcatagggaagcacccatccacctagatttcgacgggtgtcctctggagccgcattgcccagaggccctggtcggttgcggccaaattgagaatctgtccttcaaatcccggaagtgtggggacgcatttgccgaggccttgagcagatccctgcccactatggggcgcctgcagatgctaggccttgccggctcaaagataacggcccgggggatctctcatctggtgaaggccctgcccctgtgtccccaactgaaagaggtgtctttcagggataatcagctatccgatcaggttgtgctcaatatcgtagaggtgctaccccacttacctaggctgcggaaactcgacctaagctcaaattcaatctgcgtttccacgctcctgtgcctggcccgcgtggctgtgacatgcccaacagtgcgtatgctacaggcccgggaagccgatttgatcttcctcttgtctcctccaacagaaacaacagcggaactgcagcgcgctcccgacttgcaggaaagtgacggccagaggaagggagcccagtcgcggtctttgactctgaggttgcagaaatgccagttgcaagtgcatgacgccgaggccctcatcgctctactccaggagggccctcatctcgaggaggtggacctctctggcaaccagttggaggatgagggctgcagactgatggcggaagcagcctcacagctacacatagcccgaaaactcgatcttagcaataacggccttagtgtagcaggagtgcattgtgtattaagagcggttagcgcctgctggacactggccgagctgcacatcagtctccagcacaaaaccgtgatcttcatgtttgcacaggaacccgaggaacagaaggggcctcaggagagagctgcattcctcgactccttgatgctacagatgccttctgagctgcctttgagttcacggcgcatgcgcctgacccactgcggacttcaagaaaagcacctcgagcaactttgtaaggctctgggcggtagttgtcatctcggccatcttcacctggatttttcaggaaatgcgttgggcgacgagggggcagcaagattagctcaactcctgccaggattgggcgctttacagagcctgaatctcagcgagaatgggctgagtctagacgcggtgttggggttagtgcgctgcttctccactctacagtggctgttccggctagacatcagtttcgagagccagcatattctgctccgtggcgacaagacttctcgggacatgtgggctactggcagcctgcctgattttcctgcggcagcaaaatttctggggtttcgccaacggtgtattccccgatcactgtgcttaagcgagtgccccttagaaccaccatctctgacaagactgtgcgccaccctcaaagattgtcccggaccgctggagctacagctgagctgcgagttcctctctgatcagtccctggaaacattactggactgtctacctcaacttccacagctgagcctgctgcaactttcgcaaactggcttatctcctaaaagtccattcttgttggccaacacactgtccctgtgccccagagttaaaaaggtggatctgaggtcattacaccacgcaactctgcacttcagatccaacgaggaggaagagggtgtatgctgcggccggtttaccggctgtagcctttcccaggagcacgtggaaagcttgtgctggctgctgagcaagtgtaaagatttgtcacaggttgatctgagcgctaacctgcttggtgactctggcctgaggtgcctgctggagtgtctgccacaggtgcccatttcaggtctgctcgacctgtctcacaattccattagtcaggagagcgcactgtatctgcttgagaccttgccatcctgccccagagtcagggaggcctccgtgaacttagggtcggagcagtctttcagaattcattttagtcgtgaagatcaggccggcaagactctccgcctgtctgaatgcagcttccggcctgaacacgtgtccaggctggccacagggctgagcaaatctctgcagttgaccgagctgactctgacgcaatgttgcctcggacagaagcaactcgccattttactgtccctggtcggcaggcccgccggtctcttttcactccgagtacaggaaccttgggccgacagagcccgtgtcctttctctgctagaggtgtgtgctcaagcctccggctctgtgacggagatttcaatttctgaaacccagcaacagttgtgcgtgcaactggaatttccccggcaggaggagaaccccgaggccgtggcgctgcggttagctcactgcgatctgggtgcccaccatagcctgctggttgggcagctcatggagacctgcgcccgattacagcagcttagcctgtcccaagtaaatctgtgtgaagatgatgacgcctcaagcctcctgctccagagcctcttgctcagcctgtcggagctgaagaccttcagaatccagtccagtcaagaccctggccggctgctccccgatctactgcccttcgacccgcatcaagcggacttgcagctgtgtgagcacaggggcccacggcctccagggatttggagtggaccgttgccacctcttggcggagccggactggtctag

SEQ ID NO: 274029 - DNA, 60 bp, Artificial Sequence
  derived and/or modified sequence
atggaccccgtgggcctgcagctgggcaacaagaacctgtggagctgtttagtccgttag

SEQ ID NO: 274030 - DNA, 6886 bp, Artificial Sequence
  derived and/or modified sequence
gcagcagccgccagttccatgcactggcggagcagctctaggcggcggcttctactttcagtttcgtgcagagcgcggaggagccgcgagcgctgagggagtctgcactatggaaacaacctgtcaatccagctcaaggcacacatagcccagacacccatgagaccctctccgtggggaccctagagcacctatcatgaacgaggagaccaaggctggctcctcatggaccccgttggcctccagctcggcaacaagaacctgtggagctgtcttgtgaggctgctcaccaaagacccagaatggctgaacgccaagatgaagttcttcctccccaacacggacctggattccaggaacgagaccttggaccctgaacagagagtcatcctgcaactcaacaagctgcatgtccagggttcggacacctggcagtctttcattcattgtgtgtgcatgcagctggaggtgcctctggacctggaggtgctgctgctgagtacttttggctatgatgatgggttcaccagccagctgggagctgaggggaaaagccaacctgaatctcagctccaccatggcctgaagcgcccacatcagagctgtgggtcctcaccccgccggaagcagtgcaagaagcagcagctagagttggccaagaagtacctgcagctcctgcggacctctgcccagcagcgctacaggagccaaatccctgggtcagggcagccccacgccttccaccaggtctatgtccctccaatcctgcgccgggccacagcatccttagacactccggagggggccattatgggggacgtcaaggtggaagatggtgctgacgtgagcatctcggacctcttcaacaccagggttaacaagggcccgagggtgaccgtgcttttggggaaggctggcatgggcaagaccacgctggcccaccggctctgccagaagtgggcagagggccatctgaactgtttccaggccctgttcctttttgaattccgccagctcaacttgatcacgaggttcctgacaccgtccgagctcctttttgatctgtacctgagccctgaatcggaccacgacactgtcttccagtacctggagaagaacgctgaccaagtcctgctgatctttgatgggctagatgaggccctccagcctatgggtcctgatggcccaggcccagtcctcacccttttctcccatctctgcaatgggaccctcctgcctggctgccgggtgatggctacctcccgtccagggaagctgcctgcctgcctgcctgcagaggcagccatggtccacatgttgggctttgatgggccacgggtggaagaatatgtgaatcacttcttcagcgcccagccatcgcgggagggggccctggtggagttacagacaaatggacgtctccgaagcctgtgtgcggtgcccgcactgtgccaagtcgcctgtctctgcctccaccatctgcttcctgaccacgccccaggccagtctgtggccctcctgcccaacatgactcagctctatatgcagatggtgctcgccctcagcccccctgggcacttgcccacctcgtccctactggacctgggggaggtggccctgaggggcctggagacagggaaggttatcttctatgcaaaagatattgctccacccttgatagcttttggggccactcacagcctgctgacttccttctgcgtctgcacaggccctgggcaccagcagacaggctatgctttcacccacctcagcctgcaggagtttcttgctgccctgcacctgatggccagccccaaggtgaacaaagacacacttacccagtatgttaccctccattcccgctgggtacagcggaccaaagctagactgggcctctcagaccacctccccaccttcctggcgggcctggcatcctgcacctgccgccccttccttagccacctggcgcagggcaatgaggactgtgtgggtgccaagcaggctgctgtagtgcaggtgttgaagaagttggccacccgcaagctcacagggccaaaggttgtagagctgtgtcactgtgtggatgagacacaggagcctgagctggccagtctcaccgcacaaagcctcccctatcaactgcccttccacaatttcccactgacctgcaccgacctggccaccctgaccaacatcctagagcacagggaggcccccatccacctggattttgatggctgtcccctggagccccactgccctgaggctctggtaggctgtgggcagatagagaatctcagctttaagagcaggaagtgtggggatgcctttgcagaagccctctccaggagcttgccgacaatggggaggctgcagatgctggggttagcaggaagtaaaatcactgcccgaggcatcagccacctggtgaaagctttgcctctctgtccacagctgaaagaagtcagttttcgggacaaccagctcagtgaccaggtggtgctgaacattgtggaggttctccctcacctaccacggctccggaagcttgacctgagcagcaacagcatctgcgtgtcaaccctactctgcttggcaagggtggcagtcacgtgtcctaccgtcaggatgcttcaggccagggaggcggacctcatcttccttctttccccgcccacagagacaactgcagagctacaaagagctccagacctgcaggaaagtgacggccagaggaaaggggctcagagcagaagcttgacgctcaggctgcagaagtgtcagctccaggtccacgatgcggaggccctcatagccctgctccaggaaggccctcacctggaggaagtggacctctcagggaaccagctggaagatgaaggctgtcggctgatggcagaggctgcatcccagctgcacatcgccaggaagctggacctcagtaacaacgggctttctgtggccggggtgcattgtgtgctgagggccgtgagtgcgtgctggaccctggcagagctgcacatcagcctgcagcacaaaactgtgatcttcatgtttgcccaggagccagaggagcagaaggggccccaggagagggctgcatttcttgacagcctcatgctccagatgccctctgagctgcctctgagctcccgaaggatgaggctgacacattgtggcctccaagaaaagcacctagagcagctctgcaaggctctgggaggaagctgccacctcggtcacctccacctcgacttctcaggcaatgctctgggggatgaaggtgcagcccggctggctcagctgctcccagggctgggagctctgcagtccttgaacctcagtgagaacggtttgtccctggatgccgtgttgggtttggttcggtgcttctccactctgcagtggctcttccgcttggacatcagctttgaaagccaacacatcctcctgagaggggacaagacaagcagggatatgtgggccactggatctttgccagacttcccagctgcagccaagttcttagggttccgtcagcgctgcatccccaggagcctctgcctcagtgagtgtcctctggagcccccaagcctcacccgcctctgtgccactctgaaggactgcccgggacccctggaactgcaattgtcctgtgagttcctgagtgaccagagcctggagactctactggactgcttacctcaactccctcagctgagcctgctgcagctgagccagacgggactgtccccgaaaagccccttcctgctggccaacaccttaagcctgtgtccacgggttaaaaaggtggatctcaggtccctgcaccatgcaactttgcacttcagatccaacgaggaggaggaaggcgtgtgctgtggcaggttcacaggctgcagcctcagccaggagcacgtagagtcactctgctggttgctgagcaagtgtaaagacctcagccaggtggatctctcagcaaacctgctgggcgacagcggactcagatgccttctggaatgtctgccgcaggtgcccatctccggtttgcttgatctgagtcacaacagcatttctcaggaaagtgccctgtacctgctggagacactgccctcctgcccacgtgtccgggaggcctcagtgaacctgggctctgagcagagcttccggattcacttctccagagaggaccaggctgggaagacactcaggctaagtgagtgcagcttccggccagagcacgtgtccaggctggccaccggcttgagcaagtccctgcagctgacggagctcacgctgacccagtgctgcctgggccagaagcagctggccatcctcctgagcttggtggggcgacccgcagggctgttcagcctcagggtgcaggagccgtgggcggacagagccagggttctctccctgttagaagtctgcgcccaggcctcaggcagtgtcactgaaatcagcatctccgagacccagcagcagctctgtgtccagctggaatttcctcgccaggaagagaatccagaagctgtggcactcaggttggctcactgtgaccttggagcccaccacagccttcttgtcgggcagctgatggagacatgtgccaggctgcagcagctcagcttgtctcaggttaacctctgtgaggacgatgatgccagttccctgctgctgcagagcctcctgctgtccctctctgagctgaagacatttcgcattcagagctcccaagacccagggcggctcctgcctgacctgttgccctttgacccccaccaggctgacctccagctgtgtgagcaccgagggcctcgcccacctggcatctggtctgggccactgccaccacttggaggagctggacttgtctaacaatcaatttgatgaggagggcaccaaggcgctgatgagggcccttgaggggaaatggatgctaaagaggctggacctcagtcaccttctgctgaacagctccaccttggccttgcttactcacagactaagccagatgacctgcctgcagagcctcagactgaacaggaacagtatcggtgatgtcggttgctgccacctttctgaggctctcagggctgccaccagcctagaggagctggacttgagccacaaccagattggagacgctggtgtccagcacttagctaccatcctgcctgggctgccagagctcaggaagatagacctctcagggaatagcatcagctcagccgggggagtgcagttggcagagtctctcgttctttgcaggcgcctggaggagttgatgcttggctgcaatgccctgggggatcccacagccctggggctggctcaggagctgccccagcacctgagggtcctacacctaccattcagccatctgggcccaggtggggccctgagcctggcccaggccctggatggatccccccatttggaagagatcagcttggcggaaaacaacctggctggaggggtcctgcgtttctgtatggagctcccgctgctcagacagatagacctggtttcctgtaagattgacaaccagactgccaagctcctcacctccagcttcacgagctgccctgccctggaagtaatcttgctgtcctggaatctcctcggggatgaggcagctgccgagctggcccaggtgctgccgcagatgggccggctgaagagagtggacctggagaagaatcagatcacagctttgggggcctggctcctggctgaaggactggcccaggggtctagcatccaagtcatccgcctctggaataaccccattccctgcgacatggcccagcacctgaagagccaggagcccaggctggactttgccttctttgacaaccagccccaggccccttggggtacttgatggccccctcaagacctttggaatccagccaagtgatgcacccaaatgatccacctttcgcccactgggataattgactcaggaaagaagagcctcggcagggcgctctgcactccacccaggaggaaggatacgtgtgtcctgctgcagtcctcagggagaacttttttgggaaccaggagctgggtctggacaaaggagtaccctgcattacgtgggatatgtgtgatcaattggggacatgcgacacacaatgagggtgtcatgacaatgcatgacacgtacggttatatgtggcagtgtgaccccttgacatgtggcgttacatgaaagtcagtgtggcacgtgttctgtggcatgggtgctggcatcccaagtagcaggatacatgattgttggtctatatatgacacatgacaaatgtccatgtcacaggactcatggctggccagatgacctcaggctggcccaagatctaatttattaatttttaaagcaaatacatatttatagattgtgtgtatggagcagctaagtcaggaaaagtcttccgcccgagctgggaggggagagtgtccatgcactgaccagtccaggggctcaagggccagggctctggaacaagccagggactcagccattaagtcccctcctgcctcaatcctcagcctacccatctataaacttgatgactcctcccttacttacatactagcttccaaggacaggtggaggtagggccagcctggcgggagtggagaagcccagtctgtcctatgtaagggacaaagccaggtctaatggtactgggtagggggcactgccaagacaataagctaggctactgggtccagctactactttggtgggattcaggtgagtctccatgcacttcacatgttacccagtgttcttgttacttccaaggagaaccaagaatggctctgtcacactcgaagccaggcttgatcaataaacacaatggtattccacgtc

SEQ ID NO: 274031 - DNA, 4656 bp, Artificial Sequence
  derived and/or modified sequence
atggaccctgtcggcttgcaactggggaataagaacctgtggtcatgccttgtgcggcttctcaccaaagatcccgagtggctgaacgccaaaatgaagttttttctgccaaacacagacctggactcaaggaacgagacacttgatcctgagcagcgcgtgatcctgcagttgaacaaactgcatgtgcagggcagcgatacctggcaaagttttatccattgcgtctgcatgcaactcgaggtccccttggacctcgaagtccttctcctcagcaccttcggctacgatgatgggttcacctctcagcttggcgcagagggcaaaagccaacccgaaagtcagctacaccacggattgaagcgtccccaccagagctgtggctctagtccgaggaggaagcagtgcaagaagcagcagttggaactggccaagaaatatctgcagctccttagaacgtctgcccagcaaaggtatcgatcccagatccccggttcaggccaaccccacgcattccaccaggtgtacgtgccacctatcctcaggcgcgctaccgcttccctcgataccccagagggggcaatcatgggtgatgttaaagtggaagacggtgctgatgttagcatctcagatctctttaacaccagggtcaataaaggaccccgagtgacagtgctcctggggaaggccggaatgggcaagacgactcttgctcatcgcctttgccagaaatgggctgagggccaccttaattgtttccaagccctctttcttttcgagtttaggcaactcaacctgataaccagattcctgactcctagcgagcttctgttcgatctctaccttagccccgaatcagatcatgacaccgtgttccaatatttggagaagaatgccgatcaggtcctgctgatctttgacggtttagacgaagcgctccagcctatgggtcccgacggacccggtccagttcttaccctgttttctcacctatgtaatggaaccctactgcccggatgcagagttatggccacgagccgcccaggtaagcttcctgcgtgccttcccgctgaagcagccatggttcacatgctagggtttgacggcccacgcgtcgaagagtacgtaaaccatttcttcagcgcccaacctagccgggagggggcacttgtcgaactgcagaccaacggtaggctgcggagcctttgtgcagtgcctgccctgtgccaggtggcgtgcctgtgtctgcatcacttgctgcccgatcatgctcccggtcaatctgtggcgctgctgccgaacatgacacagctgtatatgcaaatggtgctggcactttcgcccccaggacacctgcccacatcctctctattggatctgggggaggttgctctgcggggtttggaaacaggtaaggtaattttctatgcgaaggatatcgctcccccactgatagcctttggggcaactcatagtttgctcaccagtttctgcgtgtgcaccgggccaggacatcagcaaacaggatacgcctttacacacctgagcttgcaggagttccttgcagcgctccacctcatggcttcgcctaaagtcaataaggacacgctgactcagtacgtgactctacactcaaggtgggtacaaaggactaaggctagactgggcctttctgatcatctcccgactttcctggccggacttgcctcatgcacctgcagacccttcctttcccacctggctcagggcaacgaagactgtgtaggcgctaaacaggctgcggtcgtacaggtcctgaaaaagctggcgacaaggaagcttaccggacccaaggtggtggaactgtgtcactgcgtcgacgagacccaggagccagaattagcctccctaaccgctcaatcactgccatatcagctgcccttccacaactttccattaacctgtactgacttagctacactgacgaatattcttgagcacagagaggcccctattcatctggacttcgatggatgccctctagaaccccactgcccagaagccctggttggctgcggacaaatagagaacctgagctttaagagcaggaagtgtggagatgccttcgcagaggccttgtcacggagcttgccaaccatgggaagattacaaatgctgggtttggcagggagcaagatcaccgcgagaggcatcagtcacctagtgaaggcacttcctctttgtccccagttgaaggaggtgtcttttcgcgataaccagttgtccgaccaggtcgtactgaatatcgtggaggtcctgccccacctccctcgccttagaaaattagaccttagttcgaattctatctgtgtgtccacccttctgtgtctggccagggtggccgtaacgtgcccaacagtgcgaatgctgcaggccagggaggcagacttgattttcttgttgagtccgcctacagagaccacagccgaactgcagagagccccagatctccaggagagtgatgggcagcggaagggcgcacagtccaggtccttaactctgcggcttcagaagtgccagttgcaggttcatgacgctgaggctctgatagccctactacaagaagggcctcatctcgaggaagttgacctttctggaaaccagttggaggacgaaggctgccgactcatggccgaggccgcttcccagctgcacattgcacgcaaactcgaccttagtaacaatggcctgagcgttgctggagtgcattgcgtcctgagagctgtaagtgcatgctggacattggccgagctgcacatttctttgcagcacaagaccgttatctttatgtttgcccaagaaccagaggagcaaaagggtccacaggagcgcgctgcctttctggatagcctcatgctgcagatgccatctgagctgccgctgagctctcgtagaatgcgcctcacccactgcggcttacaggaaaagcacctggaacagttgtgcaaagctcttggcggttcctgccacctgggacacctacatcttgacttttcaggtaacgcccttggcgacgaaggtgcggcacgtctggctcagctcctaccaggcctgggagccttacaatccctgaacctaagcgagaacggcttatccctagacgcagtgctcggcttagtaagatgctttagcaccctccaatggctgttcaggctggacattagtttcgaatcgcagcacatacttttacggggtgacaagactagccgagacatgtgggcaaccggaagcctgcctgattttccagcggctgctaaatttttgggttttaggcaaagatgtattccgcgaagcctgtgtctgagtgaatgcccccttgagccaccatcactgacaaggctctgtgcaacgctgaaggactgtccaggtcccctggagttacaactgtcttgtgagtttctcagtgaccagtctctggaaacacttcttgattgtctaccacagctgccgcagctctctcttctgcagctgagccaaaccggcctgtcacccaagagccccttcttgctcgcaaacaccctctcactgtgtcctcgcgtcaaaaaggtggacctccggagcttgcatcacgcaacactacattttaggtcaaacgaagaggaagagggagtctgttgtgggcgtttcacagggtgtagcctgtcccaggagcacgtggaatcattatgttggttgctgagcaagtgcaaagatctctcccaggtagacctgagcgcaaatttgctgggtgactccggactccgctgcctcctggaatgcctcccgcaggtacctattagcggactcctggacttatctcacaactccatttctcaggagagtgcactgtacctgctggagacactccctagctgcccgagagttcgggaggctagcgtcaacctcggcagtgagcagtcctttaggatacatttttctagggaagaccaggctggcaaaaccttgagattgtcggaatgtagctttaggccggagcacgtttctcgcttagccaccgggttatctaaatcactgcagctgaccgagctgaccctcacgcaatgctgtctggggcaaaaacagctggctattcttctgtcactggttggcagaccggctgggttattctcactcagggtgcaggagccctgggccgatcgcgcaagggtcctatccctgttggaggtgtgcgcccaggcatctgggtcagtcaccgaaatctcaatctctgagacccaacagcagttgtgtgtgcagctggagttccctcgccaggaagagaacccggaggccgtcgctctacgattggcccactgcgacctcggcgctcaccatagtctcctggtcggacagctcatggaaacatgcgccaggcttcagcagttgtccctgagtcaggtgaatctctgcgaggacgacgatgcatcctcactactgctccaaagcctgttgttgagcctgagcgagctgaaaacattccggattcagagctcacaggatccaggtcgactgctgcccgatttactgccattcgatccacaccaggccgaccttcaactgtgcgagcatagaggtcccagaccacctggcatctggtctggtcccttgccgcctctggggggagcagggttggtgtag

SEQ ID NO: 274032 - DNA, 60 bp, Artificial Sequence
  derived and/or modified sequence
atggatcctgtgggattacaattgggcaataaaaacctttggtcttgcctggtgcggtag

SEQ ID NO: 274033 - DNA, 225 bp, Artificial Sequence
  derived and/or modified sequence
atggaccccgtgggcctgcagctgggcaacaagaacctgtggagctgcctggtgagactgctgaccaaggaccccgagtggctgaacgccaagatgaagttcttcctgcccaacaccgacctggacagcagaaacgagaccctggaccccgagcagagagtgatcctgcagctgaacaagctgcacgtgcagggcagcgacacctggcagagcttcatccactag

SEQ ID NO: 274034 - DNA, 225 bp, Artificial Sequence
  derived and/or modified sequence
atggatcccgtaggactgcaattgggaaacaagaacttgtggagctgtttggtacgcctactgactaaggaccctgagtggttaaatgctaagatgaagtttttcttacctaatacagatttggacagtcggaacgagacgctcgacccagagcaacgtgtaattcttcagcttaataagctccatgtgcagggtagcgatacatggcagtctttcatccactag

SEQ ID NO: 274035 - DNA, 225 bp, Artificial Sequence
  derived and/or modified sequence
atggaccctgtgggcctgcagctgggcaacaagaacctgtggagctgcctggtgcggctgctgaccaaggaccctgagtggctgaatgccaagatgaagttcttcctgcccaacacagacctggacagcagaaatgagaccctggaccctgagcagagggtcatcctgcagctgaacaagctgcacgtgcagggcagtgacacctggcagagcttcatccactag

SEQ ID NO: 274036 - DNA, 225 bp, Artificial Sequence
  derived and/or modified sequence
atggaccccgtgggcctgcagctgggcaacaagaacctgtggagctgtctggttcgcctgctgaccaaagatcccgaatggctgaatgccaaaatgaaattcttcttgccgaatacagatctggactccaggaacgaaacactagatcctgagcagagggtgatactccagttgaacaaacttcacgtgcagggcagtgacacatggcagtcattcatccattag

SEQ ID NO: 274037 - DNA, 225 bp, Artificial Sequence
  derived and/or modified sequence
atggatcccgtaggcctgcagctcggtaataagaatttatggagttgtctagtcaggttgttgacaaaggacccagagtggcttaatgccaagatgaagttttttttgcccaacaccgacttagatagcaggaatgagaccctggatcctgagcagagagtgattttgcagttgaataaacttcacgtgcagggtagcgatacatggcagtctttcatacactag

SEQ ID NO: 274038 - protein, 1837 aa, Artificial Sequence
  derived and/or modified sequence
MDPVGLQLGNKNLWSCLVRLLTKDPEWLNAKMKFFLPNTDLDSRNETLDPEQRVILQLNKLHVQGSDTWQSFIHCVCMQLEVPLDLEVLLLSTFGYDDGFTSQLGAEGKSQPESQLHHGLKRPHQSCGSSPRRKQCKKQQLELAKKYLQLLRTSAQQRYRSQIPGSGQPHAFHQVYVPPILRRATASLDTPEGAIMGDVKVEDGADVSISDLFNTRVNKGPRVTVLLGKAGMGKTTLAHRLCQKWAEGHLNCFQALFLFEFRQLNLITRFLTPSELLFDLYLSPESDHDTVFQYLEKNADQVLLIFDGLDEALQPMGPDGPGPVLTLFSHLCNGTLLPGCRVMATSRPGKLPACLPAEAAMVHMLGFDGPRVEEYVNHFFSAQPSREGALVELQTNGRLRSLCAVPALCQVACLCLHHLLPDHAPGQSVALLPNMTQLYMQMVLALSPPGHLPTSSLLDLGEVALRGLETGKVIFYAKDIAPPLIAFGATHSLLTSFCVCTGPGHQQTGYAFTHLSLQEFLAALHLMASPKVNKDTLTQYVTLHSRWVQRTKARLGLSDHLPTFLAGLASCTCRPFLSHLAQGNEDCVGAKQAAVVQVLKKLATRKLTGPKVVELCHCVDETQEPELASLTAQSLPYQLPFHNFPLTCTDLATLTNILEHREAPIHLDFDGCPLEPHCPEALVGCGQIENLSFKSRKCGDAFAEALSRSLPTMGRLQMLGLAGSKITARGISHLVKALPLCPQLKEVSFRDNQLSDQVVLNIVEVLPHLPRLRKLDLSSNSICVSTLLCLARVAVTCPTVRMLQAREADLIFLLSPPTETTAELQRAPDLQESDGQRKGAQSRSLTLRLQKCQLQVHDAEALIALLQEGPHLEEVDLSGNQLEDEGCRLMAEAASQLHIARKLDLSNNGLSVAGVHCVLRAVSACWTLAELHISLQHKTVIFMFAQEPEEQKGPQERAAFLDSLMLQMPSELPLSSRRMRLTHCGLQEKHLEQLCKALGGSCHLGHLHLDFSGNALGDEGAARLAQLLPGLGALQSLNLSENGLSLDAVLGLVRCFSTLQWLFRLDISFESQHILLRGDKTSRDMWATGSLPDFPAAAKFLGFRQRCIPRSLCLSECPLEPPSLTRLCATLKDCPGPLELQLSCEFLSDQSLETLLDCLPQLPQLSLLQLSQTGLSPKSPFLLANTLSLCPRVKKVDLRSLHHATLHFRSNEEEEGVCCGLSANLLGDSGLRCLLECLPQVPISGLLDLSHNSISQESALYLLETLPSCPRVREASVNLGSEQSFRIHFSREDQAGKTLRLSECSFRPEHVSRLATGLSKSLQLTELTLTQCCLGQKQLAILLSLVGRPAGLFSLRVQEPWADRARVLSLLEVCAQASGSVTEISISETQQQLCVQLEFPRQEENPEAVALRLAHCDLGAHHSLLVGQLMETCARLQQLSLSQVNLCEDDDASSLLLQSLLLSLSELKTFRLTSSCVSTEGLAHLASGLGHCHHLEELDLSNNQFDEEGTKALMRALEGKWMLKRLDLSHLLLNSSTLALLTHRLSQMTCLQSLRLNRNSIGDVGCCHLSEALRAATSLEELDLSHNQIGDAGVQHLATILPGLPELRKIDLSGNSISSAGGVQLAESLVLCRRLEELMLGCNALGDPTALGLAQELPQHLRVLHLPFSHLGPGGALSLAQALDGSPHLEEISLAENNLAGGVLRFCMELPLLRQIDLVSCKIDNQTAKLLTSSFTSCPALEVILLSWNLLGDEAAAELAQVLPQMGRLKRVDLEKNQITALGAWLLAEGLAQGSSIQVIRLWNNPIPCDMAQHLKSQEPRLDFAFFDNQPQAPWGT

SEQ ID NO: 274039 - DNA, 5514 bp, Artificial Sequence
  derived and/or modified sequence
atggaccccgtgggcctgcagctgggcaacaagaacctgtggagctgcctggtgagactgctgaccaaggaccccgagtggctgaacgccaagatgaagttcttcctgcccaacaccgacctggacagcagaaacgagaccctggaccccgagcagagagtgatcctgcagctgaacaagctgcacgtgcagggcagcgacacctggcagagcttcatccactgcgtgtgcatgcagctggaggtgcccctggacctggaggtgctgctgctgagcaccttcggctacgacgacggcttcaccagccagctgggcgccgagggcaagagccagcccgagagccagctgcaccacggcctgaagagaccccaccagagctgcggcagcagccccagaagaaagcagtgcaagaagcagcagctggagctggccaagaagtacctgcagctgctgagaaccagcgcccagcagagatacagaagccagatccccggcagcggccagccccacgccttccaccaggtgtacgtgccccccatcctgagaagagccaccgccagcctggacacccccgagggcgccatcatgggcgacgtgaaggtggaggacggcgccgacgtgagcatcagcgacctgttcaacaccagagtgaacaagggccccagagtgaccgtgctgctgggcaaggccggcatgggcaagaccaccctggcccacagactgtgccagaagtgggccgagggccacctgaactgcttccaggccctgttcctgttcgagttcagacagctgaacctgatcaccagattcctgacccccagcgagctgctgttcgacctgtacctgagccccgagagcgaccacgacaccgtgttccagtacctggagaagaacgccgaccaggtgctgctgatcttcgacggcctggacgaggccctgcagcccatgggccccgacggccccggccccgtgctgaccctgttcagccacctgtgcaacggcaccctgctgcccggctgcagagtgatggccaccagcagacccggcaagctgcccgcctgcctgcccgccgaggccgccatggtgcacatgctgggcttcgacggccccagagtggaggagtacgtgaaccacttcttcagcgcccagcccagcagagagggcgccctggtggagctgcagaccaacggcagactgagaagcctgtgcgccgtgcccgccctgtgccaggtggcctgcctgtgcctgcaccacctgctgcccgaccacgcccccggccagagcgtggccctgctgcccaacatgacccagctgtacatgcagatggtgctggccctgagcccccccggccacctgcccaccagcagcctgctggacctgggcgaggtggccctgagaggcctggagaccggcaaggtgatcttctacgccaaggacatcgccccccccctgatcgccttcggcgccacccacagcctgctgaccagcttctgcgtgtgcaccggccccggccaccagcagaccggctacgccttcacccacctgagcctgcaggagttcctggccgccctgcacctgatggccagccccaaggtgaacaaggacaccctgacccagtacgtgaccctgcacagcagatgggtgcagagaaccaaggccagactgggcctgagcgaccacctgcccaccttcctggccggcctggccagctgcacctgcagacccttcctgagccacctggcccagggcaacgaggactgcgtgggcgccaagcaggccgccgtggtgcaggtgctgaagaagctggccaccagaaagctgaccggccccaaggtggtggagctgtgccactgcgtggacgagacccaggagcccgagctggccagcctgaccgcccagagcctgccctaccagctgcccttccacaacttccccctgacctgcaccgacctggccaccctgaccaacatcctggagcacagagaggcccccatccacctggacttcgacggctgccccctggagccccactgccccgaggccctggtgggctgcggccagatcgagaacctgagcttcaagagcagaaagtgcggcgacgccttcgccgaggccctgagcagaagcctgcccaccatgggcagactgcagatgctgggcctggccggcagcaagatcaccgccagaggcatcagccacctggtgaaggccctgcccctgtgcccccagctgaaggaggtgagcttcagagacaaccagctgagcgaccaggtggtgctgaacatcgtggaggtgctgccccacctgcccagactgagaaagctggacctgagcagcaacagcatctgcgtgagcaccctgctgtgcctggccagagtggccgtgacctgccccaccgtgagaatgctgcaggccagagaggccgacctgatcttcctgctgagcccccccaccgagaccaccgccgagctgcagagagcccccgacctgcaggagagcgacggccagagaaagggcgcccagagcagaagcctgaccctgagactgcagaagtgccagctgcaggtgcacgacgccgaggccctgatcgccctgctgcaggagggcccccacctggaggaggtggacctgagcggcaaccagctggaggacgagggctgcagactgatggccgaggccgccagccagctgcacatcgccagaaagctggacctgagcaacaacggcctgagcgtggccggcgtgcactgcgtgctgagagccgtgagcgcctgctggaccctggccgagctgcacatcagcctgcagcacaagaccgtgatcttcatgttcgcccaggagcccgaggagcagaagggcccccaggagagagccgccttcctggacagcctgatgctgcagatgcccagcgagctgcccctgagcagcagaagaatgagactgacccactgcggcctgcaggagaagcacctggagcagctgtgcaaggccctgggcggcagctgccacctgggccacctgcacctggacttcagcggcaacgccctgggcgacgagggcgccgccagactggcccagctgctgcccggcctgggcgccctgcagagcctgaacctgagcgagaacggcctgagcctggacgccgtgctgggcctggtgagatgcttcagcaccctgcagtggctgttcagactggacatcagcttcgagagccagcacatcctgctgagaggcgacaagaccagcagagacatgtgggccaccggcagcctgcccgacttccccgccgccgccaagttcctgggcttcagacagagatgcatccccagaagcctgtgcctgagcgagtgccccctggagccccccagcctgaccagactgtgcgccaccctgaaggactgccccggccccctggagctgcagctgagctgcgagttcctgagcgaccagagcctggagaccctgctggactgcctgccccagctgccccagctgagcctgctgcagctgagccagaccggcctgagccccaagagccccttcctgctggccaacaccctgagcctgtgccccagagtgaagaaggtggacctgagaagcctgcaccacgccaccctgcacttcagaagcaacgaggaggaggagggcgtgtgctgcggcctgagcgccaacctgctgggcgacagcggcctgagatgcctgctggagtgcctgccccaggtgcccatcagcggcctgctggacctgagccacaacagcatcagccaggagagcgccctgtacctgctggagaccctgcccagctgccccagagtgagagaggccagcgtgaacctgggcagcgagcagagcttcagaatccacttcagcagagaggaccaggccggcaagaccctgagactgagcgagtgcagcttcagacccgagcacgtgagcagactggccaccggcctgagcaagagcctgcagctgaccgagctgaccctgacccagtgctgcctgggccagaagcagctggccatcctgctgagcctggtgggcagacccgccggcctgttcagcctgagagtgcaggagccctgggccgacagagccagagtgctgagcctgctggaggtgtgcgcccaggccagcggcagcgtgaccgagatcagcatcagcgagacccagcagcagctgtgcgtgcagctggagttccccagacaggaggagaaccccgaggccgtggccctgagactggcccactgcgacctgggcgcccaccacagcctgctggtgggccagctgatggagacctgcgccagactgcagcagctgagcctgagccaggtgaacctgtgcgaggacgacgacgccagcagcctgctgctgcagagcctgctgctgagcctgagcgagctgaagaccttcagactgaccagcagctgcgtgagcaccgagggcctggcccacctggccagcggcctgggccactgccaccacctggaggagctggacctgagcaacaaccagttcgacgaggagggcaccaaggccctgatgagagccctggagggcaagtggatgctgaagagactggacctgagccacctgctgctgaacagcagcaccctggccctgctgacccacagactgagccagatgacctgcctgcagagcctgagactgaacagaaacagcatcggcgacgtgggctgctgccacctgagcgaggccctgagagccgccaccagcctggaggagctggacctgagccacaaccagatcggcgacgccggcgtgcagcacctggccaccatcctgcccggcctgcccgagctgagaaagatcgacctgagcggcaacagcatcagcagcgccggcggcgtgcagctggccgagagcctggtgctgtgcagaagactggaggagctgatgctgggctgcaacgccctgggcgaccccaccgccctgggcctggcccaggagctgccccagcacctgagagtgctgcacctgcccttcagccacctgggccccggcggcgccctgagcctggcccaggccctggacggcagcccccacctggaggagatcagcctggccgagaacaacctggccggcggcgtgctgagattctgcatggagctgcccctgctgagacagatcgacctggtgagctgcaagatcgacaaccagaccgccaagctgctgaccagcagcttcaccagctgccccgccctggaggtgatcctgctgagctggaacctgctgggcgacgaggccgccgccgagctggcccaggtgctgccccagatgggcagactgaagagagtggacctggagaagaaccagatcaccgccctgggcgcctggctgctggccgagggcctggcccagggcagcagcatccaggtgatcagactgtggaacaaccccatcccctgcgacatggcccagcacctgaagagccaggagcccagactggacttcgccttcttcgacaaccagccccaggccccctggggcacctag

SEQ ID NO: 274040 - DNA, 5514 bp, Artificial Sequence
  derived and/or modified sequence
atggacccagttggcctgcagctaggcaacaagaacttgtggagctgcttggttaggctgctgactaaggatccagagtggctgaacgcgaagatgaaattttttctccccaatacagacctggactcccgaaacgagaccctagatcccgagcagagagtgattcttcagctgaacaagctgcatgttcagggttccgatacatggcagagtttcatacattgcgtttgtatgcagctggaggtgccactcgacttagaggtgctgttgctctccacattcggttacgacgatggtttcacctctcagctgggcgcagagggaaaaagccagccagagagccagctgcaccacgggctaaaacgccctcatcagtcctgcggaagctcacctaggcgaaagcagtgtaagaaacagcagctggaactagctaaaaagtatctacagttgctgcggacaagcgcccagcagcgatatcgttcccagataccaggctctggccagccgcatgcattccaccaggtctatgtccctcctatcctgaggcgtgcgacggcttcccttgacactcccgagggagctatcatgggagatgtcaaagtggaagacggagctgacgtgagtatttccgatctgttcaatacgagagtgaacaaaggacccagggtgacagtactgctgggcaaagctggcatgggcaaaactacgctagctcatcgcctctgtcaaaaatgggctgagggccatctgaactgtttccaggctctgttcctgttcgagtttagacagctgaatctcattacccgtttcctaacgcctagcgaactgctgtttgatctttacctgtctcctgagtcagaccatgacaccgttttccaatacctcgaaaagaacgccgatcaggtgcttctgatctttgatgggctagatgaggccctgcagccgatgggtccagacggtcccggacccgttctgaccctattcagtcatttgtgcaacggcacactgctcccaggctgcagagtgatggcaacgtcacgaccgggtaaactgcctgcgtgtttgcctgctgaggcagcaatggtgcacatgctgggattcgacggtccgcgggtggaagagtacgtgaaccacttcttcagcgcccagccttcacgggaaggcgccttggttgaactacaaaccaatggtcggctgaggagcctgtgcgcagtgcctgctctctgccaggtggcctgtctgtgcctccatcatctgctgccagatcacgcgccagggcaatctgtggctctattaccaaatatgacccaattatatatgcaaatggtcctcgctctctccccacctggacacttgccgacatcttccctgctcgatctcggagaggtcgctctgcgaggattggaaacagggaaagtaatcttttatgccaaggacatcgcaccccccctgattgccttcggcgcgacccatagcttgctcacttccttttgcgtctgtacaggccccgggcatcagcaaactggctatgcattcacacaccttagcttgcaggaattcctcgccgcacttcatttgatggcgtctcccaaagtaaataaagacacactgacacagtacgtgacgcttcactcacgatgggtgcaacgaacaaaggcaaggctcggactgagcgaccacctgcccaccttcctggctgggctcgccagctgtacatgtcggccgttcctgtctcacctggcacagggcaatgaggattgtgtaggcgcaaaacaggcggccgtggtgcaagttttaaagaagctggcgacgagaaaactgacaggcccgaaagtggtggaactctgccactgtgtagacgagacacaggagcccgagcttgcctctttaacggcccagtctctcccatatcagctaccgtttcataatttcccattgacatgcaccgatttggctacgctgacaaacattctggaacacagggaggcgccaatccatctggacttcgacggatgcccgttagagcctcattgccctgaggctttggtcgggtgtgggcaaatcgaaaacctctcttttaagagccgtaaatgcggtgatgcattcgctgaagccctttcacggtctctccctactatgggacgcctgcagatgctcggtttagctggcagcaagataactgcccgcggcatcagccacctcgtgaaagcattacccctgtgcccccaactgaaagaagtgtccttccgtgataaccagctatccgaccaggtggtgctgaatattgtagaggtgcttccgcatctgcccagacttaggaaactggacctaagttccaactctatctgcgttagcacgctgctgtgcttggctcgcgtcgccgtcacgtgtccgaccgttagaatgttgcaggcacgggaagctgacttaattttcttgttatctccgcctaccgagactactgctgagctgcagcgcgcacctgaccttcaagagagcgacggacaacgcaagggcgcacagtccaggtctctaaccctaagactgcagaagtgccagctgcaagtgcatgacgccgaggctctgattgctctcctacaggaaggaccacacctcgaggaggtggacctgagcgggaaccaactggaagacgaaggctgcagactgatggctgaagccgccagtcagctgcacatcgctagaaagttggaccttagcaacaacggattgtccgtggcaggtgttcactgtgtacttagagccgttagcgcctgctggaccttagctgagctgcacatatccctgcagcacaaaacggtgattttcatgttcgctcaggagccagaggaacagaaaggaccgcaagaaagagcagcctttctcgattcgctcatgctgcagatgcctagcgaactgccgctatcatcacgaagaatgaggttgacccactgcgggttgcaggagaagcacttggaacagctctgcaaagctctcggcggctcctgccatctgggacatctgcacctggatttttctggaaacgcattaggggatgagggagctgcccggctagcccagctcttgcctggccttggagcccttcagagcctaaacctgagcgaaaatgggcttagcttagacgccgtgctcggactagtgcgctgtttcagtactctgcagtggctgtttcgactggacatatcgtttgagagccagcatatcctgctgagaggcgacaaaacatcgcgagacatgtgggccacggggtcactacccgattttccggcagccgccaagttcctggggtttagacaacggtgtattcctcgatcactatgcctgtccgagtgccccctggaaccgcccagcctcactcggttgtgcgccactctcaaggactgccccggccccctcgaactgcagctctcttgtgagttcctttcggaccaaagcctggaaaccctgctggattgtctgccacagctgcctcagctgtccttactgcaactctcccagaccgggctgagcccaaaatcaccctttctactggccaatactttatctctctgcccccgcgtcaaaaaagtggacctccggtcccttcatcacgcgacccttcactttagaagcaatgaagaggaagagggtgtgtgctgtggccttagtgcgaatttattaggagactctggtttgcggtgtctgctagagtgtctgccacaagtcccgatctctggcttgctggatctctctcataactccatatcccaggaaagcgctctgtacctgttggaaactctgcctagctgtcctcgggtgcgcgaggcaagtgtgaacctgggatcagagcagtccttcaggattcactttagtagggaagatcaagctggaaagactttgcgattgtctgagtgcagcttccgtcccgagcacgtgagccggctagccactgggcttagcaagagcctgcagttgactgaattaactttgacacagtgctgcctcggacaaaagcagctagcgattctgttaagtttggttggtcgcccagctggactcttctcactccgagtacaagagccatgggccgatcgagctcgggtgctctctttactcgaggtatgcgctcaggcgtctggatcggtgacagagattagcatttctgagacccagcagcagctgtgtgtgcagctcgaattcccccggcaagaagagaatcctgaggcagtggcactcagattggcacattgtgacttaggcgcacaccattctctgctggtgggccagctaatggagacttgtgctagactgcagcagcttagtctgagccaggtcaatctgtgcgaggatgacgacgcaagctctctgttactgcagtctttgctgttatccctcagcgagttgaagacatttcgactgacttcaagttgcgtctccactgaaggcctcgcacatcttgcttcaggtttgggacactgccatcatctggaggaactagatctgtccaataatcaattcgatgaggaaggcaccaaagccttaatgagggccctcgaagggaagtggatgctgaaaagactcgacctctctcatttactcctgaatagcagcacactggctctgctaacacatcggctctcccaaatgacttgcctgcagtcactaaggttgaatcggaatagtattggcgatgtgggctgctgccatctgtccgaggccctgagggcggcaacctccctcgaggaactcgacctgtctcacaatcagattggggacgcaggggtgcagcatctggcgaccattcttcccggactaccagagcttcgcaagattgacttgtctggcaactctatcagctctgccggaggggtacagctggcggaatccctcgtgctttgtcgccggcttgaagaactgatgttagggtgcaatgcattgggggacccaacggcactgggtctggcccaggaactcccacaacacctaagagtgctacatctccccttttcccacctggggcccggtggtgcgctgagcctcgcccaagcgctggacggctctccacacctggaagaaattagcctggcggagaacaatctggcaggcggggtgctccgcttttgtatggaactccccctcctgcggcagattgacctcgtgtcctgcaaaatcgacaatcagactgcaaaacttttaactagctcattcaccagctgtccggccctcgaagtcatcctgctcagctggaatctgctgggtgatgaagccgcagctgagctggcacaggtactccctcagatgggacgacttaagcgggtggatcttgaaaagaaccagattacggctctgggggcctggcttctggccgaaggactggcgcaaggaagctccatacaggtgattcgactgtggaacaatcccataccatgcgacatggctcagcacctcaagtcgcaggaacctcgattggatttcgcttttttcgataatcagccgcaagctccgtgggggacatag

SEQ ID NO: 274041 - DNA, 5514 bp, Artificial Sequence
  derived and/or modified sequence
atggaccctgtgggcctgcagctgggcaacaagaacctgtggagctgcctggtgcggctgctgaccaaggaccctgagtggctgaatgccaagatgaagttcttcctgcccaacacagacctggacagcagaaatgagaccctggaccctgagcagagggtcatcctgcagctgaacaagctgcacgtgcagggcagtgacacctggcagagcttcatccactgtgtgtgcatgcagctggaggtgcccctggacctggaggtgctgctgctgagcaccttcggctatgatgatggcttcaccagccagctgggcgctgagggcaagagccagcctgagagccagctgcaccacggcctgaagaggccccaccagagctgtggcagcagccccaggaggaagcagtgcaagaagcagcagctggagctggccaagaagtacctgcagctgctgcggaccagcgcccagcagcgctaccgcagccagatccctggcagcggccagccccacgccttccaccaggtgtatgtgccccccatcctgcggcgggccacagccagcctggacaccccagagggcgccatcatgggagatgtgaaggtggaggatggagcagatgtgtccatcagtgacctcttcaacaccagggtgaacaagggcccccgggtgacagtgctgctgggcaaggccggcatgggcaagaccaccctggcccaccggctgtgccagaagtgggccgagggccacctgaactgcttccaggccctcttcctgtttgagttccggcagctgaacctgatcacccgcttcctgacccccagcgagctgctgtttgacctgtacctgagccctgagagtgaccatgacaccgtcttccagtacctggagaagaatgctgaccaggtgctgctgatctttgatggcctggatgaggccctgcagcccatgggcccagatggccctggccctgtgctgaccctcttcagccacctgtgcaatggcaccctgctgcccggctgccgggtgatggccaccagcaggcctgggaagctgcctgcctgcctgcctgctgaggccgccatggtgcacatgctgggctttgatggcccccgggtggaggagtatgtgaaccacttcttcagcgcccagcccagccgggagggcgccctggtggagctgcagaccaacggccgcctgcggagcctgtgtgctgtgcctgccctgtgccaggtggcctgcctgtgcctgcaccacctgctgcctgaccacgcccctggccagagcgtggccctgctgcccaacatgacccagctgtacatgcagatggtgctggccctgagccccccaggccacctgcccaccagcagcctgctggacctgggggaggtggccctgcggggcctggagaccgggaaggtgatcttctacgccaaggacatcgccccacccctgattgcctttggagccacccacagcctgctgaccagcttctgtgtgtgcaccggccctggccaccagcagacaggctacgccttcacccacctgagcctgcaggagttcctggccgccctgcacctgatggccagccccaaggtgaacaaggacaccctgacccagtatgtgaccctgcacagccgctgggtgcagaggaccaaggcccggctgggcctgagtgaccacctgcccaccttcctggccggcctggccagctgcacctgccggcccttcctgagccacctggcccagggcaatgaagactgtgtgggcgccaagcaggccgctgtggtgcaggtgctgaagaagctggccaccaggaagctgaccggccccaaggtggtggagctgtgccactgtgtggatgagacccaggagcctgagctggccagcctgacagcccagagcctgccctaccagctgcccttccacaacttccccctgacctgcacagacctggccaccctgaccaacatcctggagcaccgggaggcccccatccacctggactttgatggctgccccctggagccccactgcccagaggccctggtgggctgcggccagatcgagaacctgtccttcaagagcaggaaatgtggagatgcctttgctgaggccctgagccgcagcctgcccaccatgggccgcctgcagatgctgggcctggccggcagcaagatcacagcccggggcatcagccacctggtgaaggccctgcccctgtgcccccagctgaaggaggtgtccttccgggacaaccagctgagtgaccaggtggtgctgaacatcgtggaggtgctgccccacctgccccggctgaggaagctggacctgagcagcaacagcatctgtgtgtccaccctgctgtgcctggcccgggtggccgtgacctgccccaccgtgaggatgctgcaggcccgggaggccgacctgatcttcctgctgagccccccaacagagaccacagctgagctgcagagggccccagacctgcaggagagtgatggccagaggaagggggcccagagccgcagcctgaccctgcggctgcagaagtgccagctgcaggtgcatgatgctgaggccctgattgccctgctgcaggagggcccccacctggaggaggtggacctgagcggcaaccagctggaggatgagggctgccgcctgatggccgaggccgccagccagctgcacatcgccaggaagctggacctgagcaacaacggcctgtctgtggccggcgtgcactgtgtgctgcgggctgtgtctgcctgctggaccctggccgagctgcacatcagcctgcagcacaagacagtcatcttcatgtttgcccaggagcctgaggagcagaagggcccccaggagcgggccgccttcctggacagcctgatgctgcagatgcccagcgagctgcccctgagcagcaggaggatgaggctgacccactgcggcctgcaggagaagcacctggagcagctgtgcaaggccctgggcggcagctgccacctgggccacctgcacctggacttctctggaaatgccctgggagatgagggcgccgcccggctggcccagctgctgcccggcctgggcgccctgcagagcctgaacctgtctgaaaatggcctgagcctggatgctgtgctgggcctggtgcgctgcttcagcaccctgcagtggctgttccggctggacatcagctttgagagccagcacatcctgctgcggggggacaagaccagccgggacatgtgggccaccggcagcctgcctgacttccctgctgctgccaagttcctgggcttccggcagcgctgcatccccaggagcctgtgcctgtctgagtgccccctggagccccccagcctgacccggctgtgtgccaccctgaaggactgccccggccccctggagctgcagctgagctgtgagttcctgagtgaccagagcctggagaccctgctggactgcctgccccagctgccccagctgagcctgctgcagctgagccagacaggcctgagccccaagagccccttcctgctggccaacaccctgagcctgtgcccccgggtgaagaaggtggacctgcggagcctgcaccacgccaccctgcacttccgcagcaatgaggaggaggagggcgtgtgctgcggcctgagcgccaacctgctgggggacagcggcctgcgctgcctgctggagtgcctgccccaggtgcccatcagcggcctgctggacctgagccacaacagcatcagccaggagagcgccctgtacctgctggagaccctgcccagctgcccccgggtgcgggaggcctctgtgaacctgggcagcgagcagagcttccgcatccacttcagccgggaggaccaggccggcaagaccctgcggctgtctgaatgttccttccggcctgagcacgtgtcccggctggccaccggcctgagcaagagcctgcagctgacagagctgaccctgacccagtgctgcctgggccagaagcagctggccatcctgctgagcctggtgggccggcctgctggcctcttcagcctgcgggtgcaggagccctgggccgaccgggcccgggtgctgagcctgctggaggtgtgtgcccaggccagcggctctgtgacagagatcagcatcagcgagacccagcagcagctgtgtgtgcagctggagttcccccggcaggaggagaaccctgaggccgtggccctgcggctggcccactgtgacctgggcgcccaccacagcctgctggtgggccagctgatggagacctgtgcccggctgcagcagctgagcctgagccaggtgaacctgtgtgaagatgatgatgccagcagcctgctgctgcagagcctgctgctgagcctgtctgagctgaagaccttccggctgaccagcagctgtgtgtccacagagggcctggcccacctggccagcggcctgggccactgccaccacctggaggagctggacctgagcaacaaccagtttgatgaggagggcaccaaggccctgatgagggccctggagggcaagtggatgctgaagaggctggacctgagccacctgctgctgaacagcagcaccctggccctgctgacccaccggctgagccagatgacctgcctgcagagcctgcggctgaacagaaacagcattggagatgtgggctgctgccacctgtctgaggccctgcgggccgccaccagcctggaggagctggacctgagccacaaccagattggagatgctggggtgcagcacctggccaccatcctgcccggcctgcctgagctgaggaagattgacctgagcggcaacagcatcagcagcgctgggggcgtgcagctggccgagagcctggtgctgtgccggcggctggaggagctgatgctgggctgcaatgccctgggggaccccacagccctgggcctggcccaggagctgccccagcacctgcgggtgctgcacctgcccttcagccacctgggccctggaggagccctgagcctggcccaggccctggatggcagcccccacctggaggagatcagcctggccgagaacaacctggccggcggcgtgctgcgcttctgcatggagctgcccctgctgcggcagattgacctggtgtcctgcaagattgacaaccagacagccaagctgctgaccagcagcttcaccagctgcccagccctggaggtgatcctgctgtcctggaacctgctgggagatgaagctgctgctgagctggcccaggtgctgccccagatgggccgcctgaagagggtggacctggagaagaaccagatcacagccctgggcgcctggctgctggccgagggcctggcccagggcagcagcatccaggtgatccggctgtggaacaaccccatcccctgtgacatggcccagcacctgaagagccaggagccccggctggactttgccttctttgacaaccagccccaggccccctggggcacctag

SEQ ID NO: 274042 - DNA, 5514 bp, Artificial Sequence
  derived and/or modified sequence
atggaccccgtgggcctgcagctgggcaacaagaacctgtggagctgtctggtgcgactgctcaccaaggaccccgagtggcttaatgctaaaatgaagttcttcttaccaaatactgacctcgactcacgtaatgaaactctggatccagagcagcgggtcatcctacagctgaacaagctgcacgttcaaggctccgacacttggcagtcatttatccactgcgtctgcatgcagctcgaggtacccctggacttggaggttcttcttcttagcacatttggatacgatgacgggtttacttcccagcttggagccgagggcaagtcccaaccagagtcccagctacaccacgggctcaaaaggccccaccagagctgcggctctagtccacgccgcaagcaatgtaagaagcagcagttagagctggctaagaagtatctccagctcctgcggacttctgcacaacagaggtatagatcacagataccagggagcggccagccccacgcgttccaccaggtatacgtgcctcccattctgcgaagagctaccgcatccctcgatacgcctgagggggccatcatgggggacgttaaggtggaggatggtgccgatgtgtctataagtgatttgtttaatacgagggtaaacaagggccctagagtgaccgtactccttgggaaggccggcatgggcaagactacactggcccacagactgtgtcagaagtgggctgagggccatttgaattgttttcaggctctgtttttgttcgaattcagacaactgaatctcattacccgctttctgacacccagcgaactcttgttcgacctttacttatcccccgaatctgaccacgatactgtcttccagtatttagaaaaaaacgcggaccaagtactgttgatattcgatggtctggatgaagccctgcagccaatgggtcccgacggtccagggccagtgcttacattgttctcccatctgtgcaatggcacactgttgccaggctgccgggtcatggctacctcccggcctggaaaacttcccgcatgcttaccagccgaggcagcaatggtgcatatgctcggattcgacgggccacgggtcgaagagtatgtgaatcactttttttctgcccagccatctcgggaaggcgcgttagttgaactacagaccaacggaaggctgcgaagtctgtgcgctgtcccagccttatgtcaggtggcttgcctatgccttcatcacctcttgcctgatcatgcacccggtcagagcgtggccctattgccaaatatgacgcagctgtacatgcagatggttcttgcactgtccccccctggccatctccctacttctagcctcctggatctcggtgaagtagccttacgaggtttagagaccggtaaggtgatcttctacgctaaggatatcgcaccccccttgattgcatttggagccactcacagtctgcttacatctttttgtgtgtgcaccggacctgggcaccagcagacaggctacgcattcacacacctatcactacaggagttcttggcagcactccacctcatggccagtccaaaggtgaacaaggacaccctaactcagtatgttacactgcactcacggtgggtgcagcgcaccaaggcaagactaggcctgtcggatcacttgccaactttcttggccggtcttgcctcatgtacctgccgaccttttctcagccacctcgcccagggcaacgaagattgcgtgggcgctaagcaagccgctgtggttcaggtcctgaagaaactggccacacgcaaactaacaggccccaaggtcgtggagctctgccattgtgtggatgagacccaggaacctgaactggcctcccttacggcacaatcactgccatatcaactcccatttcataatttccccttgacctgtacagatttagctacattgaccaacattctcgagcatagggaggcacctattcacctggacttcgacggttgtccactagaacctcactgtccggaggcactggtgggatgtggccagattgagaatctcagtttcaagtccagaaaatgcggcgacgcttttgctgaagctctgagccgcagcctgcccactatgggcagattacagatgctgggactggcgggctcgaagatcacggcccgtggaatctcccacctggttaaggcgctcccattgtgtccccagctgaaagaggtgtcatttcgcgacaaccagctgtctgaccaggtagtcctcaatattgtggaggtcttaccgcatcttccccggttacgtaaactagatctaagttctaattcaatttgtgtctcgactctgctgtgtctggcacgcgtagcggtgacatgcccaacagtcaggatgttacaggcccgagaggccgaccttattttcctgctgagcccgccaacagaaaccaccgccgagttacagagagcacctgacctccaggagtctgacgggcagcgtaaaggcgcacaatcccgaagcctaacattgagactccagaagtgtcagctgcaagtacacgatgccgaagcacttatagcactgctacaggaaggaccacacctcgaagaagtcgatctgtcaggaaatcagctggaggatgagggctgtcggctcatggcagaagccgcatcacagttgcatatcgcacggaagttagacctctccaataatggccttagtgtggccggcgtgcattgtgtactcagagccgtttcagcgtgctggactctagcggagctgcacatcagccttcagcacaaaacagtcatcttcatgttcgctcaggaaccagaagagcaaaagggtccccaagagagagccgccttcctcgacagcctcatgctgcagatgcctagtgagctcccgctgtcatcaaggcgcatgcgcttgacacattgcggtctgcaagaaaaacacctggagcagctatgcaaagctcttggagggagttgtcatttaggccacttacacctagatttctcagggaatgctctgggcgatgagggggcggcccgcttagctcagctactgccaggactgggcgcgctccagtcgctcaatctgtcggagaatgggctctctctggacgcagtcttgggactcgtccggtgctttagcactcttcagtggctgttccgcctggacatctcattcgaatcacagcatatactgctgcggggcgacaagacatctagggatatgtgggccacgggatccctcccagactttcccgccgcggcaaaatttctgggcttcaggcagagatgtattcctagatctctgtgccttagtgaatgtcccctggaacccccaagtttgacccggctatgcgccaccctgaaggattgccctggccccctggagctgcagctgtcttgcgagtttttatctgatcaaagcctcgagaccctgcttgattgcttgccccagctaccacagctgagtctgttacagctctctcagacaggcttatctccgaaaagtccatttttacttgcaaataccctgtcattatgtcctagagtcaagaaagtggatctgcggtccctgcaccatgcgacgctgcactttagaagcaacgaagaggaagagggagtgtgctgcggtctgtccgcaaacctcttaggagactctggcctacggtgcctgctggagtgcctgccacaggtacccatcagcggcctgctggatttatcccacaacagtatctctcaggaaagtgctctttacttgctcgaaaccctgccgtcctgcccaagggtccgagaggcctcagtcaacctggggtctgaacaaagcttcagaattcacttcagccgtgaagatcaggcaggcaaaaccttgcggttgtcagagtgctctttccggcctgagcatgtgtcgagacttgcaactggcctttccaagagtctgcagctgacggaacttacccttacccagtgctgcctgggccaaaagcagcttgctatcctgctttccctggtgggtaggcctgccgggctgttctcactcagggtgcaggagccttgggccgaccgggcgagggtgctatcactgctcgaagtttgtgcccaggcaagcggctctgtaacagagataagcatttcagagacccagcagcagctgtgtgtgcagcttgagttccccagacaggaagaaaatcccgaagcggtagccttacggctggctcactgcgaccttggagcgcaccacagcctgcttgtgggccaattaatggagacgtgcgcaaggctgcagcaactgagcttgtctcaggtaaatctgtgtgaggatgacgacgcctcatctctcctccttcagtcacttctgctgtccctcagcgaattgaagacattcaggttgacttcctcttgtgtttctacagaggggctcgctcacctggcctccggcttgggacattgccaccatctggaagagttggatctcagcaacaatcagtttgatgaagagggaacaaaagcactcatgagggctttggaaggaaagtggatgctgaagcggctagacctttcccatctacttctgaatagttccaccctggccttactaacacatcgcctgtcacagatgacgtgtttacagagcctccggctgaaccggaactctattggagatgtggggtgttgtcatctttctgaagcactgagggctgccaccagcttggaggagcttgatctttcccataatcagattggcgacgccggcgtgcaacacctggccaccattttgccaggattgcctgagctacgcaaaatcgatcttagtggcaattcgatttcttcagctgggggcgtgcagcttgctgagtccctggtgttatgccgtcgtctggaagaactgatgctgggctgtaatgctctcggcgaccctactgccctcggactggcgcaggaactgccgcaacatctcagggtgctgcatctcccctttagccacctggggccaggcggcgcactctcactcgcccaggccctggacggctcaccacatttagaggagattagtctcgccgaaaacaatcttgccggaggtgtcctgcgattctgcatggaactcccactgctgagacagattgatttggtgagctgcaaaatagataaccagacggcaaaactactcacgagtagcttcacttcctgccctgccctcgaagttatactcctatcttggaacctgctcggtgatgaggccgctgctgagctggcccaggttctgcctcagatgggcaggttgaaaagggtggacctagagaagaaccaaattacagccctcggcgcctggttattggccgagggcctagcacagggctcctctatacaggtgattcggctttggaacaatcctatcccttgtgacatggcccagcatctgaaatcccaagagcccagactcgacttcgctttttttgacaatcagccacaggccccatggggaacgtag

SEQ ID NO: 274043 - DNA, 6735 bp, Artificial Sequence
  derived and/or modified sequence
gcagcagccgccagttccatgcactggcggagcagctctaggcggcggcttctactttcagtttcgtgcagagcgcggaggagccgcgagcgctgagggagtctgcactatggaaacaacctgtcaatccagctcaaggcacacatagcccagacacccatgagaccctctccgtggggaccctagagcacctatcatgaacgaggagaccaaggctggctcctcatggaccccgttggcctccagctcggcaacaagaacctgtggagctgtcttgtgaggctgctcaccaaagacccagaatggctgaacgccaagatgaagttcttcctccccaacacggacctggattccaggaacgagaccttggaccctgaacagagagtcatcctgcaactcaacaagctgcatgtccagggttcggacacctggcagtctttcattcattgtgtgtgcatgcagctggaggtgcctctggacctggaggtgctgctgctgagtacttttggctatgatgatgggttcaccagccagctgggagctgaggggaaaagccaacctgaatctcagctccaccatggcctgaagcgcccacatcagagctgtgggtcctcaccccgccggaagcagtgcaagaagcagcagctagagttggccaagaagtacctgcagctcctgcggacctctgcccagcagcgctacaggagccaaatccctgggtcagggcagccccacgccttccaccaggtctatgtccctccaatcctgcgccgggccacagcatccttagacactccggagggggccattatgggggacgtcaaggtggaagatggtgctgacgtgagcatctcggacctcttcaacaccagggttaacaagggcccgagggtgaccgtgcttttggggaaggctggcatgggcaagaccacgctggcccaccggctctgccagaagtgggcagagggccatctgaactgtttccaggccctgttcctttttgaattccgccagctcaacttgatcacgaggttcctgacaccgtccgagctcctttttgatctgtacctgagccctgaatcggaccacgacactgtcttccagtacctggagaagaacgctgaccaagtcctgctgatctttgatgggctagatgaggccctccagcctatgggtcctgatggcccaggcccagtcctcacccttttctcccatctctgcaatgggaccctcctgcctggctgccgggtgatggctacctcccgtccagggaagctgcctgcctgcctgcctgcagaggcagccatggtccacatgttgggctttgatgggccacgggtggaagaatatgtgaatcacttcttcagcgcccagccatcgcgggagggggccctggtggagttacagacaaatggacgtctccgaagcctgtgtgcggtgcccgcactgtgccaagtcgcctgtctctgcctccaccatctgcttcctgaccacgccccaggccagtctgtggccctcctgcccaacatgactcagctctatatgcagatggtgctcgccctcagcccccctgggcacttgcccacctcgtccctactggacctgggggaggtggccctgaggggcctggagacagggaaggttatcttctatgcaaaagatattgctccacccttgatagcttttggggccactcacagcctgctgacttccttctgcgtctgcacaggccctgggcaccagcagacaggctatgctttcacccacctcagcctgcaggagtttcttgctgccctgcacctgatggccagccccaaggtgaacaaagacacacttacccagtatgttaccctccattcccgctgggtacagcggaccaaagctagactgggcctctcagaccacctccccaccttcctggcgggcctggcatcctgcacctgccgccccttccttagccacctggcgcagggcaatgaggactgtgtgggtgccaagcaggctgctgtagtgcaggtgttgaagaagttggccacccgcaagctcacagggccaaaggttgtagagctgtgtcactgtgtggatgagacacaggagcctgagctggccagtctcaccgcacaaagcctcccctatcaactgcccttccacaatttcccactgacctgcaccgacctggccaccctgaccaacatcctagagcacagggaggcccccatccacctggattttgatggctgtcccctggagccccactgccctgaggctctggtaggctgtgggcagatagagaatctcagctttaagagcaggaagtgtggggatgcctttgcagaagccctctccaggagcttgccgacaatggggaggctgcagatgctggggttagcaggaagtaaaatcactgcccgaggcatcagccacctggtgaaagctttgcctctctgtccacagctgaaagaagtcagttttcgggacaaccagctcagtgaccaggtggtgctgaacattgtggaggttctccctcacctaccacggctccggaagcttgacctgagcagcaacagcatctgcgtgtcaaccctactctgcttggcaagggtggcagtcacgtgtcctaccgtcaggatgcttcaggccagggaggcggacctcatcttccttctttccccgcccacagagacaactgcagagctacaaagagctccagacctgcaggaaagtgacggccagaggaaaggggctcagagcagaagcttgacgctcaggctgcagaagtgtcagctccaggtccacgatgcggaggccctcatagccctgctccaggaaggccctcacctggaggaagtggacctctcagggaaccagctggaagatgaaggctgtcggctgatggcagaggctgcatcccagctgcacatcgccaggaagctggacctcagtaacaacgggctttctgtggccggggtgcattgtgtgctgagggccgtgagtgcgtgctggaccctggcagagctgcacatcagcctgcagcacaaaactgtgatcttcatgtttgcccaggagccagaggagcagaaggggccccaggagagggctgcatttcttgacagcctcatgctccagatgccctctgagctgcctctgagctcccgaaggatgaggctgacacattgtggcctccaagaaaagcacctagagcagctctgcaaggctctgggaggaagctgccacctcggtcacctccacctcgacttctcaggcaatgctctgggggatgaaggtgcagcccggctggctcagctgctcccagggctgggagctctgcagtccttgaacctcagtgagaacggtttgtccctggatgccgtgttgggtttggttcggtgcttctccactctgcagtggctcttccgcttggacatcagctttgaaagccaacacatcctcctgagaggggacaagacaagcagggatatgtgggccactggatctttgccagacttcccagctgcagccaagttcttagggttccgtcagcgctgcatccccaggagcctctgcctcagtgagtgtcctctggagcccccaagcctcacccgcctctgtgccactctgaaggactgcccgggacccctggaactgcaattgtcctgtgagttcctgagtgaccagagcctggagactctactggactgcttacctcaactccctcagctgagcctgctgcagctgagccagacgggactgtccccgaaaagccccttcctgctggccaacaccttaagcctgtgtccacgggttaaaaaggtggatctcaggtccctgcaccatgcaactttgcacttcagatccaacgaggaggaggaaggcgtgtgctgtggtctctcagcaaacctgctgggcgacagcggactcagatgccttctggaatgtctgccgcaggtgcccatctccggtttgcttgatctgagtcacaacagcatttctcaggaaagtgccctgtacctgctggagacactgccctcctgcccacgtgtccgggaggcctcagtgaacctgggctctgagcagagcttccggattcacttctccagagaggaccaggctgggaagacactcaggctaagtgagtgcagcttccggccagagcacgtgtccaggctggccaccggcttgagcaagtccctgcagctgacggagctcacgctgacccagtgctgcctgggccagaagcagctggccatcctcctgagcttggtggggcgacccgcagggctgttcagcctcagggtgcaggagccgtgggcggacagagccagggttctctccctgttagaagtctgcgcccaggcctcaggcagtgtcactgaaatcagcatctccgagacccagcagcagctctgtgtccagctggaatttcctcgccaggaagagaatccagaagctgtggcactcaggttggctcactgtgaccttggagcccaccacagccttcttgtcgggcagctgatggagacatgtgccaggctgcagcagctcagcttgtctcaggttaacctctgtgaggacgatgatgccagttccctgctgctgcagagcctcctgctgtccctctctgagctgaagacatttcggctgacctccagctgtgtgagcaccgagggcctcgcccacctggcatctggtctgggccactgccaccacttggaggagctggacttgtctaacaatcaatttgatgaggagggcaccaaggcgctgatgagggcccttgaggggaaatggatgctaaagaggctggacctcagtcaccttctgctgaacagctccaccttggccttgcttactcacagactaagccagatgacctgcctgcagagcctcagactgaacaggaacagtatcggtgatgtcggttgctgccacctttctgaggctctcagggctgccaccagcctagaggagctggacttgagccacaaccagattggagacgctggtgtccagcacttagctaccatcctgcctgggctgccagagctcaggaagatagacctctcagggaatagcatcagctcagccgggggagtgcagttggcagagtctctcgttctttgcaggcgcctggaggagttgatgcttggctgcaatgccctgggggatcccacagccctggggctggctcaggagctgccccagcacctgagggtcctacacctaccattcagccatctgggcccaggtggggccctgagcctggcccaggccctggatggatccccccatttggaagagatcagcttggcggaaaacaacctggctggaggggtcctgcgtttctgtatggagctcccgctgctcagacagatagacctggtttcctgtaagattgacaaccagactgccaagctcctcacctccagcttcacgagctgccctgccctggaagtaatcttgctgtcctggaatctcctcggggatgaggcagctgccgagctggcccaggtgctgccgcagatgggccggctgaagagagtggacctggagaagaatcagatcacagctttgggggcctggctcctggctgaaggactggcccaggggtctagcatccaagtcatccgcctctggaataaccccattccctgcgacatggcccagcacctgaagagccaggagcccaggctggactttgccttctttgacaaccagccccaggccccttggggtacttgatggccccctcaagacctttggaatccagccaagtgatgcacccaaatgatccacctttcgcccactgggataattgactcaggaaagaagagcctcggcagggcgctctgcactccacccaggaggaaggatacgtgtgtcctgctgcagtcctcagggagaacttttttgggaaccaggagctgggtctggacaaaggagtaccctgcattacgtgggatatgtgtgatcaattggggacatgcgacacacaatgagggtgtcatgacaatgcatgacacgtacggttatatgtggcagtgtgaccccttgacatgtggcgttacatgaaagtcagtgtggcacgtgttctgtggcatgggtgctggcatcccaagtagcaggatacatgattgttggtctatatatgacacatgacaaatgtccatgtcacaggactcatggctggccagatgacctcaggctggcccaagatctaatttattaatttttaaagcaaatacatatttatagattgtgtgtatggagcagctaagtcaggaaaagtcttccgcccgagctgggaggggagagtgtccatgcactgaccagtccaggggctcaagggccagggctctggaacaagccagggactcagccattaagtcccctcctgcctcaatcctcagcctacccatctataaacttgatgactcctcccttacttacatactagcttccaaggacaggtggaggtagggccagcctggcgggagtggagaagcccagtctgtcctatgtaagggacaaagccaggtctaatggtactgggtagggggcactgccaagacaataagctaggctactgggtccagctactactttggtgggattcaggtgagtctccatgcacttcacatgttacccagtgttcttgttacttccaaggagaaccaagaatggctctgtcacactcgaagccaggcttgatcaataaacacaatggtattccacgtc

SEQ ID NO: 274044 - DNA, 5513 bp, Artificial Sequence
  derived and/or modified sequence
atggatcctgtcggtctgcagctgggcaataagaacctctggtcatgtctcgtgcggttgctgaccaaggacccggagtggctgaatgccaaaatgaaattctttctcccaaacactgacctggattctaggaacgaaaccctggaccccgaacagcgggttattctgcagctaaacaaacttcacgtgcagggctctgatacctggcagagcttcattcattgcgtctgtatgcagctggaagtgcctctcgacctcgaggtgctgcttttgagtacattcggctatgatgacgggtttacttctcagcttggcgcagaagggaaatcgcagccagagagccagctacaccatggactgaaaagaccccaccagtcatgtggatcaagccctaggcgtaagcaatgcaagaaacagcaactggagttggcgaagaagtatcttcagctcttacgcactagcgcacagcagaggtatcgttcccagattccaggttcaggacagccacatgccttccatcaggtgtatgtcccgccaatcctcaggcgggcaactgcaagtctcgataccccagagggcgcaattatgggagacgtgaaggtcgaggacggcgctgatgtctccataagcgatctgtttaacacacgcgtgaacaagggccctcgcgtgaccgtgcttctgggcaaagctggcatgggcaagaccactctagcgcaccgcctctgtcaaaagtgggccgaggggcatttgaactgcttccaggccttgtttttgtttgagtttagacagcttaatctgatcacacggttcctgacaccatccgaactgctgttcgatctatacttatccccagagtctgaccatgacactgtgtttcaatatctggaaaagaacgcggaccaggttctcctgatttttgatggcttggacgaagctttacaaccgatgggcccagacgggcctggtcctgtactgacgttattttcccatctgtgtaatggtaccctgctgcctggatgtagagtgatggcgacaagccggccagggaagctgccagcctgtctcccagctgaggctgctatggtccatatgctcgggttcgatggtcccagggtggaggaatatgtgaaccatttctttagtgcccagcctagccgggaaggagcactcgttgaactgcagaccaacggacgcttacggtccctttgcgccgtccctgcgctgtgccaggtggcatgcctttgcctgcatcacctgctgcctgaccatgctcctggccagtccgttgccctgctgcccaatatgacccagctgtacatgcaaatggtgctggccctcagcccacccggtcatctgcctacatcttccctccttgatcttggcgaggtggccctacggggtctcgaaaccgggaaagtgattttctatgccaaagatatcgccccacccctgatcgcgtttggagctacacatagtctactgacaagcttctgtgtgtgtactgggcctggacatcagcagaccgggtatgcgttcacacatctgtcccttcaagagttcttagccgctctccacttaatggccagccccaaggtgaacaaagacaccttaacacagtatgtaacactgcatagcaggtgggttcagcggaccaaagcacgtctcggcctgtcggaccaccttcctacctttcttgccggtctggcctcttgcacttgccgaccttttctgtctcatctcgcccaggggaacgaggattgcgttggcgctaagcaggctgctgtcgtgcaagtgctaaaaaagctagcaactaggaaactgacaggcccaaaggtcgtcgagctgtgccactgtgtggatgagactcaggagcctgaactggccagtttgacggcccagtcactaccctaccaattaccgtttcataatttccccttgacctgtactgaccttgccacgctgacaaacattctggagcacagagaggcaccaattcatctagacttcgacggttgtccactggagccgcattgtcctgaggcacttgtcggatgtggtcagatcgaaaatctgagctttaagagcaggaaatgcggggacgcctttgctgaggctctcagtcgcagcttgcctacaatgggccgtctccagatgcttggcctggccggtagtaagattacagctcggggaatctctcatttggttaaggcgctgccattatgccctcaactgaaggaggtatccttccgagacaaccagctctcagatcaggtcgtgttgaacatcgtagaagtgctgcctcaccttcctcgcctccggaagctagaccttagctctaactcgatctgcgtctccaccttgctgtgcctggccagagtggccgtcacttgcccgacggtcaggatgctgcaggcgagagaggcggatctcatcttcctgttgagccctcctactgagactacagccgagctgcagagagcaccagacctgcaggagtccgatggacaacggaagggtgctcagagcagaagtcttaccttgaggctccagaagtgccaactccaggtgcacgatgccgaggccttgattgcgctcctgcaagaggggccacatctggaagaagtggacctttctgggaatcagcttgaggatgagggctgtagactgatggccgaggctgctagtcagctgcatatcgccaggaagctggacttatctaacaacggcctatccgtggcgggtgtgcattgcgtcctgagggcggtatccgcttgttggacactcgcggagctgcacataagcctgcagcacaagaccgtcatatttatgtttgcgcaggaaccagaggagcagaaagggccacaggaacgcgcagcgttcctggacagcctgatgctgcagatgcctagcgaactccccctgagttcccgacggatgagactaacgcattgcggcctccaggagaaacatcttgagcagctatgcaaggccctgggcggaagttgccacctgggacatctccaccttgactttagtggcaatgccctaggtgatgaaggcgcagctaggctggcgcagctgttgcccggactcggtgccttacagtccctcaatttaagcgagaacggattatctcttgatgcagttctgggcctcgtccggtgcttttccaccctgcagtggctgtttcggctggatatttcgttcgagagccagcacatcctgcttaggggagataaaacctctagggacatgtgggcaactgggtctttgccagacttccccgctgcagccaagttcctcggtttcagacagcgatgtatacctcgaagcctgtgtttgtccgaatgtcctctggaacctccgtcactgacccgcctatgcgctacactgaaagattgcccagggccactcgagctacagctgtcatgcgagttcctgtctgaccaaagtctcgaaacactcttggactgtctgccccaactgccgcagctcagcctgttacaactcagccagactggtctctccccaaagtctccctttcttctggctaacactctgagtctgtgcccccgtgtgaaaaaggtcgacttgaggagtctgcaccacgctacactacatttcaggagtaacgaagaggaagagggtgtgtgctgtggcttgtcagcaaatctcctaggcgactcaggtttaaggtgtctgctggaatgcctgccccaggtccctatctccggactcctcgacctgagccataatagcatatcacaggaatccgctctgtatctgctggagaccttgccaagctgccccagggtgagagaagctagtgttaacctgggcagtgaacagtcgttcagaattcatttctctcgcgaagatcaagccggaaagacactgcgcctgtctgagtgctcattccgcccagaacacgtttcgcggctcgccaccgggctatccaagtccttacaactaactgaactgactttgacccagtgctgtcttggacaaaaacaactggccattctccttagcttggttggcaggcctgccggtctcttctctttgagagtacaggagccctgggcggacagggcccgtgtgttaagcctgcttgaggtctgcgctcaagccagcggctcagttaccgagatttcaatcagcgaaactcagcaacagctgtgtgtgcagctggagtttccaagacaggaagaaaatcccgaagctgtcgctttgagattggctcactgtgaccttggtgctcaccactcactactggtgggtcagctaatggagacgtgcgcaagacttcagcagctgagcctgtcccaggtgaacctgtgcgaagacgatgacgcttccagcctcctactgcagtccctccttctgtcactgtctgaattaaagaccttccgtcttacttcatcgtgcgttagtacagaaggtctagcacatctcgccagcggacttgggcactgtcatcacctggaagaactcgacctatcaaataatcagttcgatgaggaaggcactaaggcgctaatgagggcgcttgaggggaagtggatgctgaaaagactcgacctgtcccacctgctcttaaactccagcaccttagcgctgttgacacatagattatctcagatgacatgcctgcagagcctgcgactcaatagaaacagcattggcgacgtcggatgttgccacttgagcgaggcattgagagcagccacaagtctcgaagaacttgatctgtcacacaaccagatcggagacgctggcgtccagcacctagccaccatattacctggactgccggaactacgaaaaatcgatcttagcggcaattctatctctagcgcagggggtgtgcagttggctgaatcgcttgtgctgtgccgcagactggaggaattgatgctcggctgcaatgcgttgggggatcctactgcactcggcctagcccaagaactacctcagcatttgcgcgtcctacacctgccttttagtcaccttggacccggaggagcattaagcctggcccaggctctcgacggatcacctcatctcgaagagatctccctggccgagaacaacttggccggtggcgtgctgagattctgcatggagctgcccctcttgaggcagattgatctggtttcatgtaagattgacaatcagacggcaaaactcctcacatcttcatttacttcgtgcccagccttagaggtcatccttctatcatggaatctcttaggggacgaagccgcagctgagctagcccaggttctgccgcagatgggacgacttaagcgcgtggacctggaaaagaaccagattactgcactgggggcttggctgctcgcagaaggattggcccaagggagcagcatacaagtcattcggctgtggaataatccaattccctgtgatatggctcagcacttgaaatctcaagaaccgaggctcgattttgccttcttcgacaatcagcctcaggctccttggggaaccta

SEQ ID NO: 274045 - protein, 850 aa, Artificial Sequence
  derived and/or modified sequence
MASPKVNKDTLTQYVTLHSRWVQRTKARLGLSDHLPTFLAGLASCTCRPFLSHLAQGNEDCVGAKQAAVVQVLKKLATRKLTGPKVVELCHCVDETQEPELASLTAQSLPYQLPFHNFPLTCTDLATLTNILEHREAPIHLDFDGCPLEPHCPEALVGCGQIENLSFKSRKCGDAFAEALSRSLPTMGRLQMLGLAGSKITARGISHLVKALPLCPQLKEVSFRDNQLSDQVVLNIVEVLPHLPRLRKLDLSSNSICVSTLLCLARVAVTCPTVRMLQAREADLIFLLSPPTETTAELQRAPDLQESDGQRKGAQSRSLTLRLQKCQLQVHDAEALIALLQEGPHLEEVDLSGNQLEDEGCRLMAEAASQLHIARKLDLSNNGLSVAGVHCVLRAVSACWTLAELHISLQHKTVIFMFAQEPEEQKGPQERAAFLDSLMLQMPSELPLSSRRMRLTHCGLQEKHLEQLCKALGGSCHLGHLHLDFSGNALGDEGAARLAQLLPGLGALQSLNLSENGLSLDAVLGLVRCFSTLQWLFRLDISFESQHILLRGDKTSSLSECPLEPPSLTRLCATLKDCPGPLELQLSCEFLSDQSLETLLDCLPQLPQLSLLQLSQTGLSPKSPFLLANTLSLCPRVKKVDLRSLHHATLHFRSNEEEEGVCCGFTGCSLSQEHVESLCWLLSKCKDLSQVDLSANLLGDSGLRCLLECLPQVPISGLLDLSHNSISQESALYLLETLPSCPRVREASVNLGSEQSFRIHFSREDQAGKTLRLSECSFRPEHVSRLATGLSKSLQLTELTLTQCCLGQKQLAILLSLVGRPAGLFSLRDSTRHTEKLSFPTLEACALGFK

SEQ ID NO: 274046 - protein, 19 aa, Artificial Sequence
  derived and/or modified sequence
MDPVGLQLGNKNLWSCLVR

SEQ ID NO: 274047 - DNA, 2553 bp, Artificial Sequence
  derived and/or modified sequence
atggccagccccaaggtgaacaaggacaccctgacccagtacgtgaccctgcacagcagatgggtgcagagaaccaaggccagactgggcctgagcgaccacctgcccaccttcctggccggcctggccagctgcacctgcagacccttcctgagccacctggcccagggcaacgaggactgcgtgggcgccaagcaggccgccgtggtgcaggtgctgaagaagctggccaccagaaagctgaccggccccaaggtggtggagctgtgccactgcgtggacgagacccaggagcccgagctggccagcctgaccgcccagagcctgccctaccagctgcccttccacaacttccccctgacctgcaccgacctggccaccctgaccaacatcctggagcacagagaggcccccatccacctggacttcgacggctgccccctggagccccactgccccgaggccctggtgggctgcggccagatcgagaacctgagcttcaagagcagaaagtgcggcgacgccttcgccgaggccctgagcagaagcctgcccaccatgggcagactgcagatgctgggcctggccggcagcaagatcaccgccagaggcatcagccacctggtgaaggccctgcccctgtgcccccagctgaaggaggtgagcttcagagacaaccagctgagcgaccaggtggtgctgaacatcgtggaggtgctgccccacctgcccagactgagaaagctggacctgagcagcaacagcatctgcgtgagcaccctgctgtgcctggccagagtggccgtgacctgccccaccgtgagaatgctgcaggccagagaggccgacctgatcttcctgctgagcccccccaccgagaccaccgccgagctgcagagagcccccgacctgcaggagagcgacggccagagaaagggcgcccagagcagaagcctgaccctgagactgcagaagtgccagctgcaggtgcacgacgccgaggccctgatcgccctgctgcaggagggcccccacctggaggaggtggacctgagcggcaaccagctggaggacgagggctgcagactgatggccgaggccgccagccagctgcacatcgccagaaagctggacctgagcaacaacggcctgagcgtggccggcgtgcactgcgtgctgagagccgtgagcgcctgctggaccctggccgagctgcacatcagcctgcagcacaagaccgtgatcttcatgttcgcccaggagcccgaggagcagaagggcccccaggagagagccgccttcctggacagcctgatgctgcagatgcccagcgagctgcccctgagcagcagaagaatgagactgacccactgcggcctgcaggagaagcacctggagcagctgtgcaaggccctgggcggcagctgccacctgggccacctgcacctggacttcagcggcaacgccctgggcgacgagggcgccgccagactggcccagctgctgcccggcctgggcgccctgcagagcctgaacctgagcgagaacggcctgagcctggacgccgtgctgggcctggtgagatgcttcagcaccctgcagtggctgttcagactggacatcagcttcgagagccagcacatcctgctgagaggcgacaagaccagcagcctgagcgagtgccccctggagccccccagcctgaccagactgtgcgccaccctgaaggactgccccggccccctggagctgcagctgagctgcgagttcctgagcgaccagagcctggagaccctgctggactgcctgccccagctgccccagctgagcctgctgcagctgagccagaccggcctgagccccaagagccccttcctgctggccaacaccctgagcctgtgccccagagtgaagaaggtggacctgagaagcctgcaccacgccaccctgcacttcagaagcaacgaggaggaggagggcgtgtgctgcggcttcaccggctgcagcctgagccaggagcacgtggagagcctgtgctggctgctgagcaagtgcaaggacctgagccaggtggacctgagcgccaacctgctgggcgacagcggcctgagatgcctgctggagtgcctgccccaggtgcccatcagcggcctgctggacctgagccacaacagcatcagccaggagagcgccctgtacctgctggagaccctgcccagctgccccagagtgagagaggccagcgtgaacctgggcagcgagcagagcttcagaatccacttcagcagagaggaccaggccggcaagaccctgagactgagcgagtgcagcttcagacccgagcacgtgagcagactggccaccggcctgagcaagagcctgcagctgaccgagctgaccctgacccagtgctgcctgggccagaagcagctggccatcctgctgagcctggtgggcagacccgccggcctgttcagcctgagagacagcaccagacacaccgagaagctgagcttccccaccctggaggcctgcgccctgggcttcaagtag

SEQ ID NO: 274048 - DNA, 2553 bp, Artificial Sequence
  derived and/or modified sequence
atggcatctccaaaggttaataaagacaccttgacgcaatatgttaccctgcactctagatgggtacagaggacgaaggccaggctagggctctctgatcaccttcctaccttcctggccggcttggcaagctgtacatgtcgaccatttctatctcaccttgcccagggcaacgaggattgtgtcggcgctaaacaggctgccgtggtgcaggtgttaaagaaactggccactaggaaactcacaggccctaaggtagtggagctttgtcattgtgtagacgagactcaggagcctgaactggcaagtctgacagcgcagtccctgccctatcagctgcctttccacaactttccattgacctgtacagatcttgccactctaaccaacatcctcgaacatcgtgaagctcctattcacctagattttgatggttgtcccctcgagccacactgtcccgaggctctggttggatgtggccaaatagaaaatctgagtttcaaatctcgcaagtgcggagatgcatttgccgaagccctctcccgtagcctacccacaatgggcagattgcaaatgctaggcctggccgggagcaagattacagcccggggaatttctcacttagtgaaggccctaccactgtgtccccagcttaaggaggtcagttttagagacaaccagttgtcagaccaggtggttcttaatatcgtcgaagtcctgccgcatttgccccgcctgaggaaactggatctcagttccaatagcatctgtgtttcgacactgttgtgtctcgccagagtggccgtaacctgtccgacggtacgaatgttgcaggctagagaggctgacctaatcttcctcctcagcccacctacagaaactaccgccgaacttcaacgcgcccctgacttacaggagtccgacggacagagaaaaggcgcccagtctcgatcgctgaccttgaggcttcagaagtgccagctgcaggtccacgacgccgaagccttaatcgccttactgcaggaaggtccacacttagaggaagtggatcttagcggcaatcagctcgaagacgaaggctgtcgcctaatggcagaagctgcctcacagctccatattgcaagaaaacttgacctcagcaacaacggcctgtctgtcgccggcgtccactgcgtgttaagagctgtcagcgcctgctggaccctggcagaactgcatatttctttgcagcacaagacagtcatattcatgttcgcacaggaaccagaggaacagaaaggcccccaggagagagcagcattcctggactctttaatgttgcagatgccctctgagctccctctgagttctcgacgtatgcgattaacccactgcggattgcaagagaagcaccttgaacagctgtgtaaggctttaggaggaagttgtcatttgggccatctacacctggatttctctggaaacgctctcggcgacgagggcgcggccagattagcccagctcctccctggactgggtgcgctacagtcgctgaacctgagcgaaaacgggctgagcctcgacgcggttttaggcctggtaaggtgtttctccacattgcagtggctctttaggctcgacatctctttcgaaagccagcatattctcctccgcggcgacaagacgtcttccttgtccgaatgtccattggagccaccctcactgactagactctgtgcgacccttaaggactgccctggacccctcgaattgcagctatcctgcgagttcctatccgaccagtcccttgaaacgctgctggattgccttccgcaactgccgcagttgtcattactgcagttatctcaaaccgggctgtcacccaagtctccctttctgctggcaaatacattatctctgtgtcctcgggtaaaaaaggtagatctcagatccctgcaccatgcaacactccacttccggtctaacgaagaggaggagggggtgtgctgcggctttaccggatgcagtctgtctcaggaacatgttgagagtctgtgctggcttttgagcaagtgcaaagatctttcccaggtggatctcagcgcgaacctccttggagacagtggtttgaggtgtctgctggaatgcctccctcaagttccgatttctggattgctggatttgagccacaatagcatctcacaggaatcagcactctatctgcttgagacgcttccaagctgcccccgtgttagagaggcctccgtgaatctcggttccgagcagtctttccggatccacttttcaagagaagatcaagctggtaaaacactcaggctgagtgaatgctccttccggccagagcacgtgtctcgcctagcaacagggctgtcaaagagcctgcagctgactgaacttacactcactcagtgttgtctcggacaaaagcagctagctattctgctgagcctcgtcggtcgacccgctggacttttctcgctgcgcgacagcactcgccataccgagaagctcagctttcccacccttgaggcctgcgccctgggctttaagtag

SEQ ID NO: 274049 - DNA, 2553 bp, Artificial Sequence
  derived and/or modified sequence
atggccagccccaaggtgaacaaggacaccctgacccagtatgtgaccctgcacagccgctgggtgcagaggaccaaggcccggctgggcctgagtgaccacctgcccaccttcctggccggcctggccagctgcacctgccggcccttcctgagccacctggcccagggcaatgaagactgtgtgggcgccaagcaggccgctgtggtgcaggtgctgaagaagctggccaccaggaagctgaccggccccaaggtggtggagctgtgccactgtgtggatgagacccaggagcctgagctggccagcctgacagcccagagcctgccctaccagctgcccttccacaacttccccctgacctgcacagacctggccaccctgaccaacatcctggagcaccgggaggcccccatccacctggactttgatggctgccccctggagccccactgcccagaggccctggtgggctgcggccagatcgagaacctgtccttcaagagcaggaaatgtggagatgcctttgctgaggccctgagccgcagcctgcccaccatgggccgcctgcagatgctgggcctggccggcagcaagatcacagcccggggcatcagccacctggtgaaggccctgcccctgtgcccccagctgaaggaggtgtccttccgggacaaccagctgagtgaccaggtggtgctgaacatcgtggaggtgctgccccacctgccccggctgaggaagctggacctgagcagcaacagcatctgtgtgtccaccctgctgtgcctggcccgggtggccgtgacctgccccaccgtgaggatgctgcaggcccgggaggccgacctgatcttcctgctgagccccccaacagagaccacagctgagctgcagagggccccagacctgcaggagagtgatggccagaggaagggggcccagagccgcagcctgaccctgcggctgcagaagtgccagctgcaggtgcatgatgctgaggccctgattgccctgctgcaggagggcccccacctggaggaggtggacctgagcggcaaccagctggaggatgagggctgccgcctgatggccgaggccgccagccagctgcacatcgccaggaagctggacctgagcaacaacggcctgtctgtggccggcgtgcactgtgtgctgcgggctgtgtctgcctgctggaccctggccgagctgcacatcagcctgcagcacaagacagtcatcttcatgtttgcccaggagcctgaggagcagaagggcccccaggagcgggccgccttcctggacagcctgatgctgcagatgcccagcgagctgcccctgagcagcaggaggatgaggctgacccactgcggcctgcaggagaagcacctggagcagctgtgcaaggccctgggcggcagctgccacctgggccacctgcacctggacttctctggaaatgccctgggagatgagggcgccgcccggctggcccagctgctgcccggcctgggcgccctgcagagcctgaacctgtctgaaaatggcctgagcctggatgctgtgctgggcctggtgcgctgcttcagcaccctgcagtggctgttccggctggacatcagctttgagagccagcacatcctgctgcggggggacaagaccagcagcctgtctgagtgccccctggagccccccagcctgacccggctgtgtgccaccctgaaggactgccccggccccctggagctgcagctgagctgtgagttcctgagtgaccagagcctggagaccctgctggactgcctgccccagctgccccagctgagcctgctgcagctgagccagacaggcctgagccccaagagccccttcctgctggccaacaccctgagcctgtgcccccgggtgaagaaggtggacctgcggagcctgcaccacgccaccctgcacttccgcagcaatgaggaggaggagggcgtgtgctgcggcttcaccggctgcagcctgagccaggagcacgtggagagcctgtgctggctgctgagcaagtgcaaggacctgagccaggtggacctgagcgccaacctgctgggggacagcggcctgcgctgcctgctggagtgcctgccccaggtgcccatcagcggcctgctggacctgagccacaacagcatcagccaggagagcgccctgtacctgctggagaccctgcccagctgcccccgggtgcgggaggcctctgtgaacctgggcagcgagcagagcttccgcatccacttcagccgggaggaccaggccggcaagaccctgcggctgtctgaatgttccttccggcctgagcacgtgtcccggctggccaccggcctgagcaagagcctgcagctgacagagctgaccctgacccagtgctgcctgggccagaagcagctggccatcctgctgagcctggtgggccggcctgctggcctcttcagcctgcgggacagcaccaggcacacagagaagctgtccttccccaccctggaggcctgtgccctgggcttcaagtag

SEQ ID NO: 274050 - DNA, 2553 bp, Artificial Sequence
  derived and/or modified sequence
atggccagccccaaggtgaacaaggacaccctgacccagtacgtgactctgcacagtcggtgggtgcagagaaccaaagcaaggttgggattgagcgaccatctccctactttcctggctggactggccagctgcacatgtagacctttcttgtcacacctggcgcaaggaaacgaagactgtgtcggggctaagcaggccgctgtggtgcaggtgctaaaaaaacttgcgacacgtaaactgaccggtcctaaggtcgttgaattgtgtcattgcgttgacgagacccaggagccagagctggcttctctgacagcgcaatccttaccgtaccagttaccctttcataatttcccattaacatgcacagaccttgcaactctgacaaatatcctcgaacacagagaagcccctattcatttagacttcgacgggtgtcccctggagcctcattgccccgaagctctagttggatgcggccagatcgaaaacttgtcatttaaaagcaggaagtgcggagatgccttcgcagaggctctgtcgcgctccctcccaaccatgggccggctgcagatgctgggtcttgctggcagtaagatcactgcccgcggcatctcacacctggtgaaggcgctgccactgtgtcctcaactgaaagaggttagctttagagataaccagttaagtgaccaggtggtcctgaacattgtggaagtcctccctcatctgccccgtcttcgcaagctggacttgagctccaacagtatctgtgtttccactttgttgtgccttgcaagggtggccgtaacatgccccaccgttagaatgctgcaggcgcgagaggcggatttaatctttctcttgtctcctcctactgaaacgacagctgagctccagcgagcacctgatttacaagaaagtgacggccaaaggaagggtgctcagtctcgatcgttaacactgagactccaaaagtgccaattgcaggtgcacgacgcggaagcccttattgccctgttacaagagggaccccacctggaggaagtcgacctctctgggaatcagctggaggacgaaggttgtcgcctgatggctgaggccgcatctcagttgcacatcgctcgcaagctggatctgagcaataacggcttgtctgtggcaggggttcactgcgtcctgagagctgtgtccgcatgctggaccctcgccgaattgcacattagcctccagcacaaaaccgtgatcttcatgtttgcccaggagcctgaggagcagaaaggaccacaggaaagagcggccttcctggacagcctcatgcttcagatgccctccgagctgccactgagcagcaggcgaatgcgacttacccattgtgggctgcaggagaaacacttggagcaactctgcaaggcccttggagggagttgccaccttggacacctccatctggatttttccggcaacgcactgggcgatgagggcgctgctcgactggcacagttacttccagggctgggggcactgcaatcactaaacctgtctgagaacgggctgtcactggatgcagtccttgggctcgtgcgatgtttcagcactctgcagtggctgtttaggctggatatttcctttgaatcacagcacatccttctgaggggtgataagacatcatctctgtccgagtgtcccctagaaccaccatcactgacacgcctctgtgccacattaaaggactgtcctggcccgctggagttgcagctgtcatgcgaattcctgtcggaccaatctcttgaaacactgctggactgcctgccacagctgccccaactgagcctgcttcaactgtcccagaccggcctgagcccaaaatctccctttttgttggccaatacgctgagcctatgcccacgcgttaaaaaggtggatcttagatcgctacatcacgctaccctccacttcagatccaatgaggaggaggagggcgtttgttgtggattcacagggtgtagcctcagtcaagagcacgtggagagtttgtgctggctgctgtctaaatgcaaagatttgagccaggtggacctatcagctaatttgttgggcgactctggtctgaggtgtctgctcgagtgcttgcctcaggtacccatatccggcttattggatctcagccacaactccatctctcaggaatcggcattgtatcttctagaaaccttgccttcttgcccgcgggtgcgagaggcgtctgtgaatcttggatctgagcagtcgtttcgcattcatttctcgcgcgaggaccaggctggcaaaaccctgcggttatcggagtgctcctttaggcctgaacacgtctccagactggccaccggactctcaaaatcacttcagctcaccgaactcacacttacacagtgttgcctcggccaaaagcaactcgccatcctgttgtctctggttgggcgaccagcaggccttttctcactacgcgattcaacgcgacatactgaaaagctgtcgtttccaactctcgaggcctgtgcactcgggttcaaatag

SEQ ID NO: 274051 - DNA, 4353 bp, Artificial Sequence
  derived and/or modified sequence
gcagcagccgccagttccatgcactggcggagcagctctaggcggcggcttctactttcagtttcgtgcagagcgcggaggagccgcgagcgctgagggagtctgcactatggaaacaacctgtcaatccagctcaaggcacacatagcccagacacccatgagaccctctccgtggggaccctagagcacctatcatgaacgaggagaccaaggctggctcctcatggaccccgttggcctccagctcggcaacaagaacctgtggagctgtcttgtgaggctgctcaccaaagacccagaatggctgaacgccaagatgaagttcttcctccccaacacggacctggattccaggaacgagaccttggaccctgaacagagagtcatcctgcaactcaacaagctgcatgtccagggttcggacacctggcagtctttcattcattgtgtgtgcatgcagctggaggtgcctctggacctggaggtgctgctgctgagtacttttggctatgatgatgggttcaccagccagctgggagctgaggggaaaagccaacctgaatctcagctccaccatggcctgaagcgcccacatcagagctgtgggtcctcaccccgccggaagcagtgcaagaagcagcagctagagttggccaagaagtacctgcagctcctgcggacctctgcccagcagcgctacaggagccaaatccctgggtcagggcagccccacgccttccaccaggtctatgtccctccaatcctgcgccgggccacagcatccttagacactccggagggggccattatgggggacgtcaaggtggaagatggtgctgacgtgagcatctcggacctcttcaacaccagggttaacaagggcccgagggtgaccgtgcttttggggaaggctggcatgggcaagaccacgctggcccaccggctctgccagaagtgggcagagggccatctgaactgtttccaggccctgttcctttttgaattccgccagctcaacttgatcacgaggttcctgacaccgtccgagctcctttttgatctgtacctgagccctgaatcggaccacgacactgtcttccagtacctggagaagaacgctgaccaagtcctgctgatctttgatgggctagatgaggccctccagcctatgggtcctgatggcccaggcccagtcctcacccttttctcccatctctgcaatgggaccctcctgcctggctgccgggtgatggctacctcccgtccagggaagctgcctgcctgcctgcctgcagaggcagccatggtccacatgttgggctttgatgggccacgggtggaagaatatgtgaatcacttcttcagcgcccagccatcgcgggagggggccctggtggagttacagacaaatggacgtctccgaagcctgtgtgcggtgcccgcactgtgccaagtcgcctgtctctgcctccaccatctgcttcctgaccacgccccaggccagtctgtggccctcctgcccaacatgactcagctctatatgcagatggtgctcgccctcagcccccctgggcacttgcccacctcgtccctactggacctgggggaggtggccctgaggggcctggagacagggaaggttatcttctatgcaaaagatattgctccacccttgatagcttttggggccactcacagcctgctgacttccttctgcgtctgcacaggccctgggcaccagcagacaggctatgctttcacccacctcagcctgcaggagtttcttgctgccctgcacctgatggccagccccaaggtgaacaaagacacacttacccagtatgttaccctccattcccgctgggtacagcggaccaaagctagactgggcctctcagaccacctccccaccttcctggcgggcctggcatcctgcacctgccgccccttccttagccacctggcgcagggcaatgaggactgtgtgggtgccaagcaggctgctgtagtgcaggtgttgaagaagttggccacccgcaagctcacagggccaaaggttgtagagctgtgtcactgtgtggatgagacacaggagcctgagctggccagtctcaccgcacaaagcctcccctatcaactgcccttccacaatttcccactgacctgcaccgacctggccaccctgaccaacatcctagagcacagggaggcccccatccacctggattttgatggctgtcccctggagccccactgccctgaggctctggtaggctgtgggcagatagagaatctcagctttaagagcaggaagtgtggggatgcctttgcagaagccctctccaggagcttgccgacaatggggaggctgcagatgctggggttagcaggaagtaaaatcactgcccgaggcatcagccacctggtgaaagctttgcctctctgtccacagctgaaagaagtcagttttcgggacaaccagctcagtgaccaggtggtgctgaacattgtggaggttctccctcacctaccacggctccggaagcttgacctgagcagcaacagcatctgcgtgtcaaccctactctgcttggcaagggtggcagtcacgtgtcctaccgtcaggatgcttcaggccagggaggcggacctcatcttccttctttccccgcccacagagacaactgcagagctacaaagagctccagacctgcaggaaagtgacggccagaggaaaggggctcagagcagaagcttgacgctcaggctgcagaagtgtcagctccaggtccacgatgcggaggccctcatagccctgctccaggaaggccctcacctggaggaagtggacctctcagggaaccagctggaagatgaaggctgtcggctgatggcagaggctgcatcccagctgcacatcgccaggaagctggacctcagtaacaacgggctttctgtggccggggtgcattgtgtgctgagggccgtgagtgcgtgctggaccctggcagagctgcacatcagcctgcagcacaaaactgtgatcttcatgtttgcccaggagccagaggagcagaaggggccccaggagagggctgcatttcttgacagcctcatgctccagatgccctctgagctgcctctgagctcccgaaggatgaggctgacacattgtggcctccaagaaaagcacctagagcagctctgcaaggctctgggaggaagctgccacctcggtcacctccacctcgacttctcaggcaatgctctgggggatgaaggtgcagcccggctggctcagctgctcccagggctgggagctctgcagtccttgaacctcagtgagaacggtttgtccctggatgccgtgttgggtttggttcggtgcttctccactctgcagtggctcttccgcttggacatcagctttgaaagccaacacatcctcctgagaggggacaagacaagcagcctcagtgagtgtcctctggagcccccaagcctcacccgcctctgtgccactctgaaggactgcccgggacccctggaactgcaattgtcctgtgagttcctgagtgaccagagcctggagactctactggactgcttacctcaactccctcagctgagcctgctgcagctgagccagacgggactgtccccgaaaagccccttcctgctggccaacaccttaagcctgtgtccacgggttaaaaaggtggatctcaggtccctgcaccatgcaactttgcacttcagatccaacgaggaggaggaaggcgtgtgctgtgggttcacaggctgcagcctcagccaggagcacgtagagtcactctgctggttgctgagcaagtgtaaagacctcagccaggtggatctctcagcaaacctgctgggcgacagcggactcagatgccttctggaatgtctgccgcaggtgcccatctccggtttgcttgatctgagtcacaacagcatttctcaggaaagtgccctgtacctgctggagacactgccctcctgcccacgtgtccgggaggcctcagtgaacctgggctctgagcagagcttccggattcacttctccagagaggaccaggctgggaagacactcaggctaagtgagtgcagcttccggccagagcacgtgtccaggctggccaccggcttgagcaagtccctgcagctgacggagctcacgctgacccagtgctgcctgggccagaagcagctggccatcctcctgagcttggtggggcgacccgcagggctgttcagcctcagagactccacaaggcacacagagaaactgtccttccccacactggaggcctgtgctttgggatttaag

SEQ ID NO: 274052 - DNA, 2553 bp, Artificial Sequence
  derived and/or modified sequence
atggccagccccaaagtcaacaaagacactctgacccagtatgttacactacactcccggtgggtgcaacgaaccaaggcaaggctgggcttgtccgatcaccttccaacgtttctggccggacttgctagctgcacctgccgcccatttctcagccacctggctcagggcaacgaggattgtgtgggcgctaaacaggctgccgtagtccaggttttgaaaaagctggcaaccaggaaactgactgggcctaaggtggtggagttgtgtcattgcgtggacgagacccaagaaccagagctggcctctctgaccgcccagagcctaccataccaattacctttccacaacttcccacttacctgcacagatcttgcaaccctaactaatatattggagcatagagaggcccctattcacctagatttcgacgggtgtcctctggagccacactgcccggaagctctggtcggctgcgggcagattgagaatctgtcctttaaatcgcgcaaatgtggcgacgccttcgccgaagcactctctcggtcgctgcctacaatgggaagactgcagatgctggggctcgctgggagcaagattactgcgaggggcatctcacaccttgttaaggcgttgcccctctgcccccaactgaaagaagtttcttttcgcgataaccagctctctgatcaggtggtcctgaacattgtggaagttctgccgcacctgccgaggcttcgcaaactggatctctcctccaactccatttgtgtgagtaccttactttgcctcgctcgagtggctgtcacatgtccaacggtccggatgctgcaagcccgtgaggcggatctgatttttcttttgagccccccaaccgagactacagccgagttacagagggctcctgacctccaagagagtgatggccagcgcaagggagctcagagccgctcactgactcttaggctacaaaagtgtcagctgcaggtgcacgacgcggaagccctcatagcactgctgcaagaagggcctcacctggaggaggtggacctgtcaggaaatcagttggaggacgaggggtgccgtctaatggcagaagctgccagtcagctccatatcgcacggaagctagaccttagtaacaatggcctgtcagtggccggtgttcattgtgtcctccgtgccgtatcggcatgttggactctggccgaacttcacatatcattgcagcacaagactgtgatattcatgtttgctcaggagcccgaggagcagaaaggcccacaggaacgggctgcattcctagactccctcatgttacaaatgccttcggagctgccattgtcctcacggagaatgcgattgacccattgcggcttacaggagaaacacttggaacagctgtgtaaggcacttggagggtcctgccacttgggccaccttcaccttgattttagcgggaatgctctgggggatgagggtgccgcaaggctcgcacagcttctcccagggttgggtgctctgcaatccctcaatctcagtgagaacggacttagcctggatgcagtgttgggcctagtgcggtgcttctcaactctccagtggctttttagactggatatttccttcgaatcacagcacattctcctgagaggcgacaaaacttctagtttatcagaatgtcccctggagcccccttccttgaccaggctgtgcgcaaccctcaaggactgccctggtcctcttgagctgcagctatcttgcgaattcctgagcgatcagtccctcgagactttgctggattgcctgcctcaactcccccagctctccctgctccagctctctcagacagggctgagcccaaaatcacctttcctattggcaaatactctctctctgtgtccaagagttaagaaagtggatctgagatccctgcaccatgcaacactgcattttcggagcaacgaggaggaggagggtgtatgctgtggattcaccggctgctctctgtctcaggaacacgtggagagtctctgctggctcctgagtaaatgcaaggacctgtcacaggtggacctcagcgcaaatttacttggggacagtggcctgcgatgcttgcttgagtgcctcccccaggtgccaattagcggtttgctggatctttcgcataattcaatcagccaggaaagcgctctatatttactcgaaactttgccctcctgtccacgggtgagggaggcctctgtcaacctcggctccgagcagagctttcgcattcactttagcagggaagatcaggccggtaagacactgaggctttcggagtgctcgtttcgacctgagcacgttagccggctggctactgggttatccaagagcctccaattgaccgagctgaccttgacgcagtgttgcctgggtcagaagcaattagcaatcctgctgagtctggtgggtagacctgccggattattttccttgcgtgactctacaagacatactgagaaactgtcctttccaacactggaagcttgcgccctcggttttaaatag

SEQ ID NO: 274053 - protein, 869 aa, Artificial Sequence
  derived and/or modified sequence
MDFPSSLRPALFLTGPLGLSDVPDLSFMCSWRDALTLPEAQPQNSENGALHVTKDLLWEPATPGPLPMLPPLIDPWDPGLTARDLLFRGGCRYRKRPRVVLDVTEQISRFLLDHGDVAFAPLGKLMLENFKLEGAGSRTKKKTVVSVKKLLQDLGGHQPWGCPWAYLSNRQRRFSILGGPILGTSVASHLAELLHEELVLRWEQLLLDEACTGGALAWVPGRTPQFGQLVYPAGGAQDRLHFQEVVLTPGDNPQFLGKPGRIQLQGPVRQVVTCTVQGESKALIYTFLPHWLTCYLTPGPFHPSSALLAVRSDYHCAVWKFGKQWQPTLLQAMQVEKGATGISLSPHLPGELAICSRSGAVCLWSPEDGLRQIYRDPETLVFRDSSSWRWADFTAHPRVLTVGDRTGVKMLDTQGPPGCGLLLFRLGAEASCQKGERVLLTQYLGHSSPKCLPPTLHLVCTQFSLYLVDERLPLVPMLKWNHGLPSPLLLARLLPPPRPSCVQPLLLGGQGGQLQLLHLAGEGASVPRLAGPPQSLPSRIDSLPAFPLLEPKIQWRLQERLKAPTIGLAAVVPPLPSAPTPGLVLFQLSAAGDVFYQQLRPQVDSSLRRDAGPPGDTQPDCHAPTASWTSQDTAGCSQWLKALLKVPLAPPVWTAPTFTHRQMLGSTELRREEEEGQRLGVLRKAMARGQLLLQRDLGSLPAAEPPPAPESGLEDKLSERLGEAWAGRGAAWWERQQGRTSEPGRQTRRPKRRTQLSSSFSLSGHVDPSEDTSSPHSPEWPPADALPLPPTTPPSQELTPDACAQGVPSEQRQMLRDYMAKLPPQRDTPGCATTPPHSQASSVRATRSQQHTPVLSSSQPLRKKPRMGF

SEQ ID NO: 274054 - DNA, 3925 bp, Artificial Sequence
  derived and/or modified sequence
gtccaaaccggaagaccgtgggtagctgcggcggggctgacccgtcccgagtgccaaagctggggttctacttgagatttccctcgtggtgccagggtccggcgagcatcacgccgaggcccattttccagacgaccacgacgaggccggggtcacgaactctggcgccccttaccagcttccagtctctcgaggtggccagtgtggtgcttggtccttgtttccaggatggacttccccagctccctccgccctgcattgtttctgaccggcccccttggtctgagcgacgtccctgacctctctttcatgtgcagctggcgagacgcactgactctgccagaggcccagccccagaactcagagaatggggcactgcatgtgaccaaggacctgctgtgggagccggcaacccctgggcctctccccatgctgcctcccctcatcgatccctgggaccctggcctgactgcccgggacctgcttttccgcggagggtgccggtatcggaagcggccccgagtcgtgctggatgtgactgagcagatcagccggttcctcttggatcatggagacgtagcctttgcgcccctggggaagctgatgctggagaatttcaagctggagggagcggggagccgcactaagaagaagacagtggtcagtgtgaagaagctgctccaggacctcggtggacaccagccctgggggtgtccctgggcttacctcagcaaccgacagcgccgcttctctatcctcgggggccccatcctgggcacgtcggtggcgagccacttggcagagctgctgcacgaggagctggtgctgcggtgggagcagctgcttctggatgaggcctgcactgggggcgcgctggcctgggttcctggaaggacaccccagttcgggcagctggtctaccctgctggaggcgcccaggacaggctgcatttccaagaggtcgttctgaccccaggtgacaatccccaattccttgggaaacctggacgcatccagctccagggacctgtccggcaagtggtgacatgcaccgtccagggagaaagtaaggcccttatatacactttcctccctcactggctgacctgctacctgacccctggccctttccatccctcctcagctctgctggccgtccgctctgactaccactgtgccgtgtggaagtttggtaaacagtggcagccaacccttctgcaggcaatgcaggtggagaaaggggccacggggatcagcctcagccctcacctgcccggggagctggccatctgcagccgctcgggagccgtctgcctgtggagccctgaggatgggctgcggcaaatctacagggaccctgagaccctcgtgttccgggactcctcttcgtggcgttgggcagacttcactgcgcaccctcgggtgctgaccgtgggtgaccgcaccggagtgaagatgctggacactcagggcccgccgggctgtggtctgttgctttttcgtttgggggcagaggcttcgtgccagaaaggggaacgtgtcctgcttacccagtacctggggcactccagccccaaatgcctcccccctactcttcatctcgtctgtacccagttctctctctacctagtggacgagcgccttcccctggtgccgatgctgaagtggaaccatggcctcccctccccgctcctgctggcccgactgctgcctccgccccggcccagctgcgtgcagcccctgctcctcggaggccagggtgggcagctgcagctgctgcacctggcaggagaaggggcgtcggtgccccgcctggcaggccccccccagtctcttccttccaggatcgactccctccctgcatttcctctgctggagcctaagatccagtggcggctgcaggagcgcctgaaagcaccgaccataggtctggctgccgtcgtcccgcccttgccctcagcgcccacaccaggcctggtgctcttccagctctcggcggcgggagatgtcttctaccagcagctccgcccccaggtggactccagcctccgcagagatgctgggcctcctggcgacacccaacctgactgccatgcccccacagcttcctggacctcccaggacactgccggctgcagccagtggctgaaggccctgctaaaagtgcccctggctcctcctgtgtggacagcacccaccttcacccaccgccagatgctgggcagcacagagctgcggagggaggaagaggaagggcagcggctgggtgtgctccgcaaggccatggcccgagggcagctcctgctgcagagagacctgggctccctccctgcggcagagccaccccctgcacccgagtcaggcctagaggacaagctcagtgagcgcctgggggaagcctgggcaggccgaggggctgcctggtgggagaggcagcagggcaggacctcggagcccgggagacagaccaggcggcccaagcgccggacccagctgtccagcagcttttcgctcagtggccatgtggatccctcagaggacaccagctcccctcatagccctgagtggccacctgctgatgctctgcccctgccccccacgaccccgccctcccaggagttgactccggatgcatgcgcccagggcgtcccatcagagcagcggcagatgctccgtgactacatggccaagctaccaccccagagggacaccccaggctgtgccaccacacctccccactcccaggcctccagcgtccgggccactcgctcccagcagcacacacccgtcctctctagctctcagcccctccggaagaagcctcgaatgggcttctgaggacacaaggtgggctgccctcaagccccagagagcccctcatccttcctctgggaccagatgtgccttccacagttgaaacttgagaagcagagctcgccaccttctggaggccactgtgatgatgagccaagcaatttggagccaagttgaagggacagggcaacaaaatacagtagtagtttcttttgtattttgtatattcgcctgaagatcatcccgcaaggcaggctggaggtgccggtgggcctgtgttgctgggattttagtctgtgctgggaggcagggctccgctgcgcctcagctgtgggggcctcaggcaggtccctcagttctcacgccttcctgtccagtggaatgggggccaggagtgctggctcctcgtgtttggtgagggtggagtgaggcccctgcagagctgctgatgaggtgggcacagcggccgttggcagctgctgttgtgggttgctttgtcaatctctgccccggtctgatgtttcctacagggagatgccttggatccaggttcagggactaaatacacttggcagctgaagatgaattggaatggtcacgttttttaggctggacagcgtcccgccacagctactacctgacactgagctcatgcagagagatgatggctgatgttccttctcccttgggacatgggtctggcacctgtgggctgtcgatagtgccctctgagcagagggtcacggtcatgtcagtttgggggaattctctgttgtgcctcacagactcccccctttctttcctccctccccttctcattttgatgtctaaagcatcaagtccctcttcctcggagtttctctagctgcagtggaagattctgttttcctgtggggaaaatgctcacttgagattttgcagggacccgggtctgtctggtttctgatgacatagtaagagaaaggtcttttttcaggttggctggtgaaaggaattgcatgtgactcacacaaacaggagctagcccaatcatacactgactcgcgtgggtgttaaaatgtttatcatgcctaagggagacatttatgattaaaccatttatgctacataa

SEQ ID NO: 274055 - DNA, 2610 bp, Artificial Sequence
  derived and/or modified sequence
atggacttccccagcagcctgagacccgccctgttcctgaccggccccctgggcctgagcgacgtgcccgacctgagcttcatgtgcagctggagagacgccctgaccctgcccgaggcccagccccagaacagcgagaacggcgccctgcacgtgaccaaggacctgctgtgggagcccgccacccccggccccctgcccatgctgccccccctgatcgacccctgggaccccggcctgaccgccagagacctgctgttcagaggcggctgcagatacagaaagagacccagagtggtgctggacgtgaccgagcagatcagcagattcctgctggaccacggcgacgtggccttcgcccccctgggcaagctgatgctggagaacttcaagctggagggcgccggcagcagaaccaagaagaagaccgtggtgagcgtgaagaagctgctgcaggacctgggcggccaccagccctggggctgcccctgggcctacctgagcaacagacagagaagattcagcatcctgggcggccccatcctgggcaccagcgtggccagccacctggccgagctgctgcacgaggagctggtgctgagatgggagcagctgctgctggacgaggcctgcaccggcggcgccctggcctgggtgcccggcagaaccccccagttcggccagctggtgtaccccgccggcggcgcccaggacagactgcacttccaggaggtggtgctgacccccggcgacaacccccagttcctgggcaagcccggcagaatccagctgcagggccccgtgagacaggtggtgacctgcaccgtgcagggcgagagcaaggccctgatctacaccttcctgccccactggctgacctgctacctgacccccggccccttccaccccagcagcgccctgctggccgtgagaagcgactaccactgcgccgtgtggaagttcggcaagcagtggcagcccaccctgctgcaggccatgcaggtggagaagggcgccaccggcatcagcctgagcccccacctgcccggcgagctggccatctgcagcagaagcggcgccgtgtgcctgtggagccccgaggacggcctgagacagatctacagagaccccgagaccctggtgttcagagacagcagcagctggagatgggccgacttcaccgcccaccccagagtgctgaccgtgggcgacagaaccggcgtgaagatgctggacacccagggcccccccggctgcggcctgctgctgttcagactgggcgccgaggccagctgccagaagggcgagagagtgctgctgacccagtacctgggccacagcagccccaagtgcctgccccccaccctgcacctggtgtgcacccagttcagcctgtacctggtggacgagagactgcccctggtgcccatgctgaagtggaaccacggcctgcccagccccctgctgctggccagactgctgcccccccccagacccagctgcgtgcagcccctgctgctgggcggccagggcggccagctgcagctgctgcacctggccggcgagggcgccagcgtgcccagactggccggccccccccagagcctgcccagcagaatcgacagcctgcccgccttccccctgctggagcccaagatccagtggagactgcaggagagactgaaggcccccaccatcggcctggccgccgtggtgccccccctgcccagcgcccccacccccggcctggtgctgttccagctgagcgccgccggcgacgtgttctaccagcagctgagaccccaggtggacagcagcctgagaagagacgccggcccccccggcgacacccagcccgactgccacgcccccaccgccagctggaccagccaggacaccgccggctgcagccagtggctgaaggccctgctgaaggtgcccctggccccccccgtgtggaccgcccccaccttcacccacagacagatgctgggcagcaccgagctgagaagagaggaggaggagggccagagactgggcgtgctgagaaaggccatggccagaggccagctgctgctgcagagagacctgggcagcctgcccgccgccgagcccccccccgcccccgagagcggcctggaggacaagctgagcgagagactgggcgaggcctgggccggcagaggcgccgcctggtgggagagacagcagggcagaaccagcgagcccggcagacagaccagaagacccaagagaagaacccagctgagcagcagcttcagcctgagcggccacgtggaccccagcgaggacaccagcagcccccacagccccgagtggccccccgccgacgccctgcccctgccccccaccaccccccccagccaggagctgacccccgacgcctgcgcccagggcgtgcccagcgagcagagacagatgctgagagactacatggccaagctgcccccccagagagacacccccggctgcgccaccacccccccccacagccaggccagcagcgtgagagccaccagaagccagcagcacacccccgtgctgagcagcagccagcccctgagaaagaagcccagaatgggcttctag

SEQ ID NO: 274056 - DNA, 2610 bp, Artificial Sequence
  derived and/or modified sequence
atggatttccccagtagtttgcggcccgccctctttcttactgggccactggggttgtcagatgtacctgatctgagctttatgtgttcatggcgagatgcactcaccctgcctgaagctcagcctcagaatagcgaaaatggcgccctgcatgtgaccaaggatttactatgggagccagcaacacctggtccactcccgatgcttccccccctgattgacccatgggaccccggccttactgcgagggatctgctgttccgggggggttgcaggtacaggaaaaggcctcgggtcgttttagatgtaaccgaacaaattagcagattcctgttggaccatggcgatgttgcatttgcccctctgggtaaattgatgctcgaaaatttcaagctcgaaggcgctggcagccggacaaagaaaaagactgtcgtttccgtaaagaaactgctccaggatcttggaggacaccagccatggggctgcccatgggcatatctgagtaaccggcagagaaggttctctatcttggggggtccaatattgggcactagcgtcgcaagccacctcgctgaactgctccacgaagagctcgtgctaaggtgggagcaactcctactcgatgaggcgtgtacaggtggcgcactggcatgggtgcctggcaggacccctcagttcggccagctcgtgtatcccgcgggtggcgctcaggacagattgcattttcaagaggtggtgttgaccccgggggacaacccgcagtttctggggaaaccagggaggatccaattgcagggcccggtgagacaagtggtcacctgcacagttcagggagagagcaaggccctgatctacacctttctccctcactggctgacttgctatcttacacctggcccttttcaccctagctcagcactgctcgccgtccggagcgactaccattgcgcagtgtggaagttcggaaagcagtggcagccgaccctgctccaagcaatgcaagtggaaaagggggctaccggtatctccctgtctccacatctgccgggcgagctggcgatttgcagccgcagcggtgctgtctgtctatggtcccctgaagacggactgcgccagatctacagggaccccgagacgctggtgtttagagactcctcaagctggaggtgggccgacttcaccgcccacccccgagtcctgaccgtcggagaccgtactggtgtcaagatgctggatacacagggacctcctggctgtggtcttttgttattccgcctgggtgcggaggcttcatgccagaagggggaacgcgtgctcctgacacaatatctaggccattcttcccctaaatgtctgccaccaactctgcatctcgtatgcacgcaattctcattatatctagtcgatgaacggctcccactcgttcccatgctcaaatggaaccatggcctgccttcaccgctcttattggctagactcctccccccaccccggccttcctgcgttcagcctctgttgctaggaggacagggcggtcagctgcagcttttacacctcgctggagaaggagcttctgtgcctaggctggctggaccaccgcagagtctgccctcacgaattgattcgctccctgcttttcccttgctcgagccaaagattcaatggagactacaggaacgcctcaaggcccctaccatcgggctggccgccgtggtgcctcccctccctagtgccccaacacctggcctagtattgtttcagcttagtgctgctggcgatgtgttttatcaacagctgcgaccccaagtagattcatcactccgccgggatgcgggcccccccggcgacacgcagccagactgccacgcccctacggcgagctggacttcacaggatacggcaggttgttcgcagtggctgaaggctctgctgaaggtgccactggccccccccgtgtggacagccccaaccttcacacacaggcagatgctgggcagcaccgaactgagacgggaggaggaagagggccagagactgggagtgctccgcaaggccatggcccgtggccaactgctgctacagcgtgacctaggaagtcttcccgccgcagagcctccacccgcacctgagagtggtctggaagacaaattgtccgaacgacttggggaagcttgggcaggccggggggctgcgtggtgggaacgtcagcagggacgaacctctgaacctggaaggcaaacgcgccgccccaaacggcgaacacaactgtcctcctcatttagcctctcagggcacgtggacccctctgaagatacttcaagtcctcacagtcctgagtggcccccagcagacgcactgccgctgccccctacaacgcccccatcacaggagctgaccccagatgcatgtgcacagggcgtcccgtccgagcagcgtcagatgttgagagattacatggccaagctgccgccccagcgggacacacccggttgcgctactacgcctccccactctcaggccagcagtgtacgggcaacccgcagccagcagcacacccccgtgctgagttctagtcagcctctgcggaagaagcctaggatgggcttttag

SEQ ID NO: 274057 - DNA, 2610 bp, Artificial Sequence
  derived and/or modified sequence
atggactttccctcctctcttcgaccagctctgtttttgaccggacccctgggcctatcggacgttcccgacttgtcattcatgtgctcctggcgcgatgccctcacccttccagaggcccagccccagaattcagagaacggcgccttgcatgtaacaaaggaccttctgtgggagcccgccacgcctggaccacttccgatgttaccgcccctgattgacccgtgggatcctgggctgactgcccgcgaccttctttttaggggcggatgccgctatcgtaaacggccgcgtgtcgttctcgacgtcacagagcagataagcaggttccttcttgaccacggtgacgtggcgttcgcccccctgggaaaattgatgctagagaatttcaaactcgagggtgccggatcaagaacgaagaaaaagaccgttgtgtccgtgaagaaacttttacaggacctgggagggcaccagccatggggatgcccgtgggcatacctctccaataggcagcgccggttcagtattctggggggtcctatcctggggacttcggtggcctcccatcttgcagagctgctccacgaagagctggtgcttagatgggagcaattactgctcgacgaagcgtgcaccggtggggctctggcatgggtccctggacggacgccacaattcggccagttggtttatccggccggtggagcccaggatagactccacttccaggaagttgtgttaacacccggggacaatccccagtttttgggaaaacccggccggattcagttgcagggcccagtaaggcaggtcgtcacttgtacagtgcagggggaatctaaggcactgatctatacctttctgccccattggctgacatgttacctcacgccaggtccatttcatccgtccagcgccctgctcgctgtccgcagcgactaccactgtgcggtttggaagttcggcaaacagtggcaaccaacactgctgcaggctatgcaggtggagaaaggagctactggtatctccctgtcacctcatctgcctggtgaactggcaatctgttcaaggtctggggccgtgtgcctttggagcccggaggatggattgaggcaaatctatcgagacccggagacattagtgtttagggacagttcttcttggcggtgggctgatttcacagctcatcctagggttttgaccgtgggagacaggacgggcgtaaagatgctggacacccagggtcccccaggatgcggattgctgctgttcaggcttggtgccgaggcgtcttgccagaaaggggaacgagtcctgctgactcagtacttggggcatagcagtcctaagtgtctgccccccactctgcacttagtctgtacacagttctcgctatatttagtcgatgaacgtctcccacttgtgcctatgctgaaatggaaccatggcctgccctctccactcctcctggcgcgtctgttaccccccccccgtccttcctgtgtgcagcccttactgctgggggggcagggaggtcagcttcagttgctgcacctggcaggggagggagccagtgttcctaggctggccggcccgccgcaaagcctccctagcagaattgattccttacccgccttcccgctgctggagcccaagatccagtggcgccttcaggaaaggctgaaggcgcctaccatcggacttgctgccgtcgttcctccactgcctagtgcaccgacccccggtttggtgctgttccagctgagcgctgctggcgacgtgttttatcaacagctgagacctcaggttgattctagcctccgccgagacgccggaccgcctggggacactcagcctgattgtcacgcccctacagcaagctggaccagccaggacaccgccggctgtagccagtggctgaaggccctgcttaaagttcctctcgctccacccgtatggacggcccccaccttcacccacaggcagatgctgggaagcacagaactccgcagggaggaggaggagggacaacggttaggcgtgctgcgtaaggcgatggcaagaggccagttgttactgcagagagatcttggtagcctaccagccgccgaaccgccccccgcaccagagtctggactcgaggacaaactgtccgagcgtcttggagaagcctgggccggcagaggagcagcctggtgggaaaggcaacaaggccgcactagcgaacccggccgtcagactcgcaggcccaagcggcggacccagctgtcaagctccttctcactctctggccacgtggatccctctgaggacacatcgtcgccccactccccagaatggcctccagctgacgcattacccctgcccccgactacaccgccgagtcaggaactgactcctgatgcctgtgcccagggggtgcctagcgaacaacgacaaatgctgagagactacatggctaagttgcctcctcagcgcgacaccccgggctgcgctactaccccgccacacagccaggcctccagcgttcgcgcaacaagatcccagcaacacacaccagtgctatcatctagccagccactgaggaaaaaacccagaatgggtttctag

SEQ ID NO: 274058 - DNA, 2610 bp, Artificial Sequence
  derived and/or modified sequence
atggacttccccagcagcctgcggcctgccctcttcctgaccggccccctgggcctgagtgatgtgcctgacctgtccttcatgtgctcctggagagatgccctgaccctgcctgaggcccagccccagaacagtgaaaatggagccctgcacgtgaccaaggacctgctgtgggagcccgccaccccaggccccctgcccatgctgccccccctgattgacccctgggaccccggcctgacagcccgggacctgctcttccggggcggctgccgctacaggaagaggccccgggtggtgctggatgtgacagagcagatcagccgcttcctgctggaccatggagatgtggcctttgcccccctgggcaagctgatgctggagaacttcaagctggagggcgccggcagcaggaccaagaagaagacagtggtgtctgtgaagaagctgctgcaggacctgggcggccaccagccctggggctgcccctgggcctacctgagcaaccggcagaggcgcttcagcatcctgggcggccccatcctgggcacctctgtggccagccacctggccgagctgctgcacgaggagctggtgctgcgctgggagcagctgctgctggatgaggcctgcaccggcggggccctggcctgggtgcccggccgcaccccccagtttggccagctggtgtacccagctggaggagcccaggaccggctgcacttccaggaggtggtgctgacccctggggacaacccccagttcctgggcaagccaggccgcatccagctgcagggccctgtgcggcaggtggtgacctgcaccgtgcagggcgagagcaaggccctgatctacaccttcctgccccactggctgacctgctacctgaccccaggccccttccaccccagcagcgccctgctggccgtgcggagtgactaccactgtgctgtgtggaagtttgggaagcagtggcagcccaccctgctgcaggccatgcaggtggagaagggggccaccggcatcagcctgagcccccacctgcctggagagctggccatctgcagccgcagcggggctgtgtgcctgtggagcccagaagatggcctgcggcagatctacagagatcctgagaccctggtgttccgggacagcagctcctggcgctgggccgacttcaccgcccacccccgggtgctgactgtgggggacagaactggagtgaagatgctggacacccagggccccccaggctgcggcctgctgctcttccggctgggcgctgaggccagctgccagaagggggagcgggtgctgctgacccagtacctgggccacagcagccccaagtgcctgccccccaccctgcacctggtgtgcacccagttcagcctgtacctggtggatgagcggctgcccctggtgcccatgctgaagtggaaccacggcctgcccagccccctgctgctggcccggctgctgcccccaccccggcccagctgtgtgcagcccctgctgctgggcggccagggcggccagctgcagctgctgcacctggccggggagggcgcctctgtgccccggctggccggccccccccagagcctgcccagcagaattgacagcctgcctgccttccccctgctggagcccaagatccagtggaggctgcaggagcggctgaaggcccccaccatcggcctggccgctgtggtgccccccctgcccagcgcccccaccccaggcctggtgctcttccagctgtctgctgctggagatgtgttctaccagcagctgcggccccaggtggacagcagcctgcggagagatgctggccccccaggggacacccagcctgactgccacgcccccacagcctcctggaccagccaggacacagctggctgcagccagtggctgaaggccctgctgaaggtgcccctggcccctcctgtgtggacagcccccaccttcacccaccggcagatgctgggcagcacagagctgcggcgggaggaggaggagggccagaggctgggcgtgctgaggaaggccatggcccggggccagctgctgctgcagagggacctgggcagcctgcctgctgctgagcccccaccagcccctgagagcggcctggaggacaagctgtctgagcggctgggggaggcctgggccggccgcggggccgcctggtgggagcggcagcagggccgcaccagcgagcccggccggcagacccggcggcccaagaggaggacccagctgagcagcagcttcagcctgagcggccacgtggaccccagcgaggacaccagcagcccccacagccctgagtggcccccagcagatgccctgcccctgccccccaccaccccacccagccaggagctgaccccagatgcctgtgcccagggcgtgcccagcgagcagaggcagatgctgcgggactacatggccaagctgcccccccagagggacaccccaggctgtgccaccaccccaccccacagccaggccagctctgtgcgggccaccaggagccagcagcacacccctgtgctgagcagcagccagcccctgaggaagaagcccaggatgggcttctag

SEQ ID NO: 274059 - DNA, 2610 bp, Artificial Sequence
  derived and/or modified sequence
atggacttccccagcagcctgcggcccgccctgttcctgaccggccctctcgggcttagcgacgtcccagacttaagcttcatgtgctcatggcgagatgcgctgaccctgcccgaagctcaacctcaaaactccgaaaatggcgctttacacgttaccaaagacttgctctgggagcctgccacccctggccctttaccaatgctgcctcccctaatcgatccatgggaccctggcctgactgctagggacctgctcttcaggggcggatgccgttaccgaaagaggccacgggtcgtactggatgtgacggagcagatctccagatttctgctcgaccatggggacgtggcgtttgctccgctcggtaagctaatgctggaaaactttaaacttgaaggcgccgggtcaagaacgaagaagaagacagtggtgtcggtgaagaagttgctgcaggatcttggcggacaccaaccatggggatgtccatgggcctatctttcaaatcggcagcggaggttttccattctggggggaccaatccttggcacctccgtggcaagtcatttagcagagctcctgcacgaagaactggtcttgaggtgggagcagctactgttggacgaggcatgtactgggggagcgctggcctgggtgccgggaagaaccccccagtttgggcagttagtatatccagcgggtggtgcccaagacaggttgcacttccaggaggtcgtgttgacgcccggcgacaatcctcagttccttggcaaaccaggcaggatacagttacagggccctgtacgccaagtcgtaacatgtaccgtgcagggcgaatcgaaagccctgatttatacgtttctgccacattggctgacttgctacctgacacctgggccattccatccgagcagcgcactgctcgctgtgcggagcgactaccattgtgccgtgtggaaattcgggaaacagtggcagcctacgttactgcaggcaatgcaggtggagaagggagccactggaatcagcctgagcccgcatctgcccggcgaactcgcaatttgcagccgctccggggctgtgtgcctgtggtcccccgaagatggattgcgccagatttaccgtgaccccgagacactggtgtttcgcgactccagcagctggaggtgggcagactttacggcccaccctcgcgtcctgacagtcggcgaccgaacaggcgtgaaaatgctcgacacacaaggaccacccggttgtggtctgttgctattccgactcggtgccgaggcgtcatgtcagaaaggagaacgggtcctgctgactcaatatctaggtcatagtagcccaaagtgcctcccccccacactgcacctggtgtgcacacagttttccctgtacttagttgacgagcggctgcctctggttcctatgctgaagtggaatcatggcctgcctagccctttactcctggctaggctactcccaccaccgagacctagctgtgtgcagcccctcctcctaggcggacaaggcggccaactccaactactgcaccttgctggggagggcgcttctgtaccgcgattggccggccccccacagagtcttcccagccgtatcgattctctcccagctttccccctgctggagccgaaaatccagtggcgattgcaagagcgtcttaaggcccctaccattggtttagctgctgtggttccgcccttgccatcggcacctacccccggactagttcttttccagctctccgccgcaggggatgtattctaccaacagctgcgtccgcaggtggattctagcctcagaagggacgccggccctcccggcgatactcagcctgactgtcacgccccaaccgcgagctggacgtcccaggacacagctggctgctctcagtggctgaaagccttattgaaggttccactcgccccacccgtctggacagcccccaccttcactcacaggcagatgctgggaagtacagagctgaggcgggaggaggaggagggacaacggctcggagtgttgaggaaagcaatggcgaggggacagctgttgctacaaagagatctgggttccttgccagccgctgagccacctccagccccagaaagcggcctggaagataagctgagtgaaagactcggtgaagcatgggccggtcgcggggcagcctggtgggagcggcagcaaggaagaacctcggagcccggaaggcagacacgccggcctaagcggagaactcagctgagttcaagcttctctctcagcggccatgtggatccttccgaggacaccagtagtcctcactctcccgagtggccccccgctgatgctctgccactacctcccaccactcctccttcccaggaacttactccggacgcatgcgcccaaggtgtgccgtccgaacagcgtcagatgctacgtgattatatggcgaaactgcccccccagcgggacacacccggctgtgccactacccctccacactcccaggcaagtagtgtacgggctactaggagtcagcaacacacacccgtcctctccagctctcagcctttaaggaaaaagcctcggatggggttttag

SEQ ID NO: 274060 - DNA, 2610 bp, Artificial Sequence
  derived and/or modified sequence
atggacttccccagcagcctgcggcccgccctgttcctgaccggccccctgggattgtcggatgtgcccgacttgagcttcatgtgctcttggagggatgccctgacattgccggaagctcagccacaaaattcagagaatggcgcattgcacgttacaaaagacttactctgggaaccggctacgcccggtcctttaccaatgctcccccccctcattgacccctgggatccaggactcactgccagagatttgctcttcagaggcggatgcaggtaccggaagcgcccccgtgtggtcctagacgtgacagagcaaatctcacgctttctgcttgaccatggtgacgtggcctttgcaccactgggaaaactcatgttggaaaattttaagctggagggagctggctctcgcacaaaaaagaaaaccgtcgtgagcgtgaagaagctcctgcaggatctgggcggccatcaaccttggggctgtccctgggcttatttgagtaatcgacagaggcgtttttccattctggggggaccaatcttaggcacaagcgtggcttcccacctggcagaactgctgcacgaggaactggtcctgcgctgggaacagctcctgttggatgaggcctgcactggaggcgcattggcatgggttcctggccgaacaccacagtttggccaacttgtgtacccggctggaggggcacaagacaggctgcacttccaggaggtggtgttaacacccggcgacaatcctcagtttctcggtaagcctgggaggattcaactccaagggcccgtgaggcaagtagtgacgtgcacagtgcagggagaatctaaagctctcatttatacattcttaccacactggctaacatgctacctgacgccgggcccctttcatcccagtagcgccctccttgcagtgcggtccgattaccattgtgcagtttggaagtttggaaaacaatggcaacctactcttctccaggccatgcaagtggagaaaggtgccacagggatcagtctctctccccatctccccggcgagctggcaatttgttcacggtctggagccgtatgtctgtggtcacccgaggacggtcttcggcagatatacagagatccagaaactttggtctttcgcgactcaagcagttggagatgggcagacttcactgcccatcccagagttctgacagtgggagatcgcacgggagtgaagatgttggacacccagggtccccccggctgtggactgctcctgttccgactcggagcagaagccagttgtcagaaaggagaaagggtgttgctcacacagtaccttgggcacagctctcctaagtgtctcccccccactttgcatctggtgtgcactcagttcagcctatacctggtagacgagagactccctctggttccaatgctcaagtggaaccatggcctgcctagtcccctgctcctggctcgcctgctgccaccccccagaccttcttgtgttcagcctctgctgttaggcggccagggcgggcaactccaactgctgcaccttgccggtgagggggcttcggttcccagactggccggccccccacagtcccttccctccaggattgactcacttcccgctttcccactgctcgaaccgaaaatccagtggagactgcaggagcgcttgaaggctcccacgattggcctcgctgcagtggtcccacctctgccctccgcccccacacccggacttgttctgtttcagcttagcgccgctggtgatgttttctatcagcaattaagaccacaggtcgactcttctctgaggcgagatgccggccctcctggtgacacacagccagattgccacgcacctacagccagctggacatcccaggacacagcaggttgcagtcagtggttgaaagcactgctcaaagtgccgttggcaccacccgtgtggactgcccccacctttactcatcgccagatgctgggcagtacggaactgcggcgggaagaagaagaaggccagcggcttggagtccttcggaaagccatggcccgcggacagttactcctgcagcgagatctgggatcattgcccgccgctgaacctccgccagctcctgaatccggccttgaggataagctgagtgaaagattaggtgaggcctgggccggccgcggggcagcttggtgggaacgtcaacaagggagaacctcagaacctgggcggcaaactcgccggcctaaaagacgcactcaactgagttcctcattttcactgtccgggcatgttgatccttctgaagatacttcaagtccgcacagcccagagtggccccctgctgacgccttaccccttcccccaaccactcccccttctcaggaactcaccccagatgcgtgtgcccagggtgtacctagcgagcagcggcagatgctgagagattatatggccaaactaccgccccagagggatacacctggctgcgctacgaccccaccacattcccaggcttctagcgtgcgagccacaaggtctcaacagcatacgcccgtactgtcatcatctcagcctctcaggaagaaaccccggatgggattttag

SEQ ID NO: 274061 - DNA, 2610 bp, Artificial Sequence
  derived and/or modified sequence
atggatttccctagttcactgcggccagcattgttcctgactggcccacttggcctgtctgatgttccggacctgagcttcatgtgtagttggcgcgatgctctgaccctgcccgaagcccaacctcagaactccgaaaatggtgcactccatgtgacaaaagacctcctgtgggagcctgcgacaccgggtccactccccatgctgcctcctctgatcgatccctgggatcctggactgaccgctcgggatctcctgtttcgtggcggatgccgctacaggaagagacccagagtcgtgttggatgtaacagagcaaatcagtcgctttctgttggaccacggtgatgtagccttcgctccattgggaaaactgatgctcgagaatttcaagcttgagggtgctgggtcccggactaagaagaaaacagttgttagcgtcaagaagctgttgcaggatctcggaggccatcagccctggggctgtccttgggcttacctttcaaaccgccagcgtcgcttttcaattctgggaggacccatcctgggaacatctgttgcatcacacctcgctgagttgctccacgaagagcttgtactaagatgggagcagcttttacttgatgaggcctgtacagggggtgccctcgcttgggttccaggcaggacgccgcagttcggtcagctcgtgtaccctgccggtggtgcccaagatagactccactttcaggaggtcgtcctgactcccggagacaaccctcagtttctgggaaaacctggcagaatccagttgcaaggtccagttaggcaggtggtaacatgcaccgtccaaggtgagtcaaaggcactgatttatacttttctcccacactggctgacatgttacctcacacccggtccatttcatccgagttctgctttgctggcagttaggtcggattaccactgtgccgtctggaagtttggcaagcagtggcagccaactctcttacaagccatgcaggtggagaagggcgctaccgggattagcctcagccctcatctgccaggtgagctggctatttgctcccggtccggcgcagtctgtctttggtcccccgaagatggattacggcaaatttaccgggatcccgagacgctggtctttagagatagctcctcctggaggtgggccgactttacggcgcatccccgagtgcttacggtgggcgatcgcaccggggtaaaaatgctggatacgcagggcccacccggatgtgggctcctgttatttaggttgggcgcagaggcatcctgccagaagggagagcgggttctgctaacccagtacctcggccattcaagccctaagtgtttacctccaacactacatcttgtgtgcacacagttttcactctatctggtggacgaacgcttacccttggtgcctatgcttaagtggaaccatggacttccctctcccctcctgttggccagactcctccccccaccacgcccttcctgtgtccaaccactcctactcgggggtcagggaggccaactgcagttgttgcatctggcaggcgagggagccagtgtacctcgactcgcgggacccccacagagcctcccctctagaattgacagtttacccgctttccctcttttggagcctaagattcagtggcgtctgcaggagaggctaaaggcgcctaccattgggctggccgcagtggtgcctccattgccaagtgcgcctacccccggactggtattgttccaactgtccgctgccggtgacgtattctaccagcagctgagaccacaagtggattctagtctccggcgagacgccggaccacctggagatactcaacctgactgccacgcgccaacagcatcatggacaagccaggatactgccggatgcagccagtggctgaaggccttactgaaagttcccctagcacctcccgtgtggactgcacctacatttacccaccggcagatgctcggctccacagagttgcgccgtgaagaggaggaaggtcagaggttaggcgtgttacgaaaagctatggcccgaggacagctcctgttacagcgagatctgggctcactgccagctgccgaaccacctccagctcccgaatcgggattggaagataagcttagcgagcgcctaggcgaggcctgggcgggacggggtgccgcatggtgggaacgccagcaggggcgaacatctgagcctggcagacagacaagacgtcccaaacgtagaacacaattatcctctagcttctctctctctgggcacgtggatccgtccgaagataccagcagcccccactcccccgagtggcctcccgctgacgctctgcccctgccgccaactaccccccctagtcaggagctgaccccagatgcttgtgcccagggcgtgccgtctgaacagcggcaaatgctgcgagactatatggccaaacttcctccgcaaagggacacccccggatgtgccactacccctccgcactctcaggcttcaagcgtccgggcaactagaagccagcagcatacacctgtgctatcgtcctcccagcctctgagaaagaagccccgaatgggattttag

SEQ ID NO: 274062 - DNA, 2610 bp, Artificial Sequence
  derived and/or modified sequence
atggatttcccctcatccctgcgacccgctctgttcttgaccggccctctgggcctgtccgatgttcctgacctgagcttcatgtgtagctggagagacgcactgacactaccagaggcccagcctcaaaattccgagaatggcgctcttcatgttacaaaggacctgctgtgggagcctgctaccccaggccctctgccaatgctacccccattgatagatccatgggatccgggactgacagcaagggacctgttattcaggggaggctgcaggtatagaaaacggccaagagtcgtgctcgatgtcactgagcagatttcccgtttcctgctggaccatggggacgtggcctttgcacccttaggcaaacttatgctcgagaattttaaattggaaggagcagggtcgaggactaagaagaaaacagtggttagtgtcaagaaattactgcaggacctgggaggccaccaaccctgggggtgtccatgggcgtatctgagtaaccgccaacggaggttcagcatcctggggggacccattctcggcacctccgtcgcttcccatctggcggagctgctgcacgaagagttggtgctgcgctgggaacaactgttgctcgatgaagcctgcaccgggggagcactggcctgggtcccgggtcgcaccccgcagtttgggcagctggtttaccctgcgggaggagcccaggaccgcctccactttcaggaggtggtcttgactcctggtgataacccacagtttctgggaaaacctgggagaattcagctgcaggggccagtgcgccaggtcgtgacttgcaccgttcagggggagtcaaaagctcttatctatacttttcttccccactggctgacttgctatttaaccccaggaccgtttcacccctcctccgcgctgttggcagtaaggagtgactatcattgtgccgtgtggaaatttggcaaacaatggcaacccacacttttacaggcaatgcaggtcgaaaaaggagcaaccggcatttctttgtcccctcatttaccaggggaactggccatttgctcaagatctggagccgtgtgcctctggagccctgaagacgggttgcgtcagatctaccgcgaccctgaaacactggtcttccgagactcttcctcttggcgctgggcggattttactgcgcaccctagagtccttactgtcggtgatagaaccggtgtcaagatgctcgacacacaggggccaccaggatgcgggttgctgctcttcaggcttggcgctgaggctagctgccaaaaaggcgagagggtcctgctaacccagtaccttggccattcttcaccgaagtgccttccacccactttacacctggtctgcacacagttttctctttatctggtggatgagagactcccactggtccccatgctaaagtggaaccatggcctgccgtcaccactgttgttggccaggctcttacctcctcctcgaccttcctgcgtgcagcctctgctgctggggggacaggggggtcagctgcaactcctgcatttagccggtgaaggggcttcagtcccacgactagctggacctcctcagagcttgccaagtagaattgacagccttccagctttcccccttcttgaacccaaaatccagtggagactacaggaacggctgaaagccccaactattggtttggcagccgtggtgccacctctgccaagcgcaccaacccccggtttggtgctctttcagctgagtgccgctggcgatgtgttctaccagcagctgcgcccacaggtggacagcagccttagaagggacgccggaccaccaggtgacacccagccagattgtcatgcccctaccgcttcctggactagccaggatacagccggttgttctcagtggcttaaagccttgctgaaagttccactggcgcctccagtctggactgccccaaccttcacgcatcggcagatgttggggtccacagaactccgccgagaggaggaggagggccagaggctgggagtcctcagaaaagccatggcacgaggtcaactcctgctacagagggacttgggatctctacccgctgctgaaccgcctcctgccccagagtccggtttggaggataagctgtctgagcgactcggtgaggcgtgggccggtcgtggcgcagcctggtgggagaggcagcagggcagaacctctgagcccggtaggcagacccgaaggcccaaaagacgtacacagctgtcctcttctttcagcctgtcaggacatgtggacccctcagaagatacgtcaagcccacacagtcccgaatggcccccagcggacgcactgcccttaccgccaacgacacctccctcgcaggagctgaccccagacgcctgcgcccagggcgtgccctccgagcagcgccaaatgctaagggactacatggctaaacttccaccccagagggacacaccgggatgcgccaccaccccgcctcactcacaggcctcgtcagtgagggcaacaaggtcacagcaacatactccagtcctgagcagctcccagccactgcggaagaaacccagaatgggattctag

SEQ ID NO: 274063 - DNA, 3879 bp, Artificial Sequence
  derived and/or modified sequence
cccgagtgccaaagctggggttctacttgagatttccctcgtggtgccagggtccggcgagcatcacgccgaggcccattttccagacgaccacgacgaggccggggtcacgaactctggcgccccttaccagcttccagtctctcgaggtggccagtgtggtgcttggtccttgtttccaggatggacttccccagctccctccgccctgcattgtttctgaccggcccccttggtctgagcgacgtccctgacctctctttcatgtgcagctggcgagacgcactgactctgccagaggcccagccccagaactcagagaatggggcactgcatgtgaccaaggacctgctgtgggagccggcaacccctgggcctctccccatgctgcctcccctcatcgatccctgggaccctggcctgactgcccgggacctgcttttccgcggagggtgccggtatcggaagcggccccgagtcgtgctggatgtgactgagcagatcagccggttcctcttggatcatggagacgtagcctttgcgcccctggggaagctgatgctggagaatttcaagctggagggagcggggagccgcactaagaagaagacagtggtcagtgtgaagaagctgctccaggacctcggtggacaccagccctgggggtgtccctgggcttacctcagcaaccgacagcgccgcttctctatcctcgggggccccatcctgggcacgtcggtggcgagccacttggcagagctgctgcacgaggagctggtgctgcggtgggagcagctgcttctggatgaggcctgcactgggggcgcgctggcctgggttcctggaaggacaccccagttcgggcagctggtctaccctgctggaggcgcccaggacaggctgcatttccaagaggtcgttctgaccccaggtgacaatccccaattccttgggaaacctggacgcatccagctccagggacctgtccggcaagtggtgacatgcaccgtccagggagaaagtaaggcccttatatacactttcctccctcactggctgacctgctacctgacccctggccctttccatccctcctcagctctgctggccgtccgctctgactaccactgtgccgtgtggaagtttggtaaacagtggcagccaacccttctgcaggcaatgcaggtggagaaaggggccacggggatcagcctcagccctcacctgcccggggagctggccatctgcagccgctcgggagccgtctgcctgtggagccctgaggatgggctgcggcaaatctacagggaccctgagaccctcgtgttccgggactcctcttcgtggcgttgggcagacttcactgcgcaccctcgggtgctgaccgtgggtgaccgcaccggagtgaagatgctggacactcagggcccgccgggctgtggtctgttgctttttcgtttgggggcagaggcttcgtgccagaaaggggaacgtgtcctgcttacccagtacctggggcactccagccccaaatgcctcccccctactcttcatctcgtctgtacccagttctctctctacctagtggacgagcgccttcccctggtgccgatgctgaagtggaaccatggcctcccctccccgctcctgctggcccgactgctgcctccgccccggcccagctgcgtgcagcccctgctcctcggaggccagggtgggcagctgcagctgctgcacctggcaggagaaggggcgtcggtgccccgcctggcaggccccccccagtctcttccttccaggatcgactccctccctgcatttcctctgctggagcctaagatccagtggcggctgcaggagcgcctgaaagcaccgaccataggtctggctgccgtcgtcccgcccttgccctcagcgcccacaccaggcctggtgctcttccagctctcggcggcgggagatgtcttctaccagcagctccgcccccaggtggactccagcctccgcagagatgctgggcctcctggcgacacccaacctgactgccatgcccccacagcttcctggacctcccaggacactgccggctgcagccagtggctgaaggccctgctaaaagtgcccctggctcctcctgtgtggacagcacccaccttcacccaccgccagatgctgggcagcacagagctgcggagggaggaagaggaagggcagcggctgggtgtgctccgcaaggccatggcccgagggcagctcctgctgcagagagacctgggctccctccctgcggcagagccaccccctgcacccgagtcaggcctagaggacaagctcagtgagcgcctgggggaagcctgggcaggccgaggggctgcctggtgggagaggcagcagggcaggacctcggagcccgggagacagaccaggcggcccaagcgccggacccagctgtccagcagcttttcgctcagtggccatgtggatccctcagaggacaccagctcccctcatagccctgagtggccacctgctgatgctctgcccctgccccccacgaccccgccctcccaggagttgactccggatgcatgcgcccagggcgtcccatcagagcagcggcagatgctccgtgactacatggccaagctaccaccccagagggacaccccaggctgtgccaccacacctccccactcccaggcctccagcgtccgggccactcgctcccagcagcacacacccgtcctctctagctctcagcccctccggaagaagcctcgaatgggcttctgaggacacaaggtgggctgccctcaagccccagagagcccctcatccttcctctgggaccagatgtgccttccacagttgaaacttgagaagcagagctcgccaccttctggaggccactgtgatgatgagccaagcaatttggagccaagttgaagggacagggcaacaaaatacagtagtagtttcttttgtattttgtatattcgcctgaagatcatcccgcaaggcaggctggaggtgccggtgggcctgtgttgctgggattttagtctgtgctgggaggcagggctccgctgcgcctcagctgtgggggcctcaggcaggtccctcagttctcacgccttcctgtccagtggaatgggggccaggagtgctggctcctcgtgtttggtgagggtggagtgaggcccctgcagagctgctgatgaggtgggcacagcggccgttggcagctgctgttgtgggttgctttgtcaatctctgccccggtctgatgtttcctacagggagatgccttggatccaggttcagggactaaatacacttggcagctgaagatgaattggaatggtcacgttttttaggctggacagcgtcccgccacagctactacctgacactgagctcatgcagagagatgatggctgatgttccttctcccttgggacatgggtctggcacctgtgggctgtcgatagtgccctctgagcagagggtcacggtcatgtcagtttgggggaattctctgttgtgcctcacagactcccccctttctttcctccctccccttctcattttgatgtctaaagcatcaagtccctcttcctcggagtttctctagctgcagtggaagattctgttttcctgtggggaaaatgctcacttgagattttgcagggacccgggtctgtctggtttctgatgacatagtaagagaaaggtcttttttcaggttggctggtgaaaggaattgcatgtgactcacacaaacaggagctagcccaatcatacactgactcgcgtgggtgttaaaatgtttatcatgcctaagggagacatttatgattaaaccatttatgctacata

SEQ ID NO: 274064 - DNA, 3693 bp, Artificial Sequence
  derived and/or modified sequence
atggacttccccagctccctccgccctgcattgtttctgaccggcccccttggtctgagcgacgtccctgacctctctttcatgtgcagctggcgagacgcactgactctgccagaggcccagccccagaactcagagaatggggcactgcatgtgaccaaggacctgctgtgggagccggcaacccctgggcctctccccatgctgcctcccctcatcgatccctgggaccctggcctgactgcccgggacctgcttttccgcggagggtgccggtatcggaagcggccccgagtcgtgctggatgtgactgagcagatcagccggttcctcttggatcatggagacgtagcctttgcgcccctggggaagctgatgctggagaatttcaagctggagggagcggggagccgcactaagaagaagacagtggtcagtgtgaagaagctgctccaggacctcggtggacaccagccctgggggtgtccctgggcttacctcagcaaccgacagcgccgcttctctatcctcgggggccccatcctgggcacgtcggtggcgagccacttggcagagctgctgcacgaggagctggtgctgcggtgggagcagctgcttctggatgaggcctgcactgggggcgcgctggcctgggttcctggaaggacaccccagttcgggcagctggtctaccctgctggaggcgcccaggacaggctgcatttccaagaggtcgttctgaccccaggtgacaatccccaattccttgggaaacctggacgcatccagctccagggacctgtccggcaagtggtgacatgcaccgtccagggagaaagtaaggcccttatatacactttcctccctcactggctgacctgctacctgacccctggccctttccatccctcctcagctctgctggccgtccgctctgactaccactgtgccgtgtggaagtttggtaaacagtggcagccaacccttctgcaggcaatgcaggtggagaaaggggccacggggatcagcctcagccctcacctgcccggggagctggccatctgcagccgctcgggagccgtctgcctgtggagccctgaggatgggctgcggcaaatctacagggaccctgagaccctcgtgttccgggactcctcttcgtggcgttgggcagacttcactgcgcaccctcgggtgctgaccgtgggtgaccgcaccggagtgaagatgctggacactcagggcccgccgggctgtggtctgttgctttttcgtttgggggcagaggcttcgtgccagaaaggggaacgtgtcctgcttacccagtacctggggcactccagccccaaatgcctcccccctactcttcatctcgtctgtacccagttctctctctacctagtggacgagcgccttcccctggtgccgatgctgaagtggaaccatggcctcccctccccgctcctgctggcccgactgctgcctccgccccggcccagctgcgtgcagcccctgctcctcggaggccagggtgggcagctgcagctgctgcacctggcaggagaaggggcgtcggtgccccgcctggcaggccccccccagtctcttccttccaggatcgactccctccctgcatttcctctgctggagcctaagatccagtggcggctgcaggagcgcctgaaagcaccgaccataggtctggctgccgtcgtcccgcccttgccctcagcgcccacaccaggcctggtgctcttccagctctcggcggcgggagatgtcttctaccagcagctccgcccccaggtggactccagcctccgcagagatgctgggcctcctggcgacacccaacctgactgccatgcccccacagcttcctggacctcccaggacactgccggctgcagccagtggctgaaggccctgctaaaagtgcccctggctcctcctgtgtggacagcacccaccttcacccaccgccagatgctgggcagcacagagctgcggagggaggaagaggaagggcagcggctgggtgtgctccgcaaggccatggcccgagggcagctcctgctgcagagagacctgggctccctccctgcggcagagccaccccctgcacccgagtcaggcctagaggacaagctcagtgagcgcctgggggaagcctgggcaggccgaggggctgcctggtgggagaggcagcagggcaggacctcggagcccgggagacagaccaggcggcccaagcgccggacccagctgtccagcagcttttcgctcagtggccatgtggatccctcagaggacaccagctcccctcatagccctgagtggccacctgctgatgctctgcccctgccccccacgaccccgccctcccaggagttgactccggatgcatgcgcccagggcgtcccatcagagcagcggcagatgctccgtgactacatggccaagctaccaccccagagggacaccccaggctgtgccaccacacctccccactcccaggcctccagcgtccgggccactcgctcccagcagcacacacccgtcctctctagctctcagcccctccggaagaagcctcgaatgggcttctgaggacacaaggtgggctgccctcaagccccagagagcccctcatccttcctctgggaccagatgtgccttccacagttgaaacttgagaagcagagctcgccaccttctggaggccactgtgatgatgagccaagcaatttggagccaagttgaagggacagggcaacaaaatacagtagtagtttcttttgtattttgtatattcgcctgaagatcatcccgcaaggcaggctggaggtgccggtgggcctgtgttgctgggattttagtctgtgctgggaggcagggctccgctgcgcctcagctgtgggggcctcaggcaggtccctcagttctcacgccttcctgtccagtggaatgggggccaggagtgctggctcctcgtgtttggtgagggtggagtgaggcccctgcagagctgctgatgaggtgggcacagcggccgttggcagctgctgttgtgggttgctttgtcaatctctgccccggtctgatgtttcctacagggagatgccttggatccaggttcagggactaaatacacttggcagctgaagatgaattggaatggtcacgttttttaggctggacagcgtcccgccacagctactacctgacactgagctcatgcagagagatgatggctgatgttccttctcccttgggacatgggtctggcacctgtgggctgtcgatagtgccctctgagcagagggtcacggtcatgtcagtttgggggaattctctgttgtgcctcacagactcccccctttctttcctccctccccttctcattttgatgtctaaagcatcaagtccctcttcctcggagtttctctagctgcagtggaagattctgttttcctgtggggaaaatgctcacttgagattttgcagggacccgggtctgtctggtttctgatgacatagtaagagaaaggtcttttttcaggttggctggtgaaaggaattgcatgtgactcacacaaacaggagctagcccaatcatacactgactcgcgtgggtgttaaaatgtttatcatgcctaagggagacatttatgattaaaccatttatgctac

SEQ ID NO: 274065 - protein, 687 aa, Artificial Sequence
  derived and/or modified sequence
MTPQSLLQTTLFLLSLLFLVQGAHGRGHREDFRFCSQRNQTHRSSLHYKPTPDLRISIENSEEALTVHAPFPAAHPASRSFPDPRGLYHFCLYWNRHAGRLHLLYGKRDFLLSDKASSLLCFQHQEESLAQGPPLLATSVTSWWSPQNISLPSAASFTFSFHSPPHTAAHNASVDMCELKRDLQLLSQFLKHPQKASRRPSAAPASQQLQSLESKLTSVRFMGDMVSFEEDRINATVWKLQPTAGLQDLHIHSRQEEEQSEIMEYSVLLPRTLFQRTKGRSGEAEKRLLLVDFSSQALFQDKNSSQVLGEKVLGIVVQNTKVANLTEPVVLTFQHQLQPKNVTLQCVFWVEDPTLSSPGHWSSAGCETVRRETQTSCFCNHLTYFAVLMVSSVEVDAVHKHYLSLLSYVGCVVSALACLVTIAAYLCSRRKPRDYTIKVHMNLLLAVFLLDTSFLLSEPVALTGSEAGCRASAIFLHFSLLTCLSWMGLEGYNLYRLVVEVFGTYVPGYLLKLSAMGWGFPIFLVTLVALVDVDNYGPIILAVHRTPEGVIYPSMCWIRDSLVSYITNLGLFSLVFLFNMAMLATMVVQILRLRPHTQKWSHVLTLLGLSLVLGLPWALIFFSFASGTFQLVVLYLFSIITSFQGFLIFIWYWSMRLQARGGPSPLKSNSDSARLPISSGSTSSSRI

SEQ ID NO: 274066 - DNA, 3989 bp, Artificial Sequence
  derived and/or modified sequence
gagaaatccatgactcacatatatcgtccgtcatccccagtcaagctcagggaggagggaggagcccagctggggcaggagaggggtgtctccccaccaaacaaacccggtccctccctctccgcactagctgtctgccctgccctgccgtaggagatgggctgggagcctcccacgctctccagctcactcggcaggcagcggggaccagggctggcaggttaagcctctgggggtggatcctgaaaggtggtccagccgcctggccctgcgtgggaccctccacctggcagcaggtacccaaacaagggctggacagcagggtctcgctctgtcacacaggctggagtgcagtggtgtgatcttggctcatcgtaacctccacctcccgggttcaagtgattctcatgcctcagcctcccgagtagctgggattacaggtggtgacttccaagagtgactccgtcggaggaaaatgactccccagtcgctgctgcagacgacactgttcctgctgagtctgctcttcctggtccaaggtgcccacggcaggggccacagggaagactttcgcttctgcagccagcggaaccagacacacaggagcagcctccactacaaacccacaccagacctgcgcatctccatcgagaactccgaagaggccctcacagtccatgcccctttccctgcagcccaccctgcttcccgatccttccctgaccccaggggcctctaccacttctgcctctactggaaccgacatgctgggagattacatcttctctatggcaagcgtgacttcttgctgagtgacaaagcctctagcctcctctgcttccagcaccaggaggagagcctggctcagggccccccgctgttagccacttctgtcacctcctggtggagccctcagaacatcagcctgcccagtgccgccagcttcaccttctccttccacagtcctccccacacggccgctcacaatgcctcggtggacatgtgcgagctcaaaagggacctccagctgctcagccagttcctgaagcatccccagaaggcctcaaggaggccctcggctgcccccgccagccagcagttgcagagcctggagtcgaaactgacctctgtgagattcatgggggacatggtgtccttcgaggaggaccggatcaacgccacggtgtggaagctccagcccacagccggcctccaggacctgcacatccactcccggcaggaggaggagcagagcgagatcatggagtactcggtgctgctgcctcgaacactcttccagaggacgaaaggccggagcggggaggctgagaagagactcctcctggtggacttcagcagccaagccctgttccaggacaagaattccagccaagtcctgggtgagaaggtcttggggattgtggtacagaacaccaaagtagccaacctcacggagcccgtggtgctcactttccagcaccagctacagccgaagaatgtgactctgcaatgtgtgttctgggttgaagaccccacattgagcagcccggggcattggagcagtgctgggtgtgagaccgtcaggagagaaacccaaacatcctgcttctgcaaccacttgacctactttgcagtgctgatggtctcctcggtggaggtggacgccgtgcacaagcactacctgagcctcctctcctacgtgggctgtgtcgtctctgccctggcctgccttgtcaccattgccgcctacctctgctccaggaggaaacctcgggactacaccatcaaggtgcacatgaacctgctgctggccgtcttcctgctggacacgagcttcctgctcagcgagccggtggccctgacaggctctgaggctggctgccgagccagtgccatcttcctgcacttctccctgctcacctgcctttcctggatgggcctcgaggggtacaacctctaccgactcgtggtggaggtctttggcacctatgtccctggctacctactcaagctgagcgccatgggctggggcttccccatctttctggtgacgctggtggccctggtggatgtggacaactatggccccatcatcttggctgtgcataggactccagagggcgtcatctacccttccatgtgctggatccgggactccctggtcagctacatcaccaacctgggcctcttcagcctggtgtttctgttcaacatggccatgctagccaccatggtggtgcagatcctgcggctgcgcccccacacccaaaagtggtcacatgtgctgacactgctgggcctcagcctggtccttggcctgccctgggccttgatcttcttctcctttgcttctggcaccttccagcttgtcgtcctctaccttttcagcatcatcacctccttccaaggcttcctcatcttcatctggtactggtccatgcggctgcaggcccggggtggcccctcccctctgaagagcaactcagacagcgccaggctccccatcagctcgggcagcacctcgtccagccgcatctaggcctccagcccacctgcccatgtgatgaagcagagattcggcctcgtcgcacactgcctgtggcccccgagcccggcccagccccaggccagtcagccgcagactttggaaagcccaacgaccatggagagatgggccgttgccatggtggacggactcccgggctgggcttttgaattggccttggggactactcggctctcactcagctcccacgggactcagaagtgcgccgccatgctgcctagggtactgtccccacatctgtcccaacccagctggaggcctggtctctccttacaacccctgggcccagccctcattgctgggggccaggccttggatcttgagggtctggcacatccttaatcctgtgcccctgcctgggacagaaatgtggctccagttgctctgtctctcgtggtcaccctgagggcactctgcatcctctgtcattttaacctcaggtggcacccagggcgaatggggcccagggcagaccttcagggccagagccctggcggaggagaggccctttgccaggagcacagcagcagctcgcctacctctgagcccaggccccctccctccctcagccccccagtcctccctccatcttccctggggttctcctcctctcccagggcctccttgctccttcgttcacagctgggggtccccgattccaatgctgttttttggggagtggtttccaggagctgcctggtgtctgctgtaaatgtttgtctactgcacaagcctcggcctgcccctgagccaggctcggtaccgatgcgtgggctgggctaggtccctctgtccatctgggcctttgtatgagctgcattgcccttgctcaccctgaccaagcacacgcctcagaggggccctcagcctctcctgaagccctcttgtggcaagaactgtggaccatgccagtcccgtctggtttccatcccaccactccaaggactgagactgacctcctctggtgacactggcctagggcctgacactctcctaagaggttctctccaagcccccaaatagctccaggcgccctcggccgcccatcatggttaattctgtccaacaaacacacacgggtagattgctggcctgttgtaggtggtagggacacagatgaccgacctggtcactcctcctgccaacattcagtctggtatgtgaggcgtgcgtgaagcaagaactcctggagctacagggacagggagccatcattcctgcctgggaatcctggaagacttcctgcaggagtcagcgttcaatcttgaccttgaagatgggaaggatgttctttttacgtaccaattcttttgtcttttgatattaaaaagaagtacatgttcattgtagagaatttggaaactgtagaagagaatcaagaagaaaaataaaaatcagctgttgtaatcacctagcaaactgg

SEQ ID NO: 274067 - DNA, 3967 bp, Artificial Sequence
  derived and/or modified sequence
gagaaatccatgactcacatatatcgtccgtcatccccagtcaagctcagggaggagggaggagcccagctggggcaggagaggggtgtctccccaccaaacaaacccggtccctccctctccgcactagctgtctgccctgccctgccgtaggagatgggctgggagcctcccacgctctccagctcactcggcaggcagcggggaccagggctggcaggttaagcctctgggggtggatcctgaaaggtggtccagccgcctggccctgcgtgggaccctccacctggcagcagacagggtctcgctctgtcacacaggctggagtgcagtggtgtgatcttggctcatcgtaacctccacctcccgggttcaagtgattctcatgcctcagcctcccgagtagctgggattacaggtggtgacttccaagagtgactccgtcggaggaaaatgactccccagtcgctgctgcagacgacactgttcctgctgagtctgctcttcctggtccaaggtgcccacggcaggggccacagggaagactttcgcttctgcagccagcggaaccagacacacaggagcagcctccactacaaacccacaccagacctgcgcatctccatcgagaactccgaagaggccctcacagtccatgcccctttccctgcagcccaccctgcttcccgatccttccctgaccccaggggcctctaccacttctgcctctactggaaccgacatgctgggagattacatcttctctatggcaagcgtgacttcttgctgagtgacaaagcctctagcctcctctgcttccagcaccaggaggagagcctggctcagggccccccgctgttagccacttctgtcacctcctggtggagccctcagaacatcagcctgcccagtgccgccagcttcaccttctccttccacagtcctccccacacggccgctcacaatgcctcggtggacatgtgcgagctcaaaagggacctccagctgctcagccagttcctgaagcatccccagaaggcctcaaggaggccctcggctgcccccgccagccagcagttgcagagcctggagtcgaaactgacctctgtgagattcatgggggacatggtgtccttcgaggaggaccggatcaacgccacggtgtggaagctccagcccacagccggcctccaggacctgcacatccactcccggcaggaggaggagcagagcgagatcatggagtactcggtgctgctgcctcgaacactcttccagaggacgaaaggccggagcggggaggctgagaagagactcctcctggtggacttcagcagccaagccctgttccaggacaagaattccagccaagtcctgggtgagaaggtcttggggattgtggtacagaacaccaaagtagccaacctcacggagcccgtggtgctcactttccagcaccagctacagccgaagaatgtgactctgcaatgtgtgttctgggttgaagaccccacattgagcagcccggggcattggagcagtgctgggtgtgagaccgtcaggagagaaacccaaacatcctgcttctgcaaccacttgacctactttgcagtgctgatggtctcctcggtggaggtggacgccgtgcacaagcactacctgagcctcctctcctacgtgggctgtgtcgtctctgccctggcctgccttgtcaccattgccgcctacctctgctccaggaggaaacctcgggactacaccatcaaggtgcacatgaacctgctgctggccgtcttcctgctggacacgagcttcctgctcagcgagccggtggccctgacaggctctgaggctggctgccgagccagtgccatcttcctgcacttctccctgctcacctgcctttcctggatgggcctcgaggggtacaacctctaccgactcgtggtggaggtctttggcacctatgtccctggctacctactcaagctgagcgccatgggctggggcttccccatctttctggtgacgctggtggccctggtggatgtggacaactatggccccatcatcttggctgtgcataggactccagagggcgtcatctacccttccatgtgctggatccgggactccctggtcagctacatcaccaacctgggcctcttcagcctggtgtttctgttcaacatggccatgctagccaccatggtggtgcagatcctgcggctgcgcccccacacccaaaagtggtcacatgtgctgacactgctgggcctcagcctggtccttggcctgccctgggccttgatcttcttctcctttgcttctggcaccttccagcttgtcgtcctctaccttttcagcatcatcacctccttccaaggcttcctcatcttcatctggtactggtccatgcggctgcaggcccggggtggcccctcccctctgaagagcaactcagacagcgccaggctccccatcagctcgggcagcacctcgtccagccgcatctaggcctccagcccacctgcccatgtgatgaagcagagattcggcctcgtcgcacactgcctgtggcccccgagcccggcccagccccaggccagtcagccgcagactttggaaagcccaacgaccatggagagatgggccgttgccatggtggacggactcccgggctgggcttttgaattggccttggggactactcggctctcactcagctcccacgggactcagaagtgcgccgccatgctgcctagggtactgtccccacatctgtcccaacccagctggaggcctggtctctccttacaacccctgggcccagccctcattgctgggggccaggccttggatcttgagggtctggcacatccttaatcctgtgcccctgcctgggacagaaatgtggctccagttgctctgtctctcgtggtcaccctgagggcactctgcatcctctgtcattttaacctcaggtggcacccagggcgaatggggcccagggcagaccttcagggccagagccctggcggaggagaggccctttgccaggagcacagcagcagctcgcctacctctgagcccaggccccctccctccctcagccccccagtcctccctccatcttccctggggttctcctcctctcccagggcctccttgctccttcgttcacagctgggggtccccgattccaatgctgttttttggggagtggtttccaggagctgcctggtgtctgctgtaaatgtttgtctactgcacaagcctcggcctgcccctgagccaggctcggtaccgatgcgtgggctgggctaggtccctctgtccatctgggcctttgtatgagctgcattgcccttgctcaccctgaccaagcacacgcctcagaggggccctcagcctctcctgaagccctcttgtggcaagaactgtggaccatgccagtcccgtctggtttccatcccaccactccaaggactgagactgacctcctctggtgacactggcctagggcctgacactctcctaagaggttctctccaagcccccaaatagctccaggcgccctcggccgcccatcatggttaattctgtccaacaaacacacacgggtagattgctggcctgttgtaggtggtagggacacagatgaccgacctggtcactcctcctgccaacattcagtctggtatgtgaggcgtgcgtgaagcaagaactcctggagctacagggacagggagccatcattcctgcctgggaatcctggaagacttcctgcaggagtcagcgttcaatcttgaccttgaagatgggaaggatgttctttttacgtaccaattcttttgtcttttgatattaaaaagaagtacatgttcattgtagagaatttggaaactgtagaagagaatcaagaagaaaaataaaaatcagctgttgtaatcacctagcaaactgg

SEQ ID NO: 274068 - DNA, 4043 bp, Artificial Sequence
  derived and/or modified sequence
acttgggaacaggacaagttacggagccacgttgctttgctgggtctgagccggggtgtgacgtagtccctgcagctgccaacggttgccagggcaacggttgccaggggctgctgtcacctgcgccccttctcccgcgctggcggctggggcttctcagcctctattccctggctgtcccctttgtttgaagctccagtgagggagcagtggctggggtggcccagcttcaaagtctctgtcctcttgaaaaaaggtggtcgggggacattgacccaccagccccgcaggctactgcctgcaaacaagaacccctcatctgccacgcacgttcttaatgtatctatagtctgcctgatgccacaaaggagtccagggtctcgctctgtcacacaggctggagtgcagtggtgtgatcttggctcatcgtaacctccacctcccgggttcaagtgattctcatgcctcagcctcccgagtagctgggattacaggtggtgacttccaagagtgactccgtcggaggaaaatgactccccagtcgctgctgcagacgacactgttcctgctgagtctgctcttcctggtccaaggtgcccacggcaggggccacagggaagactttcgcttctgcagccagcggaaccagacacacaggagcagcctccactacaaacccacaccagacctgcgcatctccatcgagaactccgaagaggccctcacagtccatgcccctttccctgcagcccaccctgcttcccgatccttccctgaccccaggggcctctaccacttctgcctctactggaaccgacatgctgggagattacatcttctctatggcaagcgtgacttcttgctgagtgacaaagcctctagcctcctctgcttccagcaccaggaggagagcctggctcagggccccccgctgttagccacttctgtcacctcctggtggagccctcagaacatcagcctgcccagtgccgccagcttcaccttctccttccacagtcctccccacacggccgctcacaatgcctcggtggacatgtgcgagctcaaaagggacctccagctgctcagccagttcctgaagcatccccagaaggcctcaaggaggccctcggctgcccccgccagccagcagttgcagagcctggagtcgaaactgacctctgtgagattcatgggggacatggtgtccttcgaggaggaccggatcaacgccacggtgtggaagctccagcccacagccggcctccaggacctgcacatccactcccggcaggaggaggagcagagcgagatcatggagtactcggtgctgctgcctcgaacactcttccagaggacgaaaggccggagcggggaggctgagaagagactcctcctggtggacttcagcagccaagccctgttccaggacaagaattccagccaagtcctgggtgagaaggtcttggggattgtggtacagaacaccaaagtagccaacctcacggagcccgtggtgctcactttccagcaccagctacagccgaagaatgtgactctgcaatgtgtgttctgggttgaagaccccacattgagcagcccggggcattggagcagtgctgggtgtgagaccgtcaggagagaaacccaaacatcctgcttctgcaaccacttgacctactttgcagtgctgatggtctcctcggtggaggtggacgccgtgcacaagcactacctgagcctcctctcctacgtgggctgtgtcgtctctgccctggcctgccttgtcaccattgccgcctacctctgctccaggaggaaacctcgggactacaccatcaaggtgcacatgaacctgctgctggccgtcttcctgctggacacgagcttcctgctcagcgagccggtggccctgacaggctctgaggctggctgccgagccagtgccatcttcctgcacttctccctgctcacctgcctttcctggatgggcctcgaggggtacaacctctaccgactcgtggtggaggtctttggcacctatgtccctggctacctactcaagctgagcgccatgggctggggcttccccatctttctggtgacgctggtggccctggtggatgtggacaactatggccccatcatcttggctgtgcataggactccagagggcgtcatctacccttccatgtgctggatccgggactccctggtcagctacatcaccaacctgggcctcttcagcctggtgtttctgttcaacatggccatgctagccaccatggtggtgcagatcctgcggctgcgcccccacacccaaaagtggtcacatgtgctgacactgctgggcctcagcctggtccttggcctgccctgggccttgatcttcttctcctttgcttctggcaccttccagcttgtcgtcctctaccttttcagcatcatcacctccttccaaggcttcctcatcttcatctggtactggtccatgcggctgcaggcccggggtggcccctcccctctgaagagcaactcagacagcgccaggctccccatcagctcgggcagcacctcgtccagccgcatctaggcctccagcccacctgcccatgtgatgaagcagagattcggcctcgtcgcacactgcctgtggcccccgagcccggcccagccccaggccagtcagccgcagactttggaaagcccaacgaccatggagagatgggccgttgccatggtggacggactcccgggctgggcttttgaattggccttggggactactcggctctcactcagctcccacgggactcagaagtgcgccgccatgctgcctagggtactgtccccacatctgtcccaacccagctggaggcctggtctctccttacaacccctgggcccagccctcattgctgggggccaggccttggatcttgagggtctggcacatccttaatcctgtgcccctgcctgggacagaaatgtggctccagttgctctgtctctcgtggtcaccctgagggcactctgcatcctctgtcattttaacctcaggtggcacccagggcgaatggggcccagggcagaccttcagggccagagccctggcggaggagaggccctttgccaggagcacagcagcagctcgcctacctctgagcccaggccccctccctccctcagccccccagtcctccctccatcttccctggggttctcctcctctcccagggcctccttgctccttcgttcacagctgggggtccccgattccaatgctgttttttggggagtggtttccaggagctgcctggtgtctgctgtaaatgtttgtctactgcacaagcctcggcctgcccctgagccaggctcggtaccgatgcgtgggctgggctaggtccctctgtccatctgggcctttgtatgagctgcattgcccttgctcaccctgaccaagcacacgcctcagaggggccctcagcctctcctgaagccctcttgtggcaagaactgtggaccatgccagtcccgtctggtttccatcccaccactccaaggactgagactgacctcctctggtgacactggcctagggcctgacactctcctaagaggttctctccaagcccccaaatagctccaggcgccctcggccgcccatcatggttaattctgtccaacaaacacacacgggtagattgctggcctgttgtaggtggtagggacacagatgaccgacctggtcactcctcctgccaacattcagtctggtatgtgaggcgtgcgtgaagcaagaactcctggagctacagggacagggagccatcattcctgcctgggaatcctggaagacttcctgcaggagtcagcgttcaatcttgaccttgaagatgggaaggatgttctttttacgtaccaattcttttgtcttttgatattaaaaagaagtacatgttcattgtagagaatttggaaactgtagaagagaatcaagaagaaaaataaaaatcagctgttgtaatcacctagcaaactgg

SEQ ID NO: 274069 - DNA, 2688 bp, Artificial Sequence
  derived and/or modified sequence
tctcccgcgctggcggctggggcttctcagcctctattccctggctgtcccctttgtttgaagctccagtgagggagcagtggctggggtggcccagcttcaaagtctctgtcctcttgaaaaaaggtggtcgggggacattgacccaccagccccgcaggctactgcctgcaaacaagaacccctcatctgccacgcacgttcttaatgtatctatagtctgcctgatgccacaaaggagtccaggtggtgacttccaagagtgactccgtcggaggaaaatgactccccagtcgctgctgcagacgacactgttcctgctgagtctgctcttcctggtccaagccagcggaaccagacacacaggagcagcctccactacaaacccacaccagacctgcgcatctccatcgagaactccgaagaggccctcacagtccatgcccctttccctgcagcccaccctgcttcccgatccttccctgaccccaggggcctctaccacttctgcctctactggaaccgacatgctgggagattacatcttctctatggcaagcgtgacttcttgctgagtgacaaagcctctagcctcctctgcttccagcaccaggaggagagcctggctcagggccccccgctgttagccacttctgtcacctcctggtggagccctcagaacatcagcctgcccagtgccgccagcttcaccttctccttccacagtcctccccacacggccgctcacaatgcctcggtggacatgtgcgagctcaaaagggacctccagctgctcagccagttcctgaagcatccccagaaggcctcaaggaggccctcggctgcccccgccagccagcagttgcagagcctggagtcgaaactgacctctgtgagattcatgggggacatggtgtccttcgaggaggaccggatcaacgccacggtgtggaagctccagcccacagccggcctccaggacctgcacatccactcccggcaggaggaggagcagagcgagatcatggagtactcggtgctgctgcctcgaacactcttccagaggacgaaaggccggagcggggaggctgagaagagactcctcctggtggacttcagcagccaagccctgttccaggacaagaattccagccaagtcctgggtgagaaggtcttggggattgtggtacagaacaccaaagtagccaacctcacggagcccgtggtgctcactttccagcaccagctacagccgaagaatgtgactctgcaatgtgtgttctgggttgaagaccccacattgagcagcccggggcattggagcagtgctgggtgtgagaccgtcaggagagaaacccaaacatcctgcttctgcaaccacttgacctactttgcagtgctgatggtctcctcggtggaggtggacgccgtgcacaagcactacctgagcctcctctcctacgtgggctgtgtcgtctctgccctggcctgccttgtcaccattgccgcctacctctgctccaggaggaaacctcgggactacaccatcaaggtgcacatgaacctgctgctggccgtcttcctgctggacacgagcttcctgctcagcgagccggtggccctgacaggctctgaggctggctgccgagccagtgccatcttcctgcacttctccctgctcacctgcctttcctggatgggcctcgaggggtacaacctctaccgactcgtggtggaggtctttggcacctatgtccctggctacctactcaagctgagcgccatgggctggggcttccccatctttctggtgacgctggtggccctggtggatgtggacaactatggccccatcatcttggctgtgcataggactccagagggcgtcatctacccttccatgtgctggatccgggactccctggtcagctacatcaccaacctgggcctcttcagcctggtgtttctgttcaacatggccatgctagccaccatggtggtgcagatcctgcggctgcgcccccacacccaaaagtggtcacatgtgctgacactgctgggcctcagcctggtccttggcctgccctgggccttgatcttcttctcctttgcttctggcaccttccagcttgtcgtcctctaccttttcagcatcatcacctccttccaaggcttcctcatcttcatctggtactggtccatgcggctgcaggcccggggtggcccctcccctctgaagagcaactcagacagcgccaggctccccatcagctcgggcagcacctcgtccagccgcatctaggcctccagcccacctgcccatgtgatgaagcagagattcggcctcgtcgcacactgcctgtggcccccgagcccggcccagccccaggccagtcagccgcagactttggaaagcccaacgaccatggagagatgggccgttgccatggtggacggactcccgggctgggcttttgaattggccttggggactactcggctctcactcagctcccacgggactcagaagtgcgccgccatgctgcctagggtactgtccccacatctgtcccaacccagctggaggcctggtctctccttacaacccctgggcccagccctcattgctgggggccaggccttggatcttgagggtctggcacatccttaatcctgtgcccctgcctg

SEQ ID NO: 274070 - DNA, 4042 bp, Artificial Sequence
  derived and/or modified sequence
actttggggagactggccctgggaggcgacagatggaggctgaggaagcagagtgatccccggccccttcctgtccctgaacactgtctgcctggatgaggggtgaggctgaggtgcccccttgcccggcgctgagtcatgggcatcccccaggatcactgcctcagcgctctcagccctgccccctcctggtctccctctgagaaatccatgactcacatatatcgtccgtcatccccagtcaagctcagggaggagggaggagcccagctggggcaggagaggggtgtctccccaccaaacaaacccggtccctccctctccgcactagctgtctgccctgccctgccgtaggagatgggctgggagcctcccacgctctccagctcactcggcaggcagcggggaccagggctggcaggttaagcctctgggggtggatcctgaaaggtggtccagccgcctggccctgcgtgggaccctccacctggcagcaggtggtgacttccaagagtgactccgtcggaggaaaatgactccccagtcgctgctgcagacgacactgttcctgctgagtctgctcttcctggtccaaggtgcccacggcaggggccacagggaagactttcgcttctgcagccagcggaaccagacacacaggagcagcctccactacaaacccacaccagacctgcgcatctccatcgagaactccgaagaggccctcacagtccatgcccctttccctgcagcccaccctgcttcccgatccttccctgaccccaggggcctctaccacttctgcctctactggaaccgacatgctgggagattacatcttctctatggcaagcgtgacttcttgctgagtgacaaagcctctagcctcctctgcttccagcaccaggaggagagcctggctcagggccccccgctgttagccacttctgtcacctcctggtggagccctcagaacatcagcctgcccagtgccgccagcttcaccttctccttccacagtcctccccacacggccgctcacaatgcctcggtggacatgtgcgagctcaaaagggacctccagctgctcagccagttcctgaagcatccccagaaggcctcaaggaggccctcggctgcccccgccagccagcagttgcagagcctggagtcgaaactgacctctgtgagattcatgggggacatggtgtccttcgaggaggaccggatcaacgccacggtgtggaagctccagcccacagccggcctccaggacctgcacatccactcccggcaggaggaggagcagagcgagatcatggagtactcggtgctgctgcctcgaacactcttccagaggacgaaaggccggagcggggaggctgagaagagactcctcctggtggacttcagcagccaagccctgttccaggacaagaattccagccaagtcctgggtgagaaggtcttggggattgtggtacagaacaccaaagtagccaacctcacggagcccgtggtgctcactttccagcaccagctacagccgaagaatgtgactctgcaatgtgtgttctgggttgaagaccccacattgagcagcccggggcattggagcagtgctgggtgtgagaccgtcaggagagaaacccaaacatcctgcttctgcaaccacttgacctactttgcagtgctgatggtctcctcggtggaggtggacgccgtgcacaagcactacctgagcctcctctcctacgtgggctgtgtcgtctctgccctggcctgccttgtcaccattgccgcctacctctgctccaggaggaaacctcgggactacaccatcaaggtgcacatgaacctgctgctggccgtcttcctgctggacacgagcttcctgctcagcgagccggtggccctgacaggctctgaggctggctgccgagccagtgccatcttcctgcacttctccctgctcacctgcctttcctggatgggcctcgaggggtacaacctctaccgactcgtggtggaggtctttggcacctatgtccctggctacctactcaagctgagcgccatgggctggggcttccccatctttctggtgacgctggtggccctggtggatgtggacaactatggccccatcatcttggctgtgcataggactccagagggcgtcatctacccttccatgtgctggatccgggactccctggtcagctacatcaccaacctgggcctcttcagcctggtgtttctgttcaacatggccatgctagccaccatggtggtgcagatcctgcggctgcgcccccacacccaaaagtggtcacatgtgctgacactgctgggcctcagcctggtccttggcctgccctgggccttgatcttcttctcctttgcttctggcaccttccagcttgtcgtcctctaccttttcagcatcatcacctccttccaaggcttcctcatcttcatctggtactggtccatgcggctgcaggcccggggtggcccctcccctctgaagagcaactcagacagcgccaggctccccatcagctcgggcagcacctcgtccagccgcatctaggcctccagcccacctgcccatgtgatgaagcagagattcggcctcgtcgcacactgcctgtggcccccgagcccggcccagccccaggccagtcagccgcagactttggaaagcccaacgaccatggagagatgggccgttgccatggtggacggactcccgggctgggcttttgaattggccttggggactactcggctctcactcagctcccacgggactcagaagtgcgccgccatgctgcctagggtactgtccccacatctgtcccaacccagctggaggcctggtctctccttacaacccctgggcccagccctcattgctgggggccaggccttggatcttgagggtctggcacatccttaatcctgtgcccctgcctgggacagaaatgtggctccagttgctctgtctctcgtggtcaccctgagggcactctgcatcctctgtcattttaacctcaggtggcacccagggcgaatggggcccagggcagaccttcagggccagagccctggcggaggagaggccctttgccaggagcacagcagcagctcgcctacctctgagcccaggccccctccctccctcagccccccagtcctccctccatcttccctggggttctcctcctctcccagggcctccttgctccttcgttcacagctgggggtccccgattccaatgctgttttttggggagtggtttccaggagctgcctggtgtctgctgtaaatgtttgtctactgcacaagcctcggcctgcccctgagccaggctcggtaccgatgcgtgggctgggctaggtccctctgtccatctgggcctttgtatgagctgcattgcccttgctcaccctgaccaagcacacgcctcagaggggccctcagcctctcctgaagccctcttgtggcaagaactgtggaccatgccagtcccgtctggtttccatcccaccactccaaggactgagactgacctcctctggtgacactggcctagggcctgacactctcctaagaggttctctccaagcccccaaatagctccaggcgccctcggccgcccatcatggttaattctgtccaacaaacacacacgggtagattgctggcctgttgtaggtggtagggacacagatgaccgacctggtcactcctcctgccaacattcagtctggtatgtgaggcgtgcgtgaagcaagaactcctggagctacagggacagggagccatcattcctgcctgggaatcctggaagacttcctgcaggagtcagcgttcaatcttgaccttgaagatgggaaggatgttctttttacgtaccaattcttttgtcttttgatattaaaaagaagtacatgttcattgtagagaatttggaaactgtagaagagaatcaagaagaaaaataaaaatcagctgttgtaatcacctagcaaa

SEQ ID NO: 274071 - DNA, 3852 bp, Artificial Sequence
  derived and/or modified sequence
aacaagagagggtggcggctgcagtggctgtggggcagccggaaatggggcgagacagacaggcggagcctcacctggggctgcccgccagcccagacaagctcagactgggtgcctgtggccctgggaggaggtggaaggggaggagcaggccacacaggcacaggccggtgagggacctgcccagacctggagggtctcgctctgtcacacaggctggagtgcagtggtgtgatcttggctcatcgtaacctccacctcccgggttcaagtgattctcatgcctcagcctcccgagtagctgggattacaggtggtgacttccaagagtgactccgtcggaggaaaatgactccccagtcgctgctgcagacgacactgttcctgctgagtctgctcttcctggtccaaggtgcccacggcaggggccacagggaagactttcgcttctgcagccagcggaaccagacacacaggagcagcctccactacaaacccacaccagacctgcgcatctccatcgagaactccgaagaggccctcacagtccatgcccctttccctgcagcccaccctgcttcccgatccttccctgaccccaggggcctctaccacttctgcctctactggaaccgacatgctgggagattacatcttctctatggcaagcgtgacttcttgctgagtgacaaagcctctagcctcctctgcttccagcaccaggaggagagcctggctcagggccccccgctgttagccacttctgtcacctcctggtggagccctcagaacatcagcctgcccagtgccgccagcttcaccttctccttccacagtcctccccacacggccgctcacaatgcctcggtggacatgtgcgagctcaaaagggacctccagctgctcagccagttcctgaagcatccccagaaggcctcaaggaggccctcggctgcccccgccagccagcagttgcagagcctggagtcgaaactgacctctgtgagattcatgggggacatggtgtccttcgaggaggaccggatcaacgccacggtgtggaagctccagcccacagccggcctccaggacctgcacatccactcccggcaggaggaggagcagagcgagatcatggagtactcggtgctgctgcctcgaacactcttccagaggacgaaaggccggagcggggaggctgagaagagactcctcctggtggacttcagcagccaagccctgttccaggacaagaattccagccaagtcctgggtgagaaggtcttggggattgtggtacagaacaccaaagtagccaacctcacggagcccgtggtgctcactttccagcaccagctacagccgaagaatgtgactctgcaatgtgtgttctgggttgaagaccccacattgagcagcccggggcattggagcagtgctgggtgtgagaccgtcaggagagaaacccaaacatcctgcttctgcaaccacttgacctactttgcagtgctgatggtctcctcggtggaggtggacgccgtgcacaagcactacctgagcctcctctcctacgtgggctgtgtcgtctctgccctggcctgccttgtcaccattgccgcctacctctgctccaggaggaaacctcgggactacaccatcaaggtgcacatgaacctgctgctggccgtcttcctgctggacacgagcttcctgctcagcgagccggtggccctgacaggctctgaggctggctgccgagccagtgccatcttcctgcacttctccctgctcacctgcctttcctggatgggcctcgaggggtacaacctctaccgactcgtggtggaggtctttggcacctatgtccctggctacctactcaagctgagcgccatgggctggggcttccccatctttctggtgacgctggtggccctggtggatgtggacaactatggccccatcatcttggctgtgcataggactccagagggcgtcatctacccttccatgtgctggatccgggactccctggtcagctacatcaccaacctgggcctcttcagcctggtgtttctgttcaacatggccatgctagccaccatggtggtgcagatcctgcggctgcgcccccacacccaaaagtggtcacatgtgctgacactgctgggcctcagcctggtccttggcctgccctgggccttgatcttcttctcctttgcttctggcaccttccagcttgtcgtcctctaccttttcagcatcatcacctccttccaaggcttcctcatcttcatctggtactggtccatgcggctgcaggcccggggtggcccctcccctctgaagagcaactcagacagcgccaggctccccatcagctcgggcagcacctcgtccagccgcatctaggcctccagcccacctgcccatgtgatgaagcagagattcggcctcgtcgcacactgcctgtggcccccgagcccggcccagccccaggccagtcagccgcagactttggaaagcccaacgaccatggagagatgggccgttgccatggtggacggactcccgggctgggcttttgaattggccttggggactactcggctctcactcagctcccacgggactcagaagtgcgccgccatgctgcctagggtactgtccccacatctgtcccaacccagctggaggcctggtctctccttacaacccctgggcccagccctcattgctgggggccaggccttggatcttgagggtctggcacatccttaatcctgtgcccctgcctgggacagaaatgtggctccagttgctctgtctctcgtggtcaccctgagggcactctgcatcctctgtcattttaacctcaggtggcacccagggcgaatggggcccagggcagaccttcagggccagagccctggcggaggagaggccctttgccaggagcacagcagcagctcgcctacctctgagcccaggccccctccctccctcagccccccagtcctccctccatcttccctggggttctcctcctctcccagggcctccttgctccttcgttcacagctgggggtccccgattccaatgctgttttttggggagtggtttccaggagctgcctggtgtctgctgtaaatgtttgtctactgcacaagcctcggcctgcccctgagccaggctcggtaccgatgcgtgggctgggctaggtccctctgtccatctgggcctttgtatgagctgcattgcccttgctcaccctgaccaagcacacgcctcagaggggccctcagcctctcctgaagccctcttgtggcaagaactgtggaccatgccagtcccgtctggtttccatcccaccactccaaggactgagactgacctcctctggtgacactggcctagggcctgacactctcctaagaggttctctccaagcccccaaatagctccaggcgccctcggccgcccatcatggttaattctgtccaacaaacacacacgggtagattgctggcctgttgtaggtggtagggacacagatgaccgacctggtcactcctcctgccaacattcagtctggtatgtgaggcgtgcgtgaagcaagaactcctggagctacagggacagggagccatcattcctgcctgggaatcctggaagacttcctgcaggagtcagcgttcaatcttgaccttgaagatgggaaggatgttctttttacgtaccaattcttttgtcttttgatattaaaaagaagtacatgttcattgtagagaatttggaaactgtagaagagaatcaagaagaaaaataaaaatcagctgttgtaatcacct

SEQ ID NO: 274072 - DNA, 2064 bp, Artificial Sequence
  derived and/or modified sequence
atgactccacaatccctgttacagacaaccctcttccttctctcattgttgtttctggttcagggggcccatggaagaggacaccgcgaagatttccgattttgcagccagagaaaccagacccaccggagcagtcttcactataaaccaacaccggacttgaggatttctatcgagaattcagaagaagcccttaccgttcatgcccctttcccagcggcccacccagcgagccggagcttcccagatccacgtggactgtatcatttttgcttgtattggaatcggcacgccgggaggctgcacttgctatatggaaagagagacttccttttatcagacaaagcatcctccctgttatgtttccagcatcaggaagagagcctcgcccagggaccaccccttctggccaccagcgtgacctcctggtggagccctcagaacatctcactgccgagcgccgctagctttaccttttcatttcacagcccaccacacactgcagcccataacgcatcagtggacatgtgcgagcttaaacgagatctgcagttactgagtcagttcttgaagcatccacaaaaggcctccagacgcccgtccgccgctccagcaagccagcagctccagtctctcgagagtaagctaacgtccgttaggttcatgggggatatggtgagctttgaggaggaccgaatcaacgcaacggtctggaagctgcagcctacagctggtctgcaggaccttcatattcactctcgacaggaagaagagcaaagcgaaataatggagtactccgtgctcctgcccagaactctgtttcagcgcaccaagggcaggtccggagaagccgagaaaagactcttgctagtagacttttcgtcccaagccttgttccaggacaagaatagtagccaagttctgggggagaaagttcttggcattgtcgtgcaaaatacgaaggtggcaaatttaacagaaccagttgttctaacatttcagcaccaactgcaacctaaaaacgttactctacagtgtgtgttctgggtggaggatcccacactaagctcacccggtcactggtcaagcgccggctgcgaaacggtccggcgcgagactcagacaagttgtttctgcaatcatctgacctacttcgcggttcttatggtgagttcagtcgaggtggacgccgttcataagcattatcttagcctgctgagttacgtggggtgcgttgtgtccgccctcgcatgccttgtcactatagctgcatacctctgctcacgaagaaagccgcgagattataccatcaaagtccatatgaatcttttgctggcagtcttcctgctcgatacctctttcctgctctcagaaccagtcgccctgacaggcagcgaggcaggctgtcgggcctctgccattttcttgcactttagcttgctcacctgcctgtcctggatgggcttagagggttataacctttaccggctggtggttgaggtgtttggaacatacgtaccaggctacctcctgaagctttccgccatggggtggggtttccccattttccttgtgaccttagtggccctcgtcgacgtcgacaactatggccctatcatcctggccgtccatcgtactccagagggtgttatctatccaagtatgtgttggatccgggacagcctggtctcctacatcaccaacctgggattgttcagcctggtttttcttttcaatatggccatgctggccactatggtcgtgcaaattctcaggttgaggccccacacacaaaagtggtctcatgtgctgacacttttaggtctgagcctcgtgctcggactaccctgggctttgattttcttttcattcgcatctggaacctttcagctggtagtgctctacctgttttctataattacctccttccagggttttctgatctttatctggtactggagcatgaggctgcaggccaggggagggccctcgcccctcaagtcaaactcagactccgctcggctgcccatttcctccggcagcacatcctcctcgcgcatatag

SEQ ID NO: 274073 - DNA, 2064 bp, Artificial Sequence
  derived and/or modified sequence
atgacccctcagagcctgcttcagaccacactgtttctgctgagcctgctttttctcgttcagggcgcgcacggccgcggtcatagagaagactttaggttctgcagtcagaggaaccagactcacagatcctccctccactataagccaactcccgacctaagaatctctattgagaatagcgaggaggctcttaccgtccatgcccccttccccgcagcacatcccgcctcgcgttcctttcctgaccctagagggctgtaccatttttgcctgtattggaacaggcatgccggcaggctgcacctcctttacggcaagcgcgactttttgttgagtgataaggctagttctctcctgtgtttccagcatcaggaagagtccctcgctcagggccccccactgctcgcaactagcgtcacaagctggtggagtcctcagaacatttccctgcctagtgcagcttcatttacattttcgttccacagtccacctcatactgccgctcacaatgctagcgtggatatgtgcgagttaaagagggatctgcagcttttatctcagtttttgaagcatccccagaaagcctcacggcggcccagcgcagcaccagcctctcaacagctgcagtccttggagtccaaactgaccagcgtgcgttttatgggcgacatggtctccttcgaagaagacaggatcaacgcgaccgtctggaagctccaaccaactgccggccttcaggacctgcatattcattcccgtcaggaggaagaacagtcagagattatggaatactccgttctgctcccaagaactctgttccaacgcaccaagggtcggagtggggaagctgagaagcgcctgctgctggttgatttctcttcccaggcactctttcaggacaaaaacagctctcaagttctcggcgagaaggtcttggggatagtcgtacaaaatactaaagtcgccaatctcacggagcccgttgtactcacattccaacatcagctccagcctaagaacgtcacgctgcagtgcgtgttttgggtcgaggatccaaccctttctagccccggccattggtcctcagctggttgtgagaccgtccgaagagagacccaaaccagttgcttctgtaaccacctgacttattttgccgtgctaatggtatcttccgtggaagtggacgccgtccataaacactatctgagcctgcttagttacgtggggtgtgtcgtttcagctcttgcttgtcttgtgacaatcgccgcctacctctgttctaggcgaaagccgcgagactacacaattaaggtgcacatgaatctgcttctcgccgtgtttctgttagatactagttttcttctgtcagaacccgtagctctgaccgggagcgaggcgggctgccgtgcctccgccattttcctccattttagcctgttaacctgtctgtcctggatgggattagagggctacaacctgtatcgactggtcgtagaggtatttggcacctatgtccctggatacctgcttaaactatcagccatgggctgggggttccctatcttcctcgtcactctggtggcactcgtggacgtcgacaactacggcccaatcatcttggccgttcatcgcacccctgagggtgtgatttatccctccatgtgctggataagggatagcctagtgtcatacattacaaatcttggcctttttagcctcgtattcctgttcaatatggccatgcttgccaccatggtggtacagatcttacgactgcgcccgcacacccagaaatggtcacacgtgctgactctcctgggtttgtccctcgtcctcggtcttccatgggccctcatttttttctccttcgcctctggcactttccagctagtcgtactttacctgttttcaattatcacatcttttcaaggattcctgattttcatctggtattggagcatgcgtcttcaggctagaggaggacccagtccgctgaagtctaattcagactcagctaggctccctatctccagtggtagcacatccagctcccgtatatag

SEQ ID NO: 274074 - DNA, 2064 bp, Artificial Sequence
  derived and/or modified sequence
atgaccccgcaatctctgctccagacgaccctgtttcttctgtcactactttttctggtgcagggtgctcatggacgcggtcatcgcgaagacttccgtttctgcagccagcgcaatcagacccaccgttcctctctacattataagcccacccccgatctgagaattagtatcgagaattctgaggaagcactcacagtccatgctcctttcccggccgcccatcccgctagcaggtcattccctgatccacggggtctctaccacttctgcctgtactggaatcggcatgccggtcgccttcacctgctatacggcaagcgggacttccttctgagtgataaggcaagctctctcctatgtttccagcaccaggaggagtcgctcgcccaaggaccaccccttctggccacatccgtcactagctggtggtcacctcagaacatctcattgccatctgcggccagtttcacatttagctttcattcccctccccacactgctgcacacaatgcttcagtggatatgtgcgaattgaaaagagacctccaactcctctctcaattcttaaagcatccccagaaagcctcccgccggccctcagccgctcccgcttcacagcaacttcagtcgctggagagcaaactcacttctgtgcgttttatgggggatatggtgagtttcgaagaggatcgcataaacgcaacagtgtggaaattgcagcccaccgccggcttgcaagatttgcatattcactccaggcaggaggaggaacaatctgagattatggagtacagcgtgctccttcctcgcacccttttccaacgtacgaaaggccgatcaggggaggcagagaaaaggttgcttcttgtggacttctccagccaggcgctgttccaggacaaaaatagctcacaggtgctcggtgaaaaagtgctgggaattgtggtccaaaatactaaggtggctaacctgacggaacccgtggtgctgacatttcaacatcagttgcagcctaaaaacgttacactgcaatgtgtcttttgggtggaggacccaaccctgtcctcccctggtcattggtcctccgcgggctgtgagactgtgagaagagagacacagacgtcttgcttttgtaaccacctgacctattttgccgttctcatggtgagctccgtggaggtggacgctgtgcacaagcattacctgtcattgttgagttatgtaggttgcgtggtgagtgccctcgcctgtctggtgacaattgcagcttacctatgttcccgccggaaaccgagagactacaccatcaaggtccatatgaatctcttgctggccgtgttcttactcgacacctcctttctattgagcgagcccgtcgccctcacaggctcagaagccggttgccgagcctccgccatttttctacatttctcattacttacatgtctgagttggatgggccttgagggctacaatctgtacagactggtcgtggaagtgtttggtacttacgtcccaggatacctgctgaaactatcagccatgggttggggctttccaatcttcctcgttactctggtggccctcgtggacgtagacaactatggaccaatcattctggccgtgcatcgaacgccagagggagtcatataccccagcatgtgttggatacgggactcactggtgtcctacattaccaacttgggattgttttccctggtgttcttattcaatatggctatgctggctaccatggtagttcaaatcctgcggctgagaccccatacacagaaatggtcacacgtgctgacattacttggcctctcactggtgttaggcctcccttgggccttgatttttttcagtttcgcctcagggacatttcagctggtggtgttatacctcttctcaatcatcaccagcttccagggatttttgatatttatttggtattggagcatgaggttgcaggcaaggggcggcccctcccctttgaagagtaattcggactcagctcgcttacctatctcctccggcagtacatcttcctcccgtatatag

SEQ ID NO: 274075 - DNA, 1539 bp, Artificial Sequence
  derived and/or modified sequence
atgtgtgagttaaagagggacttacagctgctgtcgcagttcttgaagcacccccagaaggctagcagaagaccatcggcagcccccgctagccagcagctgcaatcattggaaagcaagttaacttctgtcaggtttatgggagacatggtgagttttgaagaggatcgcattaatgccaccgtatggaagctgcagcctaccgccggactccaggatttgcacattcacagcaggcaggaggaggaacagagcgaaatcatggagtacagtgttttgttgcctaggactctcttccaacgcaccaaaggaagatccggcgaggccgaaaagagacttctactggttgacttttctagccaggccctgtttcaggacaaaaactcttctcaagtgctgggggaaaaagtgctggggatcgtcgtgcagaacacgaaagtggccaacctgaccgaacccgtggtgctgactttccagcaccagctgcagccaaaaaatgtcactttacagtgcgtgttttgggtggaggaccctacactctcctcaccaggccactggtcctctgcgggatgcgagacagtgagaagggaaacacagacatcttgcttttgtaatcatttaacatacttcgctgtgttgatggtctcatctgtggaggtcgatgctgtgcacaaacactacctctccttgttgtcgtatgttggctgcgtggtttctgccctggcctgcttggtgacaattgccgcgtatttgtgctcacggcggaaacctcgggattatacgatcaaagtgcacatgaatctactgctcgcggtatttttgttagacaccagttttctgctctcagagccagtggcgcttacaggctccgaggccgggtgtagagcttcagccattttcctgcatttctccctgctcacttgcctttcctggatggggctcgagggctacaacctgtatcgcctggtggtggaagtgttcggtacttacgtgcctggttacctgctaaagctgtccgctatgggctgggggttccctatttttctcgtgacactcgttgccctggtggacgtagataattacgggccaatcatactggctgtccatcgaactcctgagggcgtcatttacccaagcatgtgctggatcagagattctcttgtctcctatattactaatctggggctctttagcttggttttcctcttcaacatggccatgcttgccacaatggttgtacagatcttacggctgcgcccacacacacagaaatggtctcatgtgcttaccttacttggactgtccctggtcctgggcctaccatgggcactaatttttttttccttcgctagcggaacattccagctcgtggtactctatctctttagcattataacgtcattccagggcttcctcattttcatttggtactggagcatgagactccaggcgagaggtggcccctcgcctctgaagagcaacagcgacagtgctcgcctgcccatcagctctggttcgacctcttcctcacgcatctag

SEQ ID NO: 274076 - DNA, 2064 bp, Artificial Sequence
  derived and/or modified sequence
atgactccccagtctctgttacagacgacactgttcctgctgtccctcctgttcctcgttcagggagcccatggtcggggccatcgggaggatttccgcttttgtagccaaaggaaccaaactcataggagttctttacactacaagcccacacccgatctcagaattagcatcgaaaattccgaagaagcactcaccgtccacgccccattcccggcagctcatcctgcttcacgctcgttcccggatcctcggggcctgtaccacttttgcctgtattggaacaggcacgcagggagattgcacctgctgtatggaaagcgcgacttcctgctgagtgataaggctagttcccttctgtgcttccaacaccaagaggagtccttggcacagggaccaccactgctagcaacctccgtgacctcgtggtggtcaccccagaatatcagcctcccttcagccgcatctttcacatttagtttccattccccaccccacaccgccgcccacaatgctagcgtagacatgtgtgaattgaaacgagatttacagctgctctcccagttcctgaaacacccacaaaaggcatctagaagaccctccgctgccccagcatcccagcagctgcagagcctcgaaagcaaactgactagtgtgcgcttcatgggagatatggtctccttcgaagaggaccggatcaatgctacagtgtggaagttgcagccaacagcaggcctgcaggacctccatatacactcacgacaggaagaggaacaatctgagatcatggaatactctgtactgctacctaggaccctgttccagaggacaaagggccggtctggcgaagccgagaagagactcttattggtcgacttttcctcgcaggcactctttcaggacaaaaactcaagccaagtcctcggtgaaaaggtgctgggcatcgtcgttcaaaacacaaaggtagccaatctcaccgaaccagtggtcctcacatttcagcaccagctgcagcctaaaaacgtcactttgcagtgcgttttctgggtggaagacccaaccctcagctcccctggccattggtctagtgccggatgcgagacagtgcggcgagagactcagacatcctgcttttgtaaccacctgacctacttcgctgttctgatggtctcctcagtcgaggtggacgctgtacataaacattatctcagtctcctgagttatgtgggttgtgtcgtgagcgcattagcctgcttggtgaccatagccgcttacttgtgcagccggcggaaaccccgcgactacactattaaggtacacatgaaccttctgcttgccgtttttctgctcgataccagctttctcctaagcgagcctgtcgcgcttacagggagcgaggctggctgcagagcaagcgcaatttttttacacttttctctgctcacatgtctttcttggatggggctcgaggggtacaatctttacagactggtggtggaagtttttggcacatatgtccctgggtatctccttaagctcagcgcgatgggatgggggtttccgatttttctcgttacactcgtcgccctggttgacgttgataactatgggccgataatcctggcagtccaccgcacccccgagggcgtgatttacccaagcatgtgttggatcagggacagtctggtgtcctatataaccaacctgggcttgttttccttagtttttctattcaatatggcaatgctggctaccatggtcgtgcagatcctcagactaaggccccatacacagaaatggtcccatgtgctcaccctcttgggactgagtctggtgctcggtcttccatgggctctgattttcttctcctttgcctctggcacattccagttggttgtgttataccttttcagtattattacgtcgtttcagggctttttgatattcatatggtactggagcatgagattgcaggctcgaggaggcccctctccattgaagagcaatagcgattctgcccgcctccctatctccagtggctcgaccagttctagtcgcatatag

SEQ ID NO: 274077 - DNA, 2064 bp, Artificial Sequence
  derived and/or modified sequence
atgacgccacagagccttcttcaaactacattgtttctgctgtcactcctgttcttagtgcagggagcccacggccgggggcacagggaggacttcagattttgttcacaaagaaaccaaacccaccgatcgtcattacattacaagcccaccccagatctgaggattagcattgagaacagcgaagaggcactgaccgtgcacgccccgtttcctgctgcacatccggcctcgcgatcattcccagatcctcgagggctttatcacttctgtctgtactggaatcgccatgccggtagactccacttattatatggcaaacgggacttcctgcttagcgataaagcgtcttctctcctttgcttccaacatcaagaggagtctttagcacagggcccaccactgctcgcgacgtctgtcacttcttggtggtctccacagaacatctccctcccaagcgcagcaagcttcacgttcagctttcactctccacctcatactgcggctcacaatgcatctgtcgacatgtgcgaactcaaaagagacttacagcttctcagccagttcctcaaacatccacagaaggcaagccgccggccatccgccgcacctgcatcacagcaactccagtctttggaatccaagctgacatccgtgagattcatgggagatatggtatccttcgaagaggacagaatcaacgcaacggtgtggaagctccaacctactgcaggtctgcaggaccttcatatccactccaggcaggaggaagaacagtccgagataatggagtattccgtgctcctgcccagaactctctttcaaagaaccaaaggccgctccggggaagctgagaaacgcctgcttctggttgacttttccagtcaggctctgtttcaggataagaacagttcccaagtactcggagagaaagtgctgggaatagttgtccagaacacaaaagtggcaaatcttacagaacccgtggttctgacgtttcaacaccaactccagccaaagaacgtgacactccagtgcgtcttctgggttgaggaccctaccctgtcttcccctggtcattggagctctgctggctgcgagaccgttcgcagagagacccagacttcatgtttctgcaatcacctgacctactttgccgtactgatggtgagcagcgtcgaggtggacgccgtacacaagcattatctgagcctactgagctacgttgggtgtgtggtctcagcactagcctgcctggtgaccatcgccgcgtatctttgcagccggaggaagccaagggattacacaatcaaggtccatatgaacctgctcctggctgtattcctgctggacacctcatttctgctgagtgaacccgttgcactcacaggcagtgaagcagggtgtcgcgcttcggccatttttctgcattttagcctcctaacctgtttgagttggatgggcctggaaggctacaacctgtacagactcgtggtggaggtcttcggcacatacgtccccgggtatctcctcaagttatctgccatgggatggggatttcctatctttctcgttacactggtcgccctggtggacgtcgataactacgggcctattattctcgcggtgcatagaacgcccgaaggagtcatataccccagcatgtgctggatccgggatagcctggtctcttacataacaaatctgggccttttttccctcgtattcctttttaacatggctatgctggctaccatggtggtgcagattttgcgcctgaggcctcacacacagaaatggtctcacgtcctcacgctgctcggcctcagcctggtgttgggtctaccctgggccctgatattcttttctttcgcgtctggtactttccagctggttgtcctctatctgttctctataattacatcctttcagggctttctgatttttatctggtattggagcatgcggctccaggcgaggggggggccctcccctcttaaatccaacagcgactcagcacgcctgcccatctcctccgggtctacttctagcagccgaatatag

SEQ ID NO: 274078 - DNA, 2064 bp, Artificial Sequence
  derived and/or modified sequence
atgaccccccagagcctgctgcagaccaccctcttcctgctgagcctgctcttcctggtgcagggcgcccacggccggggccaccgggaggacttccgcttctgcagccagaggaaccagacccacaggagcagcctgcactacaagcccaccccagacctgcgcatcagcattgaaaattctgaggaggccctgactgtgcacgcccccttccctgctgcccacccagccagccgctccttcccagacccccggggcctgtaccacttctgcctgtactggaacagacatgctggccgcctgcacctgctgtatggcaagagggacttcctgctgagtgacaaggccagcagcctgctgtgcttccagcaccaggaggagagcctggcccagggcccccccctgctggccacctctgtgacctcctggtggagcccccagaacatcagcctgcccagcgctgccagcttcaccttctccttccacagccccccccacacagctgcccacaatgcctctgtggacatgtgtgagctgaagagggacctgcagctgctgagccagttcctgaagcacccccagaaggccagccggcggcccagcgctgccccagccagccagcagctgcagagcctggagagcaagctgacctctgtgcgcttcatgggagacatggtgtcctttgaggaggaccgcatcaatgccaccgtgtggaagctgcagcccacagctggcctgcaggacctgcacatccacagccggcaggaggaggagcagagcgagatcatggagtacagcgtgctgctgcccaggaccctcttccagaggaccaagggccgctctggagaggccgagaagaggctgctgctggtggacttcagcagccaggccctcttccaggacaagaacagcagccaggtgctgggggagaaggtgctgggcatcgtggtgcagaacaccaaggtggccaacctgacagagcctgtggtgctgaccttccagcaccagctgcagcccaagaatgtgaccctgcagtgtgtgttctgggtggaggaccccaccctgagcagccctggccactggagcagcgctggctgtgagaccgtgcggcgggagacccagaccagctgcttctgcaaccacctgacctactttgctgtgctgatggtgtcctctgtggaggtggatgctgtgcacaagcactacctgagcctgctgtcctatgtgggctgtgtggtgtctgccctggcctgcctggtgaccatcgccgcctacctgtgcagcaggaggaagccccgggactacaccatcaaggtgcacatgaacctgctgctggccgtgttcctgctggacaccagcttcctgctgtctgagcctgtggccctgactggaagtgaagctggctgccgggccagcgccatcttcctgcacttcagcctgctgacctgcctgtcctggatgggcctggagggctacaacctgtaccgcctggtggtggaggtgtttggcacctacgtgcccggctacctgctgaagctgagcgccatgggctggggcttccccatcttcctggtgaccctggtggccctggtggatgtggacaactacggccccatcatcctggccgtgcacaggaccccagagggcgtcatctaccccagcatgtgctggatccgggacagcctggtgtcctacatcaccaacctgggcctcttcagcctggtgttcctgttcaacatggccatgctggccaccatggtggtgcagatcctgcggctgcggccccacacccagaagtggagccacgtgctgaccctgctgggcctgagcctggtgctgggcctgccctgggccctgatcttcttctcctttgccagcggcaccttccagctggtggtgctgtacctgttcagcatcatcaccagcttccagggcttcctgatcttcatctggtactggagcatgaggctgcaggcccggggcggccccagccccctgaagagcaacagcgacagcgcccggctgcccatcagcagcggcagcaccagcagcagccgcatctag

SEQ ID NO: 274079 - DNA, 1539 bp, Artificial Sequence
  derived and/or modified sequence
atgtgtgagctgaagagggacctgcagctgctgagccagttcctgaagcacccccagaaggccagcagaagacccagcgctgccccagccagccagcagctgcagagcctggagagcaagctgacctctgtgcgcttcatgggagacatggtgtcctttgaagaagatcgcatcaatgccaccgtgtggaagctgcagcccacagctggcctgcaggacctgcacatccacagccggcaggaggaggagcagagcgagatcatggagtacagcgtgctgctgcccaggaccctcttccagaggaccaagggccgcagcggggaggccgagaagaggctgctgctggtggacttcagcagccaggccctcttccaggacaagaacagcagccaggtgctgggggagaaggtgctgggcatcgtggtgcagaacaccaaggtggccaacctgacagagcctgtggtgctgaccttccagcaccagctgcagcccaagaatgtgaccctgcagtgtgtgttctgggtggaggaccccaccctgagcagccctggccactggagcagcgctggctgtgaaacagtgagaagagagacccagaccagctgcttctgcaaccacctgacctactttgctgtgctgatggtgtcctctgtggaggtggatgctgtgcacaagcactacctgagcctgctgtcctatgtgggctgtgtggtgtctgccctggcctgcctggtgaccatcgccgcctacctgtgcagcaggaggaagccccgggactacaccatcaaggtgcacatgaacctgctgctggccgtgttcctgctggacaccagcttcctgctgtctgagcctgtggccctgaccggcagcgaggccggctgccgggccagcgccatcttcctgcacttcagcctgctgacctgcctgtcctggatgggcctggagggctacaacctgtaccgcctggtggtggaggtgtttggcacctacgtgcccggctacctgctgaagctgagcgccatgggctggggcttccccatcttcctggtgaccctggtggccctggtggatgtggacaactacggccccatcatcctggccgtgcacaggaccccagagggcgtcatctaccccagcatgtgctggatccgggacagcctggtgtcctacatcaccaacctgggcctcttcagcctggtgttcctgttcaacatggccatgctggccaccatggtggtgcagatcctgcggctgcggccccacacccagaagtggagccacgtgctgaccctgctgggcctgagcctggtgctgggcctgccctgggccctgatcttcttctcctttgccagcggcaccttccagctggtggtgctgtacctgttcagcatcatcaccagcttccagggcttcctgatcttcatctggtactggagcatgaggctgcaggcccggggcggccccagccccctgaagagcaacagcgacagcgcccggctgcccatcagcagcggcagcaccagcagcagccgcatctag

SEQ ID NO: 274080 - DNA, 2064 bp, Artificial Sequence
  derived and/or modified sequence
atgaccccccagagcctgctgcagaccaccctgttcctgctgagcctgttgttcctggttcagggggcccacgggagaggacatcgggaggatttcagattttgttcccagaggaaccagacacacaggagctccctgcattacaagcccacacccgatttgagaatctccatagagaatagtgaagaggcactgactgtgcacgctcccttcccagcagcacacccggcttcacggtctttccctgaccccagaggactgtaccatttttgcttgtattggaaccgccacgccggcaggctgcatctactgtacggaaagagagactttctccttagtgacaaggcttcaagcctcctctgttttcagcatcaagaggagtccttggctcagggaccccccctgctggcgacatctgtcacgtcctggtggtctcctcaaaacatctctcttcctagcgctgcctccttcaccttctcttttcacagccctcctcacaccgctgcgcacaacgcctccgtggacatgtgcgagcttaaacgggatttgcagctgctgtctcagttcctgaaacacccccagaaggccagtcgacgaccaagtgccgctcctgctagccagcaactgcagtcattagagagtaagttgacgagcgtgcgcttcatgggtgacatggtgagctttgaggaggatcgaatcaacgcaactgtttggaaactgcaaccgactgcggggctgcaggatctacacatccactcgaggcaagaggaggaacagtcagagataatggagtattccgttctgctgcctcgaactctcttccagcgcaccaaggggcgctctggggaagccgagaaaaggttgctgctcgtggatttcagttcccaggcactgttccaagacaagaacagttcgcaggtgcttggtgagaaggtcttgggcatagtcgtgcaaaacactaaggttgctaacctgaccgaacccgtggttctcacattccagcatcagctccaacccaagaatgtcaccctccagtgtgttttctgggttgaagaccccactctctcaagccctggacactggtcaagcgcgggttgtgaaacagtgagacgagaaactcagacctcttgcttctgtaaccaccttacgtacttcgccgtgcttatggtgtcaagcgtggaggtcgatgcggtgcacaagcattatctgagtcttctatcttacgtggggtgcgtcgtgagtgccctggcatgcctcgtaacaatcgccgcctatctgtgctcccgcaggaaacctagggactacaccattaaagttcatatgaacctcctgctagcagtcttcctgctagacacctcattcctgctaagtgagccagtggccctgaccggttctgaggcagggtgtagagcctccgcaatttttctgcacttttctctgctgacatgtttatcctggatggggttagaaggatacaatctctataggcttgtggtggaagttttcggtacctacgtgcccggctatttgctgaaactgtctgctatgggctgggggttcccgatctttctcgtgactttggtcgccttagttgacgtggataactacggacctatcattcttgccgtccacaggactccagaaggcgtgatctatccatccatgtgctggattagggactccctggtgagctatatcaccaatttaggactgttcagtctggtgtttttgttcaatatggcgatgctggcaaccatggtggtgcagattctccggctgaggccccacacccagaagtggagccacgttctcacattactgggactgagcctggtgctggggctgccttgggctctgatcttcttctccttcgccagcggaacttttcaactggtggtattgtatttgttttccatcatcacctcttttcagggcttccttatcttcatatggtattggtccatgcgactgcaagccagaggtggcccctccccgctgaagagtaactcagactcagccagactgcctattagttcaggtagtacatccagttctcgtatctag

SEQ ID NO: 274081 - DNA, 2064 bp, Artificial Sequence
  derived and/or modified sequence
atgaccccccagagcctgctgcagaccaccctgttcctgctgagcctgctgttcttagtccagggcgcccatggtcgggggcatagagaggactttcggttctgtagtcagaggaatcagactcaccgatcctctctgcattacaaaccaactcccgacctgcgcattagcattgagaactcagaagaggcattaactgtgcatgctcccttcccagctgctcaccccgccagtcgctcctttcccgacccccggggtttgtaccacttctgcttatattggaacagacacgctggtaggctgcacctgctgtacgggaaacgcgatttcctgctatcggacaaggcctcttccctgctgtgcttccagcaccaggaggagagccttgcccaaggccctcctctgctcgcaacttccgtgacaagctggtggtctcctcagaatataagtctgccctccgcagctagctttaccttcagctttcactccccaccccacacagcagcccataatgctagcgtcgacatgtgtgagcttaagagggatctccagctgctgagtcaatttctgaagcacccccaaaaggcaagccgacggccaagcgcagctcctgcatcccagcagctgcagagtctggagtccaaactgaccagcgttcggtttatgggagacatggtttcatttgaggaagatcggatcaatgccactgtctggaagctacaaccaactgctgggctccaggatcttcacatccactcgagacaggaggaggagcaaagcgagattatggaatactctgttttgcttccccggaccctgtttcagagaaccaaggggcggagtggtgaggcagagaaacggctgctcctggtagatttctcttcgcaagctctattccaggataaaaatagttcccaggttctgggggagaaggtgcttgggattgtagttcagaacacaaaggtcgcaaaccttacagagcccgtagtcttaacattccagcaccaattacagcctaaaaacgtgactctacagtgcgtgttttgggtagaggatccaactttatcttcacccgggcactggtcatccgctgggtgtgagacagtgaggcgggagactcagactagctgtttctgcaatcatcttacttatttcgcggtactcatggtgtcttccgtcgaagtcgatgcagtccacaaacactacctgtctctcttgtcttacgtggggtgcgttgtgagcgcactggcttgtcttgtgaccattgctgcctacctgtgttcaagacgaaagcctcgggactacacaataaaagtgcatatgaatctgctgctggccgtctttcttctggacacgtcattcttgcttagcgaaccagtggctctgacgggcagtgaggccggctgccgtgctagcgcaatttttctccacttcagtttgttaacatgcctttcgtggatgggtctggagggttataacctgtatcgcctggttgtggaggtgtttggcacgtatgttcccggctacctgctgaagctgtccgcaatgggttggggcttcccaattttcctggtcacactggtagcacttgtggacgtcgacaactacggcccaatcattttggcagtacatagaacaccagaaggtgtcatctacccctcaatgtgctggattcgtgattccctagtgagttatatcacaaatctcggactcttcagcctcgtttttctgttcaacatggctatgttggccaccatggtggtgcaaatcctacggctgagaccccatacccagaaatggtcccacgtcctcaccttgctgggtctgtcactggtcctgggcttgccatgggcgttaatattcttctccttcgcctctggtacctttcagctcgtggttttgtatcttttctccataatcactagctttcaagggtttctgatttttatctggtattggtctatgagattgcaagctcgcgggggtccgagtccacttaagagcaactcagattccgcccggctcccaatctcaagtgggagtacctcaagctcgcgcatctag

SEQ ID NO: 274082 - DNA, 2064 bp, Artificial Sequence
  derived and/or modified sequence
atgaccccccagagcctgctgcagaccaccctgttcctgctgagcctgttattcctcgtgcaaggggctcacggccgcggtcaccgggaagattttagattctgctcccagcggaatcagacacacaggtcatctctgcactataagcccacccctgatttacggattagcattgagaactctgaggaagctctcacagtgcacgccccatttccagctgcgcatcctgccagccgatcatttcctgaccccagaggcctataccacttttgcctgtattggaatagacacgctggtcggctgcacctcctctacggcaagcgcgacttccttttatccgacaaagcttccagtctcctgtgtttccagcaccaggaggagagcctggcccaggggccaccacttcttgcgacctctgttacctcatggtggtcaccgcaaaatattagcctcccttccgccgccagctttaccttttcatttcactctcctcctcatacagccgcccataatgcctcagtcgatatgtgcgagttgaagcgagacctccagttactgtcacagtttctcaaacatcctcagaaggcctccaggagaccttcagcagcccctgctagtcagcagttgcagagcctcgaaagcaaactcacctctgtccgattcatgggcgacatggtgtccttcgaggaggaccggatcaacgcaaccgtttggaaactgcagcctacagcaggcctccaggatctccacattcactctcgccaggaggaggagcagtcggaaattatggagtactcagtattgctaccccgcactctgtttcagcgcaccaagggaagatccggagaagcagagaaacggctcctgttagtcgatttctcatcccaggccctcttccaggacaagaattcgagccaggtcctgggagaaaaggtgctgggtattgtggtgcagaacacaaaggtggcaaacctgacagaacccgtcgtgctcacgtttcaacaccagctccaacctaagaatgtgaccttgcaatgcgttttctgggtggaggatcccacgctcagcagtcctggacattggtcttccgccgggtgcgagactgtgcgaagagaaacccaaaccagctgcttttgcaatcatctgacctacttcgctgtcttaatggtttcgagcgttgaggtagatgccgtgcacaagcattaccttagcctgctatcttacgttggctgcgttgtgtcagcactcgcctgtttggtcacaattgccgcctatctgtgctctcgtcggaagccaagagactacaccatcaaggtacatatgaatctgctcttagctgtattcctcctggacacatcgttcctgctgtctgagccagtggctctgactggatctgaagccggatgtcgggctagtgcaatcttcctccatttctcgttgttgacatgtttgtcctggatgggtctcgaagggtacaacctgtatagactcgtggtggaggtttttgggacttacgtgccaggctatctgctgaagctcagtgcaatgggttggggattcccgatttttcttgtgaccctcgtggccctggtggacgtagacaattacggccctatcatcctggccgtacaccgtacccctgagggcgtgatttacccgagcatgtgttggatcagggatagtttggtgagctatatcaccaacctgggactgtttagcctcgtgtttctctttaatatggccatgcttgccaccatggtcgtccagatcttgcgtttgaggccccacacgcagaagtggtcccatgttctcacattgctcggattgtctctcgtgctggggctgccttgggccctcatcttcttctcctttgcttccggtacatttcaactagtcgtcttgtacctgttctcaatcataactagctttcagggcttcctgatcttcatttggtactggagcatgagactgcaggcgcggggcgggccttccccactgaagtccaattcagactcagcccgtctccctatttcttccggaagtacttccagttcacgcatctag

SEQ ID NO: 274083 - DNA, 1539 bp, Artificial Sequence
  derived and/or modified sequence
atgtgcgagctgaagcgggacctgcagctgctgagccagttcctgaaacacccccaaaaagcatctagacgccctagtgccgctcctgctagccagcagctgcagagtctcgagagcaagctaaccagcgttagattcatgggagatatggtgagtttcgaagaggaccggatcaatgccactgtctggaaacttcagccgacagcaggactgcaggacctgcacattcattccagacaggaggaggagcaaagcgagatcatggagtattccgttctgctgccgaggaccctgttccagaggactaagggaaggagcggcgaggctgagaagcggctcctgttggttgatttctcctcccaagcgcttttccaggacaagaactccagccaggtattaggcgaaaaagttctgggcattgtagtgcagaacactaaagtcgcaaatctcaccgaacccgttgtcctcacctttcaacatcagctgcaacctaaaaacgtcacgttacagtgcgtgttttgggtggaagacccaaccctttcctcccccggccactggagcagcgccggttgtgaaacagtgaggcgcgaaacacagacatcgtgtttttgcaaccacctgacctatttcgccgtgctgatggtgtcgtccgtggaagtggatgccgtacacaagcactacctctcactgctgtcctatgtcggctgcgtggttagcgccctggcctgcctggtaaccatcgctgcctacctctgttcacgccgaaaaccacgtgattatacaattaaggtgcatatgaaccttcttttggcagttttcctgcttgataccagctttttattgtccgaacccgttgccctgacagggtcagaagctggatgtcgggctagcgccatcttcctgcacttctctttgctgacatgtctgagttggatgggactggagggttataacttgtaccggctggtggtggaggtgtttggcacatacgtgcctggctacctgctgaagctatccgccatggggtggggtttccctattttcctggtaactctagtggctttagtcgatgtcgataattacggccccattattttagccgtccatcgcaccccagagggtgtcatatacccatcgatgtgctggatacgggactcactggtaagttatatcactaacctgggactgttctctcttgtattcctattcaatatggctatgctggccacaatggtcgtgcaaatccttaggcttcgaccacacacccagaagtggtcacatgttctgacactgctagggctttccctggtgctgggcctgccatgggcgcttatcttcttcagcttcgccagcggaactttccaactggtggtcctctacctcttctccattatcacttcattccagggcttcctaatatttatttggtactggtctatgcgcctgcaggccaggggagggccttcaccactcaagagtaacagtgactcagcacggttacccatttcaagtggtagtacttcctcttcgcgcatatag

SEQ ID NO: 274084 - DNA, 2064 bp, Artificial Sequence
  derived and/or modified sequence
atgaccccccagagcctgctgcagaccaccctgttcctgctgagcctcctatttctggtgcaaggcgcacacggccgcggtcatcgcgaggactttagattttgttcacaaagaaaccaaactcatcggagttctcttcactataagccaaccccagatctgaggatcagcatagagaactcagaggaggctctgacagtgcatgcaccctttcctgcagcacatccagccagtcggtcctttcctgacccaaggggtttgtatcacttctgtctctattggaatagacacgccggcagacttcacctgctctatggcaagagggacttcctgctcagcgacaaagctagttcactcttatgcttccagcatcaggaagaatccctagcgcagggaccgccgttgctcgccacctctgttacaagctggtggtcgcctcaaaatataagtttgccatctgccgctagtttcacattcagctttcattcaccaccacacactgccgcccacaatgcgtccgttgatatgtgtgaactgaaaagagatctgcagctcctttcccagtttctgaaacaccctcagaaagcttcacgtagaccatcggcagctcccgcctctcagcagctgcagtctcttgagtccaaactcacctcggtccgtttcatgggagacatggtgtccttcgaggaagatcggatcaacgctacagtgtggaagttgcagcccaccgccggactacaggaccttcacattcacagtcgacaagaggaagaacaaagcgagattatggagtactcggtgttactgccgaggactttgttccagcgaaccaagggccggagcggagaagccgagaaacgattgctgcttgtggatttcagctctcaagccctctttcaagacaagaactcctctcaggtcctcggtgaaaaagtcctaggaattgtggtccagaataccaaggttgctaatctgacagaaccagtggtgcttactttccagcatcagctccagcccaagaacgtaaccctccagtgtgtattctgggtcgaggatcctacgctgagcagcccaggccattggtcctcggccggttgcgaaactgtccggcgagagacacagacttcctgtttctgcaaccacctcacttatttcgcagtgctgatggtctcttctgtagaggtagacgctgtgcacaagcattatctatcgcttctgtcctatgtcggctgtgtggtgtccgccctggcttgtctagtcacgattgctgcgtacttgtgttcaagaagaaagcctcgcgactacacgatcaaggtgcatatgaatctcctgcttgcagttttcctcttggataccagtttcttgctgtccgaacctgtggccctgaccggatccgaagccggctgcagagcatctgctatctttctgcattttagtctgctaacctgtctatcctggatgggcctggaaggttacaatctgtacagactggtcgtggaagtgttcgggacctatgtgcctggctatctgctgaagctgtctgctatggggtggggcttcccaatctttttggttactctggtcgcactggttgacgttgacaattacggtcccatcatcctcgcagtgcatcggactcccgaaggagtgatctaccctagtatgtgttggatccgagacagcctcgtttcctacatcaccaacctaggtctattcagcctggtcttcctgttcaatatggctatgctggctactatggtcgtacagatactccgactacgaccccacactcagaaatggtcccatgtgttgacgctgttagggcttagcttagtgttgggactgccctgggcccttatcttcttttctttcgcaagcggaactttccagctggtcgtgctttatctcttctctataataacatcgttccagggattcctgatcttcatttggtattggagtatgaggctgcaggcacgagggggacccagtcctttgaagagcaattccgactccgctcgcctgcccatttcctccggtagtacatcttcaagtcggatatag

SEQ ID NO: 274085 - DNA, 2064 bp, Artificial Sequence
  derived and/or modified sequence
atgaccccccagagcctgctgcagaccaccctgttcctgctgagcttattattcctggttcagggggcccatgggagaggacaccgcgaggatttcagattctgctcccagcggaatcagacccacaggagttctctgcactacaaacctacccccgatttaaggatctcaatcgaaaatagcgaagaggcgctgaccgttcatgcacctttccccgctgcacaccccgcatcaaggtccttccctgatccccgcggtctctaccacttctgcttgtactggaatagacacgccggccggctccatctactttatggaaagcgagactttttactcagtgacaaagcgagctctctgctttgtttccaacatcaggaagagagcttagcccaaggtcctccgcttctggctacaagcgttacatcatggtggtcgccccaaaatatctcgttaccctccgcagcctctttcacattctcttttcacagccctccacacacagcagcccacaacgccagcgttgatatgtgtgagttgaaacgggacctccagctcctgagccaatttttgaaacacccccagaaagccagccggaggcctagcgctgcaccagcatcacaacagctccagagcctggagtcaaagctgaccagtgtgcgtttcatgggtgacatggtgtcctttgaggaagataggatcaatgctactgtctggaagctgcagcccacagctggattacaggatttacatattcactctcggcaggaagaggaacagtctgagatcatggagtattcagttcttctgccacgcaccctttttcaaagaactaaaggacgaagtggagaagccgaaaaacgccttttgctcgtggacttctcttctcaggctctctttcaggataagaatagttcacaggtgctgggagagaaagtgctgggcatcgtggtgcaaaacacaaaggtcgccaacttgacagaacctgtggtgctcacatttcagcatcagctgcagcctaaaaatgtgacccttcaatgtgtgttctgggtcgaagaccccaccctgtctagccccgggcactggtcatccgctgggtgcgagaccgtgcgaagggaaacccagacttcatgcttctgcaatcaccttacatactttgctgtcttgatggtatctagcgtcgaggtggacgccgtccacaagcattacctgtcactcctgtcctacgtgggatgcgtcgtgtcagcccttgcgtgcctcgtgacaattgcagcttacttgtgttccaggcggaagccccgagattacaccattaaagtgcacatgaatctactgttggcagtctttctcctggacacctcattccttctgtcagagcctgtggccctgaccggcagcgaagctggatgtcgagcttcagcaatctttctgcatttttctctcctgacgtgtttgagctggatgggattggagggctataatctttatcggctagtggtggaagtttttggtacatacgtccctggctacttgctgaaactgtccgccatgggatggggttttcccatcttcttagtgacactggtggcattggtggatgtggacaattacggacctattattctagccgtgcacagaactcccgagggtgtgatctacccctcgatgtgctggatccgagatagcttggtgagctatatcaccaatctggggcttttttccctcgtgtttctctttaatatggcgatgctggcaaccatggtcgtgcagattctcaggttgagaccccacacccaaaaatggagccatgttctgacactactgggcctgagtttggtcttgggactcccttgggctctcatatttttcagtttcgcctctggcacatttcagctcgtcgtgctgtacttgtttagcatcatcacctcattccagggttttctcatattcatttggtactggtccatgagactgcaagctagggggggaccatcccccctcaagtcgaacagcgattctgctcgcctcccgatctccagcggatccacctccagtagtaggatctag

SEQ ID NO: 274086 - DNA, 2064 bp, Artificial Sequence
  derived and/or modified sequence
atgacgcctcagtctctgctgcagactacactgttcctcctcagcctgctgttcctggttcaaggcgcacacggcagaggccatagggaggatttccgtttctgctcacagaggaatcaaacgcacagaagctccttgcattataaacccactcctgacctacgcatatccatagaaaacagcgaggaggccctgaccgtgcatgcacccttccctgcggctcatcccgcttcaaggagtttccctgaccccagggggctgtaccacttttgcctctattggaaccgacacgctggcaggctccatttgctgtatggcaaaagagactttctgctgagcgacaaggcgtcttccctgctatgctttcagcaccaggaagaatctctagcacagggccctcctctgctggcaacaagcgtgacatcatggtggagcccccagaatatttctctgcctagcgccgcatcattcacattttcttttcatagcccaccccacaccgctgcacataatgcgtccgtggatatgtgcgaattgaagcgcgacttgcagctgctcagccaattcctcaaacatcctcagaaggcatctagacgaccatcagccgctccagcctcccagcagctgcagtccctggagtccaaactgaccagcgttcggttcatgggggacatggtctccttcgaggaggacagaataaacgctacagtgtggaaactccaaccaacagctgggctgcaggacctgcacattcattccagacaggaggaggagcaaagcgagatcatggaatatagtgttttgcttccacgaactctgttccagcgtacaaaaggtaggagcggcgaagccgagaaacgcctgctgcttgtcgatttctcttcgcaggctctctttcaggataagaactcatctcaagtgcttggggagaaagtacttggcatcgtggtgcagaacacaaaggtggctaatctgacagagccagtcgtattgacatttcaacatcagctacaacctaaaaacgtcacccttcagtgtgttttttgggtggaggacccgaccctgagtagccccggacattggagctcagctggctgcgaaactgtcaggagagaaacacagacttcttgtttttgtaaccacctgacctattttgctgtgctgatggttagttcagtcgaggtcgatgctgttcataaacactacctgtctcttctgtcttacgtgggctgtgtggtgtccgctctcgcctgcctggttaccattgcagcctacctctgctctcggaggaaaccaagagactacactatcaaggtacacatgaatctattgctggccgtttttttgttggatacaagctttctcctgagcgaacccgttgccctcaccggctcagaagccggatgtcgcgcaagcgccatctttctccacttttcgctccttacctgcctatcctggatgggcctggagggatataatttgtaccgcctggtggtcgaggtcttcggaacatacgtgcccggatacctcctcaagctttccgctatggggtggggtttcccaatatttctcgtcactttggttgcgctagtggatgtcgacaattacggtccaatcatcttggctgtacaccgaacacccgaaggagtgatctatccttccatgtgttggataagggattctctggtaagctatatcacaaacctcggcctgttctccctcgtttttctgtttaacatggcgatgctggccaccatggttgtccagattctgcgactgcgaccgcacacgcaaaagtggagccatgtgctaacgcttctagggctgtctctggtgctcggtttaccctgggcattgatcttcttctcctttgctagcggcacttttcagctggttgtgctgtatctgttcagcatcattacatcattccagggcttcctgatcttcatttggtactggagtatgcggctacaagctcggggtggcccaagtcctttgaagagcaattctgatagcgctcggctgccgatctcgagcggatctaccagcagcagtcgtatctag

SEQ ID NO: 274087 - DNA, 2064 bp, Artificial Sequence
  derived and/or modified sequence
atgactcctcagagcctgttacagacaacgctctttctcctgtcgttactgtttttggtgcagggcgctcacggcaggggccaccgagaagactttagattctgtagccaacgcaatcaaacccaccggagcagcctccattataagcccacccccgacctccggatctctattgaaaactcagaggaggccctcacagtgcatgcaccatttccagcagcacatccagcgtcacgaagcttcccggatccgagaggcttgtatcatttttgtctgtattggaatcggcacgcgggacgcttacacctgctctacggaaagcgggatttcctcttgtcagataaggctagcagcctactgtgctttcagcaccaagaggagtccctggcacagggaccccctctgttggctacgagtgtgacttcctggtggtcccctcagaacatcagcctcccaagcgctgcttcatttaccttttcttttcatagcccgccacacactgcagcgcataacgcttccgttgatatgtgtgaactaaagagggatctacagcttctcagccaatttttgaagcacccgcagaaggcttctagacgcccttccgctgcccctgcctctcagcagttgcaaagtttagagagcaagctaacttccgtccgattcatgggcgacatggtttctttcgaggaggacaggattaacgccactgtatggaagctgcagcccacagccggtctgcaggatttacacatacactctaggcaggaggaggagcagagcgaaattatggagtattctgttctgctcccaagaacattgttccagaggacaaaaggacggtcaggcgaggctgaaaagaggctacttcttgtcgacttcagctcccaagctcttttccaagacaaaaattcctcccaggtgctgggtgagaaggtattaggcatcgtcgttcagaatactaaggtagccaacttaaccgaacccgtggtgttaacctttcagcaccaactgcagcctaaaaatgtgactctacagtgtgtattctgggtcgaagatcctactctcagctcccctggccattggtctagcgccggttgcgagacggttcggagagagacccaaacttcctgcttttgtaatcacctaacatacttcgccgtcctgatggtcagcagcgttgaggtcgacgcggtgcataagcattatctgtcattactttcttatgttggatgcgtagtatccgcactggcgtgtctcgtgactatagcggcttacctgtgcagtaggagaaaacccagagactatactattaaggttcacatgaacctgttacttgccgtctttctgctggacacctcctttctactcagcgaacccgtcgcgttgaccggaagcgaggcgggatgcagggctagcgcaatattcctgcacttctccctacttacctgcttgagctggatgggactcgaggggtacaatctgtaccgactggtagttgaggtctttggaacgtacgtgccagggtatctgctgaaactgagtgcaatgggatgggggtttcctatcttccttgtgaccttggtcgctctggtggacgtggacaattacggaccaatcatcttggccgtacacagaacccctgagggcgttatctatccttcaatgtgttggatccgggattcgttggtgtcatacattacaaacctgggcctgttcagtctcgtcttcctgttcaacatggcaatgttagctactatggtcgttcagattctgcggctgagaccccatacccaaaagtggagccacgtgctgaccctgcttggactgagcctggtcctcggcctcccatgggcgcttatctttttctcatttgctagtggaacattccagttggttgtgctgtacctattttcaatcatcaccagctttcagggcttccttatcttcatttggtactggtctatgagactgcaggccaggggtggaccatccccactgaagtccaactccgattctgcgaggctcccgatctcttctggatccacgtcaagctctcgcatttag

SEQ ID NO: 274088 - DNA, 2064 bp, Artificial Sequence
  derived and/or modified sequence
atgactccacagtccttacttcagaccactctgttcctcctgtcattgctgtttctagtgcagggagcgcatggtcgcggacaccgggaagacttccgcttctgctcccagaggaatcaaacacacaggtccagcttgcattacaaacctacacctgaccttcggatctcaattgagaactctgaagaagctctcacagtgcatgccccatttcctgcggctcatccagccagtcggtctttccccgacccaaggggtctttatcatttctgtctgtattggaaccgacatgcagggagattgcaccttttatatggaaagagggactttttgttgtctgataaggccagttcccttctgtgctttcagcaccaagaggagagtctggcccagggcccaccacttctggcgactagtgtgaccagttggtggtctccacagaatatctcacttccctccgcggcatcattcacattctcctttcacagcccacctcacacagcagcccataacgcgagtgtggacatgtgcgagcttaaacgcgatctgcagctactctctcagttcttgaagcacccacagaaggcctcacgaaggccttccgcagcccctgcctcccagcaactgcaatcactggaatctaaactcacctcagtaaggttcatgggtgatatggtctcgttcgaggaggaccgcatcaacgcaacggtttggaaactccaacctacagccggactgcaggacctgcacatccactcaagacaggaggaggaacaatctgagatcatggagtacagcgttctcctccccagaacactcttccaacgcacgaaagggaggtctggagaagccgagaagcgcttactactggtggacttctcgtcccaggccctgttccaggataagaactcttctcaggttctaggtgagaaggtactcggcattgtcgttcagaatactaaagtggctaacctcacagagcccgtcgtgctcaccttccagcatcagctccaacctaagaacgttaccctgcaatgcgttttctgggtggaggaccccaccctctcttctcccggtcactggagctcggctggttgcgaaaccgtgaggagagaaactcagactagctgcttctgtaatcacctcacatatttcgccgttctcatggtgagctccgttgaagttgacgccgtccataagcattacttatcattgctgtcctacgtggggtgcgtggtgtccgccctggcgtgcttagtgaccattgctgcttacttatgcagccgtcggaaacccagagactatactattaaggtacacatgaacctgctgctcgccgtgttcctgttagatacatcattcctcctgtccgagccagtggccctcaccgggtctgaagctggatgccgggcaagcgccatctttctgcatttctcacttctgacgtgtttgtcatggatgggtctcgaagggtacaacctttaccgtctggtcgtggaagtcttcggaacttacgttccgggataccttttgaaactgtcagccatgggttggggctttcccatctttctggtgactctagtagcgttagtggatgtggataactacggtcccatcatcctggccgtgcataggacccctgaaggcgttatttacccctccatgtgttggatacgagatagtttggtatcctacattactaatttggggctgttcagtcttgttttccttttcaatatggccatgcttgccacgatggtggtccagatcctgcggttgcgccctcatacccagaagtggtctcacgtcctcactttgttggggctgagcctggtgctgggcctgccttgggcactcatattctttagctttgctagcggcacctttcaacttgtagttttgtatctgttttccattattacttcatttcagggattcctcattttcatctggtattggtcaatgcggcttcaagcccgaggcggaccatcacccctgaaatctaattccgactccgctcggttgccgatttcttccggatcgacctcctcctctcggatttag

SEQ ID NO: 274089 - DNA, 1539 bp, Artificial Sequence
  derived and/or modified sequence
atgtgtgaactgaagcgtgatttgcagctcttgagtcaatttctgaagcacccacagaaggcttcacgcaggcctagtgcagcccctgcgagccagcagttgcagtctttggagtccaaactgacgagtgttagatttatgggggatatggtgtcgttcgaagaggaccgtattaatgccaccgtgtggaagctgcagccaactgctggtttgcaggaccttcatatccatagtcgccaagaggaagaacagtccgagataatggaatactccgtgctgctgcctagaaccctgttccagcgcaccaagggcaggagtggcgaagctgagaagcgactgctgctagttgatttcagctcacaggccctgttccaggataagaacagttcccaggtgttaggagaaaaagtactgggcatcgtggtccagaataccaaggtcgcaaatctcaccgaacccgtcgtacttactttccagcaccagttgcagccgaagaacgtgacactgcaatgcgtattctgggtggaggatcctacccttagtagccctggacactggagtagtgcaggctgcgagaccgtccgacgggagactcagacatcctgtttctgtaaccacctcacttatttcgccgttctcatggtttccagtgtggaagtggatgccgttcataaacattacctgtctctgctgagttatgtcgggtgtgtggtgtccgccctagcctgcctggtgactatcgcggcttatctgtgttcacgaaggaagcctcgcgactatacaatcaaggtgcacatgaacctcctgttggccgtgttcctgctcgatacgtccttcctcttgagtgagcctgtggccttgaccggttcggaggccggatgcagagcatcagcaatcttcttgcatttttcactgttaacctgcttgtcatggatggggttggagggctacaacctctatcgactcgtggtcgaagtcttcgggacttatgtgccaggctacctgcttaagctgtctgcaatgggctggggttttcctatattcctggtaaccctggtcgccttggttgatgtcgacaattatggccctattattcttgctgtgcaccggacccccgagggggtcatttacccatctatgtgctggatcagagatagccttgtgtcttatatcactaatctcggtctattctccctggtattcctgttcaatatggcaatgcttgccaccatggtggttcagattctgcgactgcgccctcacactcagaagtggtctcacgttctgacactcctcggcctgagtcttgttctgggcctgccctgggctttgatctttttcagcttcgcctcaggtactttccagctcgtagtgctgtacctgttcagtatcatcacgtccttccagggctttctgatctttatatggtactggtccatgaggctccaagcccgaggcggaccctctcccctgaaatctaactctgactccgcgagactgcccatctcttccggctcgacctcaagcagccggatctag

SEQ ID NO: 274090 - DNA, 2064 bp, Artificial Sequence
  derived and/or modified sequence
atgacaccccagagtctgctccagactacattgttcttgctttctctcctgttcctggtgcagggagcacacggacgcggtcatcgtgaggacttccgattttgttcacagaggaatcagacacataggagctccttacactacaagcccactccagaccttcgtatctctatagaaaactccgaggaagctcttacggtccacgcgcctttcccagcggcacatccagcttcacgatccttcccagatccaagaggcctgtaccatttttgtctgtactggaacagacacgccggtagattacatctgctgtacgggaagagagacttcctgctgtcagataaggcaagctcattgctctgttttcaacatcaggaagagtccctagcccagggacctccccttcttgccacaagcgtgacctcttggtggagtccccagaatatcagcctcccaagcgcagcttcatttactttttcgtttcattctcctcctcataccgcggctcataacgccagcgttgacatgtgcgagctgaagcgcgacctgcagctgctgagccagttcctgaagcatccccaaaaggctagccgaagacctagtgctgcaccagcctctcagcagctgcagagcctggaatctaaacttactagtgtgagattcatgggagacatggtgtcatttgaggaggaccgtataaatgccaccgtttggaagctgcagcctaccgctggccttcaggatctccacattcatagtcggcaggaggaggagcagagtgagattatggaatactctgtgctgcttccgcgtactctatttcaacgcactaagggacggagcggagaggctgagaagcgtctcctgctggtggacttctcatcccaagcgttgtttcaagacaaaaattcatcacaggtgctgggcgagaaagtcttgggcatcgttgtgcagaacaccaaggttgccaacctcacggagcctgtggtgttaacctttcagcatcagctgcaacccaagaatgtcactctgcagtgcgtgttttgggtagaggatccaaccttatcttctcccggtcactggtcaagtgcaggttgcgaaacggtgcgcagagagacccagacgtcttgcttctgtaaccatctgacttatttcgcggtgctgatggtgtcaagcgtagaggtggacgccgtgcataagcattacctcagcttactttcatatgtgggctgtgtcgtctccgccctcgcatgccttgtgacaatcgctgcctatttatgcagccggcgaaaacctcgcgactatacaataaaagtgcacatgaatcttcttctggcggtgtttcttttagataccagcttcctgctctccgaaccagttgccctcactggaagcgaagctggatgccgcgcaagcgcaatatttctccacttctctctgctaacatgtctaagttggatggggttggaaggctacaacctctatcgactggttgtagaagtgtttggaacatatgttccgggatacttactgaagctttcggcgatgggttgggggttccccattttcctcgtgacccttgtcgcccttgtagatgtggataactacggacccataattctcgctgtgcaccggacgcctgagggtgttatctatccttctatgtgctggattagagatagcctggtgagttacataacaaaccttggacttttttcccttgtgtttttattcaacatggctatgctggctactatggtagtgcagatactgcggctgcgtcctcacactcaaaaatggagtcacgttctgactctcctcggtttaagcctggtgctcggtttaccatgggcactgattttcttcagcttcgcatcaggcacctttcagctggtggttctctatttattctcaatcattacatcttttcaaggatttctaatttttatttggtattggagcatgaggctgcaggcccgagggggaccttcccccctgaagagcaattccgatagcgccagactccctatcagctcaggtagcacatcatcctcacgaatttag

SEQ ID NO: 274091 - DNA, 2064 bp, Artificial Sequence
  derived and/or modified sequence
atgactccccagtccctgttgcagaccactctgttcctgctttcgctactcttcctggtgcagggagcccacggcagaggacacagggaggacttcagattttgtagccagagaaaccagactcatcgcagcagtctgcactataaacctacaccagacctacgcattagtatcgagaatagcgaggaggccttaaccgtccacgctccctttcctgcggcacacccagcttcaaggtcttttcctgacccacggggactgtatcacttctgtttgtactggaataggcatgctggccgacttcatttgctgtacggtaagcgcgacttccttttgagcgacaaggcttctagcctcctctgtttccagcaccaagaggaatcactcgcacagggaccgcctttgctagccacgtccgtgacatcatggtggtcaccacagaacatctctttaccaagcgctgcatcctttaccttctctttccatagcccacctcacacagccgctcacaatgcctctgttgatatgtgtgagctaaagcgggatctgcagctgctctctcaatttctcaagcacccacagaaggccagcaggaggcccagcgcagctcctgcctctcagcagctgcaatccttagaatccaagctgacatccgtacgatttatgggggacatggtgtcttttgaagaagaccgcattaatgcaacggtgtggaaactacagccgacagccggacttcaggacctacacatacactcccgacaggaggaggagcagtctgaaattatggagtatagcgttttgctcccaagaacactgtttcagcggacgaaaggtcgctcaggcgaggccgagaagcggctcctactggtcgacttttcctcacaagcactcttccaggacaaaaatagctctcaggtcttaggtgagaaggtgctgggcatcgtggtgcagaacaccaaagtggctaatctgaccgagccagtggtcctaacctttcagcaccaactgcagccaaagaatgttaccctgcagtgtgtattttgggttgaggatcctaccctcagcagccccggtcattggagtagtgccggttgcgagactgtgagacgggagactcaaaccagctgtttttgtaatcacttaacctatttcgcggtgttgatggtgtcttccgtcgaggtagatgccgtacacaaacactacctgagcctcctctcgtacgtgggatgtgtagtatctgccttagcctgcctcgtgaccatcgcagcgtatctctgtagtagaagaaaaccccgtgattacacaatcaaggtgcatatgaatctgctgctggccgtgtttctcctcgacacttctttcctcctttctgagcccgtcgccttaacagggtctgaagccggatgtcgagccagtgccatttttctgcattttagtctactaacttgcctctcctggatgggcttagaaggatataacctgtacagactggtagtcgaggtgttcggaacttatgtacccggatacctgctgaagctgtccgctatgggttggggtttccccatttttttagtgactctcgtggcccttgttgatgtcgacaattacgggcctattattctggccgtgcacagaactccagaaggggtaatttatccatccatgtgttggatccgggactctctagtcagttatatcacaaatctgggtttgttcagcctagtctttctttttaacatggctatgctagccacgatggtggtacaaatcctgcgtctccgaccgcacacccaaaagtggtctcatgttctgacgctattggggctctctctggtgctgggattgccatgggccttaattttctttagtttcgcctctggcacgtttcagctggtcgtgctctacctgttctctatcattaccagttttcagggcttccttatattcatatggtactggtcaatgcggctgcaggcaagagggggaccgtcgccactcaaatcgaacagtgactccgcccgactgcctatctcctccggtagtacatctagctctaggatctag

SEQ ID NO: 274092 - DNA, 2064 bp, Artificial Sequence
  derived and/or modified sequence
atgaccccccagagcctgctgcagaccaccctgttcctgctgagcctgctgttcctggtgcagggcgcccacggcagaggccacagagaggacttcagattctgcagccagagaaaccagacccacagaagcagcctgcactacaagcccacccccgacctgagaatcagcatcgagaacagcgaggaggccctgaccgtgcacgcccccttccccgccgcccaccccgccagcagaagcttccccgaccccagaggcctgtaccacttctgcctgtactggaacagacacgccggcagactgcacctgctgtacggcaagagagacttcctgctgagcgacaaggccagcagcctgctgtgcttccagcaccaggaggagagcctggcccagggcccccccctgctggccaccagcgtgaccagctggtggagcccccagaacatcagcctgcccagcgccgccagcttcaccttcagcttccacagccccccccacaccgccgcccacaacgccagcgtggacatgtgcgagctgaagagagacctgcagctgctgagccagttcctgaagcacccccagaaggccagcagaagacccagcgccgcccccgccagccagcagctgcagagcctggagagcaagctgaccagcgtgagattcatgggcgacatggtgagcttcgaggaggacagaatcaacgccaccgtgtggaagctgcagcccaccgccggcctgcaggacctgcacatccacagcagacaggaggaggagcagagcgagatcatggagtacagcgtgctgctgcccagaaccctgttccagagaaccaagggcagaagcggcgaggccgagaagagactgctgctggtggacttcagcagccaggccctgttccaggacaagaacagcagccaggtgctgggcgagaaggtgctgggcatcgtggtgcagaacaccaaggtggccaacctgaccgagcccgtggtgctgaccttccagcaccagctgcagcccaagaacgtgaccctgcagtgcgtgttctgggtggaggaccccaccctgagcagccccggccactggagcagcgccggctgcgagaccgtgagaagagagacccagaccagctgcttctgcaaccacctgacctacttcgccgtgctgatggtgagcagcgtggaggtggacgccgtgcacaagcactacctgagcctgctgagctacgtgggctgcgtggtgagcgccctggcctgcctggtgaccatcgccgcctacctgtgcagcagaagaaagcccagagactacaccatcaaggtgcacatgaacctgctgctggccgtgttcctgctggacaccagcttcctgctgagcgagcccgtggccctgaccggcagcgaggccggctgcagagccagcgccatcttcctgcacttcagcctgctgacctgcctgagctggatgggcctggagggctacaacctgtacagactggtggtggaggtgttcggcacctacgtgcccggctacctgctgaagctgagcgccatgggctggggcttccccatcttcctggtgaccctggtggccctggtggacgtggacaactacggccccatcatcctggccgtgcacagaacccccgagggcgtgatctaccccagcatgtgctggatcagagacagcctggtgagctacatcaccaacctgggcctgttcagcctggtgttcctgttcaacatggccatgctggccaccatggtggtgcagatcctgagactgagaccccacacccagaagtggagccacgtgctgaccctgctgggcctgagcctggtgctgggcctgccctgggccctgatcttcttcagcttcgccagcggcaccttccagctggtggtgctgtacctgttcagcatcatcaccagcttccagggcttcctgatcttcatctggtactggagcatgagactgcaggccagaggcggccccagccccctgaagagcaacagcgacagcgccagactgcccatcagcagcggcagcaccagcagcagcagaatctag

SEQ ID NO: 274093 - DNA, 1539 bp, Artificial Sequence
  derived and/or modified sequence
atgtgcgagctgaagagagacctgcagctgctgagccagttcctgaagcacccccagaaggccagcagaagacccagcgccgcccccgccagccagcagctgcagagcctggagagcaagctgaccagcgtgagattcatgggcgacatggtgagcttcgaggaggacagaatcaacgccaccgtgtggaagctgcagcccaccgccggcctgcaggacctgcacatccacagcagacaggaggaggagcagagcgagatcatggagtacagcgtgctgctgcccagaaccctgttccagagaaccaagggcagaagcggcgaggccgagaagagactgctgctggtggacttcagcagccaggccctgttccaggacaagaacagcagccaggtgctgggcgagaaggtgctgggcatcgtggtgcagaacaccaaggtggccaacctgaccgagcccgtggtgctgaccttccagcaccagctgcagcccaagaacgtgaccctgcagtgcgtgttctgggtggaggaccccaccctgagcagccccggccactggagcagcgccggctgcgagaccgtgagaagagagacccagaccagctgcttctgcaaccacctgacctacttcgccgtgctgatggtgagcagcgtggaggtggacgccgtgcacaagcactacctgagcctgctgagctacgtgggctgcgtggtgagcgccctggcctgcctggtgaccatcgccgcctacctgtgcagcagaagaaagcccagagactacaccatcaaggtgcacatgaacctgctgctggccgtgttcctgctggacaccagcttcctgctgagcgagcccgtggccctgaccggcagcgaggccggctgcagagccagcgccatcttcctgcacttcagcctgctgacctgcctgagctggatgggcctggagggctacaacctgtacagactggtggtggaggtgttcggcacctacgtgcccggctacctgctgaagctgagcgccatgggctggggcttccccatcttcctggtgaccctggtggccctggtggacgtggacaactacggccccatcatcctggccgtgcacagaacccccgagggcgtgatctaccccagcatgtgctggatcagagacagcctggtgagctacatcaccaacctgggcctgttcagcctggtgttcctgttcaacatggccatgctggccaccatggtggtgcagatcctgagactgagaccccacacccagaagtggagccacgtgctgaccctgctgggcctgagcctggtgctgggcctgccctgggccctgatcttcttcagcttcgccagcggcaccttccagctggtggtgctgtacctgttcagcatcatcaccagcttccagggcttcctgatcttcatctggtactggagcatgagactgcaggccagaggcggccccagccccctgaagagcaacagcgacagcgccagactgcccatcagcagcggcagcaccagcagcagcagaatctag

SEQ ID NO: 274094 - DNA, 4659 bp, Artificial Sequence
  derived and/or modified sequence
actttcctgggaagttttcctctcgctgcggaacccccggggccctgactggccgcttcctccccgctggccgtagggagttttctgtccgacaccccctcttcctggccgggcagcctggcttcggcagacccccgggccatgtttccacacttgggcactggcatctctgagcatctcagtctcacctcctgagaacagcaagtgatcctggctaccccgggtaaccaggcctcaggtgcaggccccacatgacagatggacagactgaagtgggaggtgggaggcggacaccccggcgtcctgccaggaagggacaccatctgcacctggcgagctgtggcctccagccatcgtttccctgcctagttaggggcttttccctccagagccctgtccactctggccttgtttctggaactgctcctcacccggaggaccccatcctttccgtgaagcaggcagtgggggctttctggcaagtggcctcttcattaactatcccagagtgagtgcagatgaccagagggaagctggccaagtgcaaagcattgttattgtggaattaaagagcccgctcctgctcgcctccagaagtggtaatgtatttacagatgaaaaaatgagggcttccagactgtgctgatgtgagccccgccatccgttctggttcagagcataatcgtctcgtcttcagaaagaaggaagacagaacatgcctgccaagcccttcctctcttctgttctgctctcctggaaagttctggacttctctggcccagggcctcaggggactggccagccctgctcctgtgggcactgggcagagggacaaggcggaccacctgagcctgctggagggccggtatcccagggcagtagtgattagggaatgtcactctggccacatcccagcctgggcgggcctctatggggaggtccccgtttgatttggtttggttgtccacagtcagagccaagctctgggcatggagtctgggatggcaccctgaccccttgccttacaggactttgggcagccttctttggcactgtgcctcatctgtaacaagagaggaacagcgggctgggtaggacttggacagataggcactgtcgtggggacctgcagcctggccacaccatcacgggctctgagtcatctcctaccctctcccttgtagtcacagcccaggagaattctgctgggggtgggcagaggtctttgccatctgccccctacgtggctggctggcagatcaccgtggctctctctcctgggaccttgggcagtgtgtgaggtggtggggccaagaggagaattcatttttggaacagtcttgaagtgttcggaaaattgctttcatgtgctgaggaggccctgcggaggcttccagactgagctgcctgctcaagccctgcccttggaacccagagtggcgactgctcagggacacgtctgggttttaagcacacccatccatttgggcagtcttttcctagatgggctgacgcagcaggcactttggcccacagaaattataagatgcttcagaaggggatgggaggggaagcaggaacgtgctggccaaagcgctctatgacaatgtggccgagtccccggatgagctctccttccgcaagggtgacatcatgacggtgctggagcaggacacgcagggcctggacggctggtggctctgctcgctgcatgggcgccagggcatcgtgcctgggaaccgcctcaagatcttggtgggcatgtatgataagaagccagcagggcctggccccggccctcccgccaccccggcccagcctcagcctggcctccatgccccagcgcctccggcctcccagtacacgcccatgctccccaacacctaccagccccagccagacagcgtctacctggtgcccactcccagcaaggctcagcaaggcctctaccaagtcccgggtcccagccctcagttccagtctcccccagccaagcagacatccaccttctcgaagcagacaccccatcacccgtttcccagcccggccacagacctgtaccaggtgcccccagggcctggaggccctgcccaggatatttaccaggtgccaccttctgccgggatggggcatgacatctaccaggtccccccgtccatggacacacgcagctgggagggcacgaagcccccggcaaaggtggtggtgcccacccgcgtggggcagggctatgtatacgaggccgcccagccggagcaggacgagtacgacatcccgcgacacctgctggccccggggccacaggacatctatgatgtgcccccggttcgggggctgcttcccagccagtatggccaggaggtgtatgacacaccccccatggctgtcaagggtcccaatggccgagacccgttgctggaggtgtatgacgtgccccccagtgtggagaagggcctgccaccgtccaaccaccacgcagtctacgacgttcctccatcggtgagcaaggatgtgcccgatggcccactgctgcgtgaggagacctacgatgtgccccccgccttcgccaaggccaagccctttgacccggcccgcaccccactggtactggctgcgccccctccagactccccgccggccgaggacgtgtatgacgtgccgcccccggctcctgacctctacgacgtgccccctggcttgcggcggcctggcccgggcaccctgtacgatgtgccccgtgaacgggtgcttcctcctgaggtggctgatggtggcgtggtcgacagtggtgtgtatgcggtgcctcccccagctgaacgtgaagccccggcagagggcaagcgcctgtcggcctccagcaccggcagcacacgcagcagccagtctgcgtcctccttggaggtggcagggccgggccgggaacccctggagctggaagttgctgtggaggccctggcacggctgcagcagggtgtgagcgccaccgttgcccaccttctggacctggcaggcagcgccggtgcgactgggagctggcgtagcccctctgagccacaggagccgctggtgcaggacctgcaggctgctgtggccgctgtccagagtgccgtccacgagctgttggagtttgcccgcagcgcggtgggcaatgctgcccacacatctgaccgtgccctgcatgccaagcttagccggcagctgcagaagatggaggacgtgcaccagacgctggtggcacatggtcaggccctcgacgctggccggggaggctctggagccacccttgaggacctggaccggctggtggcctgctcgcgggctgtgcccgaggacgccaagcagctggcctccttcctgcacggcaatgcctcactgctcttcagacggaccaaggccactgccccggggcctgaggggggtggcaccctgcaccccaaccccactgacaagaccagcagcatccagtcacgacccctgccctcaccccctaagttcacctcccaggactcgccagatgggcagtacgagaacagcgaggggggctggatggaggactatgactacgtccacctacaggggaaggaggagtttgagaagacccagaaggagctgctggaaaagggcagcatcacgcggcagggcaagagccagctggagttgcagcagctgaagcagtttgaacgactggaacaggaggtgtcacggcccatagaccacgacctggccaactggacgccagcccaacccctggccccggggcgaacaggcggcctggggccctcggaccggcagctgctgctcttctacctggagcagtgtgaggccaacctgaccacactgaccaacgccgtggacgccttctttaccgccgtggccaccaaccagccgcccaagatctttgtggcgcacagcaagttcgtcatcctcagcgcccacaagctggtgttcatcggggacacactgtcacggcaggccaaggctgctgacgtgcgcagccaggtgacccactacagcaacctgctgtgcgacctcctgcgcggcatcgtggccaccaccaaggccgctgccttgcagtacccatcgccttccgcggcccaggacatggtggagagggtcaaggagctgggccacagcacccagcagttccgccgcgtcctaggccagctggcagccgcctgagggtggtgaccccaggagggaggcaggggaggggtgcggcggtcccagctccctggctcccatgtcaagagtcgctgtgccacaggcttagggacaggaccccagctctgcgtcggtcctggtgccctggatgcccaggaatctgtatatatttatggccgggcagggtgtggggccatgcctcctcaggagccgaagcccaggggccggccagtggccttccccagcatgcaccacgggcccgggttgggtcaccagacggggctggagtgtgagggtcctgcagcctgcaggacctcgtgccaccccgagggctgagcctggtcccacgagggtgccgtgtcccctgacagggccagtgcagtttggtgtgtcctccgccttaccaggagaagaacctgaagaactatttttcgttattggttttccaatcatttgactaagagtctccatttaaataaagtttttaaaaggaagagc

SEQ ID NO: 274095 - protein, 841 aa, Artificial Sequence
  derived and/or modified sequence
MTVLEQDTQGLDGWWLCSLHGRQGIVPGNRLKILVGMYDKKPAGPGPGPPATPAQPQPGLHAPAPPASQYTPMLPNTYQPQPDSVYLVPTPSKAQQGLYQVPGPSPQFQSPPAKQTSTFSKQTPHHPFPSPATDLYQVPPGPGGPAQDIYQVPPSAGMGHDIYQVPPSMDTRSWEGTKPPAKVVVPTRVGQGYVYEAAQPEQDEYDIPRHLLAPGPQDIYDVPPVRGLLPSQYGQEVYDTPPMAVKGPNGRDPLLEVYDVPPSVEKGLPPSNHHAVYDVPPSVSKDVPDGPLLREETYDVPPAFAKAKPFDPARTPLVLAAPPPDSPPAEDVYDVPPPAPDLYDVPPGLRRPGPGTLYDVPRERVLPPEVADGGVVDSGVYAVPPPAEREAPAEGKRLSASSTGSTRSSQSASSLEVAGPGREPLELEVAVEALARLQQGVSATVAHLLDLAGSAGATGSWRSPSEPQEPLVQDLQAAVAAVQSAVHELLEFARSAVGNAAHTSDRALHAKLSRQLQKMEDVHQTLVAHGQALDAGRGGSGATLEDLDRLVACSRAVPEDAKQLASFLHGNASLLFRRTKATAPGPEGGGTLHPNPTDKTSSIQSRPLPSPPKFTSQDSPDGQYENSEGGWMEDYDYVHLQGKEEFEKTQKELLEKGSITRQGKSQLELQQLKQFERLEQEVSRPIDHDLANWTPAQPLAPGRTGGLGPSDRQLLLFYLEQCEANLTTLTNAVDAFFTAVATNQPPKIFVAHSKFVILSAHKLVFIGDTLSRQAKAADVRSQVTHYSNLLCDLLRGIVATTKAAALQYPSPSAAQDMVERVKELGHSTQQFRRVLGQLAAA

SEQ ID NO: 274096 - protein, 819 aa, Artificial Sequence
  derived and/or modified sequence
MDTEGFGELLQQAEQLAAETEGISELPHVERNLQEIQQAGERLRSRTLTRTSQETADVKASVLLGSRGLDISHISQRLESLSAATTFEPLEPVKDTDIQGFLKNEKDNALLSAIEESRKRTFGMAEEYHRESMLVEWEQVKQRILHTLLASGEDALDFTQESEPSYISDVGPPGRSSLDNIEMAYARQIYIYNEKIVNGHLQPNLVDLCASVAELDDKSISDMWTMVKQMTDVLLTPATDALKNRSSVEVRMEFVRQALAYLEQSYKNYTLVTVFGNLHQAQLGGVPGTYQLVRSFLNIKLPAPLPGLQDGEVEGHPVWALIYYCMRCGDLLAASQVVNRAQHQLGEFKTWFQEYMNSKDRRLSPATENKLRLHYRRALRNNTDPYKRAVYCIIGRCDVTDNQSEVADKTEDYLWLKLNQVCFDDDGTSSPQDRLTLSQFQKQLLEDYGESHFTVNQQPFLYFQVLFLTAQFEAAVAFLFRMERLRCHAVHVALVLFELKLLLKSSGQSAQLLSHEPGDPPCLRRLNFVRLLMLYTRKFESTDPREALQYFYFLRDEKDSQGENMFLRCVSELVIESREFDMILGKLENDGSRKPGVIDKFTSDTKPIINKVASVAENKGLFEEAAKLYDLAKNADKVLELMNKLLSPVVPQISAPQSNKERLKNMALSIAERYRAQGISANKFVDSTFYLLLDLITFFDEYHSGHIDRAFDIIERLKLVPLNQESVEERVAAFRNFSDEIRHNLSEVLLATMNILFTQFKRLKGTSPSSSSRPQRVIEDRDSQLRSQARTLITFAGMIPYRTSGDTNARLVQMEVLMN

SEQ ID NO: 274097 - protein, 696 aa, Artificial Sequence
  derived and/or modified sequence
MAEEYHRESMLVEWEQVKQRILHTLLASGEDALDFTQESEPSYISDVGPPGRSSLDNIEMAYARQIYIYNEKIVNGHLQPNLVDLCASVAELDDKSISDMWTMVKQMTDVLLTPATDALKNRSSVEVRMEFVRQALAYLEQSYKNYTLVTVFGNLHQAQLGGVPGTYQLVRSFLNIKLPAPLPGLQDGEVEGHPVWALIYYCMRCGDLLAASQVVNRAQHQLGEFKTWFQEYMNSKDRRLSPATENKLRLHYRRALRNNTDPYKRAVYCIIGRCDVTDNQSEVADKTEDYLWLKLNQVCFDDDGTSSPQDRLTLSQFQKQLLEDYGESHFTVNQQPFLYFQVLFLTAQFEAAVAFLFRMERLRCHAVHVALVLFELKLLLKSSGQSAQLLSHEPGDPPCLRRLNFVRLLMLYTRKFESTDPREALQYFYFLRDEKDSQGENMFLRCVSELVIESREFDMILGKLENDGSRKPGVIDKFTSDTKPIINKVASVAENKGLFEEAAKLYDLAKNADKVLELMNKLLSPVVPQISAPQSNKERLKNMALSIAERYRAQGISANKFVDSTFYLLLDLITFFDEYHSGHIDRAFDIIERLKLVPLNQESVEERVAAFRNFSDEIRHNLSEVLLATMNILFTQFKRLKGTSPSSSSRPQRVIEDRDSQLRSQARTLITFAGMIPYRTSGDTNARLVQMEVLMN

SEQ ID NO: 274098 - DNA, 2460 bp, Artificial Sequence
  derived and/or modified sequence
atggatacagaggggttcggcgaattattacagcaggcagagcagcttgctgctgaaacggaaggtatctccgagctccctcatgtggaaagaaaccttcaagagatccagcaggccggcgaaagattgcggtcacggacactcacccgcacctctcaggaaacggcagatgtcaaggcttccgtcctgttagggtctagagggttggacatcagccacatctcccaacgactcgagagcctgtcggcagccacaaccttcgagcccctcgagcctgtgaaagacactgatattcaaggattcctaaagaacgagaaggataacgctttgttgtctgcaattgaggagtctcgtaagcgcacattcggaatggccgaggaatatcatcgcgagtccatgttagtggagtgggaacaggtgaagcaaaggattcttcacaccctcctcgctagtggggaagatgcactcgactttacccaagagtccgagcctagctacattagcgacgtaggcccacccggacgtagttctttagacaacattgaaatggcctacgcccggcaaatttatatctacaacgagaagatcgtgaatgggcacctccagcccaacctggtggatctatgcgcgagcgtggccgagctagatgataagagcatcagcgatatgtggaccatggtgaagcagatgacggatgttctgctgactcccgccactgatgcacttaagaaccgttctagtgttgaggtgcgaatggagttcgtcagacaggctctcgcatatttggagcagtcatacaagaactatacactggtcaccgtgtttgggaacctccatcaggcccagttggggggagtgccgggaacataccaacttgtgaggtccttcctgaatatcaaactaccagcccctttgccaggcctgcaggacggtgaggtcgaagggcatccggtttgggctctgatttattactgcatgcgctgtggcgatctcctagctgcgagccaggtggtgaacagggctcaacatcagcttggcgagtttaagacttggttccaggaatatatgaactcaaaggacagaagactttctcctgccaccgaaaataagctcaggctgcactaccggagagccctgaggaataatactgacccatacaagcgtgccgtatactgcatcatcggcagatgtgacgttacagacaatcaaagcgaggtggctgataagaccgaggactacctgtggttaaaactgaaccaggtttgtttcgatgacgatggcactagcagccctcaggacagacttactctgtcacagttccaaaagcagctgctggaggattatggggaatcacatttcacagtgaatcaacagccattcctttactttcaagttttgttcctaaccgcccagtttgaggcggcagtggcattcctattcagaatggagaggctaaggtgccatgcagtccacgtcgctctggtgctatttgagctcaagctactgctaaagtcttccggccaaagcgcccaactgttgtcccatgagccgggggatcctccttgcctacgacgattgaactttgtgagactgttaatgctatacacacgcaagttcgagagcactgatccccgggaagccctgcagtatttttacttccttagagacgaaaaggacagtcaaggcgagaatatgttccttagatgtgtttctgaattagtcatcgaatcacgcgaattcgacatgatcctcggaaaactggaaaatgacggatcccggaagccaggggtaattgacaagttcacgagcgataccaaacctattatcaacaaggtagcaagtgtcgcagaaaataaagggctattcgaagaagctgctaagttatatgacttggccaaaaatgccgacaaggtcctggaacttatgaataagttattatctcctgtcgtgcctcaaatttcggcccctcagagtaacaaggaaaggttgaagaatatggcgctgtctattgcagagagataccgcgcccagggcatatccgctaacaagtttgtggattcaacgttttacctgctccttgatctgattactttttttgatgagtaccacagcgggcatatcgaccgtgccttcgatatcatagagagacttaagctggtccccctgaaccaggaatctgtggaggagagggtggcagcattcaggaatttctcggacgagatacggcacaatttatctgaggtgttactcgcgacaatgaacatcttgtttacccagttcaagaggttaaagggcactagcccaagctcttcctcacgcccgcagcgggtgattgaggatagggatagccagctgcggtcccaagctcgcaccctgattaccttcgccggaatgattccttatcggacctccggcgataccaatgcccgcctagttcagatggaagtcctgatgaactag

SEQ ID NO: 274099 - DNA, 2091 bp, Artificial Sequence
  derived and/or modified sequence
atggcagaagagtaccaccgggaatcaatgctcgtcgagtgggaacaggtcaagcagagaattctccacacactgttggcctctggcgaagacgccctggatttcacacaggaaagcgagccaagctatatcagtgatgtgggccctccagggcggtccagcctggacaacatagaaatggcatacgcccggcagatctatatctataacgagaaaatcgtcaatggacaccttcagcctaatcttgtggacctgtgcgcttctgttgccgaacttgacgacaagagtatcagcgatatgtggactatggtcaagcagatgacagatgtcttgcttactcccgcgacggatgctctgaagaacagatcgagcgtggaggtgagaatggagttcgtgagacaagcccttgcttacctcgagcaatcttataaaaattacactttggttaccgttttcgggaacttacaccaggctcaactggggggtgtgcctgggacctaccaacttgttcggtctttcctgaatattaagctacccgcccctctgcccggactgcaggatggcgaagtggaaggacatccagtttgggctctgatttactattgcatgcgctgcggggatctcctagctgcttcgcaagtggtgaatcgagcccaacaccagctcggcgagttcaaaacatggtttcaggagtatatgaattcaaaagatagaagacttagcccagcaacagagaacaagctgcggttgcactatagaagagctttacgaaacaacaccgacccctataagcgagcagtttactgtatcatcggccgctgtgacgtcactgataatcagagtgaggtggcagataagactgaagactacctgtggctgaaactgaaccaagtgtgttttgacgacgacggcacttcttcgccccaagaccggttaacgctctcccaattccaaaagcagctcctcgaagattatggggagtcccacttcacagttaaccagcagccatttctttactttcaggtcctgtttctgaccgcacagtttgaagctgccgtggctttcctttttaggatggagcgactgcgctgccacgctgttcacgtggcactcgtcttattcgagctgaagctgctgttaaaatcttctggacagtccgctcaactgctcagccacgagcccggagaccccccctgtctgagacgcttgaatttcgtgcgcttgctcatgctatatacgcgaaagttcgaatcgacggaccctagggaggcccttcagtacttctattttctgagagacgaaaaggatagtcagggtgaaaacatgttcctcagatgcgtcagcgagctggttatcgaaagcagggaatttgatatgatcctggggaagctggagaatgacggatctagaaagcctggcgtcatagacaagtttacctcagacacaaaacctatcatcaacaaagtcgcctctgttgcggagaacaagggcctcttcgaagaagcggctaagctgtatgacttggccaagaacgctgacaaggttctagaacttatgaacaaactgctgtctcctgtcgtaccccagatttccgctccgcagtccaacaaggaacggttaaagaacatggctttaagtattgccgaaagataccgagcccagggaatctccgcaaacaagtttgtcgatagcacgttctatctactcctggacttgattacgttctttgatgagtaccactccggccacatagacagagccttcgacattatagagcgactgaagctggtcccactgaaccaagagtccgtggaggagagagtcgccgcattccgcaatttcagcgatgagataagacacaacttgagcgaggtcttattggccaccatgaacattctctttactcaatttaaaagactgaaggggacgtctcccagttcctcttcccgccctcagcgggttattgaggatcgggacagccagctgaggtcacaggccaggaccctcatcacctttgcggggatgattccgtacaggactagtggcgacaccaacgcacgtctggtccaaatggaagtactcatgaactag

SEQ ID NO: 274100 - DNA, 2091 bp, Artificial Sequence
  derived and/or modified sequence
atggcagaggaatatcacagggaatcaatgctggtggagtgggaacaagttaagcagcgcatcttgcacacactgctggctagtggggaggacgcccttgattttacacaagaatcggaaccttcatatatctctgatgtgggccccccgggccgttcttctcttgataacatcgagatggcctatgctcgacagatttacatctataatgagaagatagttaacggtcacctgcagcctaacttggtggatctgtgcgcgtccgtcgctgagctcgacgataagagcataagcgacatgtggacaatggtgaagcaaatgactgatgtgttgctgacgcctgcaactgacgctctgaaaaatagaagctcagtggaagtacgcatggaatttgtgcggcaggcgctggcctatctcgagcaatcatacaaaaactacacactcgttaccgtctttggcaatctgcatcaggctcagctcggaggggtccctggtacatatcagttggtccgctcctttcttaatattaagctgcccgcccctctgccaggactgcaagacggcgaggtggagggccatcccgtgtgggctcttatctactactgcatgcgttgcggggacctcctcgctgcatcccaagttgtaaacagggctcagcaccaactaggtgaattcaaaacctggttccaggaatacatgaatagcaaggaccgacgcctatccccagcgacagagaacaaattgcgacttcactaccggcgcgcattgaggaataacaccgacccatataagcgggccgtgtactgtataattggacgctgtgatgtgaccgataatcagagcgaagtcgcagataagacggaggactatctctggctgaagctgaaccaggtgtgctttgacgatgacgggaccagcagtccccaggaccgtctcacccttagccagtttcaaaagcagcttctggaagactatggagaatcccactttactgtgaaccaacagccttttctctatttccaggtcttgtttctgactgctcagttcgaggcagccgttgcattcttgttccgcatggagaggcttcggtgccatgcagtgcacgtggccctcgtcctgttcgaactcaaactcttactgaagtcatctggccagtcagcgcagcttctaagtcatgagccaggcgatcccccatgcctgcgcaggctcaacttcgtgcgcctgctcatgctgtacacaagaaagtttgagtccactgatccccgggaggccctccaatacttctacttcttacgcgatgagaaggactctcagggagagaatatgtttcttcggtgcgtcagtgaattagtaatcgagtcaagggagttcgacatgatcctgggcaagctcgagaacgatggaagtaggaaacccggcgtgattgataaattcacctccgataccaaaccaatcatcaacaaggtcgcgagtgttgccgagaacaaagggttattcgaggaggctgctaagttgtacgacctggctaagaacgccgataaagttctggagctgatgaacaaactcctgagtccagtcgtgcctcaaatctctgcaccgcagtctaataaggaaagactgaagaatatggccctatcgatcgcagaacggtatcgtgcccaggggatttctgcaaacaagtttgtggactcaaccttttatctactactcgatctaatcactttcttcgacgagtaccattccggacacatagatagagcattcgatattatcgagagattgaagttagtaccattgaatcaggagagcgtggaggagcgcgtggccgccttcagaaacttttctgacgagatcaggcacaacctgtctgaagtgctgctggctacaatgaacattctgttcactcaattcaagcggctgaagggaacatcaccttcttcgagttctcgcccacagagagtcatcgaggacagagattcacagctgagaagccaggcccggactctcatcacattcgcagggatgattccatatcggacatccggcgacactaatgctcgccttgttcagatggaagtgctgatgaactag

SEQ ID NO: 274101 - DNA, 2460 bp, Artificial Sequence
  derived and/or modified sequence
atggacacagagggctttggagagctgctgcagcaggccgagcagctggccgctgagacagagggcatcagcgagctgccccacgtggagaggaacctgcaggagatccagcaggccggggagcggctgcggagcaggaccctgaccaggaccagccaggagacagcagatgtgaaggcctctgtgctgctgggcagccggggcctggacatcagccacatcagccagaggctggagagcctgtctgctgccaccacctttgagcccctggagcctgtgaaggacacagacatccagggcttcctgaagaatgagaaggacaatgccctgctgagcgccatcgaggagagcaggaagaggaccttcggcatggccgaggagtaccaccgggagagcatgctggtggagtgggagcaggtgaagcagaggatcctgcacaccctgctggccagcggagaagatgccctggacttcacccaggagagcgagcccagctacatcagtgatgtgggccccccaggccgcagcagcctggacaacatcgagatggcctatgcccggcagatctacatctacaatgagaagatcgtgaatggccacctgcagcccaacctggtggacctgtgtgcctctgtggccgagctggatgacaagagcatcagtgacatgtggaccatggtgaagcagatgacagatgtgctgctgaccccagccacagatgccctgaagaacagaagctctgtggaggtgaggatggagtttgtgcggcaggccctggcctacctggagcagagctacaagaactacaccctggtgacagtgtttggaaacctgcaccaggcccagctgggcggcgtgcccggcacctaccagctggtgcgctccttcctgaacatcaagctgcctgcccccctgcccggcctgcaggatggagaggtggagggccaccctgtgtgggccctgatctactactgcatgagatgtggggacctgctggccgccagccaggtggtgaacagagcccagcaccagctgggggagttcaagacctggttccaggagtacatgaacagcaaggaccggcggctgagccctgccacagagaacaagctgcggctgcactaccgccgggccctgaggaacaacacagacccctacaagagagctgtgtactgcatcatcggccgctgtgatgtgacagacaaccagagcgaggtggccgacaagacagaggactacctgtggctgaagctgaaccaggtgtgctttgatgatgatggcaccagcagcccccaggaccggctgaccctgagccagttccagaagcagctgctggaggactatggagagagccacttcaccgtgaaccagcagcccttcctgtacttccaggtgctcttcctgacagcccagtttgaggccgctgtggccttcctgttcaggatggagcggctgcgctgccacgctgtgcacgtggccctggtgctgtttgagctgaagctgctgctgaagagcagcggccagagcgcccagctgctgagccatgagcccggggaccccccctgcctgcggcggctgaactttgtgcggctgctgatgctgtacaccaggaagtttgagagcacagacccccgggaggccctgcagtacttctacttcctgagagatgagaaggacagccagggcgagaacatgttcctgcgctgtgtgtctgagctggtgattgagagccgggagtttgacatgatcctgggcaagctggagaatgatggcagcaggaagccaggagtcatcgacaagttcaccagtgacaccaagcccatcatcaacaaggtggcctctgtggctgaaaataaaggcctgtttgaggaggccgccaagctgtatgacctggccaagaatgctgacaaggtgctggagctgatgaacaagctgctgagccctgtggtgccccagatcagcgccccccagagcaacaaggagcggctgaagaacatggccctgagcattgctgagcgctaccgggcccagggcatcagcgccaacaagtttgtggacagcaccttctacctgctgctggacctgatcaccttctttgatgagtaccacagcggccacatcgaccgggcctttgacatcatcgagcggctgaagctggtgcccctgaaccaggagagcgtggaggagcgggtggccgccttcaggaacttcagtgatgagatccgccacaacctgtctgaggtgctgctggccaccatgaacatcctcttcacccagttcaagaggctgaagggcaccagccccagcagcagcagccggccccagagggtgattgaagatcgggacagccagctgcggagccaggcccggaccctcatcacctttgctggcatgatcccctaccgcaccagcggggacaccaatgcccggctggtgcagatggaggtgctgatgaactag

SEQ ID NO: 274102 - DNA, 2091 bp, Artificial Sequence
  derived and/or modified sequence
atggccgaggagtaccaccgggagagcatgctggtggagtgggagcaggtgaagcagaggatcctgcacaccctgctggccagcggggaggatgccctggacttcacccaggagagcgagcccagctacatcagtgatgtgggccccccaggccgcagcagcctggacaacatcgagatggcctatgcccggcagatctacatctacaatgagaagatcgtgaatggccacctgcagcccaacctggtggacctgtgtgcctctgtggccgagctggatgacaagagcatcagtgacatgtggaccatggtgaagcagatgacagatgtgctgctgaccccagccacagatgccctgaagaacagaagctctgtggaggtgaggatggagtttgtgcggcaggccctggcctacctggagcagagctacaagaactacaccctggtgacagtgtttggaaacctgcaccaggcccagctgggcggcgtgcccggcacctaccagctggtgcgctccttcctgaacatcaagctgcctgcccccctgcccggcctgcaggatggagaggtggagggccaccctgtgtgggccctgatctactactgcatgagatgtggggacctgctggccgccagccaggtggtgaacagagcccagcaccagctgggggagttcaagacctggttccaggagtacatgaacagcaaggaccggcggctgagccctgccacagagaacaagctgcggctgcactacagaagagccctgaggaacaacacagacccctacaagagagctgtgtactgcatcatcggccgctgtgatgtgacagacaaccagagcgaggtggccgacaagacagaggactacctgtggctgaagctgaaccaggtgtgctttgatgatgatggcaccagcagcccccaggaccggctgaccctgagccagttccagaagcagctgctggaggactatggagagagccacttcaccgtgaaccagcagcccttcctgtacttccaggtgctcttcctgacagcccagtttgaagctgctgtggccttcctgttcaggatggagcggctgcgctgccacgctgtgcacgtggccctggtgctgtttgagctgaagctgctgctgaagagcagcggccagagcgcccagctgctgagccatgagcccggggaccccccctgcctgcggcggctgaactttgtgcggctgctgatgctgtacaccaggaagtttgagagcacagacccccgggaggccctgcagtacttctacttcctgagagatgagaaggacagccagggcgagaacatgttcctgcgctgtgtgtctgagctggtgattgagagccgggagtttgacatgatcctgggcaagctggagaatgatggcagcaggaagccaggagtgattgacaagttcaccagtgacaccaagcccatcatcaacaaggtggcctctgtggccgagaacaagggcctgtttgaggaggccgccaagctgtatgacctggccaagaatgctgacaaggtgctggagctgatgaacaagctgctgagccctgtggtgccccagatcagcgccccccagagcaacaaggagcggctgaagaacatggccctgagcattgctgagcgctaccgggcccagggcatcagcgccaacaagtttgtggacagcaccttctacctgctgctggacctgatcaccttctttgatgagtaccacagcggccacatcgaccgggcctttgacatcatcgagcggctgaagctggtgcccctgaaccaggagagcgtggaggagcgggtggccgccttcaggaacttcagtgatgagatccgccacaacctgtctgaggtgctgctggccaccatgaacatcctcttcacccagttcaagaggctgaagggcaccagccccagcagcagcagccggccccagagggtgattgaggaccgggacagccagctgcggagccaggcccggaccctcatcacctttgctggcatgatcccctaccgcaccagcggggacaccaatgcccggctggtgcagatggaggtgctgatgaactag

SEQ ID NO: 274103 - DNA, 2460 bp, Artificial Sequence
  derived and/or modified sequence
atggacaccgagggcttcggcgagctgctgcagcaggccgagcagctcgcggctgagacagaaggaattagtgagctcccacacgttgaaagaaacctgcaggaaattcagcaggctggagagaggttgaggtcccgcactttgactagaacatcccaggaaactgcggatgtgaaggcttccgtgcttctcggtagccgcggcctggacatcagtcatatatcccagcggctcgaatcactctcggcagcaacaaccttcgaacccctagaacctgtgaaagacacagatatccaggggtttctgaaaaatgagaaggataatgctctgttatccgctattgaggagtctaggaagcggacattcgggatggccgaggagtatcacagagaaagcatgttggtcgaatgggagcaggtgaagcagcggatactacacacactgcttgcaagcggcgaggacgctttagattttactcaggaatcagaaccaagctacattagcgacgtggggcctcctgggcgtagctctcttgacaacatagaaatggcctacgctcggcaaatttatatctataatgaaaagattgtgaatgggcatttgcagcctaacctggtggatctttgcgccagtgtggccgagctcgacgataagagcatttcagacatgtggacaatggtcaagcagatgacggatgttctgctgacaccggctactgacgctctgaaaaatagatccagtgtcgaagtgagaatggagttcgtacgccaagcacttgcttacttggagcagtcctataagaattataccctcgtcaccgtttttggtaacctgcatcaggcccaactcggcggcgtgcctggaacctaccaactagtgcgatccttcctgaatataaagctccctgctcccctcccaggtttgcaggatggcgaagtagagggccatcccgtctgggctctgatctactattgtatgaggtgtggagaccttctcgcagccagtcaggttgtaaatcgagcccagcatcagctgggagagttcaagacgtggttccaggaatatatgaactctaaggatcgtagactcagccctgccactgaaaataagctccgcctacattacaggcgggctctgcggaacaatactgatccatataagcgggccgtttactgcatcattggccgatgcgacgtgaccgacaatcagagcgaagttgcagacaagaccgaagactatctgtggctcaaacttaatcaggtctgctttgatgacgacggtacaagctccccacaggacaggttgacactgagccagttccagaaacagttgttggaggattacggtgaaagtcatttcaccgtcaaccagcaaccattcctgtacttccaggtcctatttctgactgcccagttcgaggccgcggtggcctttctgttcaggatggaacgcttaaggtgccatgccgttcatgttgccttagtattgttcgaattgaagctgctgttgaaatcctcgggccagtccgcccagctgttgtcccatgaacctggggatcccccttgcctgagaaggctgaatttcgtaaggctgctcatgctgtatacccgcaaattcgagtctacggacccccgtgaagctctgcagtatttctattttcttagagacgaaaaggattctcagggcgaaaacatgttcctgcgatgcgtgtcggaactggtgatcgagagtagagagtttgatatgatcctggggaagctggagaacgacggcagtcggaagcctggcgtgatcgataagtttacctccgataccaagccaattattaacaaggtggcctcagttgcggagaacaagggactttttgaggaggccgcaaaactgtacgatctagctaaaaatgccgataaagtgctggaactgatgaataaactgctttcccctgtggtcccacagatcagcgccccgcagagcaacaaggaaaggttgaagaacatggccctttctatcgctgaaaggtatcgcgctcaggggatctccgcaaacaaatttgtagacagcacattttatttgctgcttgatttaatcacattctttgatgaataccatagtggacacatcgaccgggcgttcgacatcatagaaagacttaagctagtgcctcttaatcaggaatccgttgaggagcgcgtggccgcttttaggaacttctcagatgaaattcgtcataatctcagcgaggtcctgctagccaccatgaacattctctttactcagttcaaaaggttgaaaggcaccagcccaagcagtagttcaagaccacagagggtaattgaagatcgagacagccagttacgcagccaagcccgcactctgataacttttgcgggaatgattccctaccggacgtcaggtgatacgaatgccaggctggtccagatggaggtactgatgaactag

SEQ ID NO: 274104 - DNA, 2091 bp, Artificial Sequence
  derived and/or modified sequence
atggccgaggagtaccaccgggagagcatgctggtggagtgggagcaagtcaaacaaaggattcttcacaccctcttggcttccggtgaagacgcactggactttactcaggaaagcgaaccttcttacatttccgacgtgggtcctcctgggcggagctccctggataatatagaaatggcctacgcccgtcagatatacatatataatgagaagattgttaatgggcacttgcagcctaacttggtcgatctctgtgctagtgtggccgagctggatgacaagtccatttcggatatgtggaccatggtgaagcagatgactgacgttctactgacacccgcaaccgatgccctgaagaaccgctcgtccgtggaagtgcgaatggagttcgttagacaggcacttgcctacctcgagcagagttacaaaaactacaccctcgttacggtcttcgggaaccttcaccaggcccagcttggcggcgttcctggaacatatcaactggtccggagttttctgaacatcaagctacctgcccccctgcccgggctccaagatggcgaggtggaggggcatccagtgtgggctctcatctattactgcatgagatgtggggacctgctggccgcttctcaagtggtcaaccgtgcgcagcatcagcttggggagttcaagacatggttccaggaatatatgaacagcaaggaccgccggctttccccagcaactgaaaacaagctcagactccattatagaagggccctacgcaacaataccgacccttataagagagctgtgtattgtatcattggaaggtgcgatgtgactgacaaccaatcagaagttgccgacaaaaccgaagattacctctggctgaagctgaatcaggtgtgtttcgacgacgacggaaccagcagcccccaagacagactgaccctctcccagttccaaaaacagctgctggaggattatggggagtcccactttacagttaatcagcagcccttcctatattttcaagttctgttcctcactgcccaattcgaagcggcagtggcattcctcttccggatggagagacttcgttgtcacgccgtccacgtagccttagttttatttgaactgaagcttcttctgaaatcatctgggcaaagcgctcaactgctcagccacgagcccggggaccctccatgcttgaggcgactgaattttgtaagactgctgatgctttataccaggaagttcgaatcgactgatccacgggaagcactccagtatttctattttcttagggatgagaaagacagccagggggaaaatatgtttctgcgttgtgtaagtgagcttgttatcgagtctcgggaattcgatatgatactcggcaagttggaaaacgacggttcccggaagccaggcgtgatcgacaagtttaccagcgacacaaaaccgatcatcaataaggtcgcatcggttgcagaaaacaaaggacttttcgaagaggctgctaagctttacgaccttgccaagaatgctgacaaagtgctagagttgatgaacaagctgttgtccccggtcgtgccccagatctccgccccacagtctaacaaggaaagattgaaaaatatggcactgtcaatagccgaacgctatagagcccaggggatctccgcgaataagtttgttgatagcacattctatttattgctcgatctgattacctttttcgatgagtatcattcaggacacatcgaccgcgcttttgatatcatcgagagactcaaacttgtcccgctgaatcaagagtctgtcgaggagcgcgtcgccgctttccgaaatttttccgatgagattagacacaatttgagcgaagtgctgctggctacaatgaatatcctgtttacacagttcaagcgcctaaaagggacctccccaagctctagcagccgcccccagcgagtgatcgaggatcgggacagtcaacttcgaagccaggcgcgaacattaattactttcgcgggaatgatcccttataggacaagcggagatactaacgcgagactagtacagatggaagtgcttatgaactag

SEQ ID NO: 274105 - DNA, 2091 bp, Artificial Sequence
  derived and/or modified sequence
atggccgaggagtaccaccgggagagcatgctggtggagtgggagcaggtcaagcaacgtattctgcacactctgctggccagcggcgaggatgcactggactttacacaggaatcagagcccagctatatcagcgatgtggggccccctggaagaagttcccttgacaatattgaaatggcttatgcaagacaaatctacatatataatgaaaagattgtgaacggacatcttcagcctaatctcgtggatttgtgtgcctctgtcgcggaactcgatgacaagagtatctcagacatgtggaccatggttaaacagatgactgacgttctgctaacgcccgcaaccgatgcactgaagaacagatctagtgtggaagtccgcatggaattcgtgaggcaggccctggcttatctcgagcaaagctacaaaaattatacccttgtgaccgtgttcgggaacttgcatcaggcccagctggggggggtgccgggaacgtaccagctcgtccggtcctttctgaatattaagctgcctgctccactacctggtctgcaagatggcgaagtcgagggtcatccagtttgggcactgatctattactgcatgagatgcggcgacctgttggcggcttcacaggtcgtcaatcgcgctcagcaccaattgggcgaattcaaaacctggttccaggaatacatgaatagcaaggacaggcggctgtctccagcaaccgagaacaagctacgccttcactatagaagggctctgcggaataatacagatccttacaagcgggccgtgtattgtatcattgggagatgtgatgtcaccgataaccaatccgaggtggcagataagacagaagattacttatggttaaagttaaaccaagtctgcttcgatgacgatggcacaagcagccctcaggaccggctgactttgtcacagtttcagaagcaactgctggaggattatggcgagagccacttcacagtgaatcagcagccatttttgtatttccaggttctgtttctgaccgcacagttcgaagccgccgtggcatttctgttccggatggaaagactgaggtgtcatgcggtgcatgtggcccttgttttgttcgaactaaagctcctcttgaaatcaagcgggcaatccgcccagctcttatcgcatgagccaggcgacccaccctgcttgcggcgactgaatttcgtgaggcttctgatgctctacacgcgcaagttcgagtcaacagaccccagggaggccctccagtatttctacttcctcagagacgaaaaagactcccagggcgaaaacatgtttctgcgctgcgtaagcgagctggtgatcgagtcacgggaatttgacatgattctgggaaaactggagaatgatgggtctagaaagccaggcgtcatagacaaatttacctcagacaccaagcctatcatcaataaagtcgccagcgttgctgagaacaaaggactgtttgaggaggcggcgaaactctatgatttagccaagaacgctgataaggtgttagagctgatgaacaagctcctgtccccagtcgtccctcagatcagtgcaccgcaaagtaataaagagaggctaaagaacatggccttgtctatagctgaacgctaccgtgctcagggaatctcagccaataaatttgtggacagcacgttctacctgctgctcgacctcatcacattcttcgatgagtaccacagtgggcatatcgatagggcgttcgacatcatcgaaaggttgaagcttgtgccattgaatcaggagagcgtagaagagcgcgtggccgctttccgaaatttcagtgacgagattagacacaacttgtcggaagtgctcctggccaccatgaacatcctcttcacccaatttaaacggctgaaaggcacatctccttcctctagttctcgaccgcagagagtaattgaagacagagatagtcagttaaggtctcaggcacgcactctgattacattcgccggcatgatcccctatagaactagcggagacacaaacgctcgcctggtccagatggaagttctcatgaactag

SEQ ID NO: 274106 - DNA, 2902 bp, Artificial Sequence
  derived and/or modified sequence
aatcaggaagcgggggagagcggcgcgagaagcggcggccgcgtcctcaagccggcacctgagcggcggagacggctgtagcacaaggatctgcatctccaatggatactgaggggtttggtgagctccttcagcaagctgaacagcttgctgctgagactgagggcatctcagagcttccccatgtggaacggaacttacaggagatccagcaggcgggagagcgcctgcgttcccgtaccctaacacgcacgtcccaggagacggcagatgtcaaggcgtcagttctcctcgggtctcggggacttgacatatcccacatctcccagcgattggagagtctgagtgcagccaccacctttgagcctcttgagcctgtgaaggacactgacattcagggcttcctgaagaatgagaaggacaatgccctgctgtctgccatcgaagagtcccggaagaggaccttcggcatggctgaggagtaccatcgggagtcaatgttggttgagtgggagcaagtgaaacagcgaattctgcacacactgctggcatcaggagaagacgcccttgactttactcaagaaagcgagccaagctacatcagtgatgtgggaccccctggtcgaagctctctggataacatcgagatggcctatgcgcggcaaatttatatctataatgagaaaattgtaaatggacacctgcagcctaacctggtggacctttgtgcttccgtcgcagagctcgatgataagagcatttccgacatgtggaccatggtaaaacaaatgacagacgtgttgttgacaccggcaacggatgccctgaagaaccgcagcagcgtggaagtgcgcatggagtttgtcaggcaggccttggcgtaccttgagcagagttataagaattacacccttgtgactgtctttggaaatttgcatcaggcccagctgggcggggtgcctgggacttaccaattggttcgaagtttcctgaacattaaactgccagctcccttgcctggactacaggatggagaggtggaaggccatcctgtgtgggcgctaatttactactgcatgcgctgtggagacctgcttgccgcttcacaggtagttaatcgagcccagcaccagctgggagagtttaaaacctggttccaggagtacatgaacagcaaggacagaagattgtccccagctacggaaaacaagctccggctgcattaccgtagggccctcaggaacaatacagatccctacaagcgggccgtgtactgtatcattggcagatgtgacgtcaccgacaaccagagtgaagtggcggacaaaactgaggattacctgtggctgaagttgaaccaagtgtgttttgacgacgatggcaccagctccccacaagacaggctcactctctcacagttccagaagcagttgttggaagactatggcgagtcccactttacggtgaaccagcaacccttcctctacttccaagtcctgttcctgacagcgcagtttgaagcagcagttgcctttcttttccgcatggagcggctgcgctgccatgctgtccatgtagcactggtgctgtttgagctgaagctgcttttaaagtcctctggacagagtgctcagctcctcagccacgagcctggtgaccctccttgcttgcggcggctgaacttcgtgcggctcctcatgctgtacacccggaagtttgagtccacggacccaagggaggccctccagtacttctatttcctcagggatgagaaagatagtcaaggagaaaacatgtttctgcgctgtgtgagtgagcttgtgattgaaagccgagagttcgatatgattcttgggaaactagagaatgacggaagtagaaagcctggagtcatagataagtttactagtgacacaaagcctattatcaacaaagttgcttctgtggcagaaaataaaggactgtttgaagaggcagcaaagctgtatgaccttgccaagaatgctgacaaggtactggagctgatgaacaaactgctgagccctgtcgtcccccagatcagtgccccgcaatccaacaaggagaggctgaagaacatggcactctccattgccgaacggtatagggctcaaggaataagcgcaaataaatttgtggactccacgttctatcttcttttggacttgatcaccttttttgacgagtatcatagtggtcatattgatagagcttttgatatcattgagcgcttgaagctggtgcccctgaatcaggaaagtgtggaagagagagtggctgccttcagaaatttcagtgatgaaatcaggcacaacctctcagaagtgcttcttgccaccatgaacatcttgttcacacagtttaagaggctcaaggggacaagtccatcctcgtcatccaggccccagcgagtcatcgaggaccgcgactctcaactccgaagtcaagcccgcactctgattacctttgctggaatgataccataccgaacgtctggggacaccaatgcgaggctggtgcagatggaggtcctcatgaattaagtgccatgctttgtgggagtctgggtcggcacactgtcagtacatcaggcacatgggcccactaggctggggtttctggttttgtttctgttgtgttttgttttggtttctgtattatgtatttttgtcaacgccaataaatttctttgatttgtatttcttttcaacattcttttattttctttttttttttctttgaaattttgtttacatttttatttgtgtaatgggaaataccgtcactagctcttgggccagggaatgagaggctatgtagatattcattatttggttaaattgaccttaattaattaaaaatctacccaaaatgagccaggaaa

SEQ ID NO: 274107 - DNA, 2856 bp, Artificial Sequence
  derived and/or modified sequence
attgcaaagaatcgatttctgagatgagacaatgagatgtggtttgcattttgtaaagatggaggaaacctctaacactgaccctgtatgggagatgactcaattatccacgccttggtacagttgcaaattatttccctttgtctgaagtgggtggatgccagcgccttcatcagagctccttaatttaatgtatggaaaatgtctcagccaccatttttaacaattagctgtatcatggtcgaggtgagctgtattctgaaggcagctgcaaggccatttcatttacattaggttccatggcacaggagctttgttactgtaaaactaagaaaatgaatttgcacattgtatagaagagttctttaggaaggtggagaatattcccagaaagaaaatggaattcttttgtctacaggcttcctgaagaatgagaaggacaatgccctgctgtctgccatcgaagagtcccggaagaggaccttcggcatggctgaggagtaccatcgggagtcaatgttggttgagtgggagcaagtgaaacagcgaattctgcacacactgctggcatcaggagaagacgcccttgactttactcaagaaagcgagccaagctacatcagtgatgtgggaccccctggtcgaagctctctggataacatcgagatggcctatgcgcggcaaatttatatctataatgagaaaattgtaaatggacacctgcagcctaacctggtggacctttgtgcttccgtcgcagagctcgatgataagagcatttccgacatgtggaccatggtaaaacaaatgacagacgtgttgttgacaccggcaacggatgccctgaagaaccgcagcagcgtggaagtgcgcatggagtttgtcaggcaggccttggcgtaccttgagcagagttataagaattacacccttgtgactgtctttggaaatttgcatcaggcccagctgggcggggtgcctgggacttaccaattggttcgaagtttcctgaacattaaactgccagctcccttgcctggactacaggatggagaggtggaaggccatcctgtgtgggcgctaatttactactgcatgcgctgtggagacctgcttgccgcttcacaggtagttaatcgagcccagcaccagctgggagagtttaaaacctggttccaggagtacatgaacagcaaggacagaagattgtccccagctacggaaaacaagctccggctgcattaccgtagggccctcaggaacaatacagatccctacaagcgggccgtgtactgtatcattggcagatgtgacgtcaccgacaaccagagtgaagtggcggacaaaactgaggattacctgtggctgaagttgaaccaagtgtgttttgacgacgatggcaccagctccccacaagacaggctcactctctcacagttccagaagcagttgttggaagactatggcgagtcccactttacggtgaaccagcaacccttcctctacttccaagtcctgttcctgacagcgcagtttgaagcagcagttgcctttcttttccgcatggagcggctgcgctgccatgctgtccatgtagcactggtgctgtttgagctgaagctgcttttaaagtcctctggacagagtgctcagctcctcagccacgagcctggtgaccctccttgcttgcggcggctgaacttcgtgcggctcctcatgctgtacacccggaagtttgagtccacggacccaagggaggccctccagtacttctatttcctcagggatgagaaagatagtcaaggagaaaacatgtttctgcgctgtgtgagtgagcttgtgattgaaagccgagagttcgatatgattcttgggaaactagagaatgacggaagtagaaagcctggagtcatagataagtttactagtgacacaaagcctattatcaacaaagttgcttctgtggcagaaaataaaggactgtttgaagaggcagcaaagctgtatgaccttgccaagaatgctgacaaggtactggagctgatgaacaaactgctgagccctgtcgtcccccagatcagtgccccgcaatccaacaaggagaggctgaagaacatggcactctccattgccgaacggtatagggctcaaggaataagcgcaaataaatttgtggactccacgttctatcttcttttggacttgatcaccttttttgacgagtatcatagtggtcatattgatagagcttttgatatcattgagcgcttgaagctggtgcccctgaatcaggaaagtgtggaagagagagtggctgccttcagaaatttcagtgatgaaatcaggcacaacctctcagaagtgcttcttgccaccatgaacatcttgttcacacagtttaagaggctcaaggggacaagtccatcctcgtcatccaggccccagcgagtcatcgaggaccgcgactctcaactccgaagtcaagcccgcactctgattacctttgctggaatgataccataccgaacgtctggggacaccaatgcgaggctggtgcagatggaggtcctcatgaattaagtgccatgctttgtgggagtctgggtcggcacactgtcagtacatcaggcacatgggcccactaggctggggtttctggttttgtttctgttgtgttttgttttggtttctgtattatgtatttttgtcaacgccaataaatttctttgatttgtatttcttttcaacattcttttattttctttttttttttctttgaaattttgtttacatttttatttgtgtaatgggaaataccgtcactagctcttgggccagggaatgagaggctatgta

SEQ ID NO: 274108 - DNA, 2875 bp, Artificial Sequence
  derived and/or modified sequence
atgcaagatgtcggaagtcatcaaagattcacatcagagtaattgcagtggtttgggttggggaaaaaaagtatcatagcattccttgcctacatgttgtctctccccctcttaaatcttaacttggtacagtccgttaacaataaaatacccttctgtaacctataaactgttactcccatcagtttgtgctttcaaactgatggctgacttctctgaatttgtgtagcgcacaacgaatggtgatgctgtgctccgggggctgcagtgcaccctttttaaagggaccctgcaatctcattgtttaatttgactctttagtgcttcagtcacatcagcacttgcagaggggttgttcttttcctttttcttctttctctctttttctcttctctctgtccttctccccacccccatccctcaattcaggcagtttggggtgggaaaaacttgagcactggttccgacagagctcatctcatataagaaggtttggaagagctgcagtgatcgacagcatcgaccgttctgtaactccttaaatttaagagctgcagggcttcctgaagaatgagaaggacaatgccctgctgtctgccatcgaagagtcccggaagaggaccttcggcatggctgaggagtaccatcgggagtcaatgttggttgagtgggagcaagtgaaacagcgaattctgcacacactgctggcatcaggagaagacgcccttgactttactcaagaaagcgagccaagctacatcagtgatgtgggaccccctggtcgaagctctctggataacatcgagatggcctatgcgcggcaaatttatatctataatgagaaaattgtaaatggacacctgcagcctaacctggtggacctttgtgcttccgtcgcagagctcgatgataagagcatttccgacatgtggaccatggtaaaacaaatgacagacgtgttgttgacaccggcaacggatgccctgaagaaccgcagcagcgtggaagtgcgcatggagtttgtcaggcaggccttggcgtaccttgagcagagttataagaattacacccttgtgactgtctttggaaatttgcatcaggcccagctgggcggggtgcctgggacttaccaattggttcgaagtttcctgaacattaaactgccagctcccttgcctggactacaggatggagaggtggaaggccatcctgtgtgggcgctaatttactactgcatgcgctgtggagacctgcttgccgcttcacaggtagttaatcgagcccagcaccagctgggagagtttaaaacctggttccaggagtacatgaacagcaaggacagaagattgtccccagctacggaaaacaagctccggctgcattaccgtagggccctcaggaacaatacagatccctacaagcgggccgtgtactgtatcattggcagatgtgacgtcaccgacaaccagagtgaagtggcggacaaaactgaggattacctgtggctgaagttgaaccaagtgtgttttgacgacgatggcaccagctccccacaagacaggctcactctctcacagttccagaagcagttgttggaagactatggcgagtcccactttacggtgaaccagcaacccttcctctacttccaagtcctgttcctgacagcgcagtttgaagcagcagttgcctttcttttccgcatggagcggctgcgctgccatgctgtccatgtagcactggtgctgtttgagctgaagctgcttttaaagtcctctggacagagtgctcagctcctcagccacgagcctggtgaccctccttgcttgcggcggctgaacttcgtgcggctcctcatgctgtacacccggaagtttgagtccacggacccaagggaggccctccagtacttctatttcctcagggatgagaaagatagtcaaggagaaaacatgtttctgcgctgtgtgagtgagcttgtgattgaaagccgagagttcgatatgattcttgggaaactagagaatgacggaagtagaaagcctggagtcatagataagtttactagtgacacaaagcctattatcaacaaagttgcttctgtggcagaaaataaaggactgtttgaagaggcagcaaagctgtatgaccttgccaagaatgctgacaaggtactggagctgatgaacaaactgctgagccctgtcgtcccccagatcagtgccccgcaatccaacaaggagaggctgaagaacatggcactctccattgccgaacggtatagggctcaaggaataagcgcaaataaatttgtggactccacgttctatcttcttttggacttgatcaccttttttgacgagtatcatagtggtcatattgatagagcttttgatatcattgagcgcttgaagctggtgcccctgaatcaggaaagtgtggaagagagagtggctgccttcagaaatttcagtgatgaaatcaggcacaacctctcagaagtgcttcttgccaccatgaacatcttgttcacacagtttaagaggctcaaggggacaagtccatcctcgtcatccaggccccagcgagtcatcgaggaccgcgactctcaactccgaagtcaagcccgcactctgattacctttgctggaatgataccataccgaacgtctggggacaccaatgcgaggctggtgcagatggaggtcctcatgaattaagtgccatgctttgtgggagtctgggtcggcacactgtcagtacatcaggcacatgggcccactaggctggggtttctggttttgtttctgttgtgttttgttttggtttctgtattatgtatttttgtcaacgccaataaatttctttgatttgt

SEQ ID NO: 274109 - DNA, 2460 bp, Artificial Sequence
  derived and/or modified sequence
atggatacagaaggcttcggggagcttctccaacaggctgagcagctggctgccgagactgagggcatcagtgagttacctcacgttgagagaaatctgcaagaaattcagcaggcgggtgaacgattaagaagccggactctgaccagaacatcccaggaaaccgctgatgtcaaagcctcagttctactaggcagccggggactcgacatatcccacatcagtcagagactggagagtctctctgccgcaacaacgttcgaaccccttgagcccgtcaaagataccgatatccagggctttctgaagaatgaaaaggacaatgccctactgtcagccattgaagagagccgtaagcgaacattcggaatggctgaggagtaccatagagaatctatgctggttgagtgggaacaggtcaaacagaggatccttcacaccctactggctagtggggaggatgccctcgactttacacaagagtctgaaccatcttatatcagtgacgtgggcccacctggacgctcatccctggacaacatcgagatggcatatgctaggcagatctatatctataatgagaagatcgtgaatggccacctgcagcctaacttggttgacctgtgtgctagcgttgcggagctggacgataagtccattagtgatatgtggactatggtaaaacagatgaccgacgtgttgttgacaccagccactgatgccctcaagaatcgttccagcgtcgaggtgagaatggagttcgtgaggcaggccttggcatacctcgaacagtcctataaaaactatacactggtaaccgttttcggcaacttgcaccaggctcaattagggggtgtgcccggaacctatcagcttgtgaggtccttcctaaacattaaactccccgcacctcttccgggactccaggacggggaggtggagggtcacccggtgtgggccctgatctactactgcatgaggtgtggtgacctgctggctgcatcacaggtagtgaatagagcgcagcaccagctgggagagttcaaaacctggttccaggaatacatgaattccaaggaccgacgcctgtcccctgccacagagaacaaactacggttgcattaccggcgtgccttgcgcaataatacagacccttacaaacgggctgtatattgtattataggtaggtgtgatgtaactgacaaccagtccgaagtcgcagacaaaaccgaggactatttgtggcttaagttgaatcaagtgtgttttgacgacgatggcactagctctccccaggataggctgaccttgtctcaattccaaaagcagctgcttgaggattatggcgaaagtcactttacggtgaatcagcagccttttctgtacttccaggttctctttctcacagcccaattcgaggccgctgtcgccttcctcttccgcatggaacgactgaggtgccatgccgtgcacgtagccctcgttctgttcgaacttaagctcctgttgaagtcgtctgggcaatccgcccaactcctcagccatgaacccggtgatccaccatgcctgagacggctgaattttgtccgcctgttgatgctgtacactcgtaaattcgagtccaccgaccctagggaggcacttcagtatttttattttcttagagatgaaaaagattcccagggcgaaaatatgttcttgcgttgcgtctcagagctggtgattgagtcccgcgagtttgacatgatcctcggtaagttggaaaatgacggatcgaggaaacctggcgttatcgacaagttcacatccgatactaagcccatcattaacaaagtggcgtcagtagccgaaaataaaggccttttcgaagaggccgctaagctgtacgacctggccaaaaacgccgacaaagtgttggaactaatgaataagctcctcagcccagtggtgccccagattagcgccccacagtccaataaggagaggcttaagaatatggccctgagcatagccgaaagataccgggctcagggtatcagcgcaaacaagttcgtggatagtacattctatttgttgcttgatcttatcacattcttcgacgagtaccactctggccacattgacagagcctttgacatcattgagcggcttaagttagtgcctttgaatcaggagtccgtagaagagagggttgctgcattcaggaatttctccgacgaaatccggcataatctgtcagaggtgctgctcgcaaccatgaatatcctgttcacccagtttaagcggctgaaaggcacctcgccctcctcttcctcacggccacagagggtgatcgaagaccgtgacagccagctaaggtcccaggctcgcacacttataactttcgccggaatgatcccctatcgtacatctggtgatactaacgcacgacttgtccagatggaggtgcttatgaattag

SEQ ID NO: 274110 - DNA, 2091 bp, Artificial Sequence
  derived and/or modified sequence
atggctgaggagtaccaccgcgagtctatgcttgtggagtgggagcaggttaaacaacgaatcctgcacactctgttagcgtccggcgaagatgcgctggatttcactcaagaaagtgaacccagctacatcagcgacgtcggccctccgggtagatccagtctagataacattgaaatggcctacgcccgacagatctatatctataacgaaaagattgtgaacggccacctgcagcctaacctggtggacctctgtgctagtgttgcggagctggatgacaagtctatctcagatatgtggaccatggtcaagcagatgactgacgtcctgctgacaccagctactgatgcactcaaaaaccgttctagcgtcgaggtgcggatggagttcgtgcggcaagcgttggcatacctagaacagagttacaaaaactatacactcgtgacagtctttggcaacctgcatcaagcccagctgggaggtgtcccgggtacgtatcagttggtgcgctcttttctcaatattaaattgccagctccattgcctggacttcaggacggcgaggttgaaggacacccggtatgggcactgatatactactgcatgagatgtggagatttgctcgccgctagtcaggttgtgaacagagcacagcaccagttgggcgagttcaagacatggttccaggaatatatgaactccaaagatagaagactaagcccagcaacggaaaacaaactgcgcctccactacagacgggctttgcggaacaacactgacccctacaaacgagctgtgtactgtataattggccgttgtgatgtcacagataaccaaagcgaggtggcagacaaaaccgaggattacctatggttaaagctcaaccaagtctgcttcgacgacgatgggacttcttctcctcaggacaggctcacactgtcccagtttcaaaagcagttgctggaagattacggggaaagccacttcacagtcaatcaacaacctttcctgtactttcaggtcctattcctcacagcccagttcgaagctgccgtggccttcctttttcgaatggaaagactgagatgtcacgcagtgcatgtagcattagtactttttgagttaaaactactcctcaaatctagtggccagtcggcccagctcttatctcacgaacccggtgaccccccttgcctgcggaggctgaacttcgtacggctcctgatgctgtacaccagaaagtttgagtctaccgacccacgtgaggccctccagtacttttactttctgagagacgaaaaagattcacagggggagaacatgttcctaaggtgtgtctccgaactcgtaattgagagtcgggaattcgacatgatactgggcaaactcgaaaatgacggctccagaaaaccaggcgtaatcgacaaattcaccagcgacactaagcccattatcaataaagtcgcgagcgtcgccgaaaataagggcttgttcgaggaggcggctaagttgtatgacctcgccaagaatgcagacaaggtgttggagctgatgaacaagttactgagtcccgtcgtgcctcaaatttcagcccctcagtccaataaagagcggctcaagaatatggcactgtctatcgccgagaggtacagagctcagggcatatcggcaaataaatttgtagatagtacattttacctcctcctggacttgattactttcttcgacgaatatcactcgggccacatcgatcgggcattcgacattattgagcggctcaaactcgtgcccctgaatcaagagtcagttgaagagcgcgttgcagccttccggaacttctccgacgagatccgacataatttgtctgaagtcttattagccacaatgaatattctgtttacacagttcaagaggctcaaggggacctcgcccagcagctcctcccgtccccaaagagtaatcgaggacagggattcgcagttacgtagccaggcccgtactttaatcacattcgcagggatgatcccataccgaaccagtggcgacacaaacgctcggctggtgcagatggaggtcctgatgaactag

SEQ ID NO: 274111 - DNA, 2091 bp, Artificial Sequence
  derived and/or modified sequence
atggcagaagagtatcacagagagtccatgcttgttgagtgggagcaggtaaaacagcgcatcctgcacactctgctcgcttccggcgaggacgccctcgacttcacccaggaatccgagccctcttacattagtgacgtgggccctcccggacgatcttctcttgacaatattgagatggcatatgctcgacagatatatatttataacgaaaagatcgtaaatggccacctgcaacccaatctcgtggatctgtgtgcctcggtcgctgaactggatgataaaagcatttccgacatgtggacaatggtgaaacagatgacggatgtgctcctcacacctgctaccgacgccctgaagaatagaagctcagttgaggttcgtatggagtttgtacgacaggctctggcttatcttgagcaatcctacaagaattataccctcgtgactgtcttcggaaaccttcaccaggcccagttggggggagtgccgggaacttaccagctggtgagatcatttctgaacatcaaactcccagcccctctgcccggattacaggacggcgaagtggaaggacatccagtctgggcccttatctactattgcatgcgctgtggagacctgctggcggcttcccaagttgtgaaccgggctcagcaccagctcggtgagtttaagacttggtttcaggagtacatgaatagcaaggatcggaggctcagccccgctaccgagaataagttgagactccactaccggagagctttaagaaataacactgacccttataagagagccgtgtattgtatcattggtcggtgcgatgtgaccgataatcagagcgaagttgcagataagacggaagactacttatggctaaaactgaatcaggtgtgcttcgacgacgacggaacttcatcccctcaggacaggctgacactttcccagttccaaaaacagttgctggaagactacggggaaagtcacttcacagtgaatcagcagccgttcttgtattttcaagtgcttttcctgaccgcccaattcgaagccgcagtggcgttcctatttaggatggaacgtctgcgttgccacgccgtacatgtggcgctggtgctgttcgaactcaaacttctgcttaagagctccgggcagtccgcacaattgctgtcccacgaaccaggggaccctccgtgtctcaggagattgaatttcgtgaggctgcttatgttgtatactaggaaatttgaatcgacggatcctagagaagcgttgcaatacttttattttctcagagacgagaaagattcccagggcgagaacatgttcttaagatgcgtctccgagctggtgatcgaaagtcgcgagttcgatatgatcctgggcaaattagagaacgacggctcccggaagccaggggtgatcgataagttcacctccgacacaaagccgattattaacaaggtggcttcagttgccgaaaacaaaggtctgtttgaggaggcggcaaagttgtacgatctggctaaaaacgccgacaaggtgttagaactcatgaacaaattactttcacccgtggtcccacaaatctcagcacctcaaagtaacaaagaacggcttaaaaatatggctctgagcatcgctgaaagatatcgagctcagggcatctcggccaacaagttcgtggacagcacattttacctcttgcttgatctgatcaccttcttcgatgagtaccatagtggccatatcgatcgagctttcgatatcatcgaaaggttgaaactggtgcctctaaaccaggaatctgttgaagagcgagttgctgcattccgcaacttctctgacgaaattaggcataatctatctgaggtgctgttggcaactatgaatatccttttcacccagttcaaacgcctgaaaggcacttctccttctagctcctcaaggccacagcgggtgattgaggatcgagactctcagttgaggtcacaggcaagaaccctgattacttttgctggcatgatcccttacagaacttcaggcgatacaaatgccagactggtccagatggaagttcttatgaactag

SEQ ID NO: 274112 - DNA, 2460 bp, Artificial Sequence
  derived and/or modified sequence
atggacaccgagggcttcggcgagctgctgcagcaggccgagcagctggccgccgagaccgagggcatcagcgagctgccccacgtggagagaaacctgcaggagatccagcaggccggcgagagactgagaagcagaaccctgaccagaaccagccaggagaccgccgacgtgaaggccagcgtgctgctgggcagcagaggcctggacatcagccacatcagccagagactggagagcctgagcgccgccaccaccttcgagcccctggagcccgtgaaggacaccgacatccagggcttcctgaagaacgagaaggacaacgccctgctgagcgccatcgaggagagcagaaagagaaccttcggcatggccgaggagtaccacagagagagcatgctggtggagtgggagcaggtgaagcagagaatcctgcacaccctgctggccagcggcgaggacgccctggacttcacccaggagagcgagcccagctacatcagcgacgtgggcccccccggcagaagcagcctggacaacatcgagatggcctacgccagacagatctacatctacaacgagaagatcgtgaacggccacctgcagcccaacctggtggacctgtgcgccagcgtggccgagctggacgacaagagcatcagcgacatgtggaccatggtgaagcagatgaccgacgtgctgctgacccccgccaccgacgccctgaagaacagaagcagcgtggaggtgagaatggagttcgtgagacaggccctggcctacctggagcagagctacaagaactacaccctggtgaccgtgttcggcaacctgcaccaggcccagctgggcggcgtgcccggcacctaccagctggtgagaagcttcctgaacatcaagctgcccgcccccctgcccggcctgcaggacggcgaggtggagggccaccccgtgtgggccctgatctactactgcatgagatgcggcgacctgctggccgccagccaggtggtgaacagagcccagcaccagctgggcgagttcaagacctggttccaggagtacatgaacagcaaggacagaagactgagccccgccaccgagaacaagctgagactgcactacagaagagccctgagaaacaacaccgacccctacaagagagccgtgtactgcatcatcggcagatgcgacgtgaccgacaaccagagcgaggtggccgacaagaccgaggactacctgtggctgaagctgaaccaggtgtgcttcgacgacgacggcaccagcagcccccaggacagactgaccctgagccagttccagaagcagctgctggaggactacggcgagagccacttcaccgtgaaccagcagcccttcctgtacttccaggtgctgttcctgaccgcccagttcgaggccgccgtggccttcctgttcagaatggagagactgagatgccacgccgtgcacgtggccctggtgctgttcgagctgaagctgctgctgaagagcagcggccagagcgcccagctgctgagccacgagcccggcgaccccccctgcctgagaagactgaacttcgtgagactgctgatgctgtacaccagaaagttcgagagcaccgaccccagagaggccctgcagtacttctacttcctgagagacgagaaggacagccagggcgagaacatgttcctgagatgcgtgagcgagctggtgatcgagagcagagagttcgacatgatcctgggcaagctggagaacgacggcagcagaaagcccggcgtgatcgacaagttcaccagcgacaccaagcccatcatcaacaaggtggccagcgtggccgagaacaagggcctgttcgaggaggccgccaagctgtacgacctggccaagaacgccgacaaggtgctggagctgatgaacaagctgctgagccccgtggtgccccagatcagcgccccccagagcaacaaggagagactgaagaacatggccctgagcatcgccgagagatacagagcccagggcatcagcgccaacaagttcgtggacagcaccttctacctgctgctggacctgatcaccttcttcgacgagtaccacagcggccacatcgacagagccttcgacatcatcgagagactgaagctggtgcccctgaaccaggagagcgtggaggagagagtggccgccttcagaaacttcagcgacgagatcagacacaacctgagcgaggtgctgctggccaccatgaacatcctgttcacccagttcaagagactgaagggcaccagccccagcagcagcagcagaccccagagagtgatcgaggacagagacagccagctgagaagccaggccagaaccctgatcaccttcgccggcatgatcccctacagaaccagcggcgacaccaacgccagactggtgcagatggaggtgctgatgaactag

SEQ ID NO: 274113 - DNA, 2091 bp, Artificial Sequence
  derived and/or modified sequence
atggccgaggagtaccacagagagagcatgctggtggagtgggagcaggtgaagcagagaatcctgcacaccctgctggccagcggcgaggacgccctggacttcacccaggagagcgagcccagctacatcagcgacgtgggcccccccggcagaagcagcctggacaacatcgagatggcctacgccagacagatctacatctacaacgagaagatcgtgaacggccacctgcagcccaacctggtggacctgtgcgccagcgtggccgagctggacgacaagagcatcagcgacatgtggaccatggtgaagcagatgaccgacgtgctgctgacccccgccaccgacgccctgaagaacagaagcagcgtggaggtgagaatggagttcgtgagacaggccctggcctacctggagcagagctacaagaactacaccctggtgaccgtgttcggcaacctgcaccaggcccagctgggcggcgtgcccggcacctaccagctggtgagaagcttcctgaacatcaagctgcccgcccccctgcccggcctgcaggacggcgaggtggagggccaccccgtgtgggccctgatctactactgcatgagatgcggcgacctgctggccgccagccaggtggtgaacagagcccagcaccagctgggcgagttcaagacctggttccaggagtacatgaacagcaaggacagaagactgagccccgccaccgagaacaagctgagactgcactacagaagagccctgagaaacaacaccgacccctacaagagagccgtgtactgcatcatcggcagatgcgacgtgaccgacaaccagagcgaggtggccgacaagaccgaggactacctgtggctgaagctgaaccaggtgtgcttcgacgacgacggcaccagcagcccccaggacagactgaccctgagccagttccagaagcagctgctggaggactacggcgagagccacttcaccgtgaaccagcagcccttcctgtacttccaggtgctgttcctgaccgcccagttcgaggccgccgtggccttcctgttcagaatggagagactgagatgccacgccgtgcacgtggccctggtgctgttcgagctgaagctgctgctgaagagcagcggccagagcgcccagctgctgagccacgagcccggcgaccccccctgcctgagaagactgaacttcgtgagactgctgatgctgtacaccagaaagttcgagagcaccgaccccagagaggccctgcagtacttctacttcctgagagacgagaaggacagccagggcgagaacatgttcctgagatgcgtgagcgagctggtgatcgagagcagagagttcgacatgatcctgggcaagctggagaacgacggcagcagaaagcccggcgtgatcgacaagttcaccagcgacaccaagcccatcatcaacaaggtggccagcgtggccgagaacaagggcctgttcgaggaggccgccaagctgtacgacctggccaagaacgccgacaaggtgctggagctgatgaacaagctgctgagccccgtggtgccccagatcagcgccccccagagcaacaaggagagactgaagaacatggccctgagcatcgccgagagatacagagcccagggcatcagcgccaacaagttcgtggacagcaccttctacctgctgctggacctgatcaccttcttcgacgagtaccacagcggccacatcgacagagccttcgacatcatcgagagactgaagctggtgcccctgaaccaggagagcgtggaggagagagtggccgccttcagaaacttcagcgacgagatcagacacaacctgagcgaggtgctgctggccaccatgaacatcctgttcacccagttcaagagactgaagggcaccagccccagcagcagcagcagaccccagagagtgatcgaggacagagacagccagctgagaagccaggccagaaccctgatcaccttcgccggcatgatcccctacagaaccagcggcgacaccaacgccagactggtgcagatggaggtgctgatgaactag

SEQ ID NO: 274114 - DNA, 1620 bp, Artificial Sequence
  derived and/or modified sequence
atgggagacacctctgaagacgcctcaatccatcgcctcgagggaacagacttagattgtcaagtcggaggactgatttgtaagtccaagtctgcagcttccgagcagcacgtctttaaggctccagcaccgcggcctagcctgctgggattggatctgctcgccagcctgaaaagaagggagcgtgaagaaaaagatgacggagaggacaaaaaaaaatctaaggtatccagctacaaagattgggaagagagcaaagatgaccagaaagatgccgaggaggagggcggcgatcaagctaaaatcttccaaaaggctcctgacggagttcgaaaatgcattgtggccaccaatattgccgagaccagcctgaccgtggatggtattatgtttgtgatcgactccggctattgcaaactgaaggtctttaaccccagaataggcatggacgccctgcagatttatccaatcagtcaggccaatgctaaccagcgttccgggcgagccggacgtaccggacctggccaatgttttcgcctctacacccagtccgcctataagaacgagctgctgactacaaccgtacctgaaattcaaaggacgaatctcgcaaacgtggtcctgctcctaaagtcgctgggagtgcaagacctcctccagtttcactttatggaccctccacctgaggacaatatgctgaatagcatgtatcagttgtggatactcggcgctctggataacaccggtggattaaccagcacgggcaggctcatggtggagttccccctagaccccgctcttagcaagatgttaattgtgtcctgcgatatggggtgtagctctgagattctgttgattgtaagtatgctaagtgtcccagctatattctatagacccaagggccgtgaggaggagtccgatcagatccgcgagaaattcgcggtgccagagtcagaccacctgacgtacttgaatgtgtacctgcagtggaaaaataataattatagcactatctggtgcaatgaccactttatacatgcgaaagctatgcggaaggtgcgggaagtcagggcgcaactgaaagacatcatggtgcagcaaaggatgtccctcgcatcatgcggcactgactgggacatagtccggaaatgtatttgtgcagcctacttccaccaggctgcaaagctgaaagggattggtgagtacgttaacatcaggactgggatgccatgtcatctgcaccctacaagctccctgttcggtatgggatacacccccgattacattgtgtaccatgagctggtcatgaccaccaaggagtacatgcagtgcgtgacagccgttgatggcgagtggctggctgagttaggaccaatgttttattcagtaaagcaagccggaaagtctcgtcaagagaatagaagacgcgccaaagaggaggcatccgcaatggaagaagagatggcgcttgccgaggaacaactccgcgcaagaaggcaggaacaggagaagagaagtccattaggaagcgttcgatccacgaagatctacactcctggaagaaaagagcaaggcgaaccaatgacgcctcggcggacgcccgctcgctttggcctgtag

SEQ ID NO: 274115 - DNA, 1620 bp, Artificial Sequence
  derived and/or modified sequence
atgggagacaccagtgaagatgccagcatccaccggctggagggcacagacctggactgccaggtgggcggcctcatctgcaagagcaagtctgctgccagcgagcagcacgtgttcaaggccccagccccccggcccagcctgctgggcctggacctgctggccagcctgaagagaagagagcgggaggagaaggatgatggagaggacaagaagaagagcaaggtgagcagctacaaggactgggaggagagcaaggatgaccagaaggatgctgaggaggagggcggggaccaggccaagatcttccagaaggccccagatggagtgaggaagtgcatcgtggccaccaacattgctgagaccagcctgactgtggatggcatcatgtttgtgattgattctggctactgcaagctgaaggtgttcaaccccagaattggcatggatgccctgcagatctaccccatcagccaggccaatgccaaccagaggagcggccgggccggccgcacaggccctggccagtgcttccggctgtacacccagagcgcctacaagaatgagctgctgaccaccaccgtgcctgagatccagaggaccaacctggccaacgtggtgctgctgctgaagagcctgggcgtgcaggacctgctgcagttccacttcatggaccccccacctgaggacaacatgctgaacagcatgtaccagctgtggatcctgggcgccctggacaacacaggaggcctgaccagcacaggccgcctgatggtggagttccccctggaccctgccctgagcaagatgctgattgtgtcctgtgacatgggctgcagcagcgagatcctgctgattgtgtccatgctgtctgtgcctgccatcttctaccggcccaagggccgggaggaggagagtgaccagatccgggagaagtttgctgtgcctgagagtgaccacctgacctacctgaatgtgtacctgcagtggaagaacaacaactacagcaccatctggtgcaatgaccacttcatccacgccaaggccatgaggaaggtgcgggaggtgcgggcccagctgaaggacatcatggtgcagcagaggatgagcctggccagctgtggcacagactgggacatcgtgaggaagtgcatctgtgccgcctacttccaccaggccgccaagctgaagggcattggagaatatgtgaacatcagaacaggcatgccctgccacctgcaccccaccagcagcctgtttggcatgggctacaccccagactacatcgtgtaccacgagctggtgatgaccaccaaggagtacatgcagtgtgtgacagctgtggatggagagtggctggccgagctgggccccatgttctacagcgtgaagcaggccggcaagagccggcaggagaacagaagaagagccaaggaggaggccagcgccatggaggaggagatggccctggccgaggagcagctgcgggcccggcggcaggagcaggagaagaggagccccctgggctctgtgcgcagcaccaagatctacaccccaggcaggaaggagcagggcgagcccatgacccccaggaggaccccagccaggtttggcctgtag

SEQ ID NO: 274116 - DNA, 1620 bp, Artificial Sequence
  derived and/or modified sequence
atgggcgacaccagcgaggacgccagcatccaccggctggagggcacagatttagactgtcaggtgggtggcctgatttgcaaatctaagtccgccgccagcgaacagcatgtgtttaaggcgcccgctccgaggccctcgctcctgggactcgatttgcttgcctcactcaagcgtcgggagcgcgaagaaaaggacgatggggaagataagaaaaagtcaaaggttagctcctataaagactgggaagaatccaaggatgatcaaaaagacgctgaagaggaaggcggtgatcaagccaaaatcttccagaaagctccagacggagtaagaaaatgtattgttgctacaaatattgcggagacgtcccttacggtagacgggatcatgttcgtgattgatagtgggtattgcaagctgaaggtgtttaacccccgtattggcatggacgctcttcaaatttaccctatatcgcaggcaaatgcaaaccagaggtccggccgagctggcaggaccggaccaggacagtgtttcaggctttatacccaatcagcctataagaatgagcttctcaccactaccgtgccggaaatccagaggaccaatctggctaacgtggtcctgctgcttaaatcactcggcgtgcaggaccttttgcagtttcacttcatggaccctcctcctgaggataacatgctgaactctatgtatcagctttggatactgggggccctggacaacaccggagggctgaccagtacaggcaggcttatggtcgagttccccctcgatcccgccctgagcaaaatgttgatagttagttgtgacatgggatgctcctctgaaattctcctgatcgtgtctatgctgtccgtgcccgcaatcttctatcggcccaagggcagagaggaggaatctgatcaaattcgcgagaaattcgctgtcccagagagtgatcacctgacctacctgaacgtgtacttgcagtggaaaaataacaactactctactatttggtgcaatgaccattttatccatgctaaagcaatgcgcaaggtgagggaggttcgagcacagctcaaggatatcatggttcaacagaggatgtcactggcctcatgtggcaccgactgggacattgtacgcaaatgtatctgtgctgcttatttccatcaggccgctaagctcaagggtatcggcgaatatgtcaacatccggacaggtatgccgtgccacctgcatccaacatcgtcccttttcgggatgggctacacacccgactatatcgtgtaccacgaactggtgatgacaaccaaggagtacatgcaatgcgtgaccgcagtagatggagagtggctcgcagagctgggacctatgttttatagcgtgaaacaggccgggaaatccagacaggagaacaggcgaagggccaaggaggaagcgagcgccatggaggaagaaatggcactcgcagaggagcagttaagagcccggcgtcaggagcaggaaaagagatccccattggggtccgttagaagtacaaaaatctacactcctggccggaaggagcagggagaaccaatgactcctaggcgcacccctgcccgtttcggactgtag

SEQ ID NO: 274117 - DNA, 1620 bp, Artificial Sequence
  derived and/or modified sequence
atgggcgacaccagcgaagacgccagtattcaccgactagagggtaccgacctcgattgccaagtcgggggtctgatctgcaagtctaaaagcgcagccagtgaacaacacgtcttcaaagctccggctcccaggccatccctgttgggactcgacctgttagcctcccttaaacggagggaacgagaagagaaggatgatggcgaggacaaaaagaagagtaaggtatcatcttataaggactgggaagagagcaaggacgaccagaaggacgccgaggaggaggggggtgaccaagccaagatctttcagaaggctcctgacggggtgcgaaaatgcattgtggcaacgaacattgctgaaacgtctttaacagtggacggaatcatgttcgtgatagactcagggtactgcaagctgaaagttttcaatcctagaattggaatggacgctctgcagatctaccctatatcacaggcaaacgctaaccagagatcaggacgggcaggtagaacaggcccaggccaatgcttccgactttacacacagagcgcctacaaaaacgaactgctcaccactacagttcccgagatccagcggaccaacttggctaacgttgtgctccttcttaaaagtttaggagttcaggatcttttacaattccatttcatggacccaccccctgaagataatatgctaaactctatgtaccagctatggatcctgggcgctcttgacaacacgggcggactgaccagcactggtcgtttgatggtggagttccccctggatccggcactttcaaaaatgctgatcgtgtcttgtgacatgggctgctcgtcggagatcctcctgatcgtttctatgctcagcgtgccagccattttttaccgcccaaaaggacgcgaggaagaaagcgaccagattagagagaagttcgcggtaccagagagcgaccacctgacctatctgaatgtgtatcttcagtggaagaacaataattactctacaatctggtgcaatgaccattttatccatgccaaggctatgcggaaagttagggaagtccgtgcccagctcaaggacatcatggtgcaacaacggatgagcctagcctcatgcggcacagactgggacattgttcgaaagtgcatatgtgcggcttatttccatcaggccgcaaaactgaagggaattggggagtatgttaatatcagaacaggcatgccttgtcacctgcaccccaccagttcgttgtttggcatgggctacacacccgactatattgtgtaccacgagctcgtcatgacgactaaagagtacatgcagtgcgtgacggccgttgatggggaatggctcgccgagcttggcccaatgttctattccgtaaagcaggccggaaaatccagacaggaaaaccggaggcgggcaaaggaggaggcaagcgccatggaggaggaaatggccctggcagaggagcagctgcgtgccaggaggcaggagcaagagaaaaggtcaccactgggatctgttcgctccacaaagatctatactccaggacgcaaagaacagggagaaccaatgaccccacggaggacccccgctagattcggcttatag

SEQ ID NO: 274118 - DNA, 1620 bp, Artificial Sequence
  derived and/or modified sequence
atgggcgacaccagcgaggacgccagcatccacagactggagggcaccgacctggactgccaggtgggcggcctgatctgcaagagcaagagcgccgccagcgagcagcacgtgttcaaggcccccgcccccagacccagcctgctgggcctggacctgctggccagcctgaagagaagagagagagaggagaaggacgacggcgaggacaagaagaagagcaaggtgagcagctacaaggactgggaggagagcaaggacgaccagaaggacgccgaggaggagggcggcgaccaggccaagatcttccagaaggcccccgacggcgtgagaaagtgcatcgtggccaccaacatcgccgagaccagcctgaccgtggacggcatcatgttcgtgatcgacagcggctactgcaagctgaaggtgttcaaccccagaatcggcatggacgccctgcagatctaccccatcagccaggccaacgccaaccagagaagcggcagagccggcagaaccggccccggccagtgcttcagactgtacacccagagcgcctacaagaacgagctgctgaccaccaccgtgcccgagatccagagaaccaacctggccaacgtggtgctgctgctgaagagcctgggcgtgcaggacctgctgcagttccacttcatggaccccccccccgaggacaacatgctgaacagcatgtaccagctgtggatcctgggcgccctggacaacaccggcggcctgaccagcaccggcagactgatggtggagttccccctggaccccgccctgagcaagatgctgatcgtgagctgcgacatgggctgcagcagcgagatcctgctgatcgtgagcatgctgagcgtgcccgccatcttctacagacccaagggcagagaggaggagagcgaccagatcagagagaagttcgccgtgcccgagagcgaccacctgacctacctgaacgtgtacctgcagtggaagaacaacaactacagcaccatctggtgcaacgaccacttcatccacgccaaggccatgagaaaggtgagagaggtgagagcccagctgaaggacatcatggtgcagcagagaatgagcctggccagctgcggcaccgactgggacatcgtgagaaagtgcatctgcgccgcctacttccaccaggccgccaagctgaagggcatcggcgagtacgtgaacatcagaaccggcatgccctgccacctgcaccccaccagcagcctgttcggcatgggctacacccccgactacatcgtgtaccacgagctggtgatgaccaccaaggagtacatgcagtgcgtgaccgccgtggacggcgagtggctggccgagctgggccccatgttctacagcgtgaagcaggccggcaagagcagacaggagaacagaagaagagccaaggaggaggccagcgccatggaggaggagatggccctggccgaggagcagctgagagccagaagacaggagcaggagaagagaagccccctgggcagcgtgagaagcaccaagatctacacccccggcagaaaggagcagggcgagcccatgacccccagaagaacccccgccagattcggcctgtag

SEQ ID NO: 274119 - DNA, 2250 bp, Artificial Sequence
  derived and/or modified sequence
acttggatccaggaatcgggcgtgttccaggctgctctctatggtagctttgggcggatagagggggcgcgcaaagtattaagggacaataatggccgctttcaaggtgtggattttggctccttgagcctgtctgagcgaggggtggcagcgccggcgccccagaatccgggacagaagggtcccaagagtcgcgcttggtgagagaaatcccagatcctgtgatgggggacaccagtgaggatgcctcgatccatcgattggaaggcactgatctggactgtcaggttggtggtcttatttgcaagtccaaaagtgcggccagcgagcagcatgtcttcaaggctcctgctccccgcccttcattactcggactggacttgctggcttccctgaaacggagagagcgagaggagaaggacgatggggaggacaagaagaagtccaaagtctcctcctacaaggactgggaagagagcaaggatgaccagaaggatgctgaggaagagggcggtgaccaggccaaaatcttccagaaggctccagatggcgttcggaagtgcatcgttgccaccaatattgccgagacgtctctcactgttgacggcatcatgtttgttatcgattctggttattgcaaattaaaggtcttcaaccccaggattggcatggatgctctgcagatctatcccattagccaggccaatgccaaccagcggtcagggcgagccggcaggacgggcccaggtcagtgtttcaggctctacacccagagcgcctacaagaatgagctcctgaccaccacagtgcccgagatccagaggactaacctggccaacgtggtgctgctgctcaagtccctcggggtgcaggacctgctgcagttccacttcatggacccgcccccggaggacaacatgctcaactctatgtatcagctctggatcctcggggccctggacaacacaggtggtctgacctctaccgggcggctgatggtggagttcccgctggaccctgccctgtccaagatgctcatcgtgtcctgtgacatgggctgcagctccgagatcctgctcatcgtttccatgctctcggtcccagccatcttctacaggcccaagggtcgagaggaggagagtgatcaaatccgggagaagttcgctgttcctgagagcgatcatttgacctacctgaatgtttacctgcagtggaagaacaataattactccaccatctggtgtaacgatcatttcatccatgctaaggccatgcggaaggtccgggaggtgcgagctcaactcaaggacatcatggtgcagcagcggatgagcctggcctcgtgtggcactgactgggacatcgtcaggaagtgcatctgtgctgcctatttccaccaagcagccaagctcaagggaatcggggagtacgtgaacatccgcacagggatgccctgccacttgcaccccaccagctccctttttggaatgggctacaccccagattacatagtgtatcacgagttggtcatgaccaccaaggagtatatgcagtgtgtgaccgctgtggacggggagtggctggcggagctgggccccatgttctatagcgtgaaacaggcgggcaagtcacggcaggagaaccgtcgtcgggccaaagaggaagcctctgccatggaggaggagatggcgctggccgaggagcagctgcgagcccggcggcaggagcaggagaagcgcagccccctgggcagtgtcaggtctacgaagatctacactccaggccggaaagagcaaggggagcccatgacccctcgccgcacgccagcccgctttggtctgtgagctgaggctgtccccagagaggatggcagcaggtattgggtcctcagccttctggcgggagccctgaggctgcggacaaagccctttcatctgaggactttcatctgtgcatatcacggccccccagggcagttcctgctggaccagactctctggcagaggaggtggagttcttccatgcaggagcacggcatggcgggagcggggctgcagagtatccgaggtgctgccggggcagcgggaggtggctggacccatcgcatctaaaactggcccaggacacttggtgtatgcgtgacttggctgtggctgtcttttttaatccttgtgtaaagcagcaaaaaagacctaaagggaattgtaatttggttataattcaggatttggaaataaatttattatttgt

SEQ ID NO: 274120 - protein, 473 aa, Artificial Sequence
  derived and/or modified sequence
MRLLESKKGLSFFAFEHSEEYQQAQHKFLVAVESMEPNNIVVLLQTSPYHVDSLLQLSDACRFQEDQEMARDLVERALYSMECAFHPLFSLTSGACRLDYRRPENRSFYLALYKQMSFLEKRGCPRTALEYCKLILSLEPDEDPLCMLLLIDHLALRARNYEYLIRLFQEWEAHRNLSQLPNFAFSVPLAYFLLSQQTDLPECEQSSARQKASLLIQQALTMFPGVLLPLLESCSVRPDASVSSHRFFGPNAEISQPPALSQLVNLYLGRSHFLWKEPATMSWLEENVHEVLQAVDAGDPAVEACENRRKVLYQRAPRNIHRHVILSEIKEAVAALPPDVTTQSVMGFDPLPPSDTIYSYVRPERKGEEERNSVIWGSQLCVCRPRSFPSPPNVQALACRPLWQAKSYQPWKHHCSLLPVTVAKLYHGGGEARGRSGWGSEPQPGPEQADAGCARHDGQLPPQRPGGAARGRR

SEQ ID NO: 274121 - DNA, 1422 bp, Artificial Sequence
  derived and/or modified sequence
atgagactgctggagagcaagaagggcctgagcttcttcgccttcgagcacagcgaggagtaccagcaggcccagcacaagttcctggtggccgtggagagcatggagcccaacaacatcgtggtgctgctgcagaccagcccctaccacgtggacagcctgctgcagctgagcgacgcctgcagattccaggaggaccaggagatggccagagacctggtggagagagccctgtacagcatggagtgcgccttccaccccctgttcagcctgaccagcggcgcctgcagactggactacagaagacccgagaacagaagcttctacctggccctgtacaagcagatgagcttcctggagaagagaggctgccccagaaccgccctggagtactgcaagctgatcctgagcctggagcccgacgaggaccccctgtgcatgctgctgctgatcgaccacctggccctgagagccagaaactacgagtacctgatcagactgttccaggagtgggaggcccacagaaacctgagccagctgcccaacttcgccttcagcgtgcccctggcctacttcctgctgagccagcagaccgacctgcccgagtgcgagcagagcagcgccagacagaaggccagcctgctgatccagcaggccctgaccatgttccccggcgtgctgctgcccctgctggagagctgcagcgtgagacccgacgccagcgtgagcagccacagattcttcggccccaacgccgagatcagccagccccccgccctgagccagctggtgaacctgtacctgggcagaagccacttcctgtggaaggagcccgccaccatgagctggctggaggagaacgtgcacgaggtgctgcaggccgtggacgccggcgaccccgccgtggaggcctgcgagaacagaagaaaggtgctgtaccagagagcccccagaaacatccacagacacgtgatcctgagcgagatcaaggaggccgtggccgccctgccccccgacgtgaccacccagagcgtgatgggcttcgaccccctgccccccagcgacaccatctacagctacgtgagacccgagagaaagggcgaggaggagagaaacagcgtgatctggggcagccagctgtgcgtgtgcagacccagaagcttccccagcccccccaacgtgcaggccctggcctgcagacccctgtggcaggccaagagctaccagccctggaagcaccactgcagcctgctgcccgtgaccgtggccaagctgtaccacggcggcggcgaggccagaggcagaagcggctggggcagcgagccccagcccggccccgagcaggccgacgccggctgcgccagacacgacggccagctgcccccccagagacccggcggcgccgccagaggcagaagatag

SEQ ID NO: 274122 - DNA, 1422 bp, Artificial Sequence
  derived and/or modified sequence
atgagactactggaatccaaaaaagggttgtcctttttcgctttcgaacacagcgaagagtatcagcaggctcagcataagtttcttgtcgccgtggagagcatggagccgaacaacattgttgtgctccttcagactagtccttatcacgtggacagtctactccagttgtcagacgcatgccgtttccaggaagaccaggaaatggccagggaccttgtggagcgggccctgtattctatggagtgcgccttccacccgctattcagtcttacctctggagcctgtcgtctcgactaccgcagaccagaaaacagaagcttttatctggccctgtataaacaaatgtcctttcttgagaagagggggtgtccacgcaccgctttggagtactgtaaattaattttgtcccttgagccagatgaggatcctctctgcatgctgctgctcattgaccatcttgccctccgtgccaggaattacgagtatcttatcagactgtttcaagaatgggaagcacatcggaacctgtcgcagcttccaaatttcgcgttttcggtccccctggcctactttctgctgtctcagcagacagatttacccgagtgcgaacaatcatcagcccggcagaaggcgtctttgctaatccagcaggcccttaccatgtttcctggtgttctgttacccctcctggagtcatgtagtgttcgccccgacgctagtgtgagttcccatcgctttttcggacctaacgccgagattagccagccccccgccctatcacaactcgtgaatctctatctggggcgctcccatttcttgtggaaggagcccgccactatgtcgtggcttgaagagaacgtccacgaggtactacaggcggtcgatgcaggggatcctgctgtggaagcctgtgagaatcgacggaaggtgctgtatcagcgggcgccccggaatatacaccgacacgtgatactgtcagagattaaggaggctgtggccgccttaccacccgatgtgaccacgcagagcgttatgggctttgacccgcttccgccttccgataccatttactcatacgtccggcctgaaaggaaaggggaggaagaaaggaactccgtcatttggggtagccagttatgtgtctgccggccaaggagttttccgtccccccccaatgtacaggcacttgcttgccgaccgctgtggcaggcgaagtcctaccagccttggaaacaccactgtagcttgctccctgtcacggtggctaaactttatcacggtggtggggaggccaggggcaggagcgggtgggggtctgagccacagcccggccccgagcaagctgacgccggttgtgcaaggcacgatggccaactcccaccgcagcggcccggcggcgctgctcgcggtcgtcgatag

SEQ ID NO: 274123 - DNA, 1422 bp, Artificial Sequence
  derived and/or modified sequence
atgaggctgctggagagcaagaagggcctgtccttctttgcctttgagcacagcgaggagtaccagcaggcccagcacaagttcctggtggccgtggagagcatggagcccaacaacatcgtggtgctgctgcagaccagcccctaccacgtggacagcctgctgcagctgagtgatgcctgccgcttccaggaggaccaggagatggcccgggacctggtggagcgggccctgtacagcatggagtgtgccttccaccccctcttcagcctgaccagcggggcctgccgcctggactacagaagacctgagaacagaagcttctacctggccctgtacaagcagatgtccttcctggagaagaggggctgccccaggacagccctggagtactgcaagctgatcctgagcctggagccagatgaggaccccctgtgcatgctgctgctgattgaccacctggccctgcgggccagaaattatgagtacctgatccgcctcttccaggagtgggaggcccacaggaacctgagccagctgcccaactttgccttctctgtgcccctggcctacttcctgctgagccagcagacagacctgcctgaatgtgagcagagcagcgcccggcagaaggccagcctgctgatccagcaggccctgaccatgtttcctggggtgctgctgcccctgctggagagctgcagcgtgcggccagatgcctctgtgagcagccaccgcttcttcggccccaatgctgagatcagccagcccccagccctgagccagctggtgaacctgtacctgggccgcagccacttcctgtggaaggagcccgccaccatgtcctggctggaggagaatgtgcatgaggtgctgcaggccgtggatgctggggaccctgctgtggaggcctgtgagaacagaaggaaggtgctgtaccagagggcccccaggaacatccacagacatgtgatcctgtctgagatcaaggaggccgtggccgccctgcccccagatgtgaccacccagagcgtgatgggctttgaccccctgccccccagcgacaccatctacagctatgtgcggcctgagaggaagggggaggaggagagaaattctgtcatctggggcagccagctgtgtgtgtgccggcccaggagcttccccagccccccaaatgtgcaggccctggcctgccggcccctgtggcaggccaagagctaccagccctggaagcaccactgcagcctgctgcctgtgacagtggccaagctgtaccatggaggaggagaggcccggggccgcagcggctggggcagcgagccccagcccggccctgagcaggctgatgctggctgtgcccggcatgatggccagctgcccccccagaggcctggaggagctgcccggggcagaagatag

SEQ ID NO: 274124 - DNA, 1422 bp, Artificial Sequence
  derived and/or modified sequence
atgcggctgctggagagcaagaagggcctgagcttcttcgccttcgaacactcggaggaatatcagcaggcacagcataagtttctggtggccgtggagagcatggaaccaaacaatatcgtcgtgttacttcagacttcgccatatcacgttgatagtctactccagctgagtgacgcatgccgatttcaggaagaccaggagatggcaagggatctggtggaaagagcgctttatagcatggagtgtgccttccatcccctcttttcattaacgtctggagcttgtcgcttagattaccggcgccctgagaaccggtccttttacctcgctttgtataagcagatgagcttcttggagaagcgcgggtgtccgcgcaccgccctggagtattgcaagttgatcctaagcttggaaccagatgaagacccgttgtgcatgctcctcttaattgatcacctcgccttaagagcacggaattatgagtatctgatccgtctctttcaagaatgggaagcacatcggaatctgtctcagcttcctaattttgcctttagtgttccactcgcgtattttttgctttcacagcagacagatctgccagagtgtgagcaaagcagtgcgagacagaaagcttcccttctgatccagcaggcactcactatgttcccgggcgtcctgttacctctcttagagtcttgttccgtccgaccagatgcatcagtgtcatcacaccgcttttttgggccgaatgcggagattagccagccacccgctcttagtcagctcgtgaacctgtacttgggccgaagtcacttcttgtggaaagaacccgctacaatgagttggcttgaagaaaacgtgcacgaggtgttgcaagccgtggacgcaggagaccccgctgtggaagcctgcgagaatcggagaaaagtgctgtatcaacgcgctcctagaaatattcacaggcatgtgattctgagcgaaatcaaggaggctgtcgctgcattgccacctgatgtaaccactcagtcagtgatgggatttgacccactgccgccatccgatacaatatattcttatgtcagacctgagcgcaagggggaggaagagagaaactcagtcatctggggttcacagctgtgcgtgtgtcggccgaggtcttttccctcaccgccaaacgtccaggctctggcttgtagacccctgtggcaggcaaaaagctaccaaccttggaagcaccactgctctcttctccctgtcactgtggcgaagttatatcacggcgggggtgaagcccgcgggagaagcggttggggctctgaaccccagcccgggccagagcaggctgatgcaggctgcgcgcgacatgacggccagcttcccccgcagagaccagggggggccgcccgcgggaggaggtag

SEQ ID NO: 274125 - DNA, 1422 bp, Artificial Sequence
  derived and/or modified sequence
atgagacttctcgagagcaagaagggcctgtccttcttcgcattcgagcactctgaggagtaccagcaagcccaacataaatttctggtcgccgttgagtccatggagccaaacaatatcgttgtgttgctgcagacctccccttaccatgtcgactctctcctgcagctctccgatgcgtgcagattccaggaggatcaagagatggccagagatctggtggaacgagctctgtatagtatggagtgtgcgtttcacccacttttttctctgacttcaggggcatgcagactggactatcgcaggccagagaatagaagcttctatctggctctctataagcagatgagctttctagaaaagagggggtgtccacgcacagcccttgaatattgcaagttaatccttagtctggaacccgatgaagacccactgtgtatgctgctcctgattgaccaccttgctttgcgcgcacgaaattacgaatacctgatccgcttatttcaggaatgggaagcccacaggaacctgagccagctccctaactttgctttttctgtgcctcttgcctattttcttctcagtcagcaaacagatcttccagagtgtgaacaatcttccgccaggcaaaaggcttcacttttgatccagcaggccttaaccatgttcccgggtgtcctgctcccactcctggagagctgcagcgtcagacctgacgctagcgtgtcttctcaccgatttttcggcccaaatgcggaaatcagccagccaccagccctgtctcagctggtcaacctatacctagggagaagccacttcctgtggaaagaacctgccaccatgtcttggctcgaagaaaatgtacacgaagtcttacaggcagtcgacgccggagaccccgcagtcgaagcctgtgagaatcgacggaaggtgctgtaccagcgtgcacctagaaatattcacaggcacgtgattctgtctgagatcaaagaggccgtcgccgctctgccgccagatgtgaccacacagtccgtcatgggattcgaccccctgcccccatcggacacgatctattcatacgtcagacctgaaaggaaaggggaagaggagagaaacagcgtcatctggggctctcagctctgtgtctgcagacctaggagcttccctagcccacccaatgtccaggctttagcctgccgccctctatggcaggcaaaatcctatcagccatggaaacaccactgctctctgttgccagtcacagtcgctaagttgtatcacggcggaggagaagcaagagggaggagtgggtggggctcggagcctcaaccgggaccagaacaagcagatgcaggatgcgctagacacgatgggcagttaccaccgcagcgtcctgggggagcagctaggggacgccgatag

SEQ ID NO: 274126 - DNA, 1869 bp, Artificial Sequence
  derived and/or modified sequence
taggaaaacggactagaagatatcgatcgcatcctagagaggattgaggacagcactgggttgaaccgtcccggcccagctcccctgagctccaggaagcacgttctctacgtggagcacagacacttgaatccagacacagaactgaaaaggtattttggtgcccgggcaatcctgggggagcaaaggccacggcagagacaacgtgtgtaccccaagtgcacatggctgaccacccctaaaagcacctggccccgctacagcaaaccaggtctgtccatgcggctgctggaatcaaaaaaaggcctctccttctttgcgtttgagcacagtgaggagtaccagcaggctcagcacaagttcctggtggccgtggagtctatggagccgaacaacatcgtggttctgctccagacgagcccttaccacgttgactcactcctgcagctcagcgatgcctgccgctttcaagaggatcaggagatggctcgagacctcgtagagagagcgctgtacagcatggaatgtgcgttccaccccctgttcagtctcaccagtggggcctgccggctggattaccgcagacccgagaacaggagcttctacctggccctctacaagcagatgagcttcctggagaagcgaggctgcccgcgcacggcgctggagtactgcaagctcatcctgagtctcgagccggatgaggaccccctctgcatgctgctgctcatcgaccacctggccttgcgggcccggaactacgagtacctgatccgcctcttccaggagtgggaggctcatcggaacctgtcccagctccctaattttgccttctctgttccactggcgtatttcctgctgagccagcagacagacctccctgagtgtgagcagagctctgccaggcagaaggcctctctcctgatacagcaggcgctcaccatgttccctggagtcctcctgcccctgctcgagtcttgcagtgtgcggcccgacgccagcgtttccagtcaccgcttctttggacccaatgctgaaataagccagccccctgccctgagccagctggtgaacctgtaccttgggaggtcacactttctctggaaagagcccgccaccatgagctggctggaggagaacgtccacgaggttctgcaagcagtggacgccggggacccagccgtggaagcctgtgagaaccggcggaaggtgctctaccagcgtgcacccaggaatatccaccgccatgtgatcctctctgagatcaaggaagccgtcgctgccctgcccccggacgtgaccacgcagtctgtgatggggtttgatcctctgcctccttcggacacaatctactcctacgtcaggccagagaggaagggagaggaggagaggaacagtgttatttgggggtcacagctctgcgtttgcaggccacgttctttcccatctccaccgaatgtacaagcgcttgcgtgtcggcctctgtggcaggctaagtcctatcagccatggaaacaccattgctctcttcttccggtcactgttgccaaactataccatggagggggagaggcccgaggaaggagtggctgggggtctgaaccgcaaccagggcctgaacaggctgatgctggctgtgcgcgacatgatggccaacttccacctcaacgacctggaggcgccgcacgaggacgacgctgagggggagggggagtgggactgagcgtccgcagaggtgaccgaaaagccgtatgatgatgttcccgatttctctgttggtcggagtcggccagttgcctgaagtagggaagctgagtgtgtcgctccctggtccactgtttctcctataaatgtaaatgggtcacgctc

SEQ ID NO: 274127 - protein, 86 aa, Artificial Sequence
  derived and/or modified sequence
MAAVVAATRWWQLLLVLSAAGMGASGAPQPPNILLLLMDDRGRHCSQDGYPSAMASTPPTPMPETPTHRRRLWAASQTRSSSCRSF

SEQ ID NO: 274128 - DNA, 261 bp, Artificial Sequence
  derived and/or modified sequence
atggcagctgtggtggccgccacaagatggtggcagttgctgttggtcctgagcgccgctggcatgggagcctctggtgcgcctcagccacccaatattctgttgcttctcatggatgacagaggtcgccattgttcgcaagacgggtaccccagtgccatggcctccacgccacctactccaatgccagagactcccactcaccgtcgtcgattatgggccgcttcccagacccgcagttcttcctgccggtctttttag

SEQ ID NO: 274129 - DNA, 261 bp, Artificial Sequence
  derived and/or modified sequence
atggccgccgtggtggccgccacccggtggtggcagctgctgctggtgctctctgctgccggcatgggcgcatccggggccccccagccccctaatatccttttgctcctaatggacgaccgcggaaggcactgctcccaggatggatatccctcagccatggcttctacccctccaactccgatgcctgagacgcccacacatagacgtaggctgtgggcggcaagtcagacaagatctagttcgtgtcggagcttctag

SEQ ID NO: 274130 - DNA, 261 bp, Artificial Sequence
  derived and/or modified sequence
atggccgctgtcgtggctgcgacaaggtggtggcaactgctgctagtcctaagtgctgcaggaatgggcgcctccggagctcctcaaccccctaatatccttttacttctaatggacgacagaggacggcattgctcccaggatggatatcccagcgccatggccagtaccccacctacccccatgccagagaccccaactcaccggcgtaggctgtgggctgctagccaaaccaggagttcatcatgtagaagtttctag

SEQ ID NO: 274131 - RNA, 261 nt, Artificial Sequence
  derived and/or modified sequence
auggccgcugucguggcugcgacaaggugguggcaacugcugcuaguccuaagugcugcaggaaugggcgccuccggagcuccucaacccccuaauauccuuuuacuucuaauggacgacagaggacggcauugcucccaggauggauaucccagcgccauggccaguaccccaccuacccccaugccagagaccccaacucaccggcguaggcugugggcugcuagccaaaccaggaguucaucauguagaaguuucuag

SEQ ID NO: 274132 - DNA, 618 bp, Artificial Sequence
  derived and/or modified sequence
ctgggcccccaggcctgcaccgtggtgcccagaagcaagtgcttcgacctggagatggtgagcagcagatgggagcccctgctgctgctgaccgaggtgaccagcgccaacgaggtgtgggtgaccagcaacagcaccgccctggtgttcgtgagcgacaacgtgagagaggagctggaggaggtgcaggacctgctgtgcagaaccctgcccctgcccgtgcagctgagcttccccgaggaggccctggacgtggccagagtggcccacgtgttcgtgagccccttctgcttcagcgccggcagcgaggagagaagaagaagagagagagacgaccagatgtacagagagagactgagaaccctgctggtgatcgccgtggtgatgagcctgctgaacgccctgagcaccagcggcggcagcatcagctggaacgacttcgtgcacgagatgctggccaagggcgaggtgcagagagtgcaggtggtgcccgagagcgacgtggtggaggtgtacctgcaccccggcgccgtggtgttcggcagacccagactggccctgatgtacagaatgcaggtggccaacatcgacaagttcgaggagaagctgagagcctag

SEQ ID NO: 274133 - DNA, 618 bp, Artificial Sequence
  derived and/or modified sequence
ttgggtccccaggcatgtaccgtggtgcctaggtctaaatgctttgaccttgagatggtgtcgagccggtgggagcccctgctcttactgactgaagttacatctgcaaacgaggtctgggttacctctaactctactgctctagttttcgttagcgataacgtgagggaggagctcgaggaggtgcaagatctcctgtgcagaacgctgcctctgcccgtccaactgtcatttcccgaggaagccctggacgtggcgagggtggctcacgtctttgtctcccccttctgcttttccgctgggtctgaggagagacgccgacgagagagggatgatcaaatgtatagggaacggctgaggactttgctggtcatcgcggtcgtgatgagtttgttgaacgcactcagtacttccgggggcagcatcagttggaatgactttgttcatgagatgctggccaagggcgaagtgcagcgggtgcaggtggtgccagagtcagacgttgtggaggtgtatttgcaccctggcgctgtggtgttcggcagaccaaggctcgcccttatgtaccgtatgcaggtggcaaatattgacaagtttgaggaaaagctccgagcgtag

SEQ ID NO: 274134 - DNA, 618 bp, Artificial Sequence
  derived and/or modified sequence
ctgggcccccaggcctgcaccgtggtgcccaggagcaaatgttttgacctggagatggtgagcagccgctgggagcccctgctgctgctgacagaggtgaccagcgccaatgaggtgtgggtgaccagcaacagcacagccctggtgtttgtgtctgacaacgtgcgggaggagctggaggaggtgcaggacctgctgtgcaggaccctgcccctgcctgtgcagctgtccttccctgaggaggccctggatgtggcccgggtggcccacgtgtttgtgagccccttctgcttctctgctggcagcgaggagaggagaagaagagaaagagatgaccagatgtaccgggagcggctgcggaccctgctggtgattgctgtggtgatgagcctgctgaatgccctgagcaccagcggcggcagcatctcctggaatgactttgtgcatgagatgctggccaagggggaggtgcagagggtgcaggtggtgcctgagagtgatgtggtggaggtgtacctgcaccctggagctgtggtgtttggccggccccggctggccctgatgtacaggatgcaggtggccaacatcgacaagtttgaggagaagctgcgggcctag

SEQ ID NO: 274135 - DNA, 129 bp, Artificial Sequence
  derived and/or modified sequence
atggagctgctgcaggccgagggcgccaccgcccggtggccccccggccggggctgcggtccagtacccgctggaggagcccgaccccacgctccccctccgcccgcagccccttgtcagggtccatag

SEQ ID NO: 274136 - DNA, 618 bp, Artificial Sequence
  derived and/or modified sequence
ctgggcccccaggcctgcaccgtggtgccccggagcaagtgcttcgatctcgagatggtaagctctcgctgggagccactgctgctgctgacggaagtcacaagcgcaaacgaagtgtgggtgacctccaattcaaccgcactcgtgtttgtttcagacaacgtgcgggaggaattagaagaggtgcaggatctgctctgccgcaccctccctttgcccgtgcagctcagtttccctgaggaagctctggacgtggcaagggtggctcacgtgttcgtctcgccattttgctttagcgctggcagcgaagaacggcgtagacgggagagggatgaccaaatgtatcgagagcgcttacgcacgctactggtcatagctgtcgtgatgagtctgctgaatgccctgagcactagcggcggctcgatctcctggaatgacttcgtccacgagatgctggcaaaaggggaggtccagagggtacaggttgtacccgaaagcgatgtcgtggaagtgtaccttcacccaggtgccgttgtgtttggaagacctcgcctggccctgatgtatcgaatgcaagtagccaacatcgataaattcgaggagaagctcagagcttag

SEQ ID NO: 274137 - DNA, 618 bp, Artificial Sequence
  derived and/or modified sequence
cttggaccccaggcatgtactgtcgtcccacgtagcaaatgcttcgatctggagatggtgtcctctagatgggagccactccttcttctcaccgaggtgacatccgcaaatgaggtgtgggtcacgagcaactccacagcacttgtgttcgtgtccgataatgtccgcgaggaacttgaggaggttcaagatctgctttgtcgcacattgcctctgccagtgcaactgtcttttcccgaagaagcgctcgacgtcgctcgcgtagctcacgtttttgtgagtccgttttgcttcagtgctggatccgaagaacgcaggcgcagagagcgcgacgatcagatgtaccgggagcgactgcgcacactgctggtgatcgcggtggtcatgtcacttctgaatgctctttctacctcaggtggttccatctcatggaatgatttcgtgcacgaaatgctggcaaaaggagaagtgcagcgcgtgcaggtagtccccgagtctgacgtggttgaagtctaccttcaccccggagcggtcgtcttcggacgacccagactagcgttaatgtatcgaatgcaggtggcaaacatcgataaattcgaggagaagttaagagcttag

SEQ ID NO: 274138 - protein, 567 aa, Artificial Sequence
  derived and/or modified sequence
MPDSPAEVKTQPRSTPPSMPPPPPAASQGATRPPSFTPHTLMNGSSHSPTAINGAPCTPNGFSNGPATSSTASLSTQHLPPACGARQLSKLKRFLTTLQQFGSDISPEIGERVRTLVLGLVNSTLTIEEFHSKLQEATNFPLRPFVIPFLKANLPLLQRELLHCARLAKQTPAQYLAQHEQLLLDASASSPIDSSELLLEVNENGKRRTPDRTKENGSDRDPLHPEHLSKRPCTLNPAQRYSPSNGPPQPTPPPHYRLEDIAMAHHFRDAYRHPDPRELRERHRPLVVPGSRQEEVIDHKLTEREWAEEWKHLNNLLNCIMDMVEKTRRSLTVLRRCQEADREELNHWARRYSDAEDTKKGPAPAAARPRSSSAGPEGPQLDVPREFLPRTLTGYVPEDIWRKAEEAVNEVKRQAMSELQKAVSDAERKAHELITTERAKMERALAEAKRQASEDALTVINQQEDSSESCWNCGRKASETCSGCNAARYCGSFCQHRDWEKHHHVCGQSLQGPTAVVADPVPGPPEAAHSLGPSLPVGAASPSEAGSAGPSRPGSPSPPGPLDTVPR

SEQ ID NO: 274139 - protein, 615 aa, Artificial Sequence
  derived and/or modified sequence
MPASRLRDRAASSASGSTCGSMSQTHPVLESGLLASAGCSAPRGPRKGGPAPVDRKAKASAMPDSPAEVKTQPRSTPPSMPPPPPAASQGATRPPSFTPHTLMNGSSHSPTAINGAPCTPNGFSNGPATSSTASLSTQHLPPACGARQLSKLKRFLTTLQQFGSDISPEIGERVRTLVLGLVNSTLTIEEFHSKLQEATNFPLRPFVIPFLKANLPLLQRELLHCARLAKQTPAQYLAQHEQLLLDASASSPIDSSELLLEVNENGKRRTPDRTKENGSDRDPLHPERYSPSNGPPQPTPPPHYRLEDIAMAHHFRDAYRHPDPRELRERHRPLVVPGSRQEEVIDHKLTEREWAEEWKHLNNLLNCIMDMVEKTRRSLTVLRRCQEADREELNHWARRYSDAEDTKKGPAPAAARPRSSSAGPEGPQLDVPREFLPRTLTGYVPEDIWRKAEEAVNEVKRQAMSELQKAVSDAERKAHELITTERAKMERALAEAKRQASEDALTVINQQEDSSESCWNCGRKASETCSGCNAARYCGSFCQHRDWEKHHHVCGQSLQGPTAVVADPVPGPPEAAHSLGPSLPVGAASPSEAGSAGPSRPGSPSPPGPLDTVPR

SEQ ID NO: 274140 - protein, 577 aa, Artificial Sequence
  derived and/or modified sequence
MPASRLRDRAASSASGSTCGSMSQTHPVLESGLLASAGCSAPRGPRKGGPVMNGSSHSPTAINGAPCTPNGFSNGPATSSTASLSTQHLPPACGARQLSKLKRFLTTLQQFGSDISPEIGERVRTLVLGLVNSTLTIEEFHSKLQEATNFPLRPFVIPFLKANLPLLQRELLHCARLAKQTPAQYLAQHEQLLLDASASSPIDSSELLLEVNENGKRRTPDRTKENGSDRDPLHPEHLSKRPCTLNPAQRYSPSNGPPQPTPPPHYRLEDIAMAHHFRDAYRHPDPRELRERHRPLVVPGSRQEEVIDHKLTEREWAEEWKHLNNLLNCIMDMVEKTRRSLTVLRRCQEADREELNHWARRYSDAEDTKKGPAPAAARPRSSSAGPEGPQLDVPREFLPRTLTGYVPEDIWRKAEEAVNEVKRQAMSELQKAVSDAERKAHELITTERAKMERALAEAKRQASEDALTVINQQEDSSESCWNCGRKASETCSGCNAARYCGSFCQHRDWEKHHHVCGQSLQGPTAVVADPVPGPPEAAHSLGPSLPVGAASPSEAGSAGPSRPGSPSPPGPLDTVPR

SEQ ID NO: 274141 - DNA, 1704 bp, Artificial Sequence
  derived and/or modified sequence
atgccagattcgccagctgaagtcaagactcagcccaggagtactccgccctccatgccacccccaccgcccgccgcgtcccagggtgctactaggcccccctccttcacaccccacaccctgatgaacgggagctctcactcacctaccgcaattaacggggcgccttgcaccccaaacggattctccaatggtccagcgacctcttccacagcctccctttcaacccagcatcttccacctgcctgtggcgccagacagctgtcgaaactcaagaggttccttacgactctgcagcagttcgggtccgatatcagccccgagatcggcgaaagggtgaggacactggttctgggcctcgtgaacagtacccttactattgaagaattccattcaaagttgcaggaagctaccaatttcccactcagaccattcgtcatcccctttctgaaagcgaatctaccactgttgcagcgtgagctgctacactgcgcccgtttggctaaacagactcctgcccagtatttggctcagcatgagcagttactgttagatgcatcagccagctccccaatcgacagttccgagcttttgctggaagtgaacgagaacgggaagcgtagaaccccggaccgcactaaggagaatggttctgatcgcgatccattgcatccagagcacctgtccaagcgcccgtgcaccctaaacccagcacagcggtatagtccttctaacggcccaccgcagcctaccccaccgccgcattaccggctggaggacatagccatggctcaccattttagagatgcttaccgccacccagaccctcgcgagcttagagagcgccacagacccttggtggtacccggcagtcgccaggaggaggtgatcgaccataagctgaccgagagagagtgggctgaagaatggaaacacttaaacaacttgctaaattgcatcatggatatggtggaaaaaactcgccgctccctcaccgtacttaggaggtgccaggaagccgaccgggaagaactgaaccactgggcacgccggtacagcgacgctgaggatacaaagaagggacctgcccctgctgccgctagaccacgaagtagtagcgccggtcccgaaggaccccaactggacgttccaagggagttcctgcctaggactctcaccggctatgtgcctgaagacatttggaggaaagctgaggaggcggtgaacgaagtgaagaggcaggcgatgtctgaactacagaaggctgtgagcgacgcggagcggaaggctcacgagttgatcacgacagagcgggcgaaaatggaaagagctcttgccgaggctaagaggcaagcctccgaagacgcactcaccgttattaatcaacaggaggactcctctgaaagctgctggaactgcggccgtaaggcttccgaaacgtgtagtggctgcaacgccgcccgatactgtggctctttctgtcagcatcgggattgggaaaaacatcaccacgtctgtgggcagagtctccagggccccacagctgttgtcgcagatcctgttccaggtccccccgaggctgcgcatagcctgggtccgagcttgccggtgggcgcggcgtcgccgagcgaggcaggatcagccggcccctcccgaccagggtctcccagtccgcctggaccgttagataccgtgccaaggtag

SEQ ID NO: 274142 - DNA, 1704 bp, Artificial Sequence
  derived and/or modified sequence
atgcccgactcccccgccgaggtcaagacacagccaagatcaacccctccgtcaatgccccccccacctccagccgcttcccagggagcgaccagaccaccatcttttaccccgcatacgctgatgaacggttcatcccattctcctaccgccataaatggggccccctgcaccccaaacgggtttagcaacggccccgccacatctagcacagcaagcttaagtacacaacatctgcctcccgcctgcggcgcgagacaattgagtaaactcaagaggtttctgacaaccctgcagcagttcggctctgacattagcccagagatcggagaaagagtgagaacactggtcttaggcctggtgaatagcactttgaccatcgaggagtttcacagtaagcttcaggaggctacaaactttccactgcgccccttcgtaataccctttctcaaagccaacttgcctttactgcagcgtgagctgctccactgcgcaaggctcgctaagcaaactcctgcccaatatttggcccagcatgagcaattgctcctcgacgcctcagcctcatcaccaattgatagtagtgaacttctgctagaggtgaacgagaacggcaaacggcggaccccggacagaactaaggagaatggatccgaccgggaccccctgcatcccgaacatctgagtaaacgaccctgtaccctgaaccctgcacagagatatagtcctagcaacgggccccctcagcctaccccaccaccgcattacagattagaggatatcgccatggcacaccatttcagggatgcatatcggcacccagatccaagggagctcagggagagacaccgacctcttgtggtgccgggcagcagacaggaagaggttatagatcacaaactaaccgagagagaatgggccgaggaatggaagcacctgaataatttgttaaactgcatcatggatatggttgagaagacaagacgctcactcactgttctgagacggtgccaggaagccgacagggaggagctcaaccattgggctaggcggtatagtgatgcagaagacactaagaagggccccgcgccagcagccgctagaccaagatctagtagtgcggggccggagggaccacagctcgatgtccctagagagttcctgcctcgtaccctgacgggatacgttcctgaagatatctggagaaaagcagaggaggccgtgaacgaggttaaaagacaggcaatgtccgagctgcagaaagctgtctccgatgctgagcgaaaagctcacgaattgatcacaaccgagcgagctaaaatggagcgagcccttgctgaggccaaaagacaggcctccgaggacgcccttaccgtgattaaccagcaggaagattcatcagagtcctgttggaactgcggccgaaaggctagcgagacttgttcaggctgtaacgccgcccggtactgcggctcattttgccagcatagggactgggagaagcatcaccacgtctgcggccaatcactgcagggtccgacagcagtcgtggccgacccagtgcctggtcctcccgaggctgcccattctctaggaccatctcttcctgtgggtgccgcaagtccatccgaggccgggtctgcaggacccagccgaccggggagtccaagtccgcccggaccactagacaccgtcccccggtag

SEQ ID NO: 274143 - DNA, 1848 bp, Artificial Sequence
  derived and/or modified sequence
atgccagccagccgtttgagggacagagccgccagctctgcaagcggctctacatgcggctctatgtctcagactcaccccgtgctggagagtggcctactcgcctctgcagggtgctcggctccaaggggcccaaggaaggggggcccagccccagtcgaccggaaggccaaggcgtctgcaatgccagatagtcccgctgaggtcaagactcagccaagatctacccctccgtcgatgcctcccccaccaccagctgccagccagggcgctactcgcccaccaagctttaccccccacaccttaatgaacggcagctcacactccccgacagccattaatggggcaccgtgcacccccaatggattttcaaacggcccggccaccagtagtaccgcgagtttatccacacagcacctgcctccggcctgcggggccagacagctgtccaagctgaaacgattcttaacgacgctccagcagttcggcagcgatatttccccagagattggggaacgggtacgtacactggtgcttggcctggtgaattctacactgactatcgaggaattccattctaagctgcaggaagcgactaactttccgcttaggcccttcgtgatccccttcctcaaggccaatttgcctcttctccagagagagctgctgcattgcgcaagactcgcaaagcagactccagcccagtatttggctcagcacgagcagcttctgttggacgccagcgcatctagtccaatcgactcttccgaattgctactcgaggtcaatgagaacggcaaaaggcggaccccggatagaacaaaggagaacggatccgatcgggaccccctgcaccccgaaaggtactccccaagtaacggcccccctcagccaacccctcccccgcactataggttggaagacattgcgatggcacaccactttcgggacgcctatcggcaccctgatccgagagaattgcgggagcgccaccgaccactggtagttcccggatccaggcaagaggaggtgattgatcacaagctgacagaacgcgagtgggcagaagaatggaagcatttgaataacctcctaaactgtattatggatatggtggagaagaccaggcggagcctgaccgttctacggcggtgtcaggaagccgaccgcgaagagctgaaccattgggcaagacggtacagcgatgccgaggataccaaaaagggccccgctccggccgccgcacggccaagatcaagctccgcaggccccgaagggcctcagctggatgtgccccgagagtttctcccccggactctgactggctatgtgcccgaagacatctggcggaaagctgaggaggcggttaacgaagtaaagcgccaggccatgtcagagttgcagaaagcggtgagcgatgcggagcgaaaagctcatgagcttattacgacagaacgtgccaagatggagcgagcactggcagaagcgaagcggcaggcttcggaggacgccctcacagtaataaaccagcaggaagattcttctgagagctgttggaactgcggcagaaaagcttcagaaacctgctcaggctgcaatgctgcgaggtactgtggctccttctgtcagcacagggattgggagaaacaccaccatgtgtgcggccaatccctacaaggacctaccgcggttgtggcagaccccgtgcctggccccccggaggcagctcacagtctgggaccttctcttccagtgggtgctgctagtccttcggaggctggaagcgctggcccttccagacccggatctccttcccctccaggtccactggacaccgtaccccgatag

SEQ ID NO: 274144 - DNA, 1734 bp, Artificial Sequence
  derived and/or modified sequence
atgcccgcctctcgccttagggacagggcagcttccagcgctagtggtagtacatgcgggtcaatgtcacaaacacacccagtgctggaatccgggttgctagcctcagcgggctgctcagcacctagagggcctaggaaaggcggaccagtgatgaatggttcatcgcattccccaactgccattaacggcgctccctgcacgcctaacggcttttctaacggccctgccacatcctcaaccgccagcctcagcactcaacacttgccgcccgcctgcggcgccagacagctcagcaagctcaaaaggttcttaaccaccctgcaacagtttggctcggatatctccccagagattggcgagagggttcgcacgctagtcctgggtctcgtcaactctaccctcacaatagaggaattccattccaagctgcaggaggccaccaatttccctttgcgccccttcgtcataccctttctaaaggcaaatctgcccctactccaacgagagcttctgcattgcgcccggcttgccaagcaaacccccgcccagtatctagcacagcacgagcagctgctgttggacgcttcggccagcagcccaattgattccagtgagctgttactggaagtgaacgagaacggcaaaagacggacccctgacagaaccaaagaaaacggttccgaccgagacccactgcatccagagcacctttccaagcgcccatgcaccctcaaccctgctcagcgctactctcctagcaacggaccaccccagcccaccccacccccccactaccgactagaggacattgctatggctcaccactttcgggatgcataccgacaccctgatcctagagagctgagggagagacataggccattagttgtacccgggagcagacaagaagaggtcattgatcataagctcaccgagagggagtgggccgaggagtggaagcacctgaataaccttttgaactgtatcatggatatggtagagaaaaccaggcgttcgctgaccgtcctccggcgctgtcaggaagcagaccgtgaggagcttaatcactgggcgaggaggtactctgacgcagaggataccaaaaagggccccgccccagccgctgctaggccccggagctcgtcggctgggccagaagggccccagctggacgtgcccagggaattcctgccacggactctcacaggctacgtgccagaagacatctggagaaaagccgaagaggcagttaatgaagtcaagcggcaggccatgtcagaactgcaaaaggccgtcagcgacgccgaacgcaaagctcacgagctcatcactactgagcgtgctaaaatggagagagccctggccgaggcgaagcgtcaggcctctgaagacgccctgaccgtgatcaaccagcaggaggattcctccgaatcgtgttggaactgcggtcgtaaggctagtgagacctgctccggatgcaatgccgccagatattgcggctcgttttgtcagcatcgggactgggaaaagcaccatcatgtgtgcggccagtccctccaaggtcccaccgccgtagtcgctgaccccgtgcctggcccgccagaggctgcacactcgctgggtccctccttgccagtgggggccgcctcccccagcgaggcgggctcagcaggcccttctagaccaggttctcctagcccaccaggacccttagacaccgtgcctaggtag

SEQ ID NO: 274145 - DNA, 1704 bp, Artificial Sequence
  derived and/or modified sequence
atgccagacagccctgctgaggtgaagacccagcccaggagcaccccacccagcatgcctcctcctcctcctgctgccagccagggcgccaccaggcctccttccttcaccccccacaccctgatgaatggcagcagccacagccccacagccatcaatggagccccctgcacccccaacggcttcagcaatggacctgccaccagcagcacagccagcctgagcacccagcacctgcccccagcctgtggggcccggcagctgagcaagctgaagcgcttcctgaccaccctgcagcagtttggaagtgacatcagccctgagattggagagcgggtgaggaccctggtgctgggcctggtgaacagcaccctgaccatcgaggagttccacagcaagctgcaggaggccaccaacttccccctgcggccctttgtgatccccttcctgaaggccaacctgcccctgctgcagcgggagctgctgcactgtgcccggctggccaagcagaccccagcccagtacctggcccagcacgagcagctgctgctggatgccagcgccagcagccccatcgacagcagcgagctgctgctggaggtgaatgaaaatggcaagaggaggaccccagacaggaccaaggaaaatggaagtgaccgggaccccctgcaccctgagcacctgagcaagaggccctgcaccctgaacccagcccagcgctacagccccagcaatggaccaccccagcccaccccaccaccccactaccgcctggaggacatcgccatggcccaccacttcagagatgcctaccgccacccagacccccgggagctgcgggagcggcaccggcccctggtggtgcccggcagccggcaggaggaggtgattgaccacaagctgacagagcgggagtgggccgaggagtggaagcacctgaacaacctgctgaactgcatcatggacatggtggagaagacccggcgcagcctgactgtgctgcggcgctgccaggaggccgaccgggaggagctgaaccactgggcccggcgctacagtgatgctgaggacaccaagaagggccctgccccagctgctgcccggcccaggagcagcagcgctggccctgagggcccccagctggatgtgccccgggagttcctgcccaggaccctgaccggctacgtgcctgaggacatctggaggaaggccgaggaggccgtgaatgaggtgaagaggcaggccatgtctgagctgcagaaggctgtgtctgatgctgagaggaaggcccacgagctgatcaccacagagcgggccaagatggagcgggccctggccgaggccaagaggcaggcctctgaagatgccctgaccgtcatcaaccagcaggaggacagcagcgagagctgctggaactgtggcaggaaggccagcgagacctgcagcggctgcaatgctgcccgctactgcggcagcttctgccagcaccgggactgggagaagcaccaccacgtgtgtggccagagcctgcagggccccacagctgtggtggccgaccctgtgcccggccccccagaggccgcccacagcctgggccccagcctgcctgtgggcgccgccagccccagcgaggccggcagcgctggccccagcaggcctggcagccccagccccccaggccccctggacacagtgcccaggtag

SEQ ID NO: 274146 - DNA, 1848 bp, Artificial Sequence
  derived and/or modified sequence
atgcctgccagccggctgcgggaccgggccgccagcagcgccagcggcagcacctgtggctccatgagccagacccaccctgtgctggagagcggcctgctggccagcgctggctgcagcgccccccggggccccaggaaaggaggccctgcccctgtggacaggaaggccaaggccagcgccatgccagacagccctgctgaggtgaagacccagcccaggagcaccccacccagcatgcctcctcctcctcctgctgccagccagggcgccacccggccccccagcttcaccccccacaccctgatgaatggcagcagccacagccccacagccatcaacggggccccctgcaccccaaatggcttcagcaatggacctgccaccagcagcacagccagcctgagcacccagcacctgcccccagcctgtggggcccggcagctgagcaagctgaagcgcttcctgaccaccctgcagcagtttggaagtgacatcagccctgagatcggggagcgggtgaggaccctggtgctgggcctggtgaacagcaccctgaccatcgaggagttccacagcaagctgcaggaggccaccaacttccccctgcggcccttcgtcatccccttcctgaaggccaacctgcccctgctgcagcgggagctgctgcactgtgcccggctggccaagcagaccccagcccagtacctggcccagcacgagcagctgctgctggatgccagcgccagcagccccatcgacagcagcgagctgctgctggaggtgaatgaaaatggcaagaggaggaccccagacaggaccaaggaaaatggaagtgaccgggaccccctgcaccctgagcgctacagccccagcaatggaccaccccagcccaccccaccaccccactaccgcctggaggacatcgccatggcccaccacttcagagatgcctaccgccacccagacccccgggagctgcgggagcggcaccggcccctggtggtgcccggcagccggcaggaggaggtgattgaccacaagctgacagagcgggagtgggccgaggagtggaagcacctgaacaacctgctgaactgcatcatggacatggtggagaagacccggcgcagcctgactgtgctgcggcgctgccaggaggccgaccgggaggagctgaaccactgggcccggcgctacagtgatgctgaggacaccaagaagggccctgccccagctgctgcccggcccaggagcagcagcgctggccctgagggcccccagctggatgtgccccgggagttcctgcccaggaccctgaccggctacgtgcctgaggacatctggaggaaggccgaggaggccgtgaatgaggtgaagaggcaggccatgtctgagctgcagaaggctgtgtctgatgctgagaggaaggcccacgagctgatcaccacagagcgggccaagatggagcgggccctggccgaggccaagaggcaggcctctgaagatgccctgaccgtcatcaaccagcaggaggacagcagcgagagctgctggaactgtggcaggaaggccagcgagacctgcagcggctgcaatgctgcccgctactgcggcagcttctgccagcaccgggactgggagaagcaccaccacgtgtgtggccagagcctgcagggccccacagctgtggtggccgaccctgtgcccggccccccagaggccgcccacagcctgggccccagcctgcctgtgggcgccgccagccccagcgaggccggcagcgctggccccagcaggcctggcagccccagccccccaggccccctggacacagtgcccaggtag

SEQ ID NO: 274147 - DNA, 1734 bp, Artificial Sequence
  derived and/or modified sequence
atgcctgccagccggctgcgggaccgggccgccagcagcgccagcggcagcacctgtggctccatgagccagacccaccctgtgctggagagcggcctgctggccagcgctggctgcagcgccccccggggccccaggaaaggaggccctgtgatgaatggcagcagccacagccccacagccatcaatggagccccctgcacccccaacggcttcagcaatggacctgccaccagcagcacagccagcctgagcacccagcacctgcccccagcctgtggggcccggcagctgagcaagctgaagcgcttcctgaccaccctgcagcagtttggaagtgacatcagccctgagattggagagcgggtgaggaccctggtgctgggcctggtgaacagcaccctgaccatcgaggagttccacagcaagctgcaggaggccaccaacttccccctgcggccctttgtgatccccttcctgaaggccaacctgcccctgctgcagcgggagctgctgcactgtgcccggctggccaagcagaccccagcccagtacctggcccagcacgagcagctgctgctggatgccagcgccagcagccccatcgacagcagcgagctgctgctggaggtgaatgaaaatggcaagaggaggaccccagacaggaccaaggaaaatggaagtgaccgggaccccctgcaccctgagcacctgagcaagaggccctgcaccctgaacccagcccagcgctacagccccagcaatggaccaccccagcccaccccaccaccccactaccgcctggaggacatcgccatggcccaccacttcagagatgcctaccgccacccagacccccgggagctgcgggagcggcaccggcccctggtggtgcccggcagccggcaggaggaggtgattgaccacaagctgacagagcgggagtgggccgaggagtggaagcacctgaacaacctgctgaactgcatcatggacatggtggagaagacccggcgcagcctgactgtgctgcggcgctgccaggaggccgaccgggaggagctgaaccactgggcccggcgctacagtgatgctgaggacaccaagaagggccctgccccagctgctgcccggcccaggagcagcagcgctggccctgagggcccccagctggatgtgccccgggagttcctgcccaggaccctgaccggctacgtgcctgaggacatctggaggaaggccgaggaggccgtgaatgaggtgaagaggcaggccatgtctgagctgcagaaggctgtgtctgatgctgagaggaaggcccacgagctgatcaccacagagcgggccaagatggagcgggccctggccgaggccaagaggcaggcctctgaagatgccctgaccgtcatcaaccagcaggaggacagcagcgagagctgctggaactgtggcaggaaggccagcgagacctgcagcggctgcaatgctgcccgctactgcggcagcttctgccagcaccgggactgggagaagcaccaccacgtgtgtggccagagcctgcagggccccacagctgtggtggccgaccctgtgcccggccccccagaggccgcccacagcctgggccccagcctgcctgtgggcgccgccagccccagcgaggccggcagcgctggccccagcaggcctggcagccccagccccccaggccccctggacacagtgcccaggtag

SEQ ID NO: 274148 - DNA, 1704 bp, Artificial Sequence
  derived and/or modified sequence
atgcccgacagccccgccgaggtgaagacccagccccggagcaccccccccagtatgcctccccccccccccgccgcttctcagggggcaactcgcccgcccagttttacccctcacacactcatgaatggatcctcccacagccccaccgccattaacggagccccatgtactcccaatggtttttccaatgggcctgcaacctcatctaccgccagtctaagcacccagcatctgccccccgcctgtggcgcaagacagctgtcaaagctgaagcgctttctcaccaccctacagcagttcggtagcgacatcagccctgagattggggagcgagtccggactctggtgctgggtctggttaatagcacactgacaatagaagagtttcatagcaagctccaggaggccacgaactttccattgaggccctttgtaatcccattcctgaaggctaatctccccctcttacagcgtgagctgcttcactgcgccagattagcaaagcagactcccgcccagtacttggcccagcatgagcagctgctgctggatgcttctgcatcatcccctatcgattcgagcgagctgcttctggaagttaatgagaacggcaagcggcgaaccccagatagaacaaaggagaatggtagcgatagagacccactccatcccgaacacctcagtaagcggccatgtaccttaaatcccgctcaaagatattcgccaagtaatggaccaccgcagcctactcctcccccccattaccggcttgaagacattgcaatggctcaccatttccgggatgcataccgtcacccagaccctagagaactgcgcgagagacacaggcctctcgttgtacctggctctaggcaggaagaagtgatcgatcacaaactcacggagagggagtgggcagaagagtggaagcacttaaacaaccttcttaactgcatcatggacatggtggaaaagaccagacgaagcctcaccgtgctcaggcggtgccaggaggcagacagggaggagttgaatcattgggcacgcaggtactcggatgccgaggatacaaagaagggccctgcccccgccgcagcccgtcctcgatcttcatccgctgggcccgaaggtcctcagctggatgtacctagagaatttctccctaggactctgacaggctacgtgccggaagacatctggcggaaagctgaggaggccgtcaacgaggttaaacgtcaggcaatgtccgagctccagaaggccgtcagtgatgccgagaggaaagcccacgaactcatcaccactgagagagctaagatggagcgggctcttgccgaagcgaagcgccaggcctctgaagatgctctgacggtcatcaaccagcaggaggattcttctgagagttgttggaattgcggaagaaaggccagtgaaacctgctccggctgtaacgccgcgagatactgcggttctttctgccaacacagggattgggagaagcaccatcacgtctgtggccagtctttgcaaggccccaccgctgttgtggcagaccccgttcctggaccaccagaggctgcgcattctcttggcccgagcttgccagtgggcgccgccagtccaagcgaggcaggaagtgctggaccttctaggcccggaagtccatcaccccccggacccctggatacagtgcctcggtag

SEQ ID NO: 274149 - DNA, 1704 bp, Artificial Sequence
  derived and/or modified sequence
atgcccgacagccccgccgaggtgaagacccagccccggagcacccctccctcaatgccaccccccccgcctgcagcttcacagggagctacacgcccccccagcttcactccacacacactgatgaacgggagctctcattccccaacagcaatcaacggagccccttgcacccctaatggtttttcaaacggccccgctacctcatctactgcgagtctcagcacgcagcacctgccgcccgcgtgcggcgcccggcaactcagtaagttgaagcgctttcttacgactctgcagcagttcggctccgatatcagtcccgagatcggggaacgggtaagaaccttagttctgggacttgtcaatagcactcttaccatcgaagagtttcatagcaaactccaggaggctactaattttcccctgaggccgttcgtcatcccctttctgaaagctaacctacctttgttacaacgcgagctgctgcattgcgccaggctggcaaagcaaacccccgcgcagtacttagcacaacacgagcagttgcttctcgatgcttctgccagcagtcccattgactcgagtgagctgttattagaggtgaacgagaacggcaagcgaaggacaccggatcgcaccaaagaaaatggttctgaccgcgaccctctgcatcctgaacatctgtccaaacgcccttgtacgctgaatcccgctcagcgttacagccctagtaatggacccccacagcccacccccccgccccactacagactcgaagacatcgcgatggctcaccacttccgtgatgcttatagacatcctgaccctagggagctgcgtgagcgccatcgtccgctggtggtcccgggaagtcgccaggaggaagtgatagatcacaaactcactgaacgagagtgggccgaggagtggaaacatctgaacaatctgctaaactgcattatggacatggtggagaagacccgaaggtcccttacagttcttaggaggtgtcaagaggctgatagggaggaacttaaccactgggcgcggcggtatagtgacgccgaagacaccaaaaaagggcctgccccagctgccgcccgacctaggtccagctcagccggacctgagggcccacagttagacgttcccagagaattcctgccgaggaccctaactgggtatgtgcccgaagatatctggcgtaaggctgaagaggccgtcaatgaggtcaaacgtcaggccatgagcgaactacagaaggctgtctccgatgcagaacggaaagctcacgagctgattactactgagcgcgccaagatggaacgggcccttgcagaggccaagagacaggcttcagaggatgctctgaccgtgattaaccagcaggaagattcttccgagagctgctggaactgcggccggaaagcgtccgagacgtgcagtggatgtaacgccgcaagatattgtggctcattttgccagcatagagattgggagaaacatcatcacgtgtgcggtcagtcccttcaggggccaaccgcggtggtggctgacccggtgcccgggccgcccgaagccgcccactcattgggcccatcacttccagttggggctgctagcccctccgaggcaggcagcgccggcccctcccgccccgggtcgcctagtcctccagggcccctagatactgtcccacgctag

SEQ ID NO: 274150 - DNA, 1848 bp, Artificial Sequence
  derived and/or modified sequence
atgcccgccagccggctgcgggaccgggccgccagcagcgccagcgggtctacttgtggcagcatgagccaaacccaccccgtcctggagtctgggctgctggcctcagctggatgtagcgccccgagaggcccgagaaaggggggacctgctcctgttgaccgcaaggccaaggcatctgccatgcccgatagtccagcagaggtgaaaactcagcctaggtcgacgcccccctctatgcccccaccgccacccgccgccagccaaggagccacaagacctccgagtttcacaccccataccttgatgaacggatcctcccactctccaactgcaattaatggagctccttgtactcctaatggctttagtaacggaccagcaacgtctagcactgccagtctgagcactcagcacctgccccctgcttgcggcgcccggcagctgtccaagctgaaacgtttcctgaccaccttacagcagtttggctcagacatctctcctgagataggggagagggtgaggacgctggttctcggcctcgtcaatagtacactcactattgaggaatttcactcaaagctgcaggaggcgaccaatttccccttacgtccctttgtaatcccatttctcaaagcgaatttacctttgctccagcgcgagctattgcactgtgcacgtcttgcaaagcagacccccgcacaatacttggcccagcacgagcagctcctgctggacgcctcggccagcagcccaatcgactcatcagaacttctgctcgaagtcaatgaaaacgggaagcgccgcacgcccgatagaactaaggaaaatggctccgatcgcgatccactgcacccagagagatattcaccttcaaatggacctccacagccgacgccccctccccactaccgccttgaggacatcgcaatggcccatcacttcagagacgcctatcgtcacccagatccaagggaactgcgagagaggcatagacccctcgttgttcctgggagccgccaagaggaagttattgaccataaactcacagaacgtgagtgggcagaggagtggaaacaccttaacaacctgcttaactgcataatggatatggtcgaaaaaacaagaagatctttaacagtgttgcggaggtgccaagaggccgatagggaggaactgaatcactgggctcgccggtacagcgatgccgaggacaccaaaaaggggccagccccagccgctgcaagacctcgctcatcgagcgccgggccagaagggccgcagttggacgttccacgcgaattcctgcctcgcaccctgacaggatatgtgcccgaagacatctggcgcaaagccgaggaagcggtgaatgaagttaaaaggcaggccatgtccgagctccagaaagcagtctctgatgcggagaggaaggcacatgagctgatcacgactgagcgtgcgaaaatggagagggccctggctgaagccaaacggcaggcttcggaggatgccttgacagtaattaaccagcaggaagacagtagcgaatcttgctggaactgtggccgaaaagcctctgagacgtgtagcgggtgtaacgccgctcgttattgcggctccttttgccagcaccgagactgggaaaaacaccaccacgtatgcggccagtcattgcagggtcccaccgccgtggtggctgaccccgtccctggtcctcccgaggctgcccatagcctaggcccatccctccccgtgggagccgcgtcacccagcgaagcggggtccgccggaccatcgaggccaggcagtccttccccccccggccctttagatacagtacctcgctag

SEQ ID NO: 274151 - DNA, 1734 bp, Artificial Sequence
  derived and/or modified sequence
atgcccgccagccggctgcgggaccgggccgccagcagcgccagcggctctacatgcggtagtatgtcacagacacaccctgtgctggagtcgggcctgttggcctcagcagggtgtagcgctcctcgcggccccagaaagggcggacccgttatgaacggatctagccattcaccgaccgcgattaatggagccccctgcacgccaaacggcttttcgaacgggcctgcaacgtctagtacagccagcctcagcacgcagcatttacctcccgcgtgcggcgctcgccagcttagcaagctgaaaaggttcctcacaacgctgcagcagtttggttccgacatttccccggaaatcggggagcgtgtgagaactctcgtcctgggtctagtgaatagcacacttaccattgaggaatttcactctaaacttcaggaggccacaaattttcctctgcggcccttcgtcatcccttttctgaaggcaaatctcccactgctgcaacgggaactgttacattgcgctcggctggcaaagcagacgcccgcgcagtacctcgcacaacacgagcaactacttctagatgccagcgcttcatcacctatagattccagtgagcttctgctggaggtgaatgagaacggcaagcggcggacgccagataggacgaaggaaaatgggtcagatagggatccgctgcaccctgagcacctctctaagagaccgtgcacactgaatcctgcccagcgctactcacctagtaatggcccaccccagcccactccccctccccattaccggctcgaagacatcgccatggcacatcatttcagggacgcctaccggcatcccgaccctagggagctaagagagcgtcataggccgctggttgttcccggaagtcgacaagaggaggtcatcgaccacaaactgacagaaagagagtgggccgaagaatggaagcacctgaataatttactgaactgcatcatggatatggtcgagaaaacccgtcggagcctgacagtgcttcgcagatgccaggaggcggacagggaggagttaaaccattgggcaaggcgctattccgacgctgaagacactaaaaagggccccgcacctgccgctgctcgcccccggagctccagtgccgggcctgaaggaccccagcttgatgtgcccagggaattccttcctaggactctgaccggttatgtaccagaggatatctggcgcaaggccgaggaggcggtcaatgaagtaaagcgccaggcgatgtctgagctgcagaaggccgtgagcgatgctgaacggaaagcacacgagctgattacaacagaaagggcgaagatggagagagcgttggccgaagccaaacggcaggcaagcgaggatgctctcaccgtgattaaccagcaggaagactcatcagagagctgttggaactgtggcaggaaggcgtctgagacctgttcaggctgcaatgctgcacgctattgcggctctttttgccagcatagggattgggagaaacaccatcatgtctgtggccagtctctacagggtcccactgctgttgtcgccgatccggtgccaggcccaccggaagccgctcacagtctggggccctccctaccagtgggggccgccagccctagcgaagcgggctctgcgggtccctcccgccccggctctccttctccccctggcccactggacacggtgcctagatag

SEQ ID NO: 274152 - DNA, 1704 bp, Artificial Sequence
  derived and/or modified sequence
atgcccgatagtcctgcggaagttaagactcagccgagatcaacaccaccttccatgccgcctcctccccctgcagcgtctcaaggtgcaacacgtccaccttctttcacacctcatacattgatgaacgggtctagccattcccccactgcgatcaacggagcaccctgcacgcctaacggcttctcaaatggacccgcaacttcgagtactgcctcactgagcacgcagcatctgcctccggcttgcggtgctcgccaattaagtaaactgaagaggtttctaacaaccctgcagcagttcggatctgacatctcgcctgagataggggagagagttcgtactctggtgttgggcctggtgaactctaccttaacaattgaagagttccattcaaagctgcaagaggctacgaatttccctctccggccattcgtgattcctttcctgaaagccaaccttcctctcctccagcgggaactcctgcactgtgcccgtttggcaaaacagacaccagcgcagtacctggcacagcatgagcaactgctgctggacgcctccgcctccagtcctattgacagctccgagctgctgctcgaggtaaacgaaaacggcaagaggcgaacaccagacaggacgaaagaaaatggttccgacagggaccccctgcacccggaacatctgtctaaacgcccttgtacgctgaatcccgctcaacggtattcgccgtccaacggaccgcctcaaccgaccccaccccctcactatcggcttgaggacatagccatggcacaccactttagagacgcttatagacaccctgacccccgtgagctgagagagaggcacagacccctggtcgtgcccggaagccgtcaggaggaggttattgaccacaaattgacagaacgtgagtgggccgaagaatggaagcatttgaataatttgttaaattgtataatggacatggtggagaaaactaggcgctccctcactgtcctgagacgctgtcaggaagctgacagggaggagttaaaccattgggcaagacggtacagcgatgctgaagacaccaagaagggtccagcacctgcggctgcacggcctaggtcctcttctgccggtcccgaggggcctcagcttgacgttcctagggagttccttcctagaaccttaactgggtacgttccagaagatatttggcggaaggccgaggaggctgtaaatgaagtgaagcggcaggccatgtcagagttgcagaaggcagtgagtgacgcggagaggaaggcacatgaattgattacaacagagagagctaagatggaacgcgcactcgccgaggccaagcgccaggcctctgaagatgctctgaccgtaatcaaccagcaggaggattcctcagagtcatgttggaattgcggacgtaaagcctcagagacctgttctggctgcaatgctgcgcgatactgtggatctttctgtcagcatcgggactgggaaaagcatcatcacgtctgtggccagtccctccaaggcccaacggccgtcgtcgctgatccggtgcctggcccaccagaagcggctcacagcctgggcccatcgctaccagttggcgctgcctcaccttcagaggctggaagcgcgggtccctcaagacctggctctcccagccccccaggcccactggacactgtccccagatag

SEQ ID NO: 274153 - DNA, 1704 bp, Artificial Sequence
  derived and/or modified sequence
atgcccgatagcccggcagaagtaaagacacagccacggagcacccctccatcgatgccgcctccaccccctgccgcttcacagggcgctacgcgccctccttcgtttacccctcacaccttaatgaacggatcatcacactcccctacagccatcaatggggcaccctgtacacctaatgggttctccaacggaccagctacaagctccacagcatcgctgagcacacagcacctcccacctgcttgtggcgctcggcaactatcaaaacttaagaggttcctaaccacgctgcagcagttcgggagtgacatctccccggagataggggagagagtgcgaaccctagtcttggggctggtgaactcaacccttactattgaagaattccactcaaaactgcaggaagccacaaacttccccttgcggcctttcgttataccatttctcaaagcgaatctgcccctgctgcaacgggagcttctgcactgtgcgagacttgcgaagcaaactcctgctcagtaccttgcgcagcacgagcaattactacttgatgctagtgcctcgtcaccaatcgatagttccgagctcctcctggaggttaacgagaatggcaagcggcgaacccccgatagaactaaggagaacggctcagacagagacccacttcaccccgaacacctgtccaagaggccctgtaccctcaatcccgctcagcggtacagccccagcaacggtcctccccagcccacccccccaccgcactaccgcctggaggatatcgccatggcccaccattttagggatgcctataggcaccccgatcccagagagctgagagagcgccatcgacctctggtcgttcctggctccaggcaggaagaagtgatagatcataagctgactgagcgagaatgggcggaagaatggaagcatcttaacaacctgctgaattgtattatggacatggttgagaagaccagaagatccctgaccgtgctccggagatgtcaggaagctgaccgagaagaactgaaccactgggctcggaggtatagcgacgcggaggacactaaaaagggccctgccccagccgctgcccgaccccgttcaagctcagccggtcccgaaggcccacagttggatgttcctagagaattcctgccccgaactctgacaggatatgttccagaggacatctggcggaaagcagaagaagccgtgaatgaggtaaagcggcaggccatgagtgagcttcagaaggccgtgtcggatgctgagagaaaggctcacgagcttatcaccacagagcgcgctaaaatggaacgcgcattagcagaagccaagaggcaggctagtgaggacgccctgaccgttattaaccagcaggaggatagctctgagtcctgctggaattgtggacgcaaagccagcgaaacatgctccgggtgcaatgctgccaggtactgtggcagcttctgtcaacaccgcgactgggagaaacaccatcacgtgtgtggtcagagcctccaaggccctacagccgtagtcgctgaccctgttccaggaccacctgaggcagcgcatagccttggcccttctctgccagtgggcgctgctagcccgagtgaggccggatctgccggtcccagccgacctggatctccatcacccccaggcccattagatacggtgccaaggtag

SEQ ID NO: 274154 - DNA, 1848 bp, Artificial Sequence
  derived and/or modified sequence
atgcctgctagtcgcctgcgcgatagagccgctagtagcgcatctggcagtacttgtggatctatgagccagacgcaccccgttctcgaatcggggttgcttgcttctgccggatgctccgctcccagaggaccaagaaagggcggtcccgcacccgtggaccggaaggccaaggcctctgccatgcctgatagcccggctgaagtcaagactcagccaaggtctacaccaccctccatgcctccaccgcctcctgctgcttcccagggagccacccggccacctagcttcaccccccacaccctgatgaacggaagttctcacagccctactgccattaatggtgcaccctgcacccccaacgggttttcaaacggaccagccacatcgagcaccgcatctctaagcacacagcacttgccccctgcctgtggagcccgacagctgtctaagcttaaaagattcctgaccacgttgcaacagtttggaagcgacatctctccagagattggggagcgggtaaggactctggtgctcggccttgtgaactcaactttaactattgaggagttccatagtaaactgcaggaggcaacgaacttccctctgcgtccttttgtgatacctttcctaaaggcaaacttgcccctgctgcaacgggagctcctgcactgtgctcgccttgcaaagcagaccccagcccagtatctcgcccagcatgagcaacttctactggatgcatcggcctcttcgcccattgactctagtgaactcttgctggaggtgaatgaaaatggaaagcgccgtacaccagaccgtactaaagaaaacggctctgatcgcgatcccttgcaccctgaaaggtacagccctagcaacgggccacctcagccaactcccccaccccactatcggctggaggatatcgcaatggcccatcacttcagagatgcctatcgtcatcccgatccacgggagctgcgggaacgacacagaccattagtggtgcctggttctagacaggaagaagtgattgaccacaagctgacagagagggagtgggctgaagaatggaaacatctcaataacctactgaactgcattatggacatggtggaaaagaccagaagatcattgaccgttctgcggagatgccaagaagccgaccgggaagaactgaaccactgggcgcgtaggtactcagatgccgaagatactaagaaaggcccagcccctgcggcagcacgacctagatcctcctccgccggaccagaggggcctcagctggacgtgcctagggaattcttgccgcgaaccttgacgggatatgtgcccgaggacatctggagaaaagcggaggaagccgtcaatgaggtgaaacgtcaggcaatgtcggaattgcagaaggccgtcagtgatgctgagcgcaaggcccatgaactgattaccacagaacgagctaagatggaaagagctttagccgaagccaaaagacaggccagcgaagacgccttaaccgttatcaaccagcaggaagattcttccgagagctgctggaactgtgggcgaaaagctagtgagacatgcagtgggtgcaatgccgctagatattgtgggtctttttgccagcatagagattgggagaaacatcaccacgtctgcggacagtccctccagggcccaacagcagtggtggccgaccccgttcccggtccccctgaggccgctcattccttgggacctagtcttcccgtaggcgctgcatccccttctgaggctgggagtgctggtccgtcccgcccaggctctcctagccccccaggtccactggacaccgtgcctcgctag

SEQ ID NO: 274155 - DNA, 1734 bp, Artificial Sequence
  derived and/or modified sequence
atgcccgcatcaaggctgcgcgaccgtgcggcatcctcagccagcggttcgacatgtggctccatgtctcagacacatcctgtgttggaaagtggtctgctcgcaagcgccggatgctctgccccacgcggacccagaaagggaggccctgtaatgaatggttcttcccacagccccaccgctattaacggcgctccatgtacacctaatggcttcagcaatggacccgctacttccagtaccgctagcctgtccactcaacatctgcctccggcatgcggcgctcgccaactctctaagctgaaacgctttctgacaaccctgcaacagtttggttcggacatttcgcctgaaattggtgaacgtgttcggacgttggtcttggggctcgtcaatagtactctcaccattgaagaatttcatagtaaacttcaggaagctacaaatttccccctaagaccattcgtgatcccatttctgaaggccaatttaccacttctccaacgcgagctgttacactgtgcaagactcgccaagcaaaccccggctcagtatcttgcccagcacgagcagctgctgctcgacgccagcgcaagcagccctatcgatagctccgaactcctccttgaggtcaacgaaaacggcaaacgaaggacccctgatcgaaccaaggaaaacggatccgacagggatccactacacccagagcatctcagtaagcggccatgcacccttaatcccgctcaaaggtactctccctccaacggccctcctcaaccgactcctccacctcactaccgcctggaggatatagccatggcccaccactttcgtgatgcatacagacaccccgatcctagagagctgcgcgaacgtcacaggcctctggtagtccccggatcaaggcaggaagaggtgattgaccataaactgacagaacgggaatgggccgaagagtggaagcatcttaacaacttattaaactgcatcatggacatggtcgagaaaacaagacggtcactcaccgtcttacgacgatgccaagaggcagaccgtgaagagttgaatcactgggccagacgctattcagacgcagaggacacgaagaagggccctgctccagctgcagctagaccccgaagttcaagtgccggaccagagggccctcagcttgacgttcctcgagaattcttacccagaaccctaaccggatatgtgccagaagatatatggcgcaaggccgaagaagcagttaacgaggtgaagagacaggccatgtcagaactgcagaaggcagttagcgacgcagaacggaaggcacatgaactaatcacaaccgaacgcgctaagatggagagagcactagctgaggccaagcgccaagcctccgaggatgccctgaccgtgattaaccagcaggaagactccagcgaaagctgctggaactgcggacggaaagcaagcgaaacgtgtagcggttgtaacgctgcccgatattgcggtagtttttgccagcatcgggattgggagaaacatcaccacgtctgcggtcagtccttgcaaggacccacagcagtagttgcagaccctgtgccgggaccccctgaggcagcccatagcctgggtcctagcctaccagtgggggcagcgtcaccaagtgaagctgggtccgcaggtccctccagaccaggaagcccctcacctcccggtcctctggacacagtacctcggtag

SEQ ID NO: 274156 - DNA, 4033 bp, Artificial Sequence
  derived and/or modified sequence
ggccgccccgcgcgccccagccccgccgcgcgcctgagcccggtgcggcgccagaagacagcgcgcagccgcccctgagtcgtggaggcggggaccaagctggaaggagcagcgactcccggaccgagtcgcgagtgtgcgccgtccgccgcccgccggatcccccggaccccccgaccccccagtggacaggaaagctaaggcctcagcgatgccggactccccagcggaggtgaagacgcagccccggtccacaccccccagcatgccgcccccaccgcctgccgcatcccagggggccacacgccccccctccttcacgccacacacactgatgaacggcagcagccactcaccaacagccatcaatggtgcaccgtgcacacccaacggcttcagcaatggcccggccacctcgtccacagcctccttgtccacacagcacctgcccccagcctgcggggcccggcagctcagcaagctcaagcgcttcctcaccacactgcagcagtttggcagcgacatctccccagagattggggagcgcgtgcgcacactggtgctgggcctggtgaactcgacattgacgatcgaggagtttcattccaagcttcaggaggccaccaacttccctctgcggccgtttgtcattcccttcctgaaggcaaacctgcccttgctgcagcgggagctcctgcactgtgcacgcctggccaagcagacgcccgcccagtacttggcccagcatgagcagctcctgctggacgccagcgcctcctcccccatcgactcctcagagctgctactggaagtcaacgagaacggcaagaggaggacgcccgacaggaccaaagagaacgggtcagaccgcgacccgctgcaccccgagcacctcagcaaacggccatgcaccctgaaccctgcccagcgctacagccccagcaacgggccaccgcagcccacaccgccgccgcactaccgcctggaggacatagccatggcccaccacttccgagatgcctaccgccacccagacccccgggagctacgagagcgccatcggccgcttgtggtgcctgggtcccggcaggaagaagtgatcgaccacaagctcacagagcgtgagtgggcagaagagtggaagcacctcaacaacctcctgaactgcatcatggacatggtggagaagacgcggcgctcgctcacggtgctgcgcaggtgccaggaggccgaccgcgaggagctcaaccactgggcgcggcgctacagcgacgccgaggacacaaagaagggccccgctcccgccgcggcccggccccgcagcagctccgccggtcccgaagggcctcagctagacgtgcctcgcgagttcctgccgaggaccctcaccggctacgtgcctgaggacatctggaggaaggctgaagaggccgtgaatgaggtgaagcggcaggccatgtcggagctgcagaaagccgtgtcggacgcggagcgcaaagcgcacgagctcatcaccacggagcgtgccaagatggagcgggccctggccgaggcgaagcggcaggcctccgaggacgccctgacggtcatcaaccagcaggaggactccagcgagagctgctggaactgcgggcggaaagccagtgagacgtgcagcggctgcaacgcggcacgctactgcgggtccttctgccagcatcgggactgggagaagcatcaccacgtgtgtggccagagcctgcagggccccacagccgtggtggccgacccggtgcctggaccgcccgaagccgcccacagcctgggcccctccctgcctgtgggtgctgccagccccagcgaagccggctctgcggggccttctcgccccggctcccccagcccacctggcccactggacaccgtgccccgctgaccccactggcccctggcctgccggacacagcaccgtgccaaccccacccagctccaggcccaccggatgctgtgcctggcctccgatgcctggcctgccagacactgcgccccgcctgacctgggggagccgaccaattagtcactgctgctactgcccctctccgaaagaagacacagaaccaacaaaaccgcattcagtgcacctgcctcagctacctaatgattccgcgcggagacctcctgacaacgtctcttcaagcatcctcagaagcctcgactgagctttagacagcagagcagatgccgcaggcgcggcggctctgcccacctctcttttcctctctgtctgtctctccccctctgtcttctctatcctctctctctctatgactatcacacactttctcttcaatgaaaaaatcgaattggtggcttatattttcagcaaagaattttggggggttttgtgtgttggcaaaagagctactcagaaatggacaaagaaaacgggggggttctccccctcctgattaaaaagggagaaagaaaactgcgattttatagctggagatctgaacccagctgtgcccctcccccaggggcgtgaggctgatcagcgaagacgggaggaaagatttcgatttctgactcaagatgcatttttggtttcagatttttttttcctgtaatgttaaactctttggctttaagtaaaaatccaaaaagtttttttaaaaaagcaaaggaagcatacttgtgaactaccttgctagctagccagccaaggataccggacacacctctgctccaaaggaaatccaaaaaagcaaacacaagaaatcaaaatccaaaatttgtttgtcactgccaaagtatttttttcactgtttcacttgctcttgggtttgtttggatgtgggtctttttctcttctgttctgattttgtttgtgggtgtcgggatatttgggtgcagagggtttgtgcccagttagaagcgacttttgttctcttctgcgtaggcgttggtgcgtccgccgcgtgtgcgtggtccgtgtgccgttgctccggcctgcgtctccatatgtgtaggaaaggacacgccgtctgtcctcacgccccctgtgacttttcatatttccgttttccacttgtggaaaaaaagtgctaaagttttcttcccagagagagcataattccgaaacaaaactgtgacaatcttttgggttgattctcgactgcttttcgagcatgcggagccagcaggcctccctgaaacactgcttctcggccagcccgtcctcctctacctctctcctctccgcgccctccgacctctctcggccccctcaccccagctccgacctctctcagccccatcgccccaactccaacctctcggccccatcgccccaccgcagctactcccctttcttccaaacttttgcagaaaaaacaaaaaaactacaaacaaaagcagccctctgcctcctccccagggaagaccctgaccgtgtacatagccctggtgctcctgcccagccacccctcagatgcgttcgcctctggccctggggtgtgtctcggtgacgttttctatcagacgtgctccctcccatcctccagccctgcccaccctccctccactcctctcaactgcctcagcgatttcaagaaggaaataaagggataaagaaattcatgcttgcaccgagtacaaggacagacagcaggcacggcccgcagcctggcatctgtgcgtgtggcgtggcccgtggcttggcatctgtgtgcgtggtgtggcccgtggcctggcatctgtgtgcgtggcgtggcccgtggcctggcatctgtgtgtgtggcgtggcccgtggcctggcatctgtgcgcgtggcgtggcccgtggcctggcatctgtgtgcgtggctatcaggagttctaggaactcagtgcaatacgggagtgacccagctactgaaccagccacgaacagcccgccagaggcctgaagctgagcgtgtacgttaatgtgaatgtatatagtctttgcagaggtccaaatgatattcatgatggtaataaacgagatgtttgccaaataaaaaacagaaaccgca

SEQ ID NO: 274157 - DNA, 4190 bp, Artificial Sequence
  derived and/or modified sequence
agggcagaggacacccagttggtggccgggagggcctcggctttccagggacagaggcccaactccaggacgccccagctggcccagcccctcctctttccctcaaggctgcaggaggtcgggaaaggcagtcctggtagaggcctgtcctgggctccaggttggcccctgagggtggccctcctcatgccggcttcaagactgagggacagggcagccagttcagcctcgggatccacctgtggctccatgtcccagacgcaccctgtgctggagagcggcctcctggcatctgccggctgctccgcaccccggggtcccaggaagggcggcccagccccagtggacaggaaagctaaggcctcagcgatgccggactccccagcggaggtgaagacgcagccccggtccacaccccccagcatgccgcccccaccgcctgccgcatcccagggggccacacgccccccctccttcacgccacacacactgatgaacggcagcagccactcaccaacagccatcaatggtgcaccgtgcacacccaacggcttcagcaatggcccggccacctcgtccacagcctccttgtccacacagcacctgcccccagcctgcggggcccggcagctcagcaagctcaagcgcttcctcaccacactgcagcagtttggcagcgacatctccccagagattggggagcgcgtgcgcacactggtgctgggcctggtgaactcgacattgacgatcgaggagtttcattccaagcttcaggaggccaccaacttccctctgcggccgtttgtcattcccttcctgaaggcaaacctgcccttgctgcagcgggagctcctgcactgtgcacgcctggccaagcagacgcccgcccagtacttggcccagcatgagcagctcctgctggacgccagcgcctcctcccccatcgactcctcagagctgctactggaagtcaacgagaacggcaagaggaggacgcccgacaggaccaaagagaacgggtcagaccgcgacccgctgcaccccgagcacctcagcaaacggccatgcaccctgaaccctgcccagcgctacagccccagcaacgggccaccgcagcccacaccgccgccgcactaccgcctggaggacatagccatggcccaccacttccgagatgcctaccgccacccagacccccgggagctacgagagcgccatcggccgcttgtggtgcctgggtcccggcaggaagaagtgatcgaccacaagctcacagagcgtgagtgggcagaagagtggaagcacctcaacaacctcctgaactgcatcatggacatggtggagaagacgcggcgctcgctcacggtgctgcgcaggtgccaggaggccgaccgcgaggagctcaaccactgggcgcggcgctacagcgacgccgaggacacaaagaagggccccgctcccgccgcggcccggccccgcagcagctccgccggtcccgaagggcctcagctagacgtgcctcgcgagttcctgccgaggaccctcaccggctacgtgcctgaggacatctggaggaaggctgaagaggccgtgaatgaggtgaagcggcaggccatgtcggagctgcagaaagccgtgtcggacgcggagcgcaaagcgcacgagctcatcaccacggagcgtgccaagatggagcgggccctggccgaggcgaagcggcaggcctccgaggacgccctgacggtcatcaaccagcaggaggactccagcgagagctgctggaactgcgggcggaaagccagtgagacgtgcagcggctgcaacgcggcacgctactgcgggtccttctgccagcatcgggactgggagaagcatcaccacgtgtgtggccagagcctgcagggccccacagccgtggtggccgacccggtgcctggaccgcccgaagccgcccacagcctgggcccctccctgcctgtgggtgctgccagccccagcgaagccggctctgcggggccttctcgccccggctcccccagcccacctggcccactggacaccgtgccccgctgaccccactggcccctggcctgccggacacagcaccgtgccaaccccacccagctccaggcccaccggatgctgtgcctggcctccgatgcctggcctgccagacactgcgccccgcctgacctgggggagccgaccaattagtcactgctgctactgcccctctccgaaagaagacacagaaccaacaaaaccgcattcagtgcacctgcctcagctacctaatgattccgcgcggagacctcctgacaacgtctcttcaagcatcctcagaagcctcgactgagctttagacagcagagcagatgccgcaggcgcggcggctctgcccacctctcttttcctctctgtctgtctctccccctctgtcttctctatcctctctctctctatgactatcacacactttctcttcaatgaaaaaatcgaattggtggcttatattttcagcaaagaattttggggggttttgtgtgttggcaaaagagctactcagaaatggacaaagaaaacgggggggttctccccctcctgattaaaaagggagaaagaaaactgcgattttatagctggagatctgaacccagctgtgcccctcccccaggggcgtgaggctgatcagcgaagacgggaggaaagatttcgatttctgactcaagatgcatttttggtttcagatttttttttcctgtaatgttaaactctttggctttaagtaaaaatccaaaaagtttttttaaaaaagcaaaggaagcatacttgtgaactaccttgctagctagccagccaaggataccggacacacctctgctccaaaggaaatccaaaaaagcaaacacaagaaatcaaaatccaaaatttgtttgtcactgccaaagtatttttttcactgtttcacttgctcttgggtttgtttggatgtgggtctttttctcttctgttctgattttgtttgtgggtgtcgggatatttgggtgcagagggtttgtgcccagttagaagcgacttttgttctcttctgcgtaggcgttggtgcgtccgccgcgtgtgcgtggtccgtgtgccgttgctccggcctgcgtctccatatgtgtaggaaaggacacgccgtctgtcctcacgccccctgtgacttttcatatttccgttttccacttgtggaaaaaaagtgctaaagttttcttcccagagagagcataattccgaaacaaaactgtgacaatcttttgggttgattctcgactgcttttcgagcatgcggagccagcaggcctccctgaaacactgcttctcggccagcccgtcctcctctacctctctcctctccgcgccctccgacctctctcggccccctcaccccagctccgacctctctcagccccatcgccccaactccaacctctcggccccatcgccccaccgcagctactcccctttcttccaaacttttgcagaaaaaacaaaaaaactacaaacaaaagcagccctctgcctcctccccagggaagaccctgaccgtgtacatagccctggtgctcctgcccagccacccctcagatgcgttcgcctctggccctggggtgtgtctcggtgacgttttctatcagacgtgctccctcccatcctccagccctgcccaccctccctccactcctctcaactgcctcagcgatttcaagaaggaaataaagggataaagaaattcatgcttgcaccgagtacaaggacagacagcaggcacggcccgcagcctggcatctgtgcgtgtggcgtggcccgtggcttggcatctgtgtgcgtggtgtggcccgtggcctggcatctgtgtgcgtggcgtggcccgtggcctggcatctgtgtgtgtggcgtggcccgtggcctggcatctgtgcgcgtggcgtggcccgtggcctggcatctgtgtgcgtggctatcaggagttctaggaactcagtgcaatacgggagtgacccagctactgaaccagccacgaacagcccgccagaggcctgaagctgagcgtgtacgttaatgtgaatgtatatagtctttgcagaggtccaaatgatattcatgatggtaataaacgagatgtttgccaaataaaaaacagaaaccgc

SEQ ID NO: 274158 - DNA, 4151 bp, Artificial Sequence
  derived and/or modified sequence
agggcagaggacacccagttggtggccgggagggcctcggctttccagggacagaggcccaactccaggacgccccagctggcccagcccctcctctttccctcaaggctgcaggaggtcgggaaaggcagtcctggtagaggcctgtcctgggctccaggttggcccctgagggtggccctcctcatgccggcttcaagactgagggacagggcagccagttcagcctcgggatccacctgtggctccatgtcccagacgcaccctgtgctggagagcggcctcctggcatctgccggctgctccgcaccccggggtcccaggaagggcggcccagccccagtggacaggaaagctaaggcctcagcgatgccggactccccagcggaggtgaagacgcagccccggtccacaccccccagcatgccgcccccaccgcctgccgcatcccagggggccacacgccccccctccttcacgccacacacactgatgaacggcagcagccactcaccaacagccatcaatggtgcaccgtgcacacccaacggcttcagcaatggcccggccacctcgtccacagcctccttgtccacacagcacctgcccccagcctgcggggcccggcagctcagcaagctcaagcgcttcctcaccacactgcagcagtttggcagcgacatctccccagagattggggagcgcgtgcgcacactggtgctgggcctggtgaactcgacattgacgatcgaggagtttcattccaagcttcaggaggccaccaacttccctctgcggccgtttgtcattcccttcctgaaggcaaacctgcccttgctgcagcgggagctcctgcactgtgcacgcctggccaagcagacgcccgcccagtacttggcccagcatgagcagctcctgctggacgccagcgcctcctcccccatcgactcctcagagctgctactggaagtcaacgagaacggcaagaggaggacgcccgacaggaccaaagagaacgggtcagaccgcgacccgctgcaccccgagcgctacagccccagcaacgggccaccgcagcccacaccgccgccgcactaccgcctggaggacatagccatggcccaccacttccgagatgcctaccgccacccagacccccgggagctacgagagcgccatcggccgcttgtggtgcctgggtcccggcaggaagaagtgatcgaccacaagctcacagagcgtgagtgggcagaagagtggaagcacctcaacaacctcctgaactgcatcatggacatggtggagaagacgcggcgctcgctcacggtgctgcgcaggtgccaggaggccgaccgcgaggagctcaaccactgggcgcggcgctacagcgacgccgaggacacaaagaagggccccgctcccgccgcggcccggccccgcagcagctccgccggtcccgaagggcctcagctagacgtgcctcgcgagttcctgccgaggaccctcaccggctacgtgcctgaggacatctggaggaaggctgaagaggccgtgaatgaggtgaagcggcaggccatgtcggagctgcagaaagccgtgtcggacgcggagcgcaaagcgcacgagctcatcaccacggagcgtgccaagatggagcgggccctggccgaggcgaagcggcaggcctccgaggacgccctgacggtcatcaaccagcaggaggactccagcgagagctgctggaactgcgggcggaaagccagtgagacgtgcagcggctgcaacgcggcacgctactgcgggtccttctgccagcatcgggactgggagaagcatcaccacgtgtgtggccagagcctgcagggccccacagccgtggtggccgacccggtgcctggaccgcccgaagccgcccacagcctgggcccctccctgcctgtgggtgctgccagccccagcgaagccggctctgcggggccttctcgccccggctcccccagcccacctggcccactggacaccgtgccccgctgaccccactggcccctggcctgccggacacagcaccgtgccaaccccacccagctccaggcccaccggatgctgtgcctggcctccgatgcctggcctgccagacactgcgccccgcctgacctgggggagccgaccaattagtcactgctgctactgcccctctccgaaagaagacacagaaccaacaaaaccgcattcagtgcacctgcctcagctacctaatgattccgcgcggagacctcctgacaacgtctcttcaagcatcctcagaagcctcgactgagctttagacagcagagcagatgccgcaggcgcggcggctctgcccacctctcttttcctctctgtctgtctctccccctctgtcttctctatcctctctctctctatgactatcacacactttctcttcaatgaaaaaatcgaattggtggcttatattttcagcaaagaattttggggggttttgtgtgttggcaaaagagctactcagaaatggacaaagaaaacgggggggttctccccctcctgattaaaaagggagaaagaaaactgcgattttatagctggagatctgaacccagctgtgcccctcccccaggggcgtgaggctgatcagcgaagacgggaggaaagatttcgatttctgactcaagatgcatttttggtttcagatttttttttcctgtaatgttaaactctttggctttaagtaaaaatccaaaaagtttttttaaaaaagcaaaggaagcatacttgtgaactaccttgctagctagccagccaaggataccggacacacctctgctccaaaggaaatccaaaaaagcaaacacaagaaatcaaaatccaaaatttgtttgtcactgccaaagtatttttttcactgtttcacttgctcttgggtttgtttggatgtgggtctttttctcttctgttctgattttgtttgtgggtgtcgggatatttgggtgcagagggtttgtgcccagttagaagcgacttttgttctcttctgcgtaggcgttggtgcgtccgccgcgtgtgcgtggtccgtgtgccgttgctccggcctgcgtctccatatgtgtaggaaaggacacgccgtctgtcctcacgccccctgtgacttttcatatttccgttttccacttgtggaaaaaaagtgctaaagttttcttcccagagagagcataattccgaaacaaaactgtgacaatcttttgggttgattctcgactgcttttcgagcatgcggagccagcaggcctccctgaaacactgcttctcggccagcccgtcctcctctacctctctcctctccgcgccctccgacctctctcggccccctcaccccagctccgacctctctcagccccatcgccccaactccaacctctcggccccatcgccccaccgcagctactcccctttcttccaaacttttgcagaaaaaacaaaaaaactacaaacaaaagcagccctctgcctcctccccagggaagaccctgaccgtgtacatagccctggtgctcctgcccagccacccctcagatgcgttcgcctctggccctggggtgtgtctcggtgacgttttctatcagacgtgctccctcccatcctccagccctgcccaccctccctccactcctctcaactgcctcagcgatttcaagaaggaaataaagggataaagaaattcatgcttgcaccgagtacaaggacagacagcaggcacggcccgcagcctggcatctgtgcgtgtggcgtggcccgtggcttggcatctgtgtgcgtggtgtggcccgtggcctggcatctgtgtgcgtggcgtggcccgtggcctggcatctgtgtgtgtggcgtggcccgtggcctggcatctgtgcgcgtggcgtggcccgtggcctggcatctgtgtgcgtggctatcaggagttctaggaactcagtgcaatacgggagtgacccagctactgaaccagccacgaacagcccgccagaggcctgaagctgagcgtgtacgttaatgtgaatgtatatagtctttgcagaggtccaaatgatattcatgatggtaataaacgagatgtttgccaaataaaaaacagaaaccgc

SEQ ID NO: 274159 - DNA, 4037 bp, Artificial Sequence
  derived and/or modified sequence
agggcagaggacacccagttggtggccgggagggcctcggctttccagggacagaggcccaactccaggacgccccagctggcccagcccctcctctttccctcaaggctgcaggaggtcgggaaaggcagtcctggtagaggcctgtcctgggctccaggttggcccctgagggtggccctcctcatgccggcttcaagactgagggacagggcagccagttcagcctcgggatccacctgtggctccatgtcccagacgcaccctgtgctggagagcggcctcctggcatctgccggctgctccgcaccccggggtcccaggaagggcggcccagtgatgaacggcagcagccactcaccaacagccatcaatggtgcaccgtgcacacccaacggcttcagcaatggcccggccacctcgtccacagcctccttgtccacacagcacctgcccccagcctgcggggcccggcagctcagcaagctcaagcgcttcctcaccacactgcagcagtttggcagcgacatctccccagagattggggagcgcgtgcgcacactggtgctgggcctggtgaactcgacattgacgatcgaggagtttcattccaagcttcaggaggccaccaacttccctctgcggccgtttgtcattcccttcctgaaggcaaacctgcccttgctgcagcgggagctcctgcactgtgcacgcctggccaagcagacgcccgcccagtacttggcccagcatgagcagctcctgctggacgccagcgcctcctcccccatcgactcctcagagctgctactggaagtcaacgagaacggcaagaggaggacgcccgacaggaccaaagagaacgggtcagaccgcgacccgctgcaccccgagcacctcagcaaacggccatgcaccctgaaccctgcccagcgctacagccccagcaacgggccaccgcagcccacaccgccgccgcactaccgcctggaggacatagccatggcccaccacttccgagatgcctaccgccacccagacccccgggagctacgagagcgccatcggccgcttgtggtgcctgggtcccggcaggaagaagtgatcgaccacaagctcacagagcgtgagtgggcagaagagtggaagcacctcaacaacctcctgaactgcatcatggacatggtggagaagacgcggcgctcgctcacggtgctgcgcaggtgccaggaggccgaccgcgaggagctcaaccactgggcgcggcgctacagcgacgccgaggacacaaagaagggccccgctcccgccgcggcccggccccgcagcagctccgccggtcccgaagggcctcagctagacgtgcctcgcgagttcctgccgaggaccctcaccggctacgtgcctgaggacatctggaggaaggctgaagaggccgtgaatgaggtgaagcggcaggccatgtcggagctgcagaaagccgtgtcggacgcggagcgcaaagcgcacgagctcatcaccacggagcgtgccaagatggagcgggccctggccgaggcgaagcggcaggcctccgaggacgccctgacggtcatcaaccagcaggaggactccagcgagagctgctggaactgcgggcggaaagccagtgagacgtgcagcggctgcaacgcggcacgctactgcgggtccttctgccagcatcgggactgggagaagcatcaccacgtgtgtggccagagcctgcagggccccacagccgtggtggccgacccggtgcctggaccgcccgaagccgcccacagcctgggcccctccctgcctgtgggtgctgccagccccagcgaagccggctctgcggggccttctcgccccggctcccccagcccacctggcccactggacaccgtgccccgctgaccccactggcccctggcctgccggacacagcaccgtgccaaccccacccagctccaggcccaccggatgctgtgcctggcctccgatgcctggcctgccagacactgcgccccgcctgacctgggggagccgaccaattagtcactgctgctactgcccctctccgaaagaagacacagaaccaacaaaaccgcattcagtgcacctgcctcagctacctaatgattccgcgcggagacctcctgacaacgtctcttcaagcatcctcagaagcctcgactgagctttagacagcagagcagatgccgcaggcgcggcggctctgcccacctctcttttcctctctgtctgtctctccccctctgtcttctctatcctctctctctctatgactatcacacactttctcttcaatgaaaaaatcgaattggtggcttatattttcagcaaagaattttggggggttttgtgtgttggcaaaagagctactcagaaatggacaaagaaaacgggggggttctccccctcctgattaaaaagggagaaagaaaactgcgattttatagctggagatctgaacccagctgtgcccctcccccaggggcgtgaggctgatcagcgaagacgggaggaaagatttcgatttctgactcaagatgcatttttggtttcagatttttttttcctgtaatgttaaactctttggctttaagtaaaaatccaaaaagtttttttaaaaaagcaaaggaagcatacttgtgaactaccttgctagctagccagccaaggataccggacacacctctgctccaaaggaaatccaaaaaagcaaacacaagaaatcaaaatccaaaatttgtttgtcactgccaaagtatttttttcactgtttcacttgctcttgggtttgtttggatgtgggtctttttctcttctgttctgattttgtttgtgggtgtcgggatatttgggtgcagagggtttgtgcccagttagaagcgacttttgttctcttctgcgtaggcgttggtgcgtccgccgcgtgtgcgtggtccgtgtgccgttgctccggcctgcgtctccatatgtgtaggaaaggacacgccgtctgtcctcacgccccctgtgacttttcatatttccgttttccacttgtggaaaaaaagtgctaaagttttcttcccagagagagcataattccgaaacaaaactgtgacaatcttttgggttgattctcgactgcttttcgagcatgcggagccagcaggcctccctgaaacactgcttctcggccagcccgtcctcctctacctctctcctctccgcgccctccgacctctctcggccccctcaccccagctccgacctctctcagccccatcgccccaactccaacctctcggccccatcgccccaccgcagctactcccctttcttccaaacttttgcagaaaaaacaaaaaaactacaaacaaaagcagccctctgcctcctccccagggaagaccctgaccgtgtacatagccctggtgctcctgcccagccacccctcagatgcgttcgcctctggccctggggtgtgtctcggtgacgttttctatcagacgtgctccctcccatcctccagccctgcccaccctccctccactcctctcaactgcctcagcgatttcaagaaggaaataaagggataaagaaattcatgcttgcaccgagtacaaggacagacagcaggcacggcccgcagcctggcatctgtgcgtgtggcgtggcccgtggcttggcatctgtgtgcgtggtgtggcccgtggcctggcatctgtgtgcgtggcgtggcccgtggcctggcatctgtgtgtgtggcgtggcccgtggcctggcatctgtgcgcgtggcgtggcccgtggcctggcatctgtgtgcgtggctatcaggagttctaggaactcagtgcaatacgggagtgacccagctactgaaccagccacgaacagcccgccagaggcctgaagctgagcgtgtacgttaatgtgaatgtatatagtctttgcagaggtccaaatgatattcatgatggtaataaacgagatgtttgccaaataaaaaacagaaaccgc

SEQ ID NO: 274160 - DNA, 1704 bp, Artificial Sequence
  derived and/or modified sequence
atgcccgacagccccgccgaggtgaagacccagcccagaagcaccccccccagcatgcccccccccccccccgccgccagccagggcgccaccagaccccccagcttcaccccccacaccctgatgaacggcagcagccacagccccaccgccatcaacggcgccccctgcacccccaacggcttcagcaacggccccgccaccagcagcaccgccagcctgagcacccagcacctgccccccgcctgcggcgccagacagctgagcaagctgaagagattcctgaccaccctgcagcagttcggcagcgacatcagccccgagatcggcgagagagtgagaaccctggtgctgggcctggtgaacagcaccctgaccatcgaggagttccacagcaagctgcaggaggccaccaacttccccctgagacccttcgtgatccccttcctgaaggccaacctgcccctgctgcagagagagctgctgcactgcgccagactggccaagcagacccccgcccagtacctggcccagcacgagcagctgctgctggacgccagcgccagcagccccatcgacagcagcgagctgctgctggaggtgaacgagaacggcaagagaagaacccccgacagaaccaaggagaacggcagcgacagagaccccctgcaccccgagcacctgagcaagagaccctgcaccctgaaccccgcccagagatacagccccagcaacggccccccccagcccaccccccccccccactacagactggaggacatcgccatggcccaccacttcagagacgcctacagacaccccgaccccagagagctgagagagagacacagacccctggtggtgcccggcagcagacaggaggaggtgatcgaccacaagctgaccgagagagagtgggccgaggagtggaagcacctgaacaacctgctgaactgcatcatggacatggtggagaagaccagaagaagcctgaccgtgctgagaagatgccaggaggccgacagagaggagctgaaccactgggccagaagatacagcgacgccgaggacaccaagaagggccccgcccccgccgccgccagacccagaagcagcagcgccggccccgagggcccccagctggacgtgcccagagagttcctgcccagaaccctgaccggctacgtgcccgaggacatctggagaaaggccgaggaggccgtgaacgaggtgaagagacaggccatgagcgagctgcagaaggccgtgagcgacgccgagagaaaggcccacgagctgatcaccaccgagagagccaagatggagagagccctggccgaggccaagagacaggccagcgaggacgccctgaccgtgatcaaccagcaggaggacagcagcgagagctgctggaactgcggcagaaaggccagcgagacctgcagcggctgcaacgccgccagatactgcggcagcttctgccagcacagagactgggagaagcaccaccacgtgtgcggccagagcctgcagggccccaccgccgtggtggccgaccccgtgcccggcccccccgaggccgcccacagcctgggccccagcctgcccgtgggcgccgccagccccagcgaggccggcagcgccggccccagcagacccggcagccccagcccccccggccccctggacaccgtgcccagatag

SEQ ID NO: 274161 - DNA, 1848 bp, Artificial Sequence
  derived and/or modified sequence
atgcccgccagcagactgagagacagagccgccagcagcgccagcggcagcacctgcggcagcatgagccagacccaccccgtgctggagagcggcctgctggccagcgccggctgcagcgcccccagaggccccagaaagggcggccccgcccccgtggacagaaaggccaaggccagcgccatgcccgacagccccgccgaggtgaagacccagcccagaagcaccccccccagcatgcccccccccccccccgccgccagccagggcgccaccagaccccccagcttcaccccccacaccctgatgaacggcagcagccacagccccaccgccatcaacggcgccccctgcacccccaacggcttcagcaacggccccgccaccagcagcaccgccagcctgagcacccagcacctgccccccgcctgcggcgccagacagctgagcaagctgaagagattcctgaccaccctgcagcagttcggcagcgacatcagccccgagatcggcgagagagtgagaaccctggtgctgggcctggtgaacagcaccctgaccatcgaggagttccacagcaagctgcaggaggccaccaacttccccctgagacccttcgtgatccccttcctgaaggccaacctgcccctgctgcagagagagctgctgcactgcgccagactggccaagcagacccccgcccagtacctggcccagcacgagcagctgctgctggacgccagcgccagcagccccatcgacagcagcgagctgctgctggaggtgaacgagaacggcaagagaagaacccccgacagaaccaaggagaacggcagcgacagagaccccctgcaccccgagagatacagccccagcaacggccccccccagcccaccccccccccccactacagactggaggacatcgccatggcccaccacttcagagacgcctacagacaccccgaccccagagagctgagagagagacacagacccctggtggtgcccggcagcagacaggaggaggtgatcgaccacaagctgaccgagagagagtgggccgaggagtggaagcacctgaacaacctgctgaactgcatcatggacatggtggagaagaccagaagaagcctgaccgtgctgagaagatgccaggaggccgacagagaggagctgaaccactgggccagaagatacagcgacgccgaggacaccaagaagggccccgcccccgccgccgccagacccagaagcagcagcgccggccccgagggcccccagctggacgtgcccagagagttcctgcccagaaccctgaccggctacgtgcccgaggacatctggagaaaggccgaggaggccgtgaacgaggtgaagagacaggccatgagcgagctgcagaaggccgtgagcgacgccgagagaaaggcccacgagctgatcaccaccgagagagccaagatggagagagccctggccgaggccaagagacaggccagcgaggacgccctgaccgtgatcaaccagcaggaggacagcagcgagagctgctggaactgcggcagaaaggccagcgagacctgcagcggctgcaacgccgccagatactgcggcagcttctgccagcacagagactgggagaagcaccaccacgtgtgcggccagagcctgcagggccccaccgccgtggtggccgaccccgtgcccggcccccccgaggccgcccacagcctgggccccagcctgcccgtgggcgccgccagccccagcgaggccggcagcgccggccccagcagacccggcagccccagcccccccggccccctggacaccgtgcccagatag

SEQ ID NO: 274162 - DNA, 1734 bp, Artificial Sequence
  derived and/or modified sequence
atgcccgccagcagactgagagacagagccgccagcagcgccagcggcagcacctgcggcagcatgagccagacccaccccgtgctggagagcggcctgctggccagcgccggctgcagcgcccccagaggccccagaaagggcggccccgtgatgaacggcagcagccacagccccaccgccatcaacggcgccccctgcacccccaacggcttcagcaacggccccgccaccagcagcaccgccagcctgagcacccagcacctgccccccgcctgcggcgccagacagctgagcaagctgaagagattcctgaccaccctgcagcagttcggcagcgacatcagccccgagatcggcgagagagtgagaaccctggtgctgggcctggtgaacagcaccctgaccatcgaggagttccacagcaagctgcaggaggccaccaacttccccctgagacccttcgtgatccccttcctgaaggccaacctgcccctgctgcagagagagctgctgcactgcgccagactggccaagcagacccccgcccagtacctggcccagcacgagcagctgctgctggacgccagcgccagcagccccatcgacagcagcgagctgctgctggaggtgaacgagaacggcaagagaagaacccccgacagaaccaaggagaacggcagcgacagagaccccctgcaccccgagcacctgagcaagagaccctgcaccctgaaccccgcccagagatacagccccagcaacggccccccccagcccaccccccccccccactacagactggaggacatcgccatggcccaccacttcagagacgcctacagacaccccgaccccagagagctgagagagagacacagacccctggtggtgcccggcagcagacaggaggaggtgatcgaccacaagctgaccgagagagagtgggccgaggagtggaagcacctgaacaacctgctgaactgcatcatggacatggtggagaagaccagaagaagcctgaccgtgctgagaagatgccaggaggccgacagagaggagctgaaccactgggccagaagatacagcgacgccgaggacaccaagaagggccccgcccccgccgccgccagacccagaagcagcagcgccggccccgagggcccccagctggacgtgcccagagagttcctgcccagaaccctgaccggctacgtgcccgaggacatctggagaaaggccgaggaggccgtgaacgaggtgaagagacaggccatgagcgagctgcagaaggccgtgagcgacgccgagagaaaggcccacgagctgatcaccaccgagagagccaagatggagagagccctggccgaggccaagagacaggccagcgaggacgccctgaccgtgatcaaccagcaggaggacagcagcgagagctgctggaactgcggcagaaaggccagcgagacctgcagcggctgcaacgccgccagatactgcggcagcttctgccagcacagagactgggagaagcaccaccacgtgtgcggccagagcctgcagggccccaccgccgtggtggccgaccccgtgcccggcccccccgaggccgcccacagcctgggccccagcctgcccgtgggcgccgccagccccagcgaggccggcagcgccggccccagcagacccggcagccccagcccccccggccccctggacaccgtgcccagatag

SEQ ID NO: 274163 - protein, 400 aa, Artificial Sequence
  derived and/or modified sequence
MDMRPAAGPCPTFRGHCPPSTAASSRSCGAATRATTTPWIPAPAARPSCWTVRWQSSGHGTKRRRHGCPSTEGGTLGMPLRPPRVEGQGPQLGLRPRPCPARMWPSLLRTATRWGPGRASHLSQACPFAGPQGSWVRSSFHLQPRMIGDVLSEDENDKKQNAQSSDESFEPYPERKVSGKKSESKEAKKSEEPRIRKKPGPKPGWKKKLRCEREELPTIYKCPYQGCTAVYRGADGMKKHIKEHHEEVRERPCPHPGCNKVFMIDRYLQRHVKLIHTEVRNYICDECGQTFKQRKHLLVHQMRHSGAKPLQCEVCGFQCRQRASLKYHMTKHKAETELDFACDQCGRRFEKAHNLNVHMSMVHPLTQTQDKALPLEAEPPPGPPSPSVTTEGQAVKPEPT

SEQ ID NO: 274164 - DNA, 1203 bp, Artificial Sequence
  derived and/or modified sequence
atggacatgagacccgccgccggcccctgccccaccttcagaggccactgcccccccagcaccgccgccagcagcagaagctgcggcgccgccaccagagccaccaccaccccctggatccccgcccccgccgccagacccagctgctggaccgtgagatggcagagcagcggccacggcaccaagagaagaagacacggctgccccagcaccgagggcggcaccctgggcatgcccctgagaccccccagagtggagggccagggcccccagctgggcctgagacccagaccctgccccgccagaatgtggcccagcctgctgagaaccgccaccagatggggccccggcagagccagccacctgagccaggcctgccccttcgccggcccccagggcagctgggtgagaagcagcttccacctgcagcccagaatgatcggcgacgtgctgagcgaggacgagaacgacaagaagcagaacgcccagagcagcgacgagagcttcgagccctaccccgagagaaaggtgagcggcaagaagagcgagagcaaggaggccaagaagagcgaggagcccagaatcagaaagaagcccggccccaagcccggctggaagaagaagctgagatgcgagagagaggagctgcccaccatctacaagtgcccctaccagggctgcaccgccgtgtacagaggcgccgacggcatgaagaagcacatcaaggagcaccacgaggaggtgagagagagaccctgcccccaccccggctgcaacaaggtgttcatgatcgacagatacctgcagagacacgtgaagctgatccacaccgaggtgagaaactacatctgcgacgagtgcggccagaccttcaagcagagaaagcacctgctggtgcaccagatgagacacagcggcgccaagcccctgcagtgcgaggtgtgcggcttccagtgcagacagagagccagcctgaagtaccacatgaccaagcacaaggccgagaccgagctggacttcgcctgcgaccagtgcggcagaagattcgagaaggcccacaacctgaacgtgcacatgagcatggtgcaccccctgacccagacccaggacaaggccctgcccctggaggccgagcccccccccggcccccccagccccagcgtgaccaccgagggccaggccgtgaagcccgagcccacctag

SEQ ID NO: 274165 - DNA, 1203 bp, Artificial Sequence
  derived and/or modified sequence
atggatatgagacccgctgccggtccctgtcctaccttccgcgggcattgccccccatcaacagctgcttcctcccgtagctgtggagctgctacacgagccactacaacaccctggatccctgcgcccgctgcaagaccatcctgttggaccgtgcggtggcagtcgagcgggcatgggacaaagagaagaaggcacgggtgccccagcacagaaggcggaactttaggcatgccactccgccctccaagagtggagggtcagggtccacaactgggccttagaccacgcccttgtcccgctcgcatgtggcccagcctgctccggactgcaacccggtggggtccgggccgggcgtcacatctgtcccaggcttgtcctttcgccgggccccagggtagctgggtgaggagctcctttcacctccagcctcgtatgattggcgacgtattatctgaagacgaaaatgacaagaagcagaacgcccaaagctcagatgaaagttttgaaccatatccagagagaaaggtctccgggaagaagtctgagtctaaggaggcaaagaagagtgaggagcctcgaatcagaaagaaaccgggccccaagcctgggtggaaaaaaaagttaagatgcgagcgcgaggaattgccgactatttataaatgcccatatcagggctgcacggctgtgtacagaggtgccgacggcatgaagaaacacataaaggaacaccatgaggaagtgagggagcgcccttgccctcacccaggctgtaacaaagtctttatgatcgacaggtacctgcagcgacatgtgaaactgatccataccgaggttcgaaattacatctgcgacgagtgcggacaaacattcaaacaacgcaagcatctacttgtgcaccaaatgcggcatagcggcgcgaagcctcttcagtgtgaggtctgtgggtttcaatgtagacagagggcctcgctcaaataccacatgacaaagcataaagccgagacagagctagacttcgcatgcgatcaatgcggtagaaggttcgaaaaagcacacaacttaaacgttcatatgagcatggtgcatcccctcactcagacgcaggataaggctctgcctctagaagccgagcccccccctgggcctccatcaccctcggtgaccactgaaggccaagccgtgaagcctgagcccacgtag

SEQ ID NO: 274166 - DNA, 1203 bp, Artificial Sequence
  derived and/or modified sequence
atggacatgaggcctgctgctggcccctgccccaccttccggggccactgcccccccagcacagctgccagcagccgcagctgtggggccgccacccgggccaccaccaccccctggatcccagccccagctgcccggcccagctgctggacagtgcgctggcagagcagcggccacggcaccaagagaagaagacatggctgccccagcacagaaggaggcaccctgggcatgcccctgcggcccccccgggtggagggccagggcccccagctgggcctgcggccccggccctgcccagccaggatgtggcccagcctgctgaggacagccacccgctggggccctggccgggccagccacctgagccaggcctgcccctttgctggcccccagggctcctgggtgcgcagcagcttccacctgcagcccaggatgattggagatgtgctgtctgaagatgaaaatgacaagaagcagaatgcccagagcagtgatgagagctttgagccctacccagagaggaaggtgtctgggaagaagtctgagagcaaggaggccaagaagtctgaggagccccgcatcaggaagaagccaggccccaagccaggctggaagaagaagctgcgctgtgagcgggaggagctgcccaccatctacaagtgcccctaccagggctgcacagctgtgtacagaggagcagatggcatgaagaagcacatcaaggagcaccacgaggaggtgcgggagcggccctgcccccaccctggctgcaacaaggtgttcatgattgaccgctacctgcagagacatgtgaagctgatccacacagaggtgaggaactacatctgtgatgaatgtggccagaccttcaagcagaggaagcacctgctggtgcaccagatgaggcacagcggggccaagcccctgcagtgtgaggtgtgtggcttccagtgccggcagagggccagcctgaagtaccacatgaccaagcacaaggccgagacagagctggactttgcctgtgaccagtgtggcagaagatttgagaaggcccacaacctgaatgtgcacatgtccatggtgcaccccctgacccagacccaggacaaggccctgcccctggaggccgagcccccacctggcccccccagccccagcgtgaccacagagggccaggccgtgaagccagagcccacctag

SEQ ID NO: 274167 - DNA, 1203 bp, Artificial Sequence
  derived and/or modified sequence
atggacatgcggcccgccgccggcccctgccccaccttccggggccactgtccgccttccaccgccgcatcctcacgcagctgcggagccgcgacgagggctaccacaaccccttggatacctgctccggcggccaggcctagctgttggacggtcaggtggcaatccagcggccacggcactaaaagacgcaggcatggatgcccctctacagagggtgggacccttggcatgcccctgcggccccccagagttgaaggtcaaggtccccagttggggcttcggccgcgcccttgtcccgcgcggatgtggccatcactgctgcgcactgcaactagatgggggccaggacgtgctagtcatctgagccaggcatgtccgtttgcggggccacaaggaagctgggtgcgctcttctttccacctgcagccccgcatgattggggatgtgctttcagaagatgagaacgataaaaaacaaaatgcgcagtcctcagatgagtcgtttgagccctatccagaacggaaggtgtctggcaagaaatcggagtctaaagaggctaaaaaatcagaagaacctcggattcgaaaaaagcctggacccaagcctggatggaagaagaaacttcgatgtgagcgagaggaactgccaaccatctataaatgcccataccagggatgcactgctgtttatagaggcgcagatgggatgaagaaacatattaaagaacaccatgaggaagtgagggaacgcccctgcccacacccagggtgcaataaggtttttatgatcgaccgctatctacaacgacacgtcaaacttattcatacagaggtccgcaattatatctgcgatgaatgtggtcaaacctttaagcagcgtaagcatctcttagtgcaccagatgagacattctggagccaaacccctgcagtgcgaggtttgcggcttccagtgcagacaacgcgcatctcttaagtaccacatgaccaaacacaaagccgaaacggagctggactttgcttgcgaccagtgtgggcgacggttcgagaaggcccataacctcaacgttcatatgagcatggtccacccgctgactcagacacaggacaaagctctgcccttagaagcagaacctccacccgggccaccttctccttctgtcacaactgaaggccaagccgtcaagcccgaacctacttag

SEQ ID NO: 274168 - DNA, 1203 bp, Artificial Sequence
  derived and/or modified sequence
atggatatgagaccagcggcaggcccttgtcctaccttccgcggtcattgtccaccgagcactgcagcctctagtcggtcttgcggcgcagccaccagagccaccaccactccttggatcccggcacccgcagcaagacctagttgctggaccgttcgttggcagtcctccgggcatggtacaaagagacggcgtcacgggtgcccgtccactgagggcggtaccttggggatgcctctgaggccgccacgagttgaaggacagggaccacagctggggcttagacctcgcccatgtcctgctagaatgtggccttccctcctccgcactgctacacgatgggggcctgggagagcctcccacctgagtcaagcctgtcccttcgccggaccccagggaagctgggtgcgctccagtttccatctgcagccccgtatgatcggcgacgtgcttagtgaggacgagaatgataagaaacagaatgcacagagttccgatgaatcatttgaaccttatccagagcgaaaggtttcaggcaaaaagagcgagagcaaagaagcaaaaaaaagcgaggagcccagaattcgcaagaaaccgggacccaaacctgggtggaagaagaagttgcggtgcgagcgagaggaactccctacaatctacaagtgcccataccaggggtgcaccgccgtgtatcggggtgccgatggaatgaagaagcatattaaggagcatcatgaggaagtccgcgaaagaccttgtccacaccccggttgcaacaaggtgtttatgattgatagatacctgcaaaggcacgtaaagctgatccacacagaagtgcggaactatatctgtgacgaatgcgggcagactttcaagcagcgaaaacacctgctggttcatcagatgaggcactcaggcgctaagccgttgcagtgcgaggtgtgtggcttccagtgcaggcagcgagcttccctgaaatatcatatgactaaacataaggcggagacggagctggattttgcttgtgatcagtgtggtcggcgatttgagaaggcacacaatctcaatgtgcacatgagcatggtacatcctctgacacaaactcaagataaagcactgccactcgaagcggaacccccacctggaccaccctccccttctgtcactacagagggccaagctgtgaaacccgagcctacatag

SEQ ID NO: 274169 - protein, 342 aa, Artificial Sequence
  derived and/or modified sequence
CREEISRIEYIHSKNFIHRDVKPDNFLMGLGKKGNLVYIIDFGLAKKYRDARTHQHIPYRENKNLTGTARYASINTHLGIEQSRRDDLESLGYVLMYFNLGSLPWQGLKAATKRQKYERISEKKMSTPIEVLCKGYPSEFATYLNFCRSLRFDDKPDYSYLRQLFRNLFHRQGFSYDYVFDWNMLKFGASRAADDAERERRDREERLRHSRNPATRGLPSTASGRLRGTQEVAPPTPLTPTSHTANTSPRPVSGMERERKVSMRLHRGAPVNISSSDLTGRQDTSRMSTSQVGAELPGGRWASGYPVRVKSGLWFLQGFFFPFFPPFLRVFNLARVWRLGCR

SEQ ID NO: 274170 - DNA, 1029 bp, Artificial Sequence
  derived and/or modified sequence
tgtagagaggagatatctaggatcgagtacatacattccaagaattttatccatagggacgttaaacccgacaatttcctgatggggctaggcaaaaaggggaacctggtatatatcatagactttgggctcgccaaaaagtatagggacgctcggacccatcagcacatcccttacagagagaataagaatttgaccgggacagcacgctatgcatccatcaacacccatttaggtatagaacagagtaggcgtgatgacctggaatcattagggtacgttctgatgtacttcaacctgggatccttgccctggcaagggctcaaggctgccacaaagcgacaaaagtacgaacggattagcgaaaaaaaaatgtccactcctatagaggtcttatgtaaagggtatccatccgagtttgctacctacctgaacttctgccggtcattaaggttcgatgacaagcccgattactcctatctgagacagctgttcaggaacctgtttcaccgccaggggttcagttatgattatgttttcgactggaacatgctcaagttcggggcaagtagggcagccgatgacgctgagagggaaaggagggatcgcgaagagcgcctccggcactctcggaatccggccacacgtggcctcccctccacagccagcggccggctccggggcacccaagaggtcgctccgcccactccactcacgcccacatcgcatacggccaacacaagtcccagacccgtgagtgggatggagagagagaggaaagtgtccatgaggctacatcggggggctcccgtgaacattagctcatccgacctgaccgggcgacaggacacatcgagaatgagtacctcccaagtaggggctgagctgcctggcggtagatgggcctccggatatcccgttcgggtgaagtctgggctttggtttctgcagggatttttcttcccctttttcccgcctttcctgcgcgtgttcaacctggctagagtgtggcgccttggctgtaggtag

SEQ ID NO: 274171 - DNA, 1029 bp, Artificial Sequence
  derived and/or modified sequence
tgccgggaggagatcagccgcatcgagtacatccacagcaagaacttcatccacagagatgtgaagccagacaacttcctgatgggcctgggcaagaagggcaacctggtgtacatcatcgactttggcctggccaagaagtacagagatgcccggacccaccagcacatcccctaccgggagaacaagaacctgaccggcacagcccgctatgccagcatcaacacccacctgggcatcgagcagagcagaagagatgacctggagagcctgggctacgtgctgatgtacttcaacctgggcagcctgccctggcagggcctgaaggccgccaccaagaggcagaagtatgagcgcatcagcgagaagaagatgagcacccccatcgaggtgctgtgcaagggctaccccagcgagtttgccacctacctgaacttctgccgcagcctgcgctttgatgacaagccagactacagctacctgcggcagctgttcaggaacctcttccaccggcagggcttctcctatgactatgtgtttgactggaacatgctgaagtttggagccagcagagctgctgatgatgctgagcgggagcggcgggaccgggaggagcggctgcggcacagcagaaatcctgccacccggggcctgcccagcacagccagcggccgcctgcggggcacccaggaggtggccccacccacccccctgacccccaccagccacacagccaacaccagccccaggcctgtgtctggcatggagcgggagaggaaggtgtccatgaggctgcacagaggagcccctgtgaacatcagcagcagtgacctgaccggccggcaggacaccagcaggatgagcaccagccaggtgggcgctgagctgcccggcggccgctgggccagcggctaccctgtgcgggtgaagagcggcctgtggttcctgcagggcttcttcttccccttcttcccccccttcctgcgggtcttcaacctggcccgggtgtggaggctgggctgcaggtag

SEQ ID NO: 274172 - DNA, 1029 bp, Artificial Sequence
  derived and/or modified sequence
tgccgggaggagatcagccggatcgagtacatccacagcaagaactttatacatagggacgtgaaaccagacaacttcctgatgggcctgggcaaaaagggcaatttggtgtacatcatcgattttggactggcaaaaaaatatcgtgacgcgcggactcatcagcatataccatatcgggagaacaagaacctcacaggaactgctcgctacgccagcatcaacacacaccttggcattgaacaatcgcgaagagacgacctcgagtcactggggtatgtgctgatgtacttcaatctgggctcccttccttggcaggggttgaaggccgctaccaaacgccagaaatatgagaggatatccgaaaagaagatgtcaacccccattgaagtgttatgcaaaggatatcccagcgaatttgcgacatatctgaatttctgccgttccctgcgtttcgacgacaaaccggattactcatacttgaggcagctgttccgcaacctgttccacagacagggattctcctatgattatgtatttgactggaacatgctgaagttcggcgcttctagagccgcagacgatgccgagagagagcggagggaccgcgaagaacgccttagacactctagaaacccggctacccgaggactgccaagtacggcctctggccgcctgagggggacccaggaagtggcccctcccacacctttgacccctacttctcacactgccaacacctcaccaaggcccgtttctgggatggaacgggagagaaaggtgagtatgcgcctgcacagaggtgcgcctgtaaacatatccagtagcgacctcacaggccgccaagacacaagtcgaatgagcactagccaggtgggggcggaattgcccggtggtcgctgggcctctggatatcccgtgcgagttaaaagtggcctgtggttccttcaaggattcttctttccattctttcctccattccttagggtgtttaacttggcccgggtatggaggcttggctgtcgctag

SEQ ID NO: 274173 - DNA, 1029 bp, Artificial Sequence
  derived and/or modified sequence
tgccgggaggaaatatctagaattgaatacattcattcaaaaaacttcattcatagggatgtgaaacctgacaactttctgatgggcttgggcaagaaaggtaacctggtgtatattatagactttggcctggccaagaaataccgggatgctcgtacccaccagcacattccctaccgggaaaataagaatctaacaggcactgcgaggtacgcctcaatcaatacccacctcggtatcgaacaatccaggcgtgacgacctggagtcgctggggtatgtgctcatgtatttcaacctgggctcactcccatggcaaggactaaaggcagcaacaaagagacagaaatacgagcgaataagcgaaaagaagatgagcacccccatcgaggtcttatgcaaagggtatccaagtgaattcgcaacctacctgaacttttgccggagtctgcgcttcgacgacaagcccgactacagctatctgcggcaattgttcagaaatttgtttcatagacagggctttagctacgattatgtcttcgactggaacatgctcaaatttggcgcttcccgcgctgccgacgatgctgaaagagagcgtcgagaccgcgaggagcgactacgccattccaggaaccctgctacccgcggactgccgagcacagcgtccgggaggctgcgcggaacccaagaggtagctccccctaccccgttgactcccacaagccacacagctaatacctccccgaggcccgtcagtgggatggagcgggaacggaaagtgtccatgagactgcacagaggtgcgccagtgaacatcagctcaagcgatctgactggcaggcaagacacttcccgtatgagtacctctcaggttggggctgaacttccaggaggtaggtgggctagcggataccctgtgcgagttaagagcggcctgtggttcctacaaggcttcttcttccctttcttccctccatttctcagggtctttaatctcgctagggtctggcggcttgggtgtcgctag

SEQ ID NO: 274174 - DNA, 1520 bp, Artificial Sequence
  derived and/or modified sequence
gcgcgatggcggcggctcctttaggcagctgaaaggggatttaggcccggaagatccgagtccatccgcggcggggagagggcaagcgggaccggtaggggccggagcagcggcggcggcgctcggactgtcccatccgccccgtattgaggcgctgggagcggcggggcgacaggaaagcgatggtgaaagcggggccgtgaggggggcggagccgggagccggacccgcagtagcggcagcagcggcgccgcctcccagagttcagacccaggaagcggccgggagggcaggagcgaatcgggccgccgccgccatggagctgagagtcgggaacaggtaccggctgggccggaagatcggcagcggctccttcggagacatctatctcggtacggacattgctgcaggagaagaggttgccatcaagcttgaatgtgtcaaaaccaaacaccctcagctccacattgagagcaaaatctacaagatgatgcagggaggagatcagtcgcatcgaatacattcattcaaagaacttcatccaccgggatgtgaagccagacaacttcctcatgggcctggggaagaagggcaacctggtgtacatcatcgacttcgggctggccaagaagtaccgggatgcacgcacccaccagcacatcccctatcgtgagaacaagaacctcacggggacggcgcggtacgcctccatcaacacgcaccttggaattgaacaatcccgaagagatgacttggagtctctgggctacgtgctaatgtacttcaacctgggctctctcccctggcaggggctgaaggctgccaccaagagacagaaatacgaaaggattagcgagaagaaaatgtccacccccatcgaagtgttgtgtaaaggctacccttccgaatttgccacatacctgaatttctgccgttccttgcgttttgacgacaagcctgactactcgtacctgcggcagcttttccggaatctgttccatcgccagggcttctcctatgactacgtgttcgactggaacatgctcaaatttggtgccagccgggccgccgatgacgccgagcgggagcgcagggaccgagaggagcggctgagacactcgcggaacccggctacccgcggcctcccttccacagcctccggccgcctgcgggggacgcaggaagtggctccccccacacccctcacccctacctcacacacggctaacacctccccccggcccgtctccggcatggagagagagcggaaagtgagtatgcggctgcaccgcggggcccccgtcaacatctcctcgtccgacctcacaggccgacaagatacctctcgcatgtccacctcacaggtaggtgcagagctcccgggcgggcgctgggcctcgggctaccccgtccgagtcaagagcgggctgtggtttctccagggcttcttctttcctttcttccccccatttttgagagtttttaatctcgccagggtgtggcgtcttggttgcagatga

SEQ ID NO: 274175 - DNA, 1029 bp, Artificial Sequence
  derived and/or modified sequence
tgcagagaggagatcagcagaatcgagtacatccacagcaagaacttcatccacagagacgtgaagcccgacaacttcctgatgggcctgggcaagaagggcaacctggtgtacatcatcgacttcggcctggccaagaagtacagagacgccagaacccaccagcacatcccctacagagagaacaagaacctgaccggcaccgccagatacgccagcatcaacacccacctgggcatcgagcagagcagaagagacgacctggagagcctgggctacgtgctgatgtacttcaacctgggcagcctgccctggcagggcctgaaggccgccaccaagagacagaagtacgagagaatcagcgagaagaagatgagcacccccatcgaggtgctgtgcaagggctaccccagcgagttcgccacctacctgaacttctgcagaagcctgagattcgacgacaagcccgactacagctacctgagacagctgttcagaaacctgttccacagacagggcttcagctacgactacgtgttcgactggaacatgctgaagttcggcgccagcagagccgccgacgacgccgagagagagagaagagacagagaggagagactgagacacagcagaaaccccgccaccagaggcctgcccagcaccgccagcggcagactgagaggcacccaggaggtggccccccccacccccctgacccccaccagccacaccgccaacaccagccccagacccgtgagcggcatggagagagagagaaaggtgagcatgagactgcacagaggcgcccccgtgaacatcagcagcagcgacctgaccggcagacaggacaccagcagaatgagcaccagccaggtgggcgccgagctgcccggcggcagatgggccagcggctaccccgtgagagtgaagagcggcctgtggttcctgcagggcttcttcttccccttcttcccccccttcctgagagtgttcaacctggccagagtgtggagactgggctgcagatag

SEQ ID NO: 274176 - protein, 126 aa, Artificial Sequence
  derived and/or modified sequence
MELRVGNRYRLGRKIGSGSFGDIYLGTDIAAGEEVAIKLECVKTKHPQLHIESKIYKMMQGGVGIPTIRWCGAEGDYNVMVMELLGPSLEDLFNFCSRKFSLKTVLLLADQMNNPEEMTWSLWATC

SEQ ID NO: 274177 - protein, 486 aa, Artificial Sequence
  derived and/or modified sequence
MSGSTPFQMRLVHLDLKGAPPKVSYLSEIFPLFRALGANGLLIEYEDMFPYEGPLRLLRAKYAYSPSEIKEILHLAGLNELEVIPLVQTFGHMEFVLKHTAFAHLREVGSFPCTLNPHEAESLALVGAMIDQVLELHPGAQRLHIGCDEVYYLGEGEASRRWLQQEQNSTGKLCLSHMRAVASGVKARRPSVTPLVWDDMLRDLPEDQLAASGVPQLVEPVLWDYTADLDVHGKVLLMQKYRRCGFPQLWAASAFKGATGPSQAVPPVEHHLRNHVQWLQVAGSGPTDSLQGIILTGWQRYDHYSVLCELLPAGVPSLAACLQLLLRGGFDEDVKAKVENLLGISSLEKTDPVREGAGSFPGSNILALVTQVSLHLRSSVDALLEGNRYVTGWFSPYHRQRKLIHPVMVQHIQPAALSLLAQWSTLVQELEAALQLAFYPDAVEEWLEENVHPSLQRLQALLQDLSEVSAPPLPPTSPGRDVAQDP

SEQ ID NO: 274178 - DNA, 1461 bp, Artificial Sequence
  derived and/or modified sequence
atgagcggcagcacccccttccagatgagactggtgcacctggacctgaagggcgccccccccaaggtgagctacctgagcgagatcttccccctgttcagagccctgggcgccaacggcctgctgatcgagtacgaggacatgttcccctacgagggccccctgagactgctgagagccaagtacgcctacagccccagcgagatcaaggagatcctgcacctggccggcctgaacgagctggaggtgatccccctggtgcagaccttcggccacatggagttcgtgctgaagcacaccgccttcgcccacctgagagaggtgggcagcttcccctgcaccctgaacccccacgaggccgagagcctggccctggtgggcgccatgatcgaccaggtgctggagctgcaccccggcgcccagagactgcacatcggctgcgacgaggtgtactacctgggcgagggcgaggccagcagaagatggctgcagcaggagcagaacagcaccggcaagctgtgcctgagccacatgagagccgtggccagcggcgtgaaggccagaagacccagcgtgacccccctggtgtgggacgacatgctgagagacctgcccgaggaccagctggccgccagcggcgtgccccagctggtggagcccgtgctgtgggactacaccgccgacctggacgtgcacggcaaggtgctgctgatgcagaagtacagaagatgcggcttcccccagctgtgggccgccagcgccttcaagggcgccaccggccccagccaggccgtgccccccgtggagcaccacctgagaaaccacgtgcagtggctgcaggtggccggcagcggccccaccgacagcctgcagggcatcatcctgaccggctggcagagatacgaccactacagcgtgctgtgcgagctgctgcccgccggcgtgcccagcctggccgcctgcctgcagctgctgctgagaggcggcttcgacgaggacgtgaaggccaaggtggagaacctgctgggcatcagcagcctggagaagaccgaccccgtgagagagggcgccggcagcttccccggcagcaacatcctggccctggtgacccaggtgagcctgcacctgagaagcagcgtggacgccctgctggagggcaacagatacgtgaccggctggttcagcccctaccacagacagagaaagctgatccaccccgtgatggtgcagcacatccagcccgccgccctgagcctgctggcccagtggagcaccctggtgcaggagctggaggccgccctgcagctggccttctaccccgacgccgtggaggagtggctggaggagaacgtgcaccccagcctgcagagactgcaggccctgctgcaggacctgagcgaggtgagcgccccccccctgccccccaccagccccggcagagacgtggcccaggacccctag

SEQ ID NO: 274179 - DNA, 1461 bp, Artificial Sequence
  derived and/or modified sequence
atgagtgggagtacccctttccagatgcggttggttcacctcgacttgaagggagctccccccaaagtgtcctatctgtccgagattttcccactgttcagagcactgggtgctaatggattgctgatcgagtacgaagacatgttcccttatgaaggtccgctgagactgctgcgggccaaatatgcttactccccatccgaaattaaggagattcttcacctggctggcctcaacgagcttgaagtaatacccctcgtgcagacattcgggcatatggagtttgtcctgaaacacactgcctttgcacatctgcgggaggtgggctcttttccatgcacactgaatccccatgaagccgaatcattggccctggtgggcgctatgatcgatcaggtcctagaactccaccctggcgcccagagattgcatataggctgtgatgaggtgtattacttgggtgaaggcgaggccagccgtcggtggctacaacaggagcagaatagcacagggaaattgtgtctttctcacatgcgggctgtagcgagcggcgtgaaagcccgacgcccgtctgtaacgcccttagtatgggacgacatgctgcgggaccttcccgaagatcagctggcagctagcggcgtgccccagttggtcgaacccgtcctgtgggactataccgcagatctcgatgtgcatgggaaagtgcttctgatgcaaaagtataggcggtgcggcttcccgcaattgtgggccgcttctgcctttaagggcgcgacgggaccatcgcaggctgtgccacctgttgaacatcacttaagaaaccacgtacagtggctgcaagtagccggctctgggcctaccgatagtcttcaaggtatcatcctgacaggatggcaacgctacgaccattactcagtgctgtgtgaactcctccctgcgggagtcccctcactggcggcttgcctgcaactgctgcttaggggcgggttcgatgaagacgtcaaagccaaagtcgagaatctccttgggatctcctcattagaaaagacagacccagtgcgggagggcgcaggatcttttcctggttcaaatatccttgcactagtgacacaagttagcctgcacctgcgaagctctgttgacgcccttctggaaggaaacagatacgttaccggatggttcagcccatatcacaggcagaggaagctgatccatcccgtaatggtgcagcacatccaaccagcggccctgtctctgcttgctcaatggagtactctggtccaggagctcgaagcggccctccaactggctttttatcctgatgccgtcgaagagtggctggaagaaaacgtgcacccttctctgcagaggttacaggcgctgctccaggacctgtctgaggtctctgccccccctctgccaccaactagccctgggagagacgtcgctcaagacccatag

SEQ ID NO: 274180 - DNA, 1461 bp, Artificial Sequence
  derived and/or modified sequence
atgagcggcagcacccccttccagatgaggctggtgcacctggacctgaagggggccccacccaaggtgtcctacctgtctgagatcttccccctcttccgggccctgggcgccaacggcctgctgattgaatatgaggacatgttcccctatgagggccccctgcggctgctgcgggccaagtatgcctacagccccagcgagatcaaggagatcctgcacctggccggcctgaatgagctggaggtgatccccctggtgcagaccttcggccacatggagtttgtgctgaagcacacagcctttgcccacctgcgggaggtgggcagcttcccctgcaccctgaacccccatgaggccgagagcctggccctggtgggcgccatgattgaccaggtgctggagctgcaccctggggcccagaggctgcacatcggctgtgatgaggtgtactacctgggggagggggaggccagccgccgctggctgcagcaggagcagaacagcacaggcaagctgtgcctgagccacatgagagctgtggccagcggcgtgaaggcccggcggcccagcgtgacccccctggtgtgggatgacatgctgcgggacctgcctgaggaccagctggccgccagcggcgtgccccagctggtggagcctgtgctgtgggactacacagctgacctggatgtgcacggcaaggtgctgctgatgcagaagtaccgccgctgtggcttcccccagctgtgggccgccagcgccttcaagggggccaccggccccagccaggccgtgccccctgtggagcaccacctgagaaatcatgtgcagtggctgcaggtggccggcagcggccccacagacagcctgcagggcatcatcctgaccggctggcagagatatgaccactacagcgtgctgtgtgagctgctgcctgctggggtgcccagcctggccgcctgcctgcagctgctgctgcggggcggctttgatgaagatgtgaaggccaaggtggagaacctgctgggcatcagcagcctggagaagacagatcctgtgcgggagggcgccggcagcttccctggcagcaacatcctggccctggtgacccaggtgtccctgcacctgcggagctctgtggatgccctgctggagggcaacagatatgtgacaggctggttcagcccctaccaccggcagaggaagctgatccaccctgtgatggtgcagcacatccagcctgctgccctgagcctgctggcccagtggagcaccctggtgcaggagctggaggccgccctgcagctggccttctacccagatgctgtggaggagtggctggaggagaatgtgcaccccagcctgcagaggctgcaggccctgctgcaggacctgtctgaggtgtctgccccacccctgccccccaccagccctggaagagatgtggcccaggacccctag

SEQ ID NO: 274181 - DNA, 1461 bp, Artificial Sequence
  derived and/or modified sequence
atgagcggcagcacccccttccagatgcggctggtgcacctggacctcaagggagcacctcctaaagttagctatttgagcgaaatttttcctctgttcagagccttgggagctaatggtctcctgatagagtacgaggatatgtttccgtatgaaggcccgctgcgcctattgcgtgccaaatacgcctactcaccgagcgagatcaaggaaatcctgcacttggccggactcaacgaacttgaggtgattccccttgtgcagacgtttggtcatatggaattcgtgctgaagcacacggctttcgcccatctgcgcgaagtgggatcatttccctgcaccctcaacccacatgaagccgaaagtcttgctctcgtcggagctatgatagatcaagttctcgagctgcacccaggcgcccagcggctgcacattgggtgcgatgaggtttactatcttggagaaggagaggcatctaggcggtggctgcagcaggagcagaactcaaccggaaaactctgcctctctcacatgcgggccgtcgcatcaggcgtgaaagctagaagaccatccgtaacacctcttgtgtgggatgatatgttgcgcgatctccccgaggatcagttggccgcctccggagtgcctcagctcgtggaaccagttctctgggactacacggccgacctggacgtgcatggcaaagtccttcttatgcaaaagtatcggcgttgcggcttcccccagctctgggcggcatccgcattcaagggcgctaccgggccgtctcaggcagttcctccagtagaacaccacctgagaaatcatgtccagtggctccaagttgccggatcaggcccaactgacagcctgcaaggaatcattttgacagggtggcagcgctatgaccactattccgtcctttgtgaactccttcctgctggcgttcccagcctggcggcctgtctgcagctgctccttcgcgggggctttgacgaagacgttaaagccaaagtggagaatctgctggggatcagttccctggagaaaaccgacccggtgcgcgagggggcaggctctttccctggctcgaacatcctggccctagtcacccaggtctcccttcacctgcggagcagcgttgatgctcttctggagggaaaccggtacgttactggttggtttagcccttaccatagacagaggaagttgatccatccggtgatggtacagcacatccagcctgctgctctcagcttgctggctcagtggtccacattagtgcaagagctcgaggccgctcttcagctcgctttctatcccgacgcagtagaggagtggcttgaggaaaatgtgcatccaagcctgcagaggctgcaggccctcctgcaagatctctccgaagtgagtgccccccctctgccccccacatccccaggccgcgacgtcgcccaggacccttag

SEQ ID NO: 274182 - DNA, 1461 bp, Artificial Sequence
  derived and/or modified sequence
atgagcgggagtacacccttccagatgcggttggttcacctcgacctcaagggagccccaccaaaagtaagttacttgtcggagatctttccacttttcagggcactcggggctaatgggctgctcatcgaatacgaggatatgtttccctatgagggtccactgaggctgttgcgagccaagtatgcctactctcctagtgaaattaaggaaatcctacatctcgcaggtctgaacgagctggaagtcatcccgctagtgcaaactttcggccacatggagttcgtgctgaagcataccgcctttgcccaccttagggaggtaggcagcttcccatgcaccctgaatcctcacgaggccgaaagccttgccctcgttggcgctatgatcgaccaggtcctcgagctccacccaggtgcccaaagactccacattggatgcgacgaagtgtactatctaggggaaggcgaggcctccaggaggtggctccagcaggagcagaatagtacaggtaagctgtgtttaagccacatgagagccgtggccagtggagtgaaggctcgcagacccagtgtcactcccctcgtgtgggacgatatgctgagggacttgcccgaggaccaacttgccgcatctggggtccctcagctggtagaacccgtactttgggactatacagcggatctggacgtgcatggcaaagtcctattaatgcaaaaatatcgaaggtgcgggtttccccaactctgggccgcaagtgccttcaaaggtgccactggcccttcacaggctgtacctccggtggagcatcacttgagaaaccatgtgcagtggctgcaagtcgctggatcaggcccaactgattctttgcaaggtattatcctcacgggatggcagaggtatgatcactatagtgtcctgtgcgaactactaccagccggagtgccaagtctagctgcctgtctgcagttactacttcgaggtgggtttgacgaagacgtcaaagccaaggtggaaaacctgcttggtatttcatcacttgaaaaaacagaccctgtgcgcgaaggagctggcagtttccctggttccaacatcctggccctcgtgacccaagtcagtctgcacctgagatccagcgtggacgccctgttggaaggcaacagatatgttaccggctggttttcgccctaccatcggcaaaggaagctgatccacccggtcatggtgcagcatatccagcctgctgccttgagtctgttagcacagtggagtaccctcgtgcaagagctggaagcagccctacagctcgctttctatcccgatgctgtagaggaatggctcgaggagaatgtccacccgtctctgcaaagactgcaggcccttctgcaggacctgtctgaagtgtcagcaccccctctccccccaacgagtccgggacgggatgtggcccaggacccatag

SEQ ID NO: 274183 - DNA, 1461 bp, Artificial Sequence
  derived and/or modified sequence
atgtcaggttccactccatttcagatgagattagttcatttagaccttaaaggagctccaccaaaggtctcgtacctctcagagatttttcctctgttccgtgcgctaggtgcaaacggcctcctcattgagtatgaagacatgtttccctacgagggccctctgaggctgctgagggccaagtacgcctacagcccctctgaaatcaaagagatcttgcatctggctggactcaatgagctggaggtgattcccttggtgcagacatttggacacatggagtttgtgctgaagcacacggccttcgcccacctgcgggaggtgggctccttcccctgcaccctgaacccccacgaggcagagtccctggcgctggtgggcgccatgattgaccaggtcctggagctacacccaggcgcccagcggctgcacatcgggtgtgatgaggtctattacctcggagagggggaggcctcgcgccggtggctacagcaagagcagaacagcacggggaagttgtgcctgtcacacatgcgggcggtggccagcggcgtgaaggcccggcgccccagcgtgacacccctggtgtgggacgacatgctccgagacctgcctgaggaccagctcgcagcgtccggggtgccgcagctggtggagccggtgctctgggactacacggccgacctggatgtgcacggcaaggtcctcctcatgcagaagtaccggcggtgcggctttccgcagctgtgggcagccagtgccttcaagggtgccacggggcccagccaggccgtgccccctgttgagcaccacctcaggaaccacgtgcagtggctgcaggtggcgggcagcgggcccacggactcactgcagggcatcatcctgaccggctggcagaggtacgaccactactctgtgctgtgcgagctgctgcccgcaggagtcccgtccctggccgcctgcctgcagttgcttctacgcggaggatttgatgaagatgttaaagcgaaagtggagaaccttctcgggatttccagcctggaaaaaacggaccctgttagggagggggccggctccttccctggcagcaacatccttgcccttgtcacacaagtcagcctccatctgcgcagctctgtggatgcgctgctggagggcaacaggtatgtcactggctggttcagcccctaccaccgccagcggaagctcatccacccggtcatggttcagcacatccagcccgcagcgctcagcctcctggcacagtggagcaccctcgtgcaggagctggaggctgccctgcagctggctttctacccggatgccgtggaggagtggctggaggaaaacgtgcaccccagcctgcagcggctgcaagctctgctgcaggacctcagcgaggtgtctgcccccccgctgccacccaccagccctggcagggacgttgctcaggacccctga

SEQ ID NO: 274184 - protein, 422 aa, Artificial Sequence
  derived and/or modified sequence
MALSDEPAAGGPEEEAEDETLAFGAALEAFGESAETRALLGRLREVHGGGAEREVALERFREWMMNLLLDIVQDQTSPASLVHLAFKFLYIITKVRGYKTFLRLFPHEVADVEPVLDLVTIQNPKDHEAWETRYMLLLWLSVTCLIPFDFSRLDGNLLTQPGQARMSIMDRILQIAESYLIVSDKARDAAAVLVSRFITRPDVKQSKMAEFLDWSLCNLARSSFQTMQGVITMDGTLQALAQIFKHGKREDCLPYAATVLRCLDGCRLPESNQTLLRKLGVKLVQRLGLTFLKPKVAAWRYQRGCRSLAANLQLLTQGQSEQKPLILTEDDDEDDDVPEGVERVIEQLLVGLKDKDTVVRWSAAKGIGRMAGRLPRALADDVVGSVLDCFSFQETDKAWHGGCLALAELGRRGLLLPSRLVD

SEQ ID NO: 274185 - protein, 184 aa, Artificial Sequence
  derived and/or modified sequence
MKGIQSDPQALGSFSGTLLQIFEDNLLNERVSVPLLKTLDHVLTHGCFDIFTTEEDHPFAVKLLALCKKEIKNSKDIQKLLSGIAVFCEMVQFPGDVRRQALLQLCLLLCHRFPLIRKTTASQVYETLLTYSDVVGADVLDEVVTVLSDTAWDAELAVVREQRNRLCDLLGVPRPQLVPQPGAC

SEQ ID NO: 274186 - DNA, 3876 bp, Artificial Sequence
  derived and/or modified sequence
tagcgggcgcctccttttcatccctcatccttcatccctggctttcgcgctctagcggagtgggatctgcgaacacgtgaggcgggggcgcggtccccaggctgccgagatggccctgagcgacgaaccggccgcgggcggccccgaggaggaggcggaggacgagacactggcctttggcgcggcgctggaagcgttcggcgagagcgcggagacccgggcgctgctgggccgcctgcgggaggtgcacggcggcggcgcggagcgcgaggtggccctggagcggttccgcgaatggatgatgaacttgttgttggacatagtgcaagatcagacatctccagcttcccttgtacatctggcttttaaatttctttacatcatcaccaaggttcgaggctataaaacatttcttcgtttatttcctcatgaagttgccgatgtagagcctgttttagatttggtcacaattcagaatcccaaggaccatgaagcttgggaaacccgctacatgcttttgctctggctctccgtgacctgcctgatcccttttgatttttctcgccttgacgggaacctcctcacccagcctgggcaagcacgaatgtccataatggaccgtattctccaaatagcagagtcctacttgattgtcagtgacaaggcccgagatgcagctgctgtccttgtgtccagatttatcacacgtcctgatgtcaagcaaagcaagatggctgagttcctggactggagcctgtgcaatctggcccgttcctccttccagaccatgcagggggtcatcaccatggatgggacgctgcaggccctggcacaaatatttaaacatggaaaacgtgaagactgtttgccctatgctgccactgtcctcaggtgcctcgatggctgcagactccctgagagcaaccagaccctgctgcggaagctgggggtgaagcttgtgcagcgactggggctgacattcctgaagccgaaggtggcagcatggaggtaccagcgtggctgccgatctttggctgcaaatctgcagctcctcactcagggtcagagtgagcagaagccactcatcctgaccgaagatgacgacgaagatgacgacgtcccagagggggtggagcgtgtgatagagcagctgctggtcgggctgaaggacaaggacacggtcgtgcggtggtctgcagccaagggcatcggtaggatggctggcaggcttcccagagccctggcggatgatgtggtcgggtctgtgctggactgcttcagtttccaggagactgacaaggcgtggcatgggggatgtctggcgctggcagagctgggcaggagaggcctgttgctgccgtctcgactcgtggatgttgtcgccgtgatcctgaaggcgctgacctacgacgagaagcggggtgcctgcagcgtgggcaccaacgtcagggacgccgcctgctacgtgtgctgggccttcgcgcgtgcctatgagcctcaggagctgaagccctttgtgactgcaatctcgagtgcactggtgattgctgcggtgtttgaccgagacataaactgcagaagagcagcctctgccgccttccaggagaatgtggggagacagggcactttccctcatggtattgatattttgaccacagctgactattttgccgtcggtaacagatccaactgtttcctggttataagtgtgtttattgccggctttcctgagtacacgcagccaatgatagaccacctggttaccatgaagatcagccactgggatggggtcatccgagagttggctgcgagggcgctgcacaacctggcccagcaggcacccgagttcagcgccacgcaagtcttcccgaggctgctgtccatgacactgagtccagatcttcacatgaggcatgggtcgattctcgcctgcgcagaagttgcttacgccttgtacaaacttgcagcccaagagaacaggcccgtcacggaccatctggacgagcaggcagtgcagggcctgaagcagattcaccagcagctctatgatcgtcagttatacaggggtctgggaggacagctcatgagacaagcagtgtgtgttttaatagaaaagttgtcactttccaaaatgccctttagaggtgacaccgtaattgatggttggcaatggctgataaatgacactttgagacatctccatctcatctcaagtcactcccgccagcagatgaaggatgcagcagtctcggccctggctgctctatgcagtgaatattacatgaaggagccgggggaggcagatcccgcaattcaggaggagctgatcacgcagtacctggctgagcttcggaaccccgaggagatgactcgctgtggcttctcgttggccttgggcgcccttccaggcttccttctgaaaggccggctccagcaggttctcacaggtttaagagcagttacccacacttcccccgaggacgtaagttttgctgagtccaggagagacggcttgaaggccattgcgaggatttgccagactgttggtgtgaaagcaggagccccagacgaagctgtgtgcggagagaatgtttcccagatttactgtgcgctgctgggctgcatggacgactacaccacggacagcagaggggacgtgggcacctgggtccgcaaggccgccatgaccagtctgatggatctgacacttctgctggctcggagccagcctgagctgatcgaggcccatacctgtgagcgcatcatgtgctgtgtggcccagcaggccagtgagaagattgaccgtttccgtgctcacgccgccagcgtgttcctgacgctcctgcactttgacagccctcccatcccccacgtgccccaccgaggagaactggaaaagctgtttcccaggtccgatgtggcctccgtgaactggagtgcaccttcccaggccttcccacgcatcacccagctccttgggctgcccacctaccgctaccacgtcctgctggggctagtcgtgtccctgggcggcttgacggagtcgacgatccggcactccacccagagcctctttgagtacatgaagggcattcagagcgacccgcaggccctgggcagcttcagcgggacccttctgcagatctttgaggacaaccttctgaatgagagggtgtccgtgccgctgctgaagacgctggaccacgtgctcacccacggctgcttcgacatcttcaccacggaggaggaccacccctttgctgtgaagttgcttgcgctctgtaagaaagaaatcaagaattcaaaagatatccagaagctcctgtcaggcatcgcagtgttctgcgagatggtgcagttccccggcgacgtgaggaggcaggccctcctgcagctgtgtctgctcctctgccaccgtttcccgctgatccggaagaccacggccagccaggtgtacgagacattgctcacctacagtgacgtcgtgggcgcggatgtgctggacgaggtggtgactgtgctcagtgacactgcgtgggacgcggagcttgcagtggtgagagagcagcgcaaccgtctgtgtgaccttctgggcgtacccaggccccagctggtgccccagcctggtgcctgctgaagccagtcctggagcccatacctcacccctgcctggtgaggatgtcttgttcctgagggaggccggtgtggaaagcctcgcacagtggtgcctccagctgttgaagggtagcgctggcccttggaggctggcactagctgacagcttttcctctctgcacctgcgctctggtgacttggggtggacgcctctgccttcacttgaacacaaatgtgcttcctataaaatcatgtaccaag

SEQ ID NO: 274187 - DNA, 423 bp, Artificial Sequence
  derived and/or modified sequence
atgagaagatgcctgagagtgaagaccagaagaggccagctgggcctggccagcagctgcttcgagcagcacagctgcttcagccccagagtgaacagaatcctgagcgccgtgcagaacaccctgtgcaccggccccagcagccaggcccccccccagcccccccaggccagcccccccgccgccgccgaccacagcagaacccccagcctgctggccagcagccacagcgccagcggcggcgagagcctgttccagctgtacatcgccagcctggcctggccccagaactgctgcgtgctggagagctgcagaagaatccccctgggcggcctgagcagcatggagaacagaagacccctgctgagaaagggcagactgctgagaggccagatccaccacagccagaccaacgagctgtag

SEQ ID NO: 274188 - DNA, 261 bp, Artificial Sequence
  derived and/or modified sequence
atggtaagacacccctactcagtgcagacccagctgtctacggaagccaaagccatctggagatcaatgcaacagcaggagaccaaccttctggctaatctgacgaccaatgacgctagagacaactcaaaagacttccagaactccaaggtgggcgcggccgcaacatctcgggatgagggctgcaactgcccaatcattggtgagatcgtgattagctgttactggcttttcgagatcccaccactgatcagtaggtag

SEQ ID NO: 274189 - DNA, 399 bp, Artificial Sequence
  derived and/or modified sequence
taacgcaatgtcaataagcagtggatcacctttcagcacttttcctttctgaagagaatgtacgtcactcagctcaatcgtagccataaccagcaggtccggcctaagccggaaccagtagcgagccccttccttgagaagacctcttctggtcaagctaaggctgaaatctacgagatgcggccactgagccctccttccttgtctttgagtaggaaacctaatgaaaaagaactaattgagctggaaccagactcagtgatcgaggattctattgacgttggcaaagagacaaaagaggaaaagcgttggaaggaaatgaaactgcaggtgtatgatctgcccggaatccttgctaggttatctaagattaaactcacaggaacattgttcttctag

SEQ ID NO: 274190 - DNA, 399 bp, Artificial Sequence
  derived and/or modified sequence
tgaagaaatgtgaacaagcagtggatcaccttccagcacttctccttcctgaagaggatgtatgtgacccagctgaacagaagccacaaccagcaggtgcggcccaagccagagcctgtggccagccccttcctggagaagaccagcagcggccaggccaaggccgagatctatgagatgaggcccctgagcccccccagcctgagcctgagcaggaagcccaatgagaaggagctgattgagctggagccagacagcgtgattgaagattccattgatgtgggcaaggagaccaaggaggagaagcgctggaaggagatgaagctgcaggtgtatgacctgcccggcatcctggcccggctgagcaagatcaagctgaccggcaccctcttcttctag

SEQ ID NO: 274191 - DNA, 399 bp, Artificial Sequence
  derived and/or modified sequence
tgacggaacgtgaacaagcagtggatcaccttccagcacttcagctttctgaagcggatgtacgtcactcagctcaacaggtcacataatcaacaagtacggccaaagccggagcccgtggctagccccttcctcgaaaagacgtctagcgggcaggcaaaagccgagatttatgagatgaggccactgtcgcctccctctttaagtctgagccggaaacctaacgaaaaggaattgatagaattagagccagattctgtgatagaagactctatagatgttggcaaggaaaccaaggaagagaagcgctggaaagagatgaagcttcaagtatacgatctgccaggcattcttgctagactgtctaagataaagttgaccggtacccttttcttctag

SEQ ID NO: 274192 - DNA, 399 bp, Artificial Sequence
  derived and/or modified sequence
taacgcaacgtgaataagcagtggattacttttcagcacttcagcttcctgaaaagaatgtatgtcacgcaattaaatcgctctcacaaccaacaggtgaggccaaaaccggaacccgtggcatcaccatttctcgaaaagacctcctcgggccaggccaaagccgaaatttatgagatgcgccctctgtcgccaccgtcgctatccctgagccggaaaccaaacgaaaaggagctcatcgagttggaacccgactccgtgatcgaagacagtattgacgtggggaaagagacaaaggaggagaagcgatggaaagagatgaaactccaggtgtacgatctgccagggattctcgcccgtctctccaaaatcaagctaacgggtaccctctttttttag

SEQ ID NO: 274193 - DNA, 646 bp, Artificial Sequence
  derived and/or modified sequence
caggaatgtcaataagcagtggattacatttcagcactttagcttcctcaaacgcatgtatgtcacacagctgaacagaagccacaaccagcaagtaagacccaagccagaaccagtagcatctcctttccttgaaaaaacatcttcaggtcaagccaaagcagaaatatatgagatgagacctctctcaccgcccagcctatctttgtccagaaagccaaatgaaaaggaattgatagaactagagccagactcagtaattgaagactcaatagatgtagggaaagagacaaaagaggaaaagcggtggaaagagatgaagctgcaagtgtatgatttgccaggaattttggctcgactatccaaaatcaaactcacaggtactttgtttttctgatatacttacttatttgaaactctatctttagtgaaacaaaaagctaattttatttaccacctgaaaagaataatttggaactgcaggtcctgtcttagtatttttcctctcttcaatttaactgggatttgaaattaaattttctgaattctatttacacagaattgtaaatagtattgcattgtaagtattgtattaaaaatagtcaccctttcctttgcaattaaagttgaatgtttatcctgctta

SEQ ID NO: 274194 - DNA, 399 bp, Artificial Sequence
  derived and/or modified sequence
tgaagaaacgtgaacaagcagtggatcaccttccagcacttcagcttcctgaagagaatgtacgtgacccagctgaacagaagccacaaccagcaggtgagacccaagcccgagcccgtggccagccccttcctggagaagaccagcagcggccaggccaaggccgagatctacgagatgagacccctgagcccccccagcctgagcctgagcagaaagcccaacgagaaggagctgatcgagctggagcccgacagcgtgatcgaggacagcatcgacgtgggcaaggagaccaaggaggagaagagatggaaggagatgaagctgcaggtgtacgacctgcccggcatcctggccagactgagcaagatcaagctgaccggcaccctgttcttctag

SEQ ID NO: 274195 - protein, 724 aa, Artificial Sequence
  derived and/or modified sequence
MDCLCIVTTKKYRYQDEDTPPLEHSPAHLPNQANSPPVIVNTDTLEAPGYVLQVNGTEGEMEYEEITLERGNSGLGFSIAGGTDNPHIGDDPSIFITKIIPGGAAAQDGRLRVNDSILFVNEVDVREVTHSAAVEALKEAGSIVRLYVMRRKPPAEKVMEIKLIKGPKGLGFSIAGGVGNQHIPGDNSIYVTKIIEGGAAHKDGRLQIGDKILAVNSVGLEDVMHEDAVAALKNTYDVVYLKVAKPSNAYLSDSYAPPDITTSYSQHLDNEISHSSYLGTDYPTAMTPTSPRRYSPVAKDLLGEEDIPREPRRIVIHRGSTGLGFNIVGGEDGEGIFISFILAGGPADLSGELRKGDQILSVNGVDLRNASHEQAAIALKNAGQTVTIIAQYKPEEYSRFEAKIHDLREQLMNSSLGSGTASLRSNPKRGFYIRALFDYDKTKDCGFLSQALSFRFGDVLHVIDASDEEWWQARRVHSDSETDDIGFIPSKRRVERREWSRLKAKDWGSSSGSQGREDSVLSYETVTQMEVHYARPIIILGPTKDRANDDLLSEFPDKFGSCVPHTTRPKREYEIDGRDYHFVSSREKMEKDIQAHKFIEAGQYNSHLYGTSVQSVREVAEQGKHCILDVSANAVRRLQAAHLHPIAIFIRPRSLENVLEINKRITEEQARKAFDRATKLEQEFTECFSAIVEGDSFEEIYHKVKRVIEDLSGPYIWVPARERL

SEQ ID NO: 274196 - DNA, 2175 bp, Artificial Sequence
  derived and/or modified sequence
atggactgtctttgtatcgtcacgacaaaaaagtaccgataccaggacgaagatacaccgccgctggagcattctccagcccacctaccaaaccaggctaacagcccgcccgtcatagtgaacacggacacactcgaggctccaggttacgtcttacaggtgaatggaacagaaggcgagatggagtacgaggaaatcacgctggagagggggaacagcggactggggtttagcattgccgggggcaccgacaacccccatattggggatgatccatcgatctttattactaagataatccccgggggtgctgccgcgcaagacgggagacttagggtgaatgatagtattctttttgtaaacgaagttgacgtgagggaggtgacgcacagtgctgccgtcgaggccctgaaagaagccggtagtatcgtgcgcctgtacgtgatgcgccggaagcccccggcggagaaggtgatggaaataaagctaattaaaggacctaaagggctcgggttttcaattgccggcggggtaggtaaccagcacatccctggggataattcaatttatgtgaccaagattattgaaggcggagcagcccacaaagatggtcggctccagattggtgacaaaatactggcggtgaactccgtggggctagaggacgtgatgcacgaagatgccgtcgccgccctaaaaaatacttatgatgtagtctatcttaaggttgctaaaccgagcaacgcttacctctctgactcttacgccccacccgacataacgacctcgtactcccagcacctggacaatgagatcagccacagctcgtatttggggaccgattatcccaccgctatgacccctacgagccctcgccggtactcccccgttgcaaaggacctcctgggggaggaggatattcccagagagccccgccggatcgtgatccatcggggtagtaccgggctggggttcaatatagtgggcggcgaggacggagagggtatcttcatttccttcatattggccggtggtcccgccgatctgagcggcgagctccggaagggagaccagatactcagcgttaacggggtggatctccgaaatgctagtcatgaacaagccgccatcgctttgaagaacgccggccagaccgttacaataattgctcagtacaagccagaggaatactctcggttcgaagccaagattcacgatctcagggagcaacttatgaactccagcctgggtagtggaactgctagtttgagaagcaacccgaagcgcggcttttacattcgtgcgctctttgactacgataagactaaggattgcggcttcctgtcacaggcactctcattccggttcggcgatgtgttgcacgtgattgatgcatcggacgaggaatggtggcaggcaaggcgggtccattccgactctgaaacggatgacattggtttcattcctagcaagcgccgagtcgaacgacgcgagtggagccgccttaaagcaaaagattggggtagtagttccggttcacagggcagagaggattccgtgttaagctatgagactgtgacccaaatggaggtgcactatgcacgccccattataatcctgggtccaactaaggacagggccaacgacgacctcttatccgagtttcccgataaatttggctcatgcgtccctcatactacccggcccaagagagagtacgaaattgacgggcgcgattaccactttgtgtctagcagggaaaagatggaaaaggatattcaagctcacaagttcatcgaggctggtcagtacaactcacacctgtatgggacatcagtccagagtgtgcgcgaagtggctgagcaaggcaaacactgcattctggatgtgtcagccaatgcggtacgccgtttgcaagctgctcacttacaccccattgctatcttcatccgaccgaggtctctggaaaatgtgctggaaatcaataaacggatcactgaggagcaggcgagaaaggctttcgacagggccaccaagttagagcaggagttcaccgagtgtttctctgcaattgtggaaggggatagttttgaagaaatatatcacaaggtgaagagagttatagaagacttatccggtccatacatttgggtgcccgctcgggagagactgtag

SEQ ID NO: 274197 - DNA, 2175 bp, Artificial Sequence
  derived and/or modified sequence
atggactgcctgtgcatcgtgaccaccaagaagtaccgctaccaggatgaggacaccccacccctggagcacagccctgcccacctgcccaaccaggccaacagcccccctgtgattgtgaacacagacaccctggaggcccctggctacgtgctgcaggtgaatggaacagaaggagagatggagtatgaggagatcaccctggagcggggcaacagcggcctgggcttcagcattgctgggggcacagacaacccccacatcggagatgaccccagcatcttcatcaccaagatcatccctggaggagctgctgcccaggacggccgcctgcgggtgaatgacagcatcctgtttgtgaatgaggtggatgtgcgggaggtgacccacagcgctgctgtggaggccctgaaggaggccggcagcatcgtgcggctgtatgtgatgaggaggaagcccccagctgagaaggtgatggagatcaagctgatcaagggccccaagggcctgggcttcagcattgctggaggagtgggcaaccagcacatccctggggacaacagcatctacgtgaccaagatcattgaaggaggagctgcccacaaggatggccgcctgcagatcggggacaagatcctggccgtgaacagcgtgggcctggaggatgtgatgcatgaagatgctgtggccgccctgaagaacacctatgatgtggtgtacctgaaggtggccaagcccagcaatgcctacctgagtgacagctatgcccccccagacatcaccaccagctacagccagcacctggacaatgagatcagccacagcagctacctgggcacagactaccccacagccatgacccccaccagcccccggcgctacagccctgtggccaaggacctgctgggggaggaggacatcccccgggagccccggcgcatcgtcatccaccggggcagcacaggcctgggcttcaacatcgtgggcggagaagatggagagggcatcttcatctccttcatcctggccggcggccctgctgacctgagcggggagctgaggaaaggagaccagatcctgtctgtgaatggagtggacctgagaaatgccagccatgagcaggccgccatcgccctgaagaatgccggccagacagtgaccatcatcgcccagtacaagccagaggagtacagcagatttgaggccaagatccatgacctgcgggagcagctgatgaacagcagcctgggcagcggcacagccagcctgcggagcaaccccaagaggggcttctacatccgggccctgtttgattatgacaagaccaaggactgtggcttcctgagccaggccctgtccttccgctttggagatgtgctgcacgtgattgatgccagtgatgaggagtggtggcaggcccggcgggtgcacagcgacagcgagacagatgacatcggcttcatccccagcaagagaagagtggagcggcgggagtggagccggctgaaggccaaggactggggcagcagcagcggcagccagggcagagaagattctgtgctgtcctatgaaacagtgacccagatggaggtgcactacgcccggcccatcatcatcctgggccccaccaaggaccgggccaatgatgacctgctgtctgagttcccagacaagtttggcagctgtgtgccccacaccacccggcccaagcgggagtatgaaattgatggccgggactaccactttgtgagcagccgggagaagatggagaaggacatccaggcccacaagttcattgaagctggccagtacaacagccacctgtatggcacctctgtgcagagcgtgcgggaggtggccgagcagggcaagcactgcatcctggatgtgtctgccaatgctgtgcggcggctgcaggccgcccacctgcaccccatcgccatcttcatccggcccaggagcctggagaatgtgctggagatcaacaagaggatcacagaggagcaggccaggaaggcctttgaccgggccaccaagctggagcaggagttcacagagtgcttcagcgccatcgtggagggggacagctttgaggagatctaccacaaggtgaagagggtgattgaggacctgagcggcccctacatctgggtgcctgcccgggagcggctgtag

SEQ ID NO: 274198 - DNA, 2175 bp, Artificial Sequence
  derived and/or modified sequence
atggactgcctgtgcatcgtgaccaccaagaagtaccggtaccaggacgaagacacgccaccattggagcacagcccagcgcaccttcctaatcaggctaatagcccccccgtgattgtaaatacagatacactagaggcccccgggtacgtgctccaggtgaacgggaccgagggtgagatggagtacgaggaaataacccttgagaggggcaactctggacttggattttcaattgctggcggtaccgataatcctcacatcggagatgatccttctatctttatcacgaaaattattccaggaggagcagccgcgcaggatggcaggctccgcgtgaacgactccattctcttcgttaacgaggttgacgtccgggaggtcactcactccgcagccgtcgaggctctcaaagaagctggcagtatcgttcggctgtatgtcatgaggcgtaagccaccagctgaaaaggtgatggagattaagttgataaagggtcccaaaggactcgggtttagcatcgcaggcggagtgggtaatcagcatatacctggggacaactctatatatgtgaccaaaatcatagagggcggggccgcccataaggacggtaggcttcaaattggagacaagatcctcgccgttaactccgtgggtctggaagacgtgatgcatgaagacgccgtcgccgcactcaagaatacttatgatgtagtgtatttgaaggtcgcaaagcctagcaacgcctatctgtctgactcttacgctccccctgacatcactactagctattcccagcatctcgacaatgagatttctcacagtagctacttagggacagactaccccacagcaatgacaccaacttccccccgtcgttattcccctgtcgctaaggatttattgggggaagaggatattcccagagagccaaggcgaatagtgatccatcgcggaagcacgggactgggttttaatatcgtggggggcgaggacggcgaaggtatttttatttcctttatactggctggtggaccagctgaccttagtggcgaactgaggaaaggggatcagatcctgtcagtgaacggtgtagacctacgcaacgcctcccacgaacaggcggcgatcgcacttaagaacgctggccagaccgttacgataatcgcacagtataagccagaggagtactcccggtttgaagcaaaaatccatgacttaagggagcagctgatgaactcctctctcggtagcggcaccgcgtctctgcgctcaaatccgaaaaggggcttctatattcgggcccttttcgattacgataagaccaaggactgcgggttcctctctcaggcactcagctttcgcttcggcgatgtgctgcatgttatcgatgcttcagacgaggaatggtggcaggcccggagagtgcatagcgatagcgaaacagacgacatagggttcatccctagtaaacggagggttgagcggcgtgagtggagcagattgaaagctaaggactggggatcctcaagtggttcccagggccgggaggactctgtactgtcttatgagacagttacccagatggaagtacactatgcgcggccaattatcatcctcggccccaccaaggatcgggcaaacgacgaccttctctccgagtttccagacaaattcggctcttgcgttccacatactactcgtcccaaacgggaatacgaaatagatggccgggactaccatttcgtgtcttccagagaaaaaatggagaaagatatccaggctcacaagttcattgaagctggacagtacaactctcatttgtacgggacttctgtccagtcagtcagggaggtggccgaacagggaaagcactgtatccttgatgtatccgccaatgccgtgcgacgcctgcaggccgctcacctgcatccaatcgccatattcatcagaccccgtagtctcgagaacgtgcttgagattaacaagcggattacagaagaacaggctcgcaaggccttcgaccgtgctacgaaactggagcaggagtttacagaatgcttcagtgccatcgtcgaaggagattccttcgaagagatataccacaaagtcaaacgagtcattgaggacctaagcggtccgtacatctgggtgcctgcccgcgaaaggctgtag

SEQ ID NO: 274199 - DNA, 2175 bp, Artificial Sequence
  derived and/or modified sequence
atggattgcctatgtatcgtgacgacgaaaaagtaccgatatcaggatgaggacactcctcccctggagcacagtccagcacatctgcctaaccaggctaactctcccccagtgatagtgaacactgacactctggaagccccaggctacgttttgcaagtgaatggaaccgagggggaaatggaatacgaagagataacccttgagcgcggtaactcagggcttgggttttcaattgcgggaggcacggataatccccacattggtgatgacccgtccatttttattaccaaaatcatcccagggggagccgcagcccaggacggaagacttcgcgtaaatgacagtatcctctttgtgaacgaagtggatgtgagagaggtgactcattcggcagctgtagaggccctcaaggaggcaggcagcattgtgcgcctgtatgtgatgagacggaagcccccagcagaaaaggtgatggaaatcaaattgatcaaaggccctaaggggttgggattcagcattgcgggaggcgtgggtaatcaacatatccccggagataactctatctacgtcacaaagatcatcgaaggtggggcagctcataaagacggccgtctgcagataggagataaaatcctagctgtgaactctgtgggcctggaggacgtaatgcatgaggacgctgtggcagccttaaaaaatacgtatgatgtcgtttacctaaaagtggctaagcctagtaacgcctatttgtctgatagctacgcgcctcctgacatcactacctcatacagccaacacctcgacaatgaaatatcccactctagctatctggggacagattacccaacagccatgacgcctacatccccaaggcggtacagtcccgttgcaaaggaccttctgggagaggaggacataccgagggagcctcgacggatcgtgattcacagaggatccacgggactgggattcaacatcgtcgggggtgaagacggagaggggatctttattagctttatcttagcagggggtcctgcagacctttccggcgagctccggaagggtgaccagattctgtctgtcaacggggtcgatctaaggaatgctagtcatgaacaggcagctatcgcactgaagaacgctggccagactgttaccatcatcgcccagtacaaacccgaggagtattcacgtttcgaagctaagatccatgatctgcgcgagcagctgatgaacagctctctgggatctggtaccgctagcctgagatcaaaccccaaaaggggtttctatatcagggcccttttcgactatgataagacaaaagattgcggatttctgagccaagccctatcatttaggttcggcgacgtattgcacgtgatcgatgctagcgacgaagagtggtggcaggccaggagagtgcacagtgattctgaaaccgatgacataggcttcattccctcaaaacgaagagttgagcgacgcgagtggtccagactgaaggctaaagattggggctcctcctctggaagccagggcagggaggattctgtgctgtcttacgagacagtaactcaaatggaagtgcactacgccaggcctataattattcttggccctactaaggacagagccaatgacgatctcctgtcagagttccccgataagttcggtagttgtgttccccatacaaccagacccaaacgggagtacgagatcgacgggagagactaccatttcgtctcatccagggagaaaatggagaaagatattcaggcccataaattcattgaggcagggcaatacaactcgcacctctacggtacgagcgttcagtcagtgcgagaggtggccgagcaggggaagcactgtattcttgatgtatccgctaacgctgtcagaagactccaggctgcccatctgcaccccatcgccatttttatccggccacgctcattggaaaatgtgctcgagatcaacaagaggataacggaagagcaagcaagaaaagcctttgaccgggctaccaagttggagcaggaatttaccgaatgtttttccgcgatcgtggagggagattcgttcgaggaaatctatcacaaggtcaaacgtgtgatcgaggacttgtcggggccttacatttgggtgcccgcaagggagcgtctgtag

SEQ ID NO: 274200 - DNA, 2175 bp, Artificial Sequence
  derived and/or modified sequence
atggactgcctgtgcatcgtgaccaccaagaagtacagataccaggacgaggacaccccccccctggagcacagccccgcccacctgcccaaccaggccaacagcccccccgtgatcgtgaacaccgacaccctggaggcccccggctacgtgctgcaggtgaacggcaccgagggcgagatggagtacgaggagatcaccctggagagaggcaacagcggcctgggcttcagcatcgccggcggcaccgacaacccccacatcggcgacgaccccagcatcttcatcaccaagatcatccccggcggcgccgccgcccaggacggcagactgagagtgaacgacagcatcctgttcgtgaacgaggtggacgtgagagaggtgacccacagcgccgccgtggaggccctgaaggaggccggcagcatcgtgagactgtacgtgatgagaagaaagccccccgccgagaaggtgatggagatcaagctgatcaagggccccaagggcctgggcttcagcatcgccggcggcgtgggcaaccagcacatccccggcgacaacagcatctacgtgaccaagatcatcgagggcggcgccgcccacaaggacggcagactgcagatcggcgacaagatcctggccgtgaacagcgtgggcctggaggacgtgatgcacgaggacgccgtggccgccctgaagaacacctacgacgtggtgtacctgaaggtggccaagcccagcaacgcctacctgagcgacagctacgccccccccgacatcaccaccagctacagccagcacctggacaacgagatcagccacagcagctacctgggcaccgactaccccaccgccatgacccccaccagccccagaagatacagccccgtggccaaggacctgctgggcgaggaggacatccccagagagcccagaagaatcgtgatccacagaggcagcaccggcctgggcttcaacatcgtgggcggcgaggacggcgagggcatcttcatcagcttcatcctggccggcggccccgccgacctgagcggcgagctgagaaagggcgaccagatcctgagcgtgaacggcgtggacctgagaaacgccagccacgagcaggccgccatcgccctgaagaacgccggccagaccgtgaccatcatcgcccagtacaagcccgaggagtacagcagattcgaggccaagatccacgacctgagagagcagctgatgaacagcagcctgggcagcggcaccgccagcctgagaagcaaccccaagagaggcttctacatcagagccctgttcgactacgacaagaccaaggactgcggcttcctgagccaggccctgagcttcagattcggcgacgtgctgcacgtgatcgacgccagcgacgaggagtggtggcaggccagaagagtgcacagcgacagcgagaccgacgacatcggcttcatccccagcaagagaagagtggagagaagagagtggagcagactgaaggccaaggactggggcagcagcagcggcagccagggcagagaggacagcgtgctgagctacgagaccgtgacccagatggaggtgcactacgccagacccatcatcatcctgggccccaccaaggacagagccaacgacgacctgctgagcgagttccccgacaagttcggcagctgcgtgccccacaccaccagacccaagagagagtacgagatcgacggcagagactaccacttcgtgagcagcagagagaagatggagaaggacatccaggcccacaagttcatcgaggccggccagtacaacagccacctgtacggcaccagcgtgcagagcgtgagagaggtggccgagcagggcaagcactgcatcctggacgtgagcgccaacgccgtgagaagactgcaggccgcccacctgcaccccatcgccatcttcatcagacccagaagcctggagaacgtgctggagatcaacaagagaatcaccgaggagcaggccagaaaggccttcgacagagccaccaagctggagcaggagttcaccgagtgcttcagcgccatcgtggagggcgacagcttcgaggagatctaccacaaggtgaagagagtgatcgaggacctgagcggcccctacatctgggtgcccgccagagagagactgtag

SEQ ID NO: 274201 - DNA, 2712 bp, Artificial Sequence
  derived and/or modified sequence
aggttattcaggatgcgctgcgcccacaaacctcttcagcccggcctcctctcggcctggctaacgtggggcggggcccagggcaggagaggcggggctagcggatcccttctgcgctcaggagtttggtcggccccaggccacgccccacccccctgttgtcctgacgacagggcctcctggaggccaattctcccccagtgattgtcaacacagataccctagaagccccaggatatgagttgcaggtgaacgggaccgagggggagatggaatacgaggaaatcacattggaaaggggtaactcaggtctgggcttcagcatcgcaggtggcactgacaacccacacatcggtgacgacccatccattttcatcaccaagatcattcctggtggggctgcggcccaggatggccgcctcagggtcaacgacagcatcctgtttgtaaatgaagtggacgtgcgcgaggtgacccactcagcggcggtggaagccctcaaagaggcaggctccatcgttcgcctctatgtcatgcgccggaagcccccggctgagaaggtcatggagatcaagctcatcaaggggcctaaaggtcttggcttcagcatcgcagggggcgtagggaaccagcacatcccaggagataatagcatctatgtaacaaagatcatcgaagggggtgctgcccacaaggatgggaggttgcagattggagacaagatcctggcggtcaacagtgtggggctagaggacgtcatgcatgaagatgctgtggcagccctgaagaacacgtatgatgttgtctacctaaaggtggccaagcccagcaatgcctacctgagtgacagctatgctcccccagacatcacaacctcttattcccagcacctggacaatgagatcagtcacagcagctacctgggcaccgactaccccacagccatgacccccacttcccctcggcgctactctccagtggccaaggacctgctcggggaggaagacattccccgagaaccgaggcgaattgtgatccaccggggctccacgggcctgggcttcaacatcgtgggtggcgaggacggtgaaggcatcttcatctcctttatcctggccgggggccctgcagacctcagtggggagctgcggaagggggaccagatcctgtcggtcaacggtgtggacctccgaaatgccagccatgagcaggctgccattgccctgaagaatgcgggtcagacggtcacgatcatcgctcagtataaaccagaagagtacagccgattcgaggccaagatccacgaccttcgggaacagctcatgaacagcagcctgggctcagggactgcgtccctgcggagcaaccccaaaaggggtttctacatcagggccctgtttgattacgacaagaccaaggactgcggcttcctgagccaggccctgagcttccgctttggggatgtgctgcatgtcatcgatgctagtgatgaggagtggtggcaggcacggcgggtccactctgacagtgagaccgacgacattgggttcatccccagcaaacggcgggttgagcgacgagagtggtcaaggttaaaggccaaggactggggctccagctctggatcgcagggtcgagaagactcggttctgagctacgagacagtgacgcagatggaagtgcactatgctcgccccatcatcatccttgggcccaccaaggaccgcgccaacgatgatcttctctccgagttccccgacaagtttggatcctgtgttccccatacgacacggcccaagcgggagtatgagatagatggccgggattaccactttgtgtcgtcccgggagaaaatggagaaggacattcaggcgcacaagttcattgaggccggccagtacaacagccacctctatgggaccagcgtccagtccgtgcgagaggtggcagagcaggggaagcactgcatcctcgatgtctcggccaatgccgtgcggcggctgcaggcggcccacctgcaccccatcgccatcttcatccgcccccgctccctggagaatgtgctagagattaacaagcggatcacagaggagcaagcccgcaaagccttcgacagagccaccaagctggagcaggagttcacagagtgcttctcagccatcgtggagggtgacagctttgaggagatctaccacaaggtgaagcgtgtcatcgaggacctctcaggcccctacatctgggttccagcccgagagagactctgattcctgccctggcttggcctggactcgccctgcctccatcacctgggcccttggtctggactgaattgcccaagcccttggctccccccggcctccctcccaccccttcttatttatttcctttctaactggatccagcctgttggaggggggacactcctctgcatgtatccccgcaccccagaactgggctcctgaacgccaggaacctggggtctgggggggagctgggctccttgttccgagcccttgctccttaggatccccgcccccacctgcccccaatgcacacacagacccaccgggggccacctgccctcccccatcctctcccacacacattccagaagtcagggccccctcgaggagcacccgctgcagggatgcagggccacaggcctccgctctctcctaaggcagggtctggggtcacccctgccctcatcgt

SEQ ID NO: 274202 - DNA, 3185 bp, Artificial Sequence
  derived and/or modified sequence
cccctccctcccacgctcccctccccttcccttctccaaccccctccttcccctctcacccctccccccatcctggccccccctgcaaaagtggggtgcggaggggggaggggtgagaacccacggaggggaggaacgaaactccgatgaagtcagagccccttacccgccgccgcggccaggccccccaacatggactgtctctgtatagtgacaaccaagaaataccgctaccaagatgaagacacgccccctctggagcacagcccggcccacctccccaaccaggccaattctcccccagtgattgtcaacacagataccctagaagccccaggatatgtgttgcaggtgaacgggaccgagggggagatggaatacgaggaaatcacattggaaaggggtaactcaggtctgggcttcagcatcgcaggtggcactgacaacccacacatcggtgacgacccatccattttcatcaccaagatcattcctggtggggctgcggcccaggatggccgcctcagggtcaacgacagcatcctgtttgtaaatgaagtggacgtgcgcgaggtgacccactcagcggcggtggaagccctcaaagaggcaggctccatcgttcgcctctatgtcatgcgccggaagcccccggctgagaaggtcatggagatcaagctcatcaaggggcctaaaggtcttggcttcagcatcgcagggggcgtagggaaccagcacatcccaggagataatagcatctatgtaacaaagatcatcgaagggggtgctgcccacaaggatgggaggttgcagattggagacaagatcctggcggtcaacagtgtggggctagaggacgtcatgcatgaagatgctgtggcagccctgaagaacacgtatgatgttgtctacctaaaggtggccaagcccagcaatgcctacctgagtgacagctatgctcccccagacatcacaacctcttattcccagcacctggacaatgagatcagtcacagcagctacctgggcaccgactaccccacagccatgacccccacttcccctcggcgctactctccagtggccaaggacctgctcggggaggaagacattccccgagaaccgaggcgaattgtgatccaccggggctccacgggcctgggcttcaacatcgtgggtggcgaggacggtgaaggcatcttcatctcctttatcctggccgggggccctgcagacctcagtggggagctgcggaagggggaccagatcctgtcggtcaacggtgtggacctccgaaatgccagccatgagcaggctgccattgccctgaagaatgcgggtcagacggtcacgatcatcgctcagtataaaccagaagagtacagccgattcgaggccaagatccacgaccttcgggaacagctcatgaacagcagcctgggctcagggactgcgtccctgcggagcaaccccaaaaggggtttctacatcagggccctgtttgattacgacaagaccaaggactgcggcttcctgagccaggccctgagcttccgctttggggatgtgctgcatgtcatcgatgctagtgatgaggagtggtggcaggcacggcgggtccactctgacagtgagaccgacgacattgggttcatccccagcaaacggcgggttgagcgacgagagtggtcaaggttaaaggccaaggactggggctccagctctggatcgcagggtcgagaagactcggttctgagctacgagacagtgacgcagatggaagtgcactatgctcgccccatcatcatccttgggcccaccaaggaccgcgccaacgatgatcttctctccgagttccccgacaagtttggatcctgtgttccccatacgacacggcccaagcgggagtatgagatagatggccgggattaccactttgtgtcgtcccgggagaaaatggagaaggacattcaggcgcacaagttcattgaggccggccagtacaacagccacctctatgggaccagcgtccagtccgtgcgagaggtggcagagcaggggaagcactgcatcctcgatgtctcggccaatgccgtgcggcggctgcaggcggcccacctgcaccccatcgccatcttcatccgcccccgctccctggagaatgtgctagagattaacaagcggatcacagaggagcaagcccgcaaagccttcgacagagccaccaagctggagcaggagttcacagagtgcttctcagccatcgtggagggtgacagctttgaggagatctaccacaaggtgaagcgtgtcatcgaggacctctcaggcccctacatctgggttccagcccgagagagactctgattcctgccctggcttggcctggactcgccctgcctccatcacctgggcccttggtctggactgaattgcccaagcccttggctccccccggcctccctcccaccccttcttatttatttcctttctaactggatccagcctgttggaggggggacactcctctgcatgtatccccgcaccccagaactgggctcctgaacgccaggaacctggggtctgggggggagctgggctccttgttccgagcccttgctccttaggatccccgcccccacctgcccccaatgcacacacagacccaccgggggccacctgccctcccccatcctctcccacacacattccagaagtcagggccccctcgaggagcacccgctgcagggatgcagggccacaggcctccgctctctcctaaggcagggtctggggtcacccctgccctcatcgtaattccccatgttccttgatttctcatttattttttccactttttttcttctcaaaggtggttttttggggggagaagcaggggactccgcagcgggcccctgccttccacatgcccccaccatttttctttgccggtttgcatgagtggaaggtctaaatgtggcttttttttttttttttcctgggaatttttttggggaaaagggagggatgggtctagggagtgggaaatgcgggagggagggtggggggcaggggtcgggggtcgggtgtccgggagccagggaagactggaaatgctgccgccttctgcaatttatttatttttttcttttgagagagtgaaaggaagagacagatacttgaaa

SEQ ID NO: 274203 - protein, 154 aa, Artificial Sequence
  derived and/or modified sequence
MADDLDFETGDAGASATFPMQCSALRKNGFVVLKGRPCKIVEMSTSKTGKHGHAKVHLVGIDIFTGKKYEDICPSTHNMDVPNIKRNDFQLIGIQDGYLSLLQDSGEVREDLRLPEGDLGKEIEQKYDCGEEILITVLSAMTEEAAVAIKAMAK

SEQ ID NO: 274204 - DNA, 465 bp, Artificial Sequence
  derived and/or modified sequence
atggctgatgacttggacttcgaaaccggggacgccggtgcgagtgcaactttccccatgcagtgttctgcacttagaaaaaacgggtttgtcgttctgaagggacggccttgtaagattgtcgagatgagcacgtcaaagacaggcaagcacgggcacgctaaggtccacctcgtggggatcgacatttttacgggaaagaagtacgaagatatttgtccttccacccacaacatggatgtcccaaacatcaaacggaacgatttccagcttatcggcattcaagatgggtacctgtcccttctgcaggattccggcgaagttcgtgaggatttgagactgcctgaaggcgatcttggcaaggaaatcgagcagaaatacgattgcggagaggagattttgatcaccgtactttccgcaatgacagaagaagccgctgttgcaatcaaggctatggccaagtag

SEQ ID NO: 274205 - DNA, 465 bp, Artificial Sequence
  derived and/or modified sequence
atggcggacgatctcgatttcgaaacgggggatgccggggcctccgcgacattccccatgcagtgtagcgctctgcggaagaacggcttcgtggtcctcaaagggcggccctgtaaaatcgtggaaatgtcaacgtctaaaacggggaaacacggccacgccaaggtccacctcgtcggcatcgacatttttaccgggaaaaaatatgaagatatttgtccctcaacccacaatatggacgtgcctaatatcaagcggaatgactttcagttgattggaattcaggacgggtatctgagcctgctgcaagacagcggcgaagttcgggaagacctgagacttcccgaaggtgatttgggcaaagagattgagcagaaatatgattgcggtgaggagatactgatcaccgtgttgagcgctatgacggaggaggccgccgtagctattaaagccatggccaagtag

SEQ ID NO: 274206 - DNA, 465 bp, Artificial Sequence
  derived and/or modified sequence
atggctgatgatctagacttcgaaacgggggacgccggtgcctctgccactttcccaatgcagtgttcagccctacgaaaaaacggctttgtagtactaaagggacgcccttgtaagatcgtcgagatgtccactagcaaaacaggaaagcatgggcacgcaaaagtgcacctggttggcatagacatcttcaccggcaaaaaatacgaggatatttgtccctccacacataacatggatgtccccaatatcaagagaaacgacttccaattgataggcatacaggatgggtacctttcattgctccaggactctggtgaggtcagagaagatttgaggctgcccgagggtgaccttggaaaagaaatagagcagaaatacgattgtggtgaggaaattcttattacagtgctgtccgctatgactgaggaggctgcagtggcaatcaaagctatggctaaatag

SEQ ID NO: 274207 - DNA, 465 bp, Artificial Sequence
  derived and/or modified sequence
atggctgatgacctggactttgaaacaggagatgctggggccagcgccaccttccccatgcagtgcagcgccctgaggaagaatggatttgtggtgctgaagggccggccctgcaagatcgtggagatgagcaccagcaagacaggcaagcacggccacgccaaggtgcacctggtgggcatcgacatcttcaccgggaagaagtatgaggacatctgccccagcacccacaacatggatgtgcccaacatcaagagaaatgacttccagctgattggcatccaggacggctacctgagcctgctgcaggacagcggggaggtgcgggaggacctgcggctgcctgagggggacctgggcaaggagattgagcagaagtatgactgtggggaggagatcctgatcaccgtgctgagcgccatgacagaggaggccgctgtggccatcaaggccatggccaagtag

SEQ ID NO: 274208 - DNA, 465 bp, Artificial Sequence
  derived and/or modified sequence
atggccgacgacctggacttcgagaccggcgacgccggcgccagcgctacctttcccatgcagtgttctgctttacgcaagaacggattcgtggtgctgaaagggcgaccgtgcaagattgttgaaatgtcgacatctaagacaggtaaacatggccatgcaaaggtacatctcgtgggcatcgatatctttaccggaaagaagtatgaagacatctgtccctctacccataatatggacgtgccgaacattaaaaggaacgactttcagttgataggtatccaggacggctacctgtcactgctacaggattcaggggaagtcagggaggacttgcggctgccagagggcgacttgggcaaagaaattgaacagaaatatgactgcggcgaggaaatactcatcaccgtgctcagtgctatgaccgaggaggctgcagtcgctattaaggccatggcaaagtag

SEQ ID NO: 274209 - DNA, 465 bp, Artificial Sequence
  derived and/or modified sequence
atggccgacgacctggacttcgagaccggcgacgccggcgccagcgcaaccttccctatgcagtgcagtgccttgaggaaaaatggcttcgtggtcttgaaaggacgcccttgcaagatcgttgaaatgtccacgtcaaagaccgggaagcatggccatgcaaaggtacacctggtggggatcgatatctttacgggaaaaaaatatgaggacatctgtccttcaacacacaacatggacgtgccgaacataaagagaaacgatttccagctgataggaatccaggacggctacctgtctctattacaggactccggagaagtcagggaggacttgcggctgccggaaggcgatctgggcaaagagatcgagcaaaaatatgattgcggcgaagagatacttataacggtcttaagcgccatgaccgaagaagctgcagtcgccatcaaggccatggctaagtag

SEQ ID NO: 274210 - DNA, 465 bp, Artificial Sequence
  derived and/or modified sequence
atggccgacgacctggacttcgagaccggcgacgccggcgccagcgcaaccttccctatgcagtgcagcgctctccgtaagaatggctttgtggtcctcaaaggtcggccttgcaagatcgttgagatgtcaacttccaaaaccggtaaacacggccacgctaaagttcacctggttgggatagatatttttactggaaaaaaatacgaggatatatgcccctctacccacaatatggacgtgcctaatatcaaacgcaatgatttccagttaatcggcattcaggacggatatctgagccttctccaggattcgggagaggtaagagaggatctgcggctccctgaaggggacctgggcaaagagatcgaacagaagtacgattgtggggaagagattctgattacggtcttatccgcaatgacagaagaagcagccgtcgccattaaggccatggcgaagtag

SEQ ID NO: 274211 - DNA, 465 bp, Artificial Sequence
  derived and/or modified sequence
atggcggatgacctagacttcgaaacaggtgatgcaggcgcaagcgctaccttccccatgcagtgttctgcacttcgtaaaaacggattcgtggtgctgaaagggaggccatgcaaaattgtggagatgagtactagtaaaaccggaaagcacggacatgccaaggtgcatttagtgggaatcgatatcttcactggcaaaaagtacgaagacatctgtccatccactcataacatggatgtgccaaatatcaagaggaatgacttccagctgattggaattcaggacggatatctaagtctcctgcaggattcgggggaggttagagaggatctgcgtctgcctgagggcgatctgggtaaagaaattgaacaaaaatatgactgcggcgaggaaattcttatcaccgtgttaagcgctatgacggaagaagctgcagtcgccatcaaagctatggcaaaatag

SEQ ID NO: 274212 - DNA, 465 bp, Artificial Sequence
  derived and/or modified sequence
atggcagatgatctggattttgaaaccggtgacgcgggagcttcagctacatttccaatgcagtgttccgccctgcgtaaaaatggattcgtagtcctgaaagggcgaccctgcaagatcgtcgagatgtcaacaagtaagactggcaaacacggccacgccaaagtccatctcgtgggtatcgacatcttcactggaaaaaaatacgaggatatatgcccgagcacacataacatggacgtccctaacattaagcgtaatgacttccagctgatcgggatccaagacggatacttaagtctgctgcaggatagcggggaggttcgagaagacttgagattgcctgaaggagacctgggaaaagaaattgaacagaagtacgattgtggggaagaaatcctgattaccgtcttatcagcgatgaccgaggaagccgcagtggcaattaaagccatggcaaaatag

SEQ ID NO: 274213 - DNA, 465 bp, Artificial Sequence
  derived and/or modified sequence
atggcagacgatcttgattttgaaaccggtgacgccggagccagcgcaactttccccatgcaatgcagtgcgctgcggaaaaacgggtttgtggtgctgaaggggaggccttgcaaaatcgtcgaaatgtccacttctaaaaccggtaagcacgggcatgctaaggtacatcttgttggcattgacatctttacagggaagaaatacgaagatatctgtccatcgacacacaacatggacgtgcccaacatcaaacgcaatgactttcagctcatagggatacaggacggctacctcagtctccttcaagatagcggcgaggtgcgggaagacttaagacttccagaaggggacctcggcaaggagattgagcaaaagtacgactgcggagaagagatattgattactgttctgtcagccatgaccgaagaggccgcagtcgctatcaaagccatggcaaaatag

SEQ ID NO: 274214 - DNA, 465 bp, Artificial Sequence
  derived and/or modified sequence
atggccgacgacctggacttcgagaccggcgacgccggcgccagcgccaccttccccatgcagtgcagcgccctgagaaagaacggcttcgtggtgctgaagggcagaccctgcaagatcgtggagatgagcaccagcaagaccggcaagcacggccacgccaaggtgcacctggtgggcatcgacatcttcaccggcaagaagtacgaggacatctgccccagcacccacaacatggacgtgcccaacatcaagagaaacgacttccagctgatcggcatccaggacggctacctgagcctgctgcaggacagcggcgaggtgagagaggacctgagactgcccgagggcgacctgggcaaggagatcgagcagaagtacgactgcggcgaggagatcctgatcaccgtgctgagcgccatgaccgaggaggccgccgtggccatcaaggccatggccaagtag

SEQ ID NO: 274215 - protein, 434 aa, Artificial Sequence
  derived and/or modified sequence
MAMQKIFAREILDSRGNPTVEVDLHTAKGRFRAAVPSGASTGIYEALELRDGDKGRYLGKGVLKAVENINNTLGPALLQKKLSVVDQEKVDKFMIELDGTENKSKFGANAILGVSLAVCKAGAAEKGVPLYRHIADLAGNPDLILPVPAFNVINGGSHAGNKLAMQEFMILPVGASSFKEAMRIGAEVYHHLKGVIKAKYGKDATNVGDEGGFAPNILENNEALELLKTAIQAAGYPDKVVIGMDVAASEFYRNGKYDLDFKSPDDPARHITGEKLGELYKSFIKNYPVVSIEDPFDQDDWATWTSFLSGVNIQIVGDDLTVTNPKRIAQAVEKKACNCLLLKVNQIGSVTESIQACKLAQSNGWGVMVSHRSGETEDTFIADLVVGLCTGQIKTGAPCRSERLAKYNQLMRIEEALGDKAIFAGRKFRNPKAK

SEQ ID NO: 274216 - protein, 283 aa, Artificial Sequence
  derived and/or modified sequence
MAMQKIFAREILDSRGNPTVEVDLHTAKGRFRAAVPSGASTGIYEALELRDGDKGRYLGKGVLKAVENINNTLGPALLQKKLSVVDQEKVDKFMIELDGTENKSKFGANAILGVSLAVCKAGAAEKGVPLYRHIADLAGNPDLILPVPAFNVINGGSHAGNKLAMQEFMILPVGASSFKEAMRIGAEVYHHLKGVIKAKYGKDATNVGDEGGFAPNILENNEALELLKTAIQAAGYPDKVVIGMDVAASEFYRNGKYDLDFKSPDDPARHITGEKLGELYKSF

SEQ ID NO: 274217 - protein, 154 aa, Artificial Sequence
  derived and/or modified sequence
MAMQKIFAREILDSRGNPTVEVDLHTAKGRFRAAVPSGASTGIYEALELRDGDKGRYLGKGVLKAVENINNTLGPALLQKKLSVVDQEKVDKFMIELDGTENKSKFGANAILGVSLAVCKAGAAEKGVPLYRHIADLAGNPDLILPVPAFNVIN

SEQ ID NO: 274218 - protein, 148 aa, Artificial Sequence
  derived and/or modified sequence
MAMQKIFAREILDSRGNPTVEVDLHTAKGRFRAAVPSGASTGIYEALELRDGDKGRYLGKGVLKAVENINNTLGPALLQKKLSVVDQEKVDKFMIELDGTENKSKFGANAILGVSLAVCKAGAAEKGVPLYRHIADLAGNPDLILPVP

SEQ ID NO: 274219 - DNA, 1521 bp, Artificial Sequence
  derived and/or modified sequence
gcgcagcctgagagggggtgagctgacactgtcccagctgccacctagactcggagctccatccaaacctccagcgaagacatcccaggtcgggtgaatcttccagccctgggggtggaggtagtaaaggccatggccatgcagaaaatctttgcccgggaaatcttggactccaggggcaaccccacggtggaggtggacctgcacacggccaagggccgattccgagcagctgtgcccagtggggcttccacgggtatctatgaggctctggaactaagagacggagacaaaggccgctacctggggaaaggagtcctgaaggctgtggagaacatcaacaatactctgggccctgctctgctgcaaaagaaactaagcgttgtggatcaagaaaaagttgacaaatttatgattgagctagatgggaccgagaataagtccaagtttggggccaatgccatcctgggcgtgtccttggccgtgtgtaaggcgggagcagctgagaagggggtccccctgtaccgccacatcgcagatctcgctgggaaccctgacctcatactcccagtgccagccttcaatgtgatcaacgggggctcccatgctggaaacaagctggccatgcaggagttcatgattctgcctgtgggagccagctccttcaaggaagccatgcgcattggcgccgaggtctaccaccacctcaagggggtcatcaaggccaagtatgggaaggatgccaccaatgtgggtgatgaaggtggcttcgcacccaacatcctggagaacaatgaggccctggagctgctgaagacggccatccaggcggctggttacccagacaaggtggtgatcggcatggatgtggcagcatctgagttctatcgcaatgggaagtacgatcttgacttcaagtcgcctgatgatcccgcacggcacatcactggggagaagctcggagagctgtataagagctttatcaagaactatcctgtggtctccatcgaagacccctttgaccaggatgactgggccacttggacctccttcctctcgggggtgaacatccagattgtgggggatgacttgacagtcaccaaccccaagaggattgcccaggccgttgagaagaaggcctgcaactgtctgctgctgaaggtcaaccagatcggctcggtgaccgaatcgatccaggcgtgcaaactggctcagtctaatggctggggggtgatggtgagccaccgctctggggagactgaggacacattcattgctgaccttgtggtggggctctgcacaggacagatcaagactggcgccccctgccgctcggagcgtctggccaaatacaaccaactcatgaggatcgaggaggctcttggggacaaggcaatctttgctggacgcaagttccgtaacccgaaggccaagtgagaagctggaggctccaggactccactggacagacccaggtcttccagacctgcttcctgaaataaacactggtgccaaccaaga

SEQ ID NO: 274220 - DNA, 1448 bp, Artificial Sequence
  derived and/or modified sequence
aaagggcaagggatttctggttccttaagagatcaactgtctacactcactcacacctcctgtcctgcagccatggccatgcagaaaatctttgcccgggaaatcttggactccaggggcaaccccacggtggaggtggacctgcacacggccaagggccgattccgagcagctgtgcccagtggggcttccacgggtatctatgaggctctggaactaagagacggagacaaaggccgctacctggggaaaggagtcctgaaggctgtggagaacatcaacaatactctgggccctgctctgctgcaaaagaaactaagcgttgtggatcaagaaaaagttgacaaatttatgattgagctagatgggaccgagaataagtccaagtttggggccaatgccatcctgggcgtgtccttggccgtgtgtaaggcgggagcagctgagaagggggtccccctgtaccgccacatcgcagatctcgctgggaaccctgacctcatactcccagtgccagccttcaatgtgatcaacgggggctcccatgctggaaacaagctggccatgcaggagttcatgattctgcctgtgggagccagctccttcaaggaagccatgcgcattggcgccgaggtctaccaccacctcaagggggtcatcaaggccaagtatgggaaggatgccaccaatgtgggtgatgaaggtggcttcgcacccaacatcctggagaacaatgaggccctggagctgctgaagacggccatccaggcggctggttacccagacaaggtggtgatcggcatggatgtggcagcatctgagttctatcgcaatgggaagtacgatcttgacttcaagtcgcctgatgatcccgcacggcacatcactggggagaagctcggagagctgtataagagctttatcaagaactatcctgtggtctccatcgaagacccctttgaccaggatgactgggccacttggacctccttcctctcgggggtgaacatccagattgtgggggatgacttgacagtcaccaaccccaagaggattgcccaggccgttgagaagaaggcctgcaactgtctgctgctgaaggtcaaccagatcggctcggtgaccgaatcgatccaggcgtgcaaactggctcagtctaatggctggggggtgatggtgagccaccgctctggggagactgaggacacattcattgctgaccttgtggtggggctctgcacaggacagatcaagactggcgccccctgccgctcggagcgtctggccaaatacaaccaactcatgaggatcgaggaggctcttggggacaaggcaatctttgctggacgcaagttccgtaacccgaaggccaagtgagaagctggaggctccaggactccactggacagacccaggtcttccagacctgcttcctgaaataaacactg

SEQ ID NO: 274221 - DNA, 945 bp, Artificial Sequence
  derived and/or modified sequence
ataaatgcgcagcctgagagggggtgagctgacactgtcccagctgccacctagactcggagctccatccaaacctccagcgaagacatcccagccatggccatgcagaaaatctttgcccgggaaatcttggactccaggggcaaccccacggtggaggtggacctgcacacggccaagggccgattccgagcagctgtgcccagtggggcttccacgggtatctatgaggctctggaactaagagacggagacaaaggccgctacctggggaaaggagtcctgaaggctgtggagaacatcaacaatactctgggccctgctctgctgcaaaagaaactaagcgttgtggatcaagaaaaagttgacaaatttatgattgagctagatgggaccgagaataagtccaagtttggggccaatgccatcctgggcgtgtccttggccgtgtgtaaggcgggagcagctgagaagggggtccccctgtaccgccacatcgcagatctcgctgggaaccctgacctcatactcccagtgccagccttcaatgtgatcaacgggggctcccatgctggaaacaagctggccatgcaggagttcatgattctgcctgtgggagccagctccttcaaggaagccatgcgcattggcgccgaggtctaccaccacctcaagggggtcatcaaggccaagtatgggaaggatgccaccaatgtgggtgatgaaggtggcttcgcacccaacatcctggagaacaatgaggccctggagctgctgaagacggccatccaggcggctggttacccagacaaggtggtgatcggcatggatgtggcagcatctgagttctatcgcaatgggaagtacgatcttgacttcaagtcgcctgatgatcccgcacggcacatcactggggagaagctcggagagctgtataagagcttt

SEQ ID NO: 274222 - DNA, 561 bp, Artificial Sequence
  derived and/or modified sequence
gacactgtcccagctgccacctagactcggagctccatccaaacctccagcgaagacatcccaggtcgggtgaatcttccagccctgggggtggagccatggccatgcagaaaatctttgcccgggaaatcttggactccaggggcaaccccacggtggaggtggacctgcacacggccaagggccgattccgagcagctgtgcccagtggggcttccacgggtatctatgaggctctggaactaagagacggagacaaaggccgctacctggggaaaggagtcctgaaggctgtggagaacatcaacaatactctgggccctgctctgctgcaaaagaaactaagcgttgtggatcaagaaaaagttgacaaatttatgattgagctagatgggaccgagaataagtccaagtttggggccaatgccatcctgggcgtgtccttggccgtgtgtaaggcgggagcagctgagaagggggtccccctgtaccgccacatcgcagatctcgctgggaaccctgacctcatactcccagtgccagccttcaatgtgatcaacg

SEQ ID NO: 274223 - DNA, 563 bp, Artificial Sequence
  derived and/or modified sequence
acttattcaagtaataagaaagcaaagaagagtttggccaaatcctctagtcgctctcatagctgaaggcacccaccggggccacttctgtccccagcgtcttctcgggtcgtgcagccatggccatgcagaaaatctttgcccgggaaatcttggactccaggggcaaccccacggtggaggtggacctgcacacggccaagggccgattccgagcagctgtgcccagtggggcttccacgggtatctatgaggctctggaactaagagacggagacaaaggccgctacctggggaaaggagtcctgaaggctgtggagaacatcaacaatactctgggccctgctctgctgcaaaagaaactaagcgttgtggatcaagaaaaagttgacaaatttatgattgagctagatgggaccgagaataagtccaagtttggggccaatgccatcctgggcgtgtccttggccgtgtgtaaggcgggagcagctgagaagggggtccccctgtaccgccacatcgcagatctcgctgggaaccctgacctcatactcccagtgcca

SEQ ID NO: 274224 - protein, 1643 aa, Artificial Sequence
  derived and/or modified sequence
MHRAVDPPGARAAREAFALGGLSCAGAWSSCPPHPPPRSAWLPGGRCSASIGQPPLPAPLPPSHGSSSGHPSKPYYAPGAPTPRPLHGKLESLHGCVQALLREPAQPGLWEQLGQLYESEHDSEEATRCYHSALRYGGSFAELGPRIGRLQQAQLWNFHTGSCQHRAKVLPPLEQVWNLLHLEHKRNYGAKRGGPPVKRAAEPPVVQPVPPAALSGPSGEEGLSPGGKRRRGCNSEQTGLPPGLPLPPPPLPPPPPPPPPPPPPLPGLATSPPFQLTKPGLWSTLHGDAWGPERKGSAPPERQEQRHSLPHPYPYPAPAYTAHPPGHRLVPAAPPGPGPRPPGAESHGCLPATRPPGSDLRESRVQRSRMDSSVSPAATTACVPYAPSRPPGLPGTTTSSSSSSSSNTGLRGVEPNPGIPGADHYQTPALEVSHHGRLGPSAHSSRKPFLGAPAATPHLSLPPGPSSPPPPPCPRLLRPPPPPAWLKGPACRAAREDGEILEELFFGTEGPPRPAPPPLPHREGFLGPPASRFSVGTQDSHTPPTPPTPTTSSSNSNSGSHSSSPAGPVSFPPPPYLARSIDPLPRPPSPAQNPQDPPLVPLTLALPPAPPSSCHQNTSGSFRRPESPRPRVSFPKTPEVGPGPPPGPLSKAPQPVPPGVGELPARGPRLFDFPPTPLEDQFEEPAEFKILPDGLANIMKMLDESIRKEEEQQQHEAGVAPQPPLKEPFASLQSPFPTDTAPTTTAPAVAVTTTTTTTTTTTATQEEEKKPPPALPPPPPLAKFPPPSQPQPPPPPPPSPASLLKSLASVLEGQKYCYRGTGAAVSTRPGPLPTTQYSPGPPSGATALPPTSAAPSAQGSPQPSASSSSQFSTSGGPWARERRAGEEPVPGPMTPTQPPPPLSLPPARSESEVLEEISRACETLVERVGRSATDPADPVDTAEPADSGTERLLPPAQAKEEAGGVAAVSGSCKRRQKEHQKEHRRHRRACKDSVGRRPREGRAKAKAKVPKEKSRRVLGNLDLQSEEIQGREKSRPDLGGASKAKPPTAPAPPSAPAPSAQPTPPSASVPGKKAREEAPGPPGVSRADMLKLRSLSEGPPKELKIRLIKVESGDKETFIASEVEERRLRMADLTISHCAADVVRASRNAKVKGKFRESYLSPAQSVKPKINTEEKLPREKLNPPTPSIYLESKRDAFSPVLLQFCTDPRNPITVIRGLAGSLRLNLGLFSTKTLVEASGEHTVEVRTQVQQPSDENWDLTGTRQIWPCESSRSHTTIAKYAQYQASSFQESLQEEKESEDEESEEPDSTTGTPPSSAPDPKNHHIIKFGTNIDLSDAKRWKPQLQELLKLPAFMRVTSTGNMLSHVGHTILGMNTVQLYMKVPGSRTPGHQENNNFCSVNINIGPGDCEWFAVHEHYWETISAFCDRHGVDYLTGSWWPILDDLYASNIPVYRFVQRPGDLVWINAGTVHWVQATGWCNNIAWNVGPLTAYQYQLALERYEWNEVKNVKSIVPMIHVSWNVARTVKISDPDLFKMIKFCLLQSMKHCQVQRESLVRAGKKIAYQGRVKDEPAYYCNECDVEVFNILFVTSENGSRNTYLVHCEGCARRRSAGLQGVVVLEQYRTEELAQAYDAFTLAPASTSR

SEQ ID NO: 274225 - DNA, 4932 bp, Artificial Sequence
  derived and/or modified sequence
atgcacagggctgtggatccacccggggcccgagccgccagagaggcctttgcactcgggggtctctcatgcgcgggggcgtggtccagctgtccaccccaccctccgcctcgctccgcttggctgccgggcggcagatgctccgcttccatcgggcagcccccgcttccagccccacttcccccctcccatgggagctcatcaggacacccaagtaaaccctattatgcacccggagcacccaccccccgccctctgcacggaaagctggaatctttacacggttgcgttcaggccctgctgagggaacctgcacagccaggcctctgggagcagttgggacagctgtatgagtctgagcacgatagcgaggaagccacacgatgctaccacagtgcgctgcggtatggggggtcattcgccgaactggggcccagaattggacggctgcagcaagcccaactgtggaacttccacactggatcctgtcagcatcgcgctaaggtcctgcctcctttggaacaggtgtggaacctcttgcatttagaacacaaaagaaactatggcgcaaagaggggaggcccacccgtcaagcgcgctgctgaacctccagtggtacagccagtcccccccgcagcactcagtggaccctcgggcgaagagggcttgtcccctgggggcaagagaagacgcggatgcaactctgagcagaccggtctgccacccggtctacccctgccaccaccaccactgcctcccccgcctccgccaccacctccgcctcccccgcctctgcctggattagcaaccagtcctccctttcagttgacgaagcctgggctgtggtcaaccttgcacggcgacgcctggggacctgagcgaaagggaagtgctccgccggaaagacaggaacagaggcatagcctcccgcacccctatccatacccagccccggcttacacagcccacccgccaggtcatcgcctagtccccgccgcaccgcctggcccgggcccccgtcctcccggtgccgaatcccatgggtgcctgcctgccacgcgaccaccaggcagcgacctgcgagaatctagagtgcagcggagcagaatggattcaagtgtaagccctgccgctacaactgcctgcgtgccatacgccccatctcgtccaccaggcctgcccggaacgacaacgagcagttcttctagcagctccagcaacacaggcttgcggggcgttgagccaaaccctggtatacctggcgccgaccactaccaaacccctgcattggaggtctctcaccatgggagactgggtccgtccgctcattcttcccggaagcctttcttaggagcccccgctgcgaccccccacctctcccttccacctggcccctcttcccctccaccaccaccttgtccccggctgttacgccctcctccaccaccagcatggttaaagggtcccgcttgccgcgcagcccgagaggacggcgagattctagaggagctgtttttcggtacggaaggcccaccacggccagcccctcctcctctgcctcatagagaaggattcctgggtccccccgccagtcgattcagcgtaggaacacaggacagtcacaccccgccaaccccacctactcccaccacctcctcaagcaattctaattccggctcccattcctcttcacctgctgggcctgttagcttcccgccccccccatacctggcccgcagcatcgaccccctgcctcggcccccctctccggctcagaacccccaggacccccctctggtacctttgaccctggcgttgccgcctgctccaccatcgtcttgtcatcaaaatacatccggatctttccggcgccccgaatcccctcggcccagagtgtcgttccccaagacaccagaggtcggccccggccctccaccaggacctttgtccaaggcgccacagcccgtcccccctggagtcggcgagttgccagctaggggcccccgcctctttgactttcccccaaccccgctggaagatcagttcgaggagcctgctgagtttaagatcttgccggatggacttgcaaacattatgaaaatgctggacgagtccattcggaaagaggaggagcagcaacaacatgaggctggagtagcaccccaacccccgctgaaggaaccttttgcttcactccagtctcccttccccacagacacagctcccactaccactgcacccgccgtggccgttacaaccactactacaaccactactaccacaacagcgacccaggaggaggagaaaaaaccccctcccgctctgcccccacctccgcctctggctaagttccctccaccatcccagccgcagccgccccctccccccccaccttcccctgcttccttgctgaagtcactcgcatccgtgcttgaggggcagaaatattgttacaggggtacaggggcagccgtgagtactcgccctgggccattgcccaccacacagtatagccctggtcctcctagcggagctactgccctgccaccaactagcgccgccccttcagctcaagggtcgccgcagcccagtgctagtagcagttcccaatttagtacctcagggggtccgtgggcgcgagagaggcgcgcaggcgaggagcccgtgccagggcctatgacccctacccagcctccgccaccgctgtcgctgccaccagctaggtcagaaagcgaggtattagaggaaattagtcgagcttgtgagaccttggtagagcgcgtgggcagaagcgcaacagaccccgctgatcctgtcgatacagccgagcccgccgactccgggaccgaaaggcttctcccgcccgctcaagcgaaagaggaggctggcggggtggcagcggtaagcggctcctgtaaacgtagacaaaaggaacatcagaaggaacatcgcagacacagaagggcttgcaaagattcagtgggcaggagacctcgggaggggcgcgcgaaggcaaaggccaaagtccccaaggagaagtcacgcagggtgctagggaatctggatttacaaagcgaggagatccagggtcgcgaaaaatcccgcccagacttaggaggtgcttccaaggcgaaaccacctactgcccccgctccaccatccgctcctgccccaagtgcacaacccacccctcctagcgccagcgttcctggcaagaaggctcgagaagaggcgccagggccccccggcgtgtcccgggctgatatgctgaaactgcgatccctcagcgagggaccccctaaggagctcaaaattagattgatcaaagtggagagcggggataaagaaacctttatcgcctcagaagtcgaagagcggaggcttcgaatggccgatctcaccataagtcactgtgccgcagacgtggttagggcttcccgcaatgcaaaggtgaaggggaagtttcgcgaatcttacctatcgcccgcccagagcgttaagcctaagattaacacagaggaaaagcttcctcgtgagaagctcaatccccctacaccgagtatttatctggagtctaagcgcgatgcttttagtccggtgttactccaattctgcaccgacccgcgaaatcccataacagtgattcggggccttgctggcagtctgcgcctaaatctgggactcttcagcactaaaacactggtagaagcgtctggtgaacacacggtcgaggtaaggacccaggtgcaacagccttccgacgaaaattgggacttaacaggcaccagacagatttggccctgtgagtcttccaggtcccacaccaccattgcgaagtatgcacagtaccaggccagttcattccaggagtctttgcaggaagaaaaagaatctgaggatgaggagtctgaagaacctgattctacaacaggtacacctccctcctccgctccagaccccaagaaccatcacattattaaattcgggactaatattgacctgtccgatgccaaaaggtggaagccccagctacaggaactgctcaaactcccggcttttatgagggtgacctcaactggtaatatgctaagccacgttggccatactatactgggaatgaatacggtccagttgtatatgaaggttcccggttccagaactccgggtcaccaggagaacaataatttttgtagtgtgaacattaatatagggccaggggactgcgagtggtttgctgtccacgagcactattgggagactatttctgctttttgtgaccgccacggagtggactatctcactgggagctggtggcccattctcgatgacctgtacgcaagcaacatccctgtctaccggtttgtacagcggccaggagatttggtatggatcaacgcaggtaccgtgcactgggtccaggctactggttggtgcaataatatcgcctggaacgtgggcccacttacagcttaccagtaccagctggcgctggagaggtatgagtggaatgaggtgaagaacgtgaagagcatcgtacctatgatccacgtgtcgtggaatgtggccaggactgtgaagatctccgacccggacttattcaaaatgattaaattttgtctgttacagagcatgaagcactgccaggtccaacgcgaaagcctggtcagagccgggaagaaaattgcttaccagggccgggtgaaggacgaacccgcctactattgtaacgagtgtgacgtagaagtttttaatattctcttcgttactagtgagaacggctcccgtaacacttatctggtacactgcgaagggtgtgcccgccgccgatctgctggtctacagggtgtggtggtgttggaacagtatcgcaccgaggagctggcccaggcatatgatgctttcactctggctcctgcaagcacttccagatag

SEQ ID NO: 274226 - DNA, 4932 bp, Artificial Sequence
  derived and/or modified sequence
atgcacagagctgtggaccccccaggggcccgggccgcccgggaggcctttgccctgggcggcctgagctgtgccggggcctggagcagctgccccccccaccccccacccaggtctgcctggctgcccggcggccgctgcagcgccagcatcggccagccccccctgcctgcccccctgccccccagccacggcagcagcagcggccaccccagcaagccctactatgcccctggggcccccaccccccggcccctgcacggcaagctggagagcctgcacggctgtgtgcaggccctgctgcgggagcccgcccagcccggcctgtgggagcagctgggccagctgtatgaaagtgaacatgattctgaggaggccacccgctgctaccacagcgccctgcgctatggaggcagctttgctgagctgggccccagaattggccgcctgcagcaggcccagctgtggaacttccacacaggcagctgccagcaccgggccaaggtgctgccccccctggagcaggtgtggaacctgctgcacctggagcacaagaggaactacggggccaagagaggaggcccccctgtgaagagagctgctgagccccctgtggtgcagcctgtgcccccagctgccctgagcggccccagcggggaggagggcctgagccctgggggcaagagaagaagaggctgcaacagcgagcagacaggcctgcccccaggcctgcccctgcccccaccacccctgcccccacctcctcctcctcctcctcctcctcctccacccctgcccggcctggccaccagcccccccttccagctgaccaagccaggcctgtggagcaccctgcatggagatgcctggggccctgagaggaaaggaagtgcccctcctgagcggcaggagcagaggcacagcctgccccacccctacccctacccagccccagcctacacagcccaccccccaggccaccggctggtgcctgctgcccctcctggccctggccccaggcctcctggagctgagagccacggctgcctgcctgccaccaggcctcctggcagtgacctgcgggagagccgggtgcagaggagcaggatggacagctctgtgtccccagctgccaccacagcctgtgtgccctatgcccccagccggcccccaggcctgcccggcaccaccaccagcagcagcagcagcagcagcagcaacacaggcctgcggggcgtggagcccaaccctggcatccctggagctgaccactaccagaccccagccctggaggtgagccaccacggccgcctgggccccagcgcccacagcagcaggaagcccttcctgggcgccccagctgccaccccccacctgagcctgcccccaggccccagcagccccccacctccaccctgcccccggctgctgcggcccccacctcctccagcctggctgaagggccctgcctgcagagctgcccgggaggatggagagatcctggaggagctgttcttcggcacagagggcccccccaggcctgcccccccacccctgccccaccgggagggcttcctgggccccccagccagccgcttctctgtgggcacccaggacagccacaccccacccaccccacccacccccaccaccagcagcagcaacagcaacagcggcagccacagcagcagccctgctggccctgtgtccttccccccaccaccctacctggcccggagcattgaccccctgcccaggcctcccagccctgcccagaacccccaggacccccccctggtgcccctgaccctggccctgcccccagccccacccagcagctgccaccagaacaccagcggcagcttcagaagacctgagagcccccggccccgggtgtccttccccaagaccccagaggtgggccctggccccccacctggccccctgagcaaggccccccagcctgtgcccccaggagtgggggagctgcctgcccggggcccccggctgtttgacttcccccccacccccctggaggaccagtttgaggagcctgctgagttcaagatcctgcctgatggcctggccaacatcatgaagatgctggatgagagcatcaggaaggaggaggagcagcagcagcatgaagctggggtggccccccagccccccctgaaggagccctttgccagcctgcagagccccttccccacagacacagcccccaccaccacagccccagctgtggccgtgaccaccaccaccaccaccaccaccaccaccacagccacccaggaggaggagaagaagcccccaccagccctgcccccacctccacccctggccaagtttcctccacccagccagccccagcccccacctcctcctccacccagccctgccagcctgctgaagagcctggcctctgtgctggagggccagaagtactgctaccggggcactggagctgctgtgtccaccaggcctggccccctgcccaccacccagtacagccctggccccccatctggggccacagccctgccccccaccagcgctgcccccagcgcccagggcagcccccagcccagcgccagcagcagcagccagttcagcaccagcggcggcccctgggcccgggagcggcgggccggggaggagcctgtgcccggccccatgacccccacccagcccccaccacccctgagcctgcccccagcccggtctgagagcgaggtgctggaggagatcagccgggcctgtgagaccctggtggagcgggtgggccgcagcgccacagatcctgctgaccctgtggacacagctgagcctgctgacagcggcacagagcggctgctgcccccagcccaggccaaggaggaggccggcggcgtggccgctgtgtctggcagctgcaagaggcggcagaaggagcaccagaaggagcaccggcggcacagaagagcctgcaaggacagcgtgggccggcggccccgggagggccgggccaaggccaaggccaaggtgcccaaggagaagagcagaagagtgctgggcaacctggacctgcagagcgaggagatccagggccgggagaagagcaggccagacctgggcggggccagcaaggccaagccacccacagccccagccccacccagcgccccagcccccagcgcccagcccaccccacccagcgcctctgtgcctgggaagaaggcccgggaggaggcccctggccccccaggagtgtccagagctgacatgctgaagctgcggagcctgtctgagggcccccccaaggagctgaagatccgcctcatcaaggtggagagcggggacaaggagaccttcatcgccagcgaggtggaggagcggcggctgaggatggctgacctgaccatcagccactgtgccgcagatgtggtgcgggccagcagaaatgccaaggtgaagggcaagttccgggagagctacctgagccctgcccagagcgtgaagcccaagatcaacacagaggagaagctgccccgggagaagctgaacccccccacccccagcatctacctggagagcaagagagatgccttcagccctgtgctgctgcagttctgcacagaccccaggaaccccatcaccgtcatccggggcctggccggcagcctgcggctgaacctgggcctcttcagcaccaagaccctggtggaggccagcggggagcacacagtggaggtgaggacccaggtgcagcagcccagtgatgagaactgggacctgaccggcacccggcagatctggccctgtgagagcagccgcagccacaccaccatcgccaagtatgcccagtaccaggccagcagcttccaggagagcctgcaggaggagaaggagagtgaagatgaggagagcgaggagccagacagcaccaccggcaccccacccagcagcgccccagaccccaagaaccaccacatcatcaagtttggcaccaacatcgacctgagtgatgccaagcgctggaagccccagctgcaggagctgctgaagctgcctgccttcatgagggtgaccagcactggaaacatgctgagccacgtgggccacaccatcctgggcatgaacacagtgcagctgtacatgaaggtgcccggcagcaggaccccaggccaccaggagaacaacaacttctgcagcgtgaacatcaacatcggccctggggactgtgagtggtttgctgtgcatgagcactactgggagaccatcagcgccttctgtgacagacatggagtggactacctgaccggctcctggtggcccatcctggatgacctgtatgccagcaacatccctgtgtacagatttgtgcagaggcctggggacctggtgtggatcaatgccggcaccgtgcactgggtgcaggccaccggctggtgcaacaacatcgcctggaatgtgggccccctgacagcctaccagtaccagctggccctggagagatatgagtggaatgaggtgaagaatgtgaagagcatcgtgcccatgatccacgtgtcctggaatgtggccaggacagtgaagatcagtgaccctgacctcttcaagatgatcaagttctgcctgctgcagagcatgaagcactgccaggtgcagcgggagagcctggtgcgggccggcaagaagatcgcctaccagggccgggtgaaggatgagcccgcctactactgcaatgaatgtgatgtggaggtgttcaacatcctgtttgtgaccagtgaaaatggcagcaggaacacctacctggtgcactgtgagggctgtgcccggcggcgctctgctggcctgcagggcgtggtggtgctggagcagtacagaacagaggagctggcccaggcctatgatgccttcaccctggccccagccagcaccagcaggtag

SEQ ID NO: 274227 - DNA, 5321 bp, Artificial Sequence
  derived and/or modified sequence
aggttccccccagggcaacatgccagccccgtagcactgcccaccccacccactgtggtctgttgtaccccactgctggggtggtggttccaatgagacagggcacaccaaactccatctggctgttactgaggcggagacacgggtgatgattggctttctggggagagaggaagtcctgtgattggccagatctctggagcttgccgacgcggtgtgaggacgctcccacggaggccggaattggctgtgaaaggactgaggcagccatctgggggtagcgggcactcttatcagagcggctggagccggaccatcgtcccagagagctggggcagggggccgtgcccaatctccagggctcctggggccactgctgacctggctggatgcatcgggcagtggaccctccaggggcccgcgctgcacgggaagcctttgcccttgggggcctgagctgtgctggggcctggagctcctgcccgcctcatccccctcctcgtagcgcatggctgcctggaggcagatgctcagccagcattgggcagcccccgcttcctgctcccctacccccttcacatggcagtagttctgggcaccccagcaaaccatattatgctccaggggcgcccactccaagacccctccatgggaagctggaatccctgcatggctgtgtgcaggcattgctccgggagccagcccagccagggctttgggaacagcttgggcaactgtacgagtcagagcacgatagtgaggaggccacacgctgctaccacagcgcccttcgatacggaggaagcttcgctgagctggggccccgcattggccgactgcagcaggcccagctctggaactttcatactggctcctgccagcaccgagccaaggtcctgcccccactggagcaagtgtggaacttgctacaccttgagcacaaacggaactatggagccaagcggggaggtcccccggtgaagcgagctgctgaacccccagtggtgcagcctgtgcctcctgcagcactctcaggcccctcaggggaggagggcctcagccctggaggcaagcgaaggagaggctgcaactctgaacagactggccttcccccagggctgccactgcctccaccaccattaccaccaccaccaccaccaccaccaccaccaccaccacccctgcctggcctggctaccagccccccatttcagctaaccaagccagggctgtggagtaccctgcatggagatgcctggggcccagagcgcaagggttcagcacccccagagcgccaggagcagcggcactcgctgcctcacccatatccatacccagctccagcgtacaccgcgcacccccctggccaccggctggtcccggctgctcccccaggcccaggcccccgccccccaggagcagagagccatggctgcctgcctgccacccgtccccccggaagtgaccttagagagagcagagttcagaggtcgcggatggactccagcgtttcaccagcagcaaccaccgcctgcgtgccttacgccccttcccggccccctggcctccccggcaccaccaccagcagcagcagtagcagcagcagcaacactggtctccggggcgtggagccgaacccaggcattcccggcgctgaccattaccaaactcccgcgctggaggtctctcaccatggccgcctggggccctcggcacacagcagtcggaaaccgttcttgggggctcccgctgccactccccacctatccctgccacctggaccttcctcaccccctccacccccctgtccccgcctcttacgccccccaccaccccctgcctggttgaagggtccggcctgccgggcagcccgagaggatggagagatcttagaagagctcttctttgggactgagggacccccccgccctgccccaccacccctcccccatcgcgagggcttcttggggcctccggcctcccgcttttctgtgggcactcaggattctcacacccctcccactcccccaaccccaaccaccagcagtagcaacagcaacagtggcagccacagcagcagccctgctgggcctgtgtcctttcccccaccaccctatctggccagaagtatagacccccttccccggcctcccagcccagcacagaacccccaggacccacctcttgtacccctgactcttgccctgcctccagcccctccttcctcctgccaccaaaatacctcaggaagcttcaggcgcccggagagcccccggcccagggtctccttcccaaagacccccgaggtggggccggggccacccccaggccccctgagtaaagccccccagcctgtgccgcccggggttggggagctgcctgcccgaggccctcgactctttgattttccccccactccgctggaggaccagtttgaggagccagccgaattcaagatcctacctgatgggctggccaacatcatgaagatgctggacgaatccattcgcaaggaagaggaacagcaacaacacgaagcaggcgtggccccccaacccccgctgaaggagccctttgcatctctgcagtctcctttccccaccgacacagcccccaccactactgctcctgctgtcgccgtcaccaccaccaccaccaccaccaccaccaccacggccacccaggaagaggagaagaagccaccaccagccctaccaccaccaccgcctctagccaagttccctccaccctctcagccacagccaccaccacccccaccccccagcccggccagcctgctcaaatccttggcctccgtgctggagggacaaaagtactgttatcgggggactggagcagctgtttccacccggcctgggcccttgcccaccactcagtattcccctggccccccatcaggtgctaccgccctgccgcccacctcagcggcccctagcgcccagggctccccacagccctctgcttcctcgtcatctcagttctctacctcaggcgggccctgggcccgggagcgcagggcgggcgaagagccagtcccgggccccatgacccccacccaaccgcccccacccctatctctgccccctgctcgctctgagtctgaggtgctagaagagatcagccgggcttgcgagacccttgtggagcgggtgggccggagtgccactgacccagccgacccagtggacacagcagagccagcggacagtgggactgagcgactgctgccccccgcacaggccaaggaggaggctggcggggtggcggcagtgtcaggcagctgtaagcggcgacagaaggagcatcagaaggagcatcggcggcacaggcgggcctgtaaggacagtgtgggtcgtcggccccgtgagggcagggcaaaggccaaggccaaggtccccaaagaaaagagccgccgggtgctggggaacctggacctgcagagcgaggagatccagggtcgtgagaagtcccggcccgatcttggcggggcctccaaggccaagccacccacagctccagcccctccatcagctcctgcaccttctgcccagcccacacccccgtcagcctctgtccctggaaagaaggctcgggaggaagccccagggccaccgggtgtcagccgggccgacatgctgaagctgcgctcacttagtgaggggccccccaaggagctgaagatccggctcatcaaggtagagagtggtgacaaggagacctttatcgcctctgaggtggaagagcggcggctgcgcatggcagacctcaccatcagccactgtgctgctgacgtcgtgcgcgccagcaggaatgccaaggtgaaagggaagtttcgagagtcctacctttcccctgcccagtctgtgaaaccgaagatcaacactgaggagaagctgccccgggaaaaactcaacccccctacacccagcatctatctggagagcaaacgggatgccttctcacctgtcctgctgcagttctgtacagaccctcgaaatcccatcacagtgatccggggcctggcgggctccctgcggctcaacttgggcctcttctccaccaagaccctggtggaagcgagtggcgaacacaccgtggaagttcgcacccaggtgcagcagccctcagatgagaactgggatctgacaggcactcggcagatctggccttgtgagagctcccgttcccacaccaccattgccaagtacgcacagtaccaggcctcatccttccaggagtctctgcaggaggagaaggagagtgaggatgaggagtcagaggagccagacagcaccactggaacccctcctagcagcgcaccagacccgaagaaccatcacatcatcaagtttggcaccaacatcgacttgtctgatgctaagcggtggaagccccagctgcaggagctgctgaagctgcccgccttcatgcgggtaacatccacgggcaacatgctgagccacgtgggccacaccatcctgggcatgaacacggtgcagctgtacatgaaggtgcccggcagccgaacgccaggccaccaggagaataacaacttctgctccgtcaacatcaacattggcccaggcgactgcgagtggttcgcggtgcacgagcactactgggagaccatcagcgctttctgtgatcggcacggcgtggactacttgacgggttcctggtggccaatcctggatgatctctatgcatccaatattcctgtgtaccgcttcgtgcagcgacccggagacctcgtgtggattaatgcggggactgtgcactgggtgcaggccaccggctggtgcaacaacattgcctggaacgtggggcccctcaccgcctatcagtaccagctggccctggaacgatacgagtggaatgaggtgaagaacgtcaaatccatcgtgcccatgattcacgtgtcatggaacgtggctcgcacggtcaaaatcagcgaccccgacttgttcaagatgatcaagttctgcctgctgcagtccatgaagcactgccaggtgcaacgcgagagcctggtgcgggcagggaagaaaatcgcttaccagggccgtgtcaaggacgagccagcctactactgcaacgagtgcgatgtggaggtgtttaacatcctgttcgtgacaagtgagaatggcagccgcaacacgtacctggtacactgcgagggctgtgcccggcgccgcagcgcaggcctgcagggcgtggtggtgctggagcagtaccgcactgaggagctggctcaggcctacgacgccttcacgctggccccagccagcacgtcgcgatga

SEQ ID NO: 274228 - DNA, 4932 bp, Artificial Sequence
  derived and/or modified sequence
atgcaccgggccgtggacccccccggcgcccgggccgcccgggaggctttcgctcttggtggcttgtcatgtgcgggcgcatggagcagttgtccacctcacccaccgccacgaagcgcgtggctgcctggtggccgctgcagtgccagtattgggcagcctccgcttccagcccccctgccaccctcccacggctcgagctctgggcaccctagtaagccttattacgcacccggagctcctacacctcgccccctccacggaaaactggagagcctccatggttgcgtccaggcgctgcttcgagagcctgcccagccaggcttgtgggaacagctcggtcaactctacgagagcgaacatgatagtgaggaggcgactcgatgctaccacagcgctctgcgctatgggggctctttcgcagagttagggccccgaattggaagattgcagcaggcccagctttggaatttccatactggcagctgccagcaccgggcaaaggttctccctcccctggagcaggtgtggaatctactacatctcgaacacaagaggaactacggagcaaaaagaggggggccgcccgttaaacgggccgctgaaccgcctgtggttcagcccgtcccacctgccgccctgagcggcccttcgggcgaggagggcttatccccaggaggcaagcgccgccggggctgcaacagcgagcagaccggtttgccccccggtcttcctctcccacctccccctctgccgccacctcctccaccacccccccctccgccccccccattgcccgggctggctacctctccacccttccagcttacaaaacctggcctctggagcacgttacacggcgatgcatggggcccggagagaaagggcagtgcacctcctgagcgccaagaacagcggcatagtttgcctcatccgtacccctatcctgctcctgcatacacagctcacccgccaggccaccggcttgtgccagcagccccacctgggccgggtcctagacctcctggtgcagagagtcatggctgcctacctgcgacccgcccccccggaagcgatctgcgggagtcacgagtgcaaaggtccaggatggattctagtgtcagtccagcggccacaactgcctgcgtcccctatgcgccctcacgcccgcctgggctgccgggaaccaccacttcaagctcttcaagctctagtagtaacactggattgcggggcgtcgaacccaatcccggcataccaggcgccgatcattaccagactcccgctctcgaggtgtcccatcacggccgactagggccttccgcccactctagcaggaagcccttcctcggtgccccagccgcaaccccccacctcagcctcccacccgggccatcctccccaccgccccccccatgtccccggcttttgcggcctccgccacccccggcctggctgaaggggcccgcgtgccgggccgcccgcgaggacggcgagatccttgaggaactcttttttgggaccgagggaccaccccggcccgctccaccccccttgccccatagagaaggctttctgggccctcctgcctcgagattctccgtcgggacacaagattcccatacccccccaacccctcccacaccgaccacaagttccagcaactccaactcagggagccactcgtcctcacctgcgggccctgtgtccttccctcctccgccctatctggccaggtcaatcgaccccttacccaggcctccatctcccgcacaaaacccccaagatccacccttggtgcccttgaccctcgccctcccaccagcacccccgagcagctgtcatcagaacacctccggaagttttcgcagacccgagtccccaaggccccgagtgtcatttcccaagactccagaggtgggcccaggcccaccacccggtccgctctcaaaagcaccccagcccgtaccccctggggtgggcgagctgcctgcaagaggacctcggctctttgatttccctccgactccccttgaggaccaatttgaagaaccagcggagtttaagatcttaccagatgggctggcaaacatcatgaagatgctggatgaaagtattcggaaggaagaggagcagcaacagcatgaagctggcgtcgccccccagcctcccttaaaggagccattcgcttctctgcaatccccattccccaccgataccgcccccactacgacggccccggccgtagctgttactacaaccactacgaccaccacaactaccaccgccacccaggaagaagagaagaaacctccgcccgccctgccccccccccccccacttgccaagttccctccaccctcacagccacagccgccaccgcctccgccaccatccccagcaagcctattgaaaagtctggcgtctgtcctcgaaggtcagaaatattgctatcgcgggactggagccgcggtcagtactcgacctggacccttaccaacgactcagtactcacctgggccgccttcaggggccacagcactgcctcccacgtccgctgccccctctgcccagggttcaccacagccaagcgcaagcagcagctcccagttttctacctcaggagggccttgggctagggaacgcagagccggcgaggagccagtgccagggcccatgaccccaacacagcccccacccccactgtcactgcctcctgcccggtccgagtccgaagtgctggaagagatttcccgtgcttgcgagacgctcgtggagcgcgtggggcgcagcgctaccgatcccgcggatcctgtggatacagccgaacctgctgacagcggcaccgaacggctgttgccaccagcacaagccaaggaggaggccgggggtgttgctgctgtgtcaggttcctgtaaaagacggcagaaagagcatcagaaggagcatagacgtcaccgcagagcgtgcaaggactcagtcggccgccgtcctcgggaaggtagggccaaagctaaagcgaaagtgcctaaggaaaagagtcgcagggtgcttggaaatctggacttgcagtccgaagaaatccagggacgagagaaatccaggcccgacctcgggggtgcatctaaggctaagccccctaccgcacccgcccccccatccgcgccggctccaagcgcacagcccacacccccgtcagccagtgtacccggcaaaaaggcccgagaggaggcccccggtccacccggtgtgagtcgcgccgatatgctcaagctgagatctctctcagaggggccacccaaggagttgaaaatccggctgattaaggtcgagtctggggacaaggagacatttatcgcgagcgaggtggaggagcgaagactgcgaatggccgaccttacaatttcgcattgcgcggccgatgtggtacgcgcatcaagaaacgctaaagttaagggaaaattccgagaatcgtacctgagcccagctcagtcagttaaacctaagatcaacacagaggagaagttaccgagagagaagctgaacccacctacccctagcatttatctggagagcaagagggacgctttttccccggtcctccttcaattctgtaccgacccaagaaacccaatcacagttatacggggcctcgccggttccttgagactaaacctgggcctgtttagcactaaaacactggttgaggccagtggggagcacactgtggaggtcaggacccaagtgcaacagccctctgatgaaaattgggacctgaccggtacccggcagatctggccctgcgagtcctcaagatctcacacaacaatcgccaagtacgctcaataccaagcaagcagtttccaggagtccttgcaagaggagaaggagagtgaggacgaagaatctgaggagcccgattcgacaacggggactcctccctccagcgcccccgaccccaagaatcatcacatcataaaatttggaaccaacatcgacctgtctgacgccaagcggtggaaaccgcaactgcaggagttgctgaaactgccagcttttatgcgcgtgacaagcacaggcaacatgctctcccatgtgggtcacactatcctgggaatgaacacagtgcagttgtacatgaaggtcccggggtccaggacccctggacaccaggagaacaacaacttctgcagcgtgaacatcaatataggcccgggtgattgcgagtggttcgctgttcatgaacactactgggaaactatctctgccttttgtgacagacatggggtcgactatcttacaggaagttggtggcccatcctggacgacctttatgcttccaatattcccgtatatcggtttgtgcaacgacctggggatttggtgtggataaatgcggggaccgttcattgggtgcaggcaaccggctggtgtaacaatatcgcatggaacgtcgggcctctgactgcataccagtaccagcttgcactggagagatatgagtggaacgaagttaagaacgtgaagtccatagtaccaatgattcacgtgtcttggaatgtcgcccggaccgtgaagatttccgatcccgatctcttcaaaatgataaagttctgcttactgcagagcatgaagcattgccaggttcagcgggagagcctcgtcagagcaggcaaaaaaatcgcttatcaaggaagagtcaaggatgagccagcatattactgcaacgaatgcgatgtagaggtcttcaatattttgtttgtgacctctgaaaatggaagccggaatacttacttggtacattgcgaagggtgcgcaagacgaagatcagccgggttgcagggggttgtcgtgctggaacagtatagaactgaagaacttgcgcaggcctacgatgctttcaccctcgctcccgctagtacctcccggtag

SEQ ID NO: 274229 - DNA, 4932 bp, Artificial Sequence
  derived and/or modified sequence
atgcaccgcgcagtggacccccctggcgcacgagcggctcgagaagcctttgctctcggtggcctgtcctgcgccggagcatggtcttcatgccctcctcacccccctcccaggagtgcttggttaccaggaggcaggtgtagtgcctccatcggccagccccctcttccagcgcctctgcccccatcccacggaagctcatccggacaccccagcaagccatactatgcaccaggcgcacccacgccgcgacccctccatggcaagctcgagtccctccatggatgtgtgcaagcgctactcagggagccagcccaaccaggcctctgggaacagctgggtcagttgtatgagtctgaacatgactctgaggaagcaacgaggtgttatcacagcgccctacgatacggtggatctttcgccgagctgggcccaaggatcggtaggttacagcaggcccagctctggaactttcacaccggaagttgccagcatagggccaaggtgctgccaccactggaacaggtttggaatttactccaccttgagcataagcgaaattatggggctaaaagaggaggtcctcctgtgaagagagctgctgaacccccagtggtgcagcccgtgcccccagctgccttatcgggaccgtctggcgaggaaggcctttcccctggaggcaagcgtaggaggggttgcaattccgaacaaacaggcttaccaccgggtctgcctctcccaccgcctcctttgcccccaccacctccaccaccccctccacctccgcctcccctgccagggctcgcaacgtccccaccttttcaactgaccaaacctggtctttggagtaccctccacggtgatgcttgggggcctgagcgcaagggctcagctccaccagaacggcaggaacagagacattcactgccccacccctacccttatcctgcgccagcttatactgcgcacccccctgggcacagactagtgccagctgcgccacctggccctggacctcggccacccggagccgaaagccacggatgcctccctgcaacacgaccacccggaagtgatctgagagaatcgagagtgcagcgttcgcggatggactcgagtgtgtcccctgctgcgactactgcttgcgtcccatacgctcctagtaggcctcccggactgcctggcactaccacctcctcatcatcttcgtcctcttccaacacaggcctccgtggagtggagcctaaccccggaatccctggcgctgatcattaccagacccccgctctggaggtgagtcaccatggcaggctgggccctagcgcccatagctcaaggaagccattcttgggggcacccgctgctactccccacctgtcactcccacctgggccaagcagcccccctccaccaccatgccctcggctgcttaggcctccacccccaccagcatggctgaagggccctgcctgccgcgctgctcgtgaagatggggagatacttgaagaacttttcttcgggaccgaaggccctcctcggccagctccgccaccactgcctcatagggagggcttccttggacctccagcgtccagattctcggtcggtactcaagattcacatactcctcctactccaccaacacctactacatcttccagtaactctaattctggaagccactcctcatcacctgcgggacctgtcagctttccccctcctccctatttggcgcgatctatagatcctctcccacgcccacccagtccagcgcagaacccccaagaccccccattggtgcctttgaccctggcacttcctccggcaccacccagttcttgccatcagaatacttcaggctcattccgtagacctgaatcccctagacctcgagtgagtttcccgaaaacgccggaagtcggccctggccctccaccgggacccctgagtaaagctcctcaaccagtgccacctggcgttggcgagctgcctgcgagaggaccccgtctgttcgatttcccaccaaccccacttgaagatcagttcgaggaacccgctgagtttaaaattctccctgatgggctcgcaaatataatgaaaatgctggatgaatccatcaggaaggaagaggaacagcagcagcacgaagcaggtgtagctccgcagccacccctaaaagagccattcgcttctctgcagtcgccgtttcctactgatactgctcccacaacaaccgccccagccgtcgcagtgactacaacaacaacgacaacaaccacgacaactgctactcaagaggaggaaaagaagccgcctccagcgctgccaccgcctccccctttggccaagtttcctcccccaagccaacctcagcccccacctccccctcctccatctcctgctagtctgcttaagagcctggccagcgtactggaaggacagaaatactgttatcgtggaaccggggctgcagtttctactaggcccggacctctccctacgactcaatactctcctgggcctcctagtggggctaccgctctgccccctactagcgcagctccgtccgcccaggggtcacctcagccttccgcttctagcagctctcagttttccacatccgggggtccttgggccagggaacgaagggctggtgaggagcctgtgcccggacctatgacccctacgcaacccccaccaccgctgtcacttccacctgctcggagcgagagcgaggtgctggaggaaatttctcgtgcttgcgagactctggtcgaaagggtgggcagatcagccactgatccagcggaccctgtggacactgccgagcccgctgactctggaaccgagagactgctcccacccgctcaggccaaggaagaagctggaggggtagcagccgtgagcggatcctgcaaaagaaggcaaaaggagcaccagaaagagcaccgccgtcaccgcagagcgtgtaaggattccgtagggagaagaccccgtgagggacgggcaaaagccaaagccaaagtccctaaggaaaagtcccgacgggtcctcggcaatctcgatctgcagtctgaggaaattcaaggaagagaaaaatccaggcctgacttgggaggcgcttcaaaagctaagccacccacggcccctgctcccccaagcgctcctgccccaagtgctcagcctacaccacctagcgcgagcgttcctgggaagaaggccagagaagaggctcccggaccaccgggagtgagcagggcggatatgttgaaactgcggagcctgagtgaaggaccccctaaggagctaaagataagactgattaaagtggagtctggtgacaaagaaaccttcatcgcgtcggaggtggaggaaaggcggctaagaatggccgatctgactatcagtcactgcgcggctgatgtggtccgagcctcccggaacgcaaaggtgaagggcaagttccgcgaatcttacctgagtcccgctcagagcgtgaaaccaaaaatcaataccgaggaaaagcttccacgggagaaactaaaccccccaactccttccatctacctggaatcgaagagggatgctttctctcccgttctgctgcagttctgcacagaccccaggaatccaataactgtgattcgaggcctcgccggaagcctgcggctcaatctcggtctgttctcaacgaagacacttgtggaggcctcaggcgagcataccgtggaggtcaggacacaggtccagcagccctctgatgagaattgggacctgacaggtacccgccagatctggccctgcgaatcttcaagatcccacaccacaatcgcaaaatatgcacaatatcaggcaagcagctttcaggaatcattgcaggaagagaaagagtccgaggacgaagaatccgaggaaccagactccaccaccggaacaccgcctagctcggctccggaccccaagaaccaccatattattaagtttggcaccaacatcgacttgagcgatgctaagaggtggaagccgcagctgcaggaattacttaagctccctgcatttatgagggttacctctacaggaaatatgctcagtcacgtgggtcatactattctgggaatgaataccgtccagctgtacatgaaggtgcctggttcacgaacacctggtcaccaggagaataacaacttctgttcagttaatatcaatatcggacccggagactgtgagtggttcgctgttcacgaacactattgggagacaatttcagccttctgtgaccgccatggagttgattatctgacaggatcttggtggccaatcctggatgatctctacgcctccaatatccctgtctataggtttgttcagcgcccaggagaccttgtctggattaacgcaggtacagtgcattgggtacaggcaacagggtggtgcaataatatagcctggaatgtgggccctctcacggcatatcagtatcagcttgcgctcgagaggtatgagtggaacgaggttaaaaacgtaaagagtattgtccctatgatccacgtgtcatggaacgtggccaggacagttaagattagcgatcctgacctcttcaaaatgattaagttttgtctgctacagagtatgaagcactgccaagtccagagggagagcctggtcagggcagggaaaaaaatcgcctaccaggggcgagtgaaggatgaaccagcatactattgtaatgagtgcgacgtggaggtgtttaacatcctcttcgtaacctccgaaaatggttcgaggaatacctacctggttcactgtgaagggtgcgcccgacggagaagtgctggattacagggcgtcgtggttcttgagcagtatcgaaccgaggagcttgcccaggcatatgatgcgtttaccctggcccctgccagtacctcgcgttag

SEQ ID NO: 274230 - DNA, 4932 bp, Artificial Sequence
  derived and/or modified sequence
atgcacagagccgtggacccccccggcgccagagccgccagagaggccttcgccctgggcggcctgagctgcgccggcgcctggagcagctgccccccccaccccccccccagaagcgcctggctgcccggcggcagatgcagcgccagcatcggccagccccccctgcccgcccccctgccccccagccacggcagcagcagcggccaccccagcaagccctactacgcccccggcgcccccacccccagacccctgcacggcaagctggagagcctgcacggctgcgtgcaggccctgctgagagagcccgcccagcccggcctgtgggagcagctgggccagctgtacgagagcgagcacgacagcgaggaggccaccagatgctaccacagcgccctgagatacggcggcagcttcgccgagctgggccccagaatcggcagactgcagcaggcccagctgtggaacttccacaccggcagctgccagcacagagccaaggtgctgccccccctggagcaggtgtggaacctgctgcacctggagcacaagagaaactacggcgccaagagaggcggcccccccgtgaagagagccgccgagccccccgtggtgcagcccgtgccccccgccgccctgagcggccccagcggcgaggagggcctgagccccggcggcaagagaagaagaggctgcaacagcgagcagaccggcctgccccccggcctgcccctgccccccccccccctgcccccccccccccccccccccccccccccccccccccccctgcccggcctggccaccagcccccccttccagctgaccaagcccggcctgtggagcaccctgcacggcgacgcctggggccccgagagaaagggcagcgccccccccgagagacaggagcagagacacagcctgccccacccctacccctaccccgcccccgcctacaccgcccacccccccggccacagactggtgcccgccgccccccccggccccggccccagaccccccggcgccgagagccacggctgcctgcccgccaccagaccccccggcagcgacctgagagagagcagagtgcagagaagcagaatggacagcagcgtgagccccgccgccaccaccgcctgcgtgccctacgcccccagcagaccccccggcctgcccggcaccaccaccagcagcagcagcagcagcagcagcaacaccggcctgagaggcgtggagcccaaccccggcatccccggcgccgaccactaccagacccccgccctggaggtgagccaccacggcagactgggccccagcgcccacagcagcagaaagcccttcctgggcgcccccgccgccaccccccacctgagcctgccccccggccccagcagcccccccccccccccctgccccagactgctgagacccccccccccccccgcctggctgaagggccccgcctgcagagccgccagagaggacggcgagatcctggaggagctgttcttcggcaccgagggcccccccagacccgcccccccccccctgccccacagagagggcttcctgggcccccccgccagcagattcagcgtgggcacccaggacagccacaccccccccaccccccccacccccaccaccagcagcagcaacagcaacagcggcagccacagcagcagccccgccggccccgtgagcttccccccccccccctacctggccagaagcatcgaccccctgcccagaccccccagccccgcccagaacccccaggacccccccctggtgcccctgaccctggccctgccccccgccccccccagcagctgccaccagaacaccagcggcagcttcagaagacccgagagccccagacccagagtgagcttccccaagacccccgaggtgggccccggccccccccccggccccctgagcaaggccccccagcccgtgccccccggcgtgggcgagctgcccgccagaggccccagactgttcgacttcccccccacccccctggaggaccagttcgaggagcccgccgagttcaagatcctgcccgacggcctggccaacatcatgaagatgctggacgagagcatcagaaaggaggaggagcagcagcagcacgaggccggcgtggccccccagccccccctgaaggagcccttcgccagcctgcagagccccttccccaccgacaccgcccccaccaccaccgcccccgccgtggccgtgaccaccaccaccaccaccaccaccaccaccaccgccacccaggaggaggagaagaagcccccccccgccctgcccccccccccccccctggccaagttccccccccccagccagccccagcccccccccccccccccccccagccccgccagcctgctgaagagcctggccagcgtgctggagggccagaagtactgctacagaggcaccggcgccgccgtgagcaccagacccggccccctgcccaccacccagtacagccccggcccccccagcggcgccaccgccctgccccccaccagcgccgcccccagcgcccagggcagcccccagcccagcgccagcagcagcagccagttcagcaccagcggcggcccctgggccagagagagaagagccggcgaggagcccgtgcccggccccatgacccccacccagccccccccccccctgagcctgccccccgccagaagcgagagcgaggtgctggaggagatcagcagagcctgcgagaccctggtggagagagtgggcagaagcgccaccgaccccgccgaccccgtggacaccgccgagcccgccgacagcggcaccgagagactgctgccccccgcccaggccaaggaggaggccggcggcgtggccgccgtgagcggcagctgcaagagaagacagaaggagcaccagaaggagcacagaagacacagaagagcctgcaaggacagcgtgggcagaagacccagagagggcagagccaaggccaaggccaaggtgcccaaggagaagagcagaagagtgctgggcaacctggacctgcagagcgaggagatccagggcagagagaagagcagacccgacctgggcggcgccagcaaggccaagccccccaccgcccccgccccccccagcgcccccgcccccagcgcccagcccaccccccccagcgccagcgtgcccggcaagaaggccagagaggaggcccccggcccccccggcgtgagcagagccgacatgctgaagctgagaagcctgagcgagggcccccccaaggagctgaagatcagactgatcaaggtggagagcggcgacaaggagaccttcatcgccagcgaggtggaggagagaagactgagaatggccgacctgaccatcagccactgcgccgccgacgtggtgagagccagcagaaacgccaaggtgaagggcaagttcagagagagctacctgagccccgcccagagcgtgaagcccaagatcaacaccgaggagaagctgcccagagagaagctgaacccccccacccccagcatctacctggagagcaagagagacgccttcagccccgtgctgctgcagttctgcaccgaccccagaaaccccatcaccgtgatcagaggcctggccggcagcctgagactgaacctgggcctgttcagcaccaagaccctggtggaggccagcggcgagcacaccgtggaggtgagaacccaggtgcagcagcccagcgacgagaactgggacctgaccggcaccagacagatctggccctgcgagagcagcagaagccacaccaccatcgccaagtacgcccagtaccaggccagcagcttccaggagagcctgcaggaggagaaggagagcgaggacgaggagagcgaggagcccgacagcaccaccggcaccccccccagcagcgcccccgaccccaagaaccaccacatcatcaagttcggcaccaacatcgacctgagcgacgccaagagatggaagccccagctgcaggagctgctgaagctgcccgccttcatgagagtgaccagcaccggcaacatgctgagccacgtgggccacaccatcctgggcatgaacaccgtgcagctgtacatgaaggtgcccggcagcagaacccccggccaccaggagaacaacaacttctgcagcgtgaacatcaacatcggccccggcgactgcgagtggttcgccgtgcacgagcactactgggagaccatcagcgccttctgcgacagacacggcgtggactacctgaccggcagctggtggcccatcctggacgacctgtacgccagcaacatccccgtgtacagattcgtgcagagacccggcgacctggtgtggatcaacgccggcaccgtgcactgggtgcaggccaccggctggtgcaacaacatcgcctggaacgtgggccccctgaccgcctaccagtaccagctggccctggagagatacgagtggaacgaggtgaagaacgtgaagagcatcgtgcccatgatccacgtgagctggaacgtggccagaaccgtgaagatcagcgaccccgacctgttcaagatgatcaagttctgcctgctgcagagcatgaagcactgccaggtgcagagagagagcctggtgagagccggcaagaagatcgcctaccagggcagagtgaaggacgagcccgcctactactgcaacgagtgcgacgtggaggtgttcaacatcctgttcgtgaccagcgagaacggcagcagaaacacctacctggtgcactgcgagggctgcgccagaagaagaagcgccggcctgcagggcgtggtggtgctggagcagtacagaaccgaggagctggcccaggcctacgacgccttcaccctggcccccgccagcaccagcagatag

SEQ ID NO: 274231 - protein, 1148 aa, Artificial Sequence
  derived and/or modified sequence
MEATGVLPFVRGVDLSGNDFKGGYFPENVKAMTSLRWLKLNRTGLCYLPEELAALQKLEHLSVSHNNLTTLHGELSSLPSLRAIVARANSLKNSGVPDDIFKLDDLSVLDLSHNQLTECPRELENAKNMLVLNLSHNSIDTIPNQLFINLTDLLYLDLSENRLESLPPQMRRLVHLQTLVLNGNPLLHAQLRQLPAMTALQTLHLRSTQRTQSNLPTSLEGLSNLADVDLSCNDLTRVPECLYTLPSLRRLNLSSNQITELSLCIDQWVHVETLNLSRNQLTSLPSAICKLSKLKKLYLNSNKLDFDGLPSGIGKLTNLEEFMAANNNLELVPESLCRCPKLRKLVLNKNHLVTLPEAIHFLTEIEVLDVRENPNLVMPPKPADRAAEWYNIDFSLQNQLRLAGASPATVAAAAAAGSGPKDPMARKMRLRRRKDSAQDDQAKQVLKGMSDVAQEKNKKQEESADARAPSGKVRRWDQGLEKPRLDYSEFFTEDVGQLPGLTIWQIENFVPVLVEEAFHGKFYEADCYIVLKTFLDDSGSLNWEIYYWIGGEATLDKKACSAIHAVNLRNYLGAECRTVREEMGDESEEFLQVFDNDISYIEGGTASGFYTVEDTHYVTRMYRVYGKKNIKLEPVPLKGTSLDPRFVFLLDRGLDIYVWRGAQATLSSTTKARLFAEKINKNERKGKAEITLLVQGQELPEFWEALGGEPSEIKKNWDDVLTVDYTRNAEAVLQSPGLSGKVKRDAEKKDQMKADLTALFLPRQPPMSLAEAEQLMEEWNEDLDGMEGFVLEGKKFARLPEEEFGHFYTQDCYVFLCRYWVPVEYEEEEKKEDKEEKAEGKEGEEATAEAEEKQPEEDFQCIVYFWQGREASNMGWLTFTFSLQKKFESLFPGKLEVVRMTQQQENPKFLSHFKRKFIIHRGKRKAVQGAQQPSLYQIRTNGSALCTRCIQINTDSSLLNSEFCFILKVPFESEDNQGIVYAWVGRASDPDEAKLAEDILNTMFDTSYSKQVINEGEEPENFFWVGIGAQKPYDDDAEYMKHTRLFRCSNEKGYFAVTEKCSDFCQDDLADDDIMLLDNGQEVYMWVGTQTSQVEIKLSLKACQVYIQHMRSKEHERPRRLRLVRKGNEQHAFTRCFHAWSAFCKALA

SEQ ID NO: 274232 - protein, 1403 aa, Artificial Sequence
  derived and/or modified sequence
  misc_feature (1)..(1): Xaa can be any naturally occurring amino acid
XLLLESCEKEKQALLQNLKEVEDKASAYEDQLQGQAQQVETLQKEKLSATFEGSEQVHQLEEQLEAREASVRRLAEHVQSLCDERDLLRQRFQELTERVATSDEDVAELREKLRRREADNQSLEHSYQRVSSQLQSMHTLLREKEEELERIKEAHEKVLEKKEQDLNEALVKMVALGSSLEETEIKLQAKEEILRKFASESPKDMEEPRSTPEETERDGTLLPGQPVQATRAPLGLPHTRLEDEDEDLGAPPGEEYGDGSPSREDSMVPPKSVEVLDREGHQQGTAKLDQGAPGVKRQRIRFSTIQCQRYIHPEGSEKTWTSSTSSDTSQDRSPSEESMSSEPAPSVLPATGDSDTYLSIIHSLETKLYVTEEKLKDVTVRLESQQGQSREALLALHHQWAGTEAQLREQLRASLLQVGALASQLEQERQERARRVEGHVGELGDFQVKNSQALMCLENCREQLRSLPRASQEDEQDARAASLASVESALVSAIQALQHWPAPAHGGARAQLETGGTEENGKPASLQQCSQSELTEQEQVRLLSDQIALEASLISQIADSLKNTTSDVSRMLHEISWSGQPPMESAGAPVDTWARKVLVDGEFWSQVESLRKHLGTLGGEAVGASGDGQQSIPQGLAPILANATWVRAELSFATQSVRESFHRRLQSIQETLRGTQTALRQHKCLLREILGAYQTPDFERVMQQVLEALRLPAGHEDGVQLSWDLSPLGEVLGRDSDSSQEPFDVSDQSPGAFVAIQEELAQQLKEKASLLEEIAAALPSLPPVESLRDCQKLLQVSQSLSYNTCLGGLGQYSSLLVQDAIIQAQVCYASCRIRLEYEKELQLCKESWQTREPSCSEQAQAARALREEYEELLRKQKSEYLDVIAIVERENAELKAKAAQLDHQQQCLEDAESKHSMSMFTLRGRYEEEIRCVVEQLTRTESTLQAERSRVLSQLDASVRDRQDMERHHGEQIQTLEDRFQLKVRELQTIHEEELRTLQEHYSQSLRCLQDTLCLHQGPHPKALPAPAPNWQATQGEADSMTGLRERIQELEAQMDVMREELGHKDLEGDAATLREKYQRDLESLKATCERGFAAMEETHQKKIEDLQRQHQRELEKLREEKDRLLAEETAATISAIEAMKNAHREEMERELEKSQRSQISSVNSDVEALRRQYLEELQSVQRELEVLSEQYSQKCLENAHLAQALEAERQALRQCQRENQELNAHNQELNNRLAAEITRLRTLLTGDGGGEATGSPLAQGKDAYELEVLLRVKESEIQYLKQEISSLKDELQTALRDKKYASDKYKDIYTELSIAKAKADCDISRLKEQLKAATEALGEKSPDSATVSGYDIMKSKSNPDFLKKDRSCVTRQLRNIRSKSLKEGLTVQERLKLFESRDLKKD

SEQ ID NO: 274233 - DNA, 4212 bp, Artificial Sequence
  derived and/or modified sequence
tgactcctgctggaaagttgcgagaaggaaaaacaagcactactccaaaacctgaaagaggtggaggacaaggcatctgcatacgaggatcagttgcagggccaagcgcaacaggttgaaactctgcagaaagagaagctgtcagccacatttgaggggtctgaacaggtgcaccagctcgaagagcagctggaagccagagaggcctccgtgagacggttggcagagcacgttcagagtctatgcgatgagagggacctgcttcggcaacgatttcaggagctgaccgagagggtcgccaccagcgacgaagatgtggccgaattaagagagaaactaaggcgtcgcgaagcagataatcagagcctagaacattcctaccagagggtctctagccagctgcagtccatgcacaccctcctccgtgaaaaggaagaggaactggagcgcatcaaggaagcccatgagaaggtattagaaaagaaagagcaggacctgaatgaagctttggtgaaaatggtggcccttgggtccagcctcgaagagacggagatcaaactgcaggctaaggaggagatcctcagaaagttcgcaagtgagtcacccaaagacatggaagaacccagaagcacaccggaggagaccgagagggatggaactcttctgccaggtcaacccgttcaggctacgagagctcccctcggccttccccacacgcgattggaggatgaggacgaggacttgggtgccccacctggggaagagtacggtgatggaagtccttctcgtgaggattccatggtgcccccaaagtccgttgaagtattggatcgcgaagggcaccaacagggcaccgcaaaattggaccagggcgcccctggcgtgaaacgccagaggattaggtttagtacaatccagtgtcagcgttatatccatcccgaaggttcagagaaaacttggacatcgtcaacctcctcagacacaagccaggaccgctccccatctgaggagagcatgtcttctgagcctgccccctccgtgttaccagctaccggagactcagacacatatttatcaatcatccattcgctcgagacaaagctgtacgtgactgaagaaaagttaaaggacgtgacagtgcgactcgagtctcagcagggccagtcccgggaggctctgctagctctgcatcaccagtgggctggcaccgaagcccaactgagagagcagctgagagcgtccttgttgcaggttggtgctctggcaagccaactggagcaggagcgccaggagcgcgccaggagagttgaaggccacgtgggcgagctcggggactttcaggtgaaaaattcacaggcgctgatgtgcttggagaactgccgtgagcagttgcgttcactgccccgggcgtctcaggaagatgagcaggacgctcgtgccgcctctctggccagcgtcgaaagtgctctggtttctgccatccaggcattacagcactggcctgcccctgcccatggcggggcacgggcacagctggagaccggcgggaccgaggagaacgggaaaccagcctcattacaacagtgcagccagtctgagctgaccgaacaagaacaggtgaggttattgtcggaccagattgctctcgaggcttccctcatctcacagatcgcagattccctgaagaataccacatctgatgtaagcagaatgcttcacgagattagttggagcggccagccgcctatggaatccgccggggcccctgttgatacctgggctcgaaaagtactggtagacggcgaattttggtcacaagttgagagtttgcggaaacaccttggtacactcggtggagaggctgtaggcgcctctggcgatggacagcagagcatcccccagggcctggctcctatactggccaatgctacatgggtgcgcgccgagctgagctttgccacacaaagtgtgagggaatcattccatcggagactgcagtccatccaggaaaccctgagaggaacgcagaccgccctccggcagcacaagtgtctgctccgggaaatcctcggcgcttaccagacaccggacttcgagcgcgtgatgcagcaggtcttggaggctctgcgactgcccgcgggacatgaggacggtgtccagctgagctgggacctgagcccccttggagaggtgctaggcagggactccgattcatcccaggagccctttgatgtttcagaccagtctccaggagcttttgtggctatccaggaagaacttgcccagcagctgaaagaaaaggcttccctactggaggagatagctgcagctcttccttccctccctcctgtggaatccctgagagattgccagaaactcttacaggttagccagtccctctcttataatacttgcctgggcggattgggccagtattcatcccttttggtgcaggacgctattattcaggctcaggtgtgctacgctagttgccgcattagactggaatacgagaaagagcttcaactgtgcaaggagtcctggcagacccgtgagccatcgtgcagtgagcaggctcaggcagcccgtgcactgagagaggaatatgaagaattgctcaggaagcagaagtcagagtacttggacgttatcgctatagtggagagggagaacgccgagctgaaggccaaggcagcacagctggaccatcagcaacaatgtttggaggacgcagagtccaagcacagcatgtccatgttcacactgcgcgggcgctatgaggaggagatcagatgtgtggtggaacagttgaccagaacagaatcaaccctgcaagccgaacgatcccgcgtgctgagtcagttagacgctagcgtgcgcgacaggcaggatatggagcgccaccatggagaacagattcagaccctcgaagataggttccagttgaaagtgagagaactccagacgatacacgaagaagagctgaggacccttcaggaacactattctcaatcgctacggtgtcttcaggacactttatgcctgcatcaagggccccatccgaaggccctcccagcccccgccccaaattggcaagccacccagggggaggcagacagcatgaccggcttgcgtgagaggatccaggaattggaagcccagatggacgttatgcgggaggagctcggacataaggacttagaaggtgacgcagccacactcagagagaagtaccagcgagaccttgagagcctaaaagccacctgcgagcgtgggttcgccgccatggaagagacccaccagaagaagattgaagatctccaacggcagcatcagcgtgagcttgagaaactgagggaggaaaaagatagactgctggccgaggagaccgcagctaccatctcagccattgaagccatgaagaacgcacaccgagaggagatggagagagagctggaaaagtcacagagatctcagatttcctccgtgaactctgacgtggaggcactgcggaggcagtacctggaggaacttcagagcgtccagcgggaactggaagttctctccgaacaatacagtcagaagtgcctcgagaatgcgcatttggcacaggcattggaggccgagcgccaggccttgagacagtgccagcgagagaatcaggaacttaatgctcacaaccaggagctcaacaatcgcctggctgcggaaattacaaggctgagaacactgctcactggagatggcgggggagaagccaccgggtctcccctggcacagggtaaagacgcctacgagctcgaagtactcctgagggtgaaagagtctgagattcaatatctgaagcaggagatttctagcttaaaagatgagctgcagacggctttgcgcgacaaaaaatacgcttctgataagtacaaggatatctatacagagctgagcattgccaaagctaaagcagattgtgacatcagcaggctcaaagagcagctgaaggccgcaactgaagctctgggagaaaagagtcctgattccgctacagtgtcaggctatgacatcatgaagagcaaaagcaacccagacttcctgaaaaaagaccggtcttgcgtgacacggcagctgcgcaacatcaggtctaagtccctcaaagagggcctgactgtacaagagagactaaagttgtttgagagcagggacctgaaaaaggactag

SEQ ID NO: 274234 - DNA, 840 bp, Artificial Sequence
  derived and/or modified sequence
taacaagaagccgagctgggtgagcccgatccagagcaaaaacgttcgcgtgcccgggagcgtcgacgtgaggggcgttccaaaacgttcgattgggctgagttcagacccattcagcaggccctggctcaggagagggtcggcggggtgggtcctgccgacacacatgaacctctacggccagaagcagagcctggtgaactggaaagagaacgagccagaaggagggaggaacgacggaaacggttcggaatgcttgatgcaaccgacgggccaggaactgaggatgccgctttaaggatggaggttgatcgcagcccagggctgcccatgtccgatctgaagacccacaatgtccatgtggagatagaacaaaggtggcaccaggtcgagacaactccattgagagaagagaaacaggtgccgattgcgccagtgcatctatcctcagaggacgggggagataggttatccacccacgagcttactagtcttcttgagaaggaattggaacagtcccaaaaggaggcaagcgatctgctggaacagaatcgcctgttgcaggatcagctcagagtggccctaggtagggagcaatctgcacgcgagggttacgtgctccagaccgaggtggcagcttctccatcgggcgcttggcagcgcctgcacagggtgaatcaagatctgcagtccgagttggaagcgcagtgtcagcgacaggaacttattacacaccagatccagactctcaaacgatcctatggagaggctaaggataccattcgccaccatgaggcagagatacgaagtctgcaggcacgcctctccaatgcagcctag

SEQ ID NO: 274235 - DNA, 4212 bp, Artificial Sequence
  derived and/or modified sequence
tgactgctgctggagagctgtgagaaggagaagcaggccctgctgcagaacctgaaggaggtggaggacaaggccagcgcctatgaggaccagctgcagggccaggcccagcaggtggagaccctgcagaaggagaagctgagcgccacctttgagggcagcgagcaggtgcaccagctggaggagcagctggaggcccgggaggcctctgtgcggcggctggccgagcacgtgcagagcctgtgtgatgagcgggacctgctgcggcagcgcttccaggagctgacagagcgggtggccaccagtgatgaagatgtggccgagctgcgggagaagctgcggcggcgggaggccgacaaccagagcctggagcacagctaccagagggtgagcagccagctgcagagcatgcacaccctgctgcgggagaaggaggaggagctggagcgcatcaaggaggcccacgagaaggtgctggagaagaaggagcaggacctgaatgaggccctggtgaagatggtggccctgggcagcagcctggaggagacagagatcaagctgcaggccaaggaggagatcctgaggaagtttgccagcgagagccccaaggacatggaggagcccaggagcaccccagaggagacagaaagagatggcaccctgctgcccggccagcctgtgcaggccacccgggcccccctgggcctgccccacacccggctggaggatgaagatgaggacctgggcgcccctcctggagaggagtatggagatggcagccccagccgggaggacagcatggtgccccccaagtctgtggaggtgctggaccgggagggccaccagcagggcacagccaagctggaccagggcgcccctggggtgaagaggcagaggatccgcttcagcaccatccagtgccagcgctacatccaccctgagggcagcgagaagacctggaccagcagcaccagcagtgacaccagccaggacaggagccccagcgaggagagcatgagcagcgagcccgcccccagcgtgctgcctgccactggagacagcgacacctacctgagcatcatccacagcctggagaccaagctgtatgtgacagaggagaagctgaaggatgtgacagtgcggctggagagccagcagggccagagccgggaggccctgctggccctgcaccaccagtgggccggcacagaggcccagctgcgggagcagctgcgggccagcctgctgcaggtgggcgccctggccagccagctggagcaggagcggcaggagcgggcccggcgggtggagggccacgtgggggagctgggggacttccaggtgaagaacagccaggccctgatgtgcctggagaactgccgggagcagctgcggagcctgccccgggccagccaggaggatgagcaggatgcccgggccgccagcctggcctctgtggagagcgccctggtgtctgccatccaggccctgcagcactggccagccccagcccatggaggagcccgggcccagctggagaccggcggcacagaagaaaatggcaagccagccagcctgcagcagtgcagccagagcgagctgacagagcaggagcaggtgcggctgctgagtgaccagatcgccctggaggccagcctcatcagccagattgctgacagcctgaagaacaccaccagtgatgtgtccaggatgctgcacgagatctcctggagcggccagccccccatggagagcgctggggcccctgtggacacctgggccaggaaggtgctggtggatggagagttctggagccaggtggagagcctgaggaagcacctgggcaccctgggcggggaggccgtgggcgccagcggagatggccagcagagcatcccccagggcctggcccccatcctggccaatgccacctgggtgcgggcagagctgagctttgccacccagagcgtgcgggagagcttccaccggcggctgcagagcatccaggagaccctgcggggcacccagacagccctgcggcagcacaagtgcctgctgcgggagatcctgggcgcctaccagaccccagactttgagcgggtgatgcagcaggtgctggaggccctgcggctgcctgctggccatgaagatggagtgcagctgtcctgggacctgagccccctgggggaggtgctgggccgggacagcgacagcagccaggagccctttgatgtgtctgaccagagccctggggcctttgtggccatccaggaggagctggcccagcagctgaaggagaaggccagcctgctggaggagattgctgctgccctgcccagcctgccccctgtggagagcctgcgggactgccagaagctgctgcaggtgtcccagagcctgagctacaacacctgcctgggcggcctgggccagtacagcagcctgctggtgcaggatgccatcatccaggcccaggtgtgctacgccagctgccgcatccggctggagtatgagaaggagctgcagctgtgcaaggagagctggcagacccgggagcccagctgcagcgagcaggcccaggccgcccgggccctgcgggaggagtatgaggagctgctgaggaagcagaagtctgagtacctggatgtgattgccatcgtggagcgggagaatgctgagctgaaggccaaggccgcccagctggaccaccagcagcagtgcctggaggatgctgagagcaagcacagcatgtccatgttcaccctgcggggccgctatgaggaggagatccgctgtgtggtggagcagctgaccaggacagagagcaccctgcaggccgagaggagccgggtgctgagccagctggatgcctctgtgcgggaccggcaggacatggagcggcaccacggggagcagatccagaccctggaggaccgcttccagctgaaggtgcgggagctgcagaccatccacgaggaggagctgcggaccctgcaggagcactacagccagagcctgcgctgcctgcaggacaccctgtgcctgcaccagggcccccaccccaaggccctgcctgccccagcccccaactggcaggccacccagggcgaggccgacagcatgacaggcctgcgggagcgcatccaggagctggaggcccagatggatgtgatgagggaggagctgggccacaaggacctggagggagatgctgccaccctgcgggagaagtaccagagggacctggagagcctgaaggccacctgtgagcggggctttgctgccatggaggagacccaccagaagaagattgaggacctgcagaggcagcaccagcgggagctggagaagctgcgggaggagaaggaccggctgctggccgaggagacagctgccaccatcagcgccatcgaggccatgaagaatgcccaccgggaggagatggagcgggagctggagaagagccagaggagccagatcagctctgtgaacagtgatgtggaggccctgcggcggcagtacctggaggagctgcagagcgtgcagcgggagctggaggtgctgtctgagcagtacagccagaagtgcctggagaatgcccacctggcccaggccctggaggccgagcggcaggccctgcggcagtgccagcgggagaaccaggagctgaatgcccacaaccaggagctgaacaaccggctggccgctgagatcacccggctgcggaccctgctgactggagatggcggcggggaggccaccggcagccccctggcccagggcaaggatgcctatgagctggaggtgctgctgcgggtgaaggagagcgagatccagtacctgaagcaggagatcagcagcctgaaggatgagctgcagacagccctgcgggacaagaagtatgccagtgacaagtacaaggacatctacacagagctgagcatcgccaaggccaaggctgactgtgacatcagccggctgaaggagcagctgaaggccgccacagaggccctgggggagaagagcccagattctgccaccgtgtctggctatgacatcatgaagagcaagagcaacccagacttcctgaagaaggacaggagctgtgtgacccggcagctgaggaacatccgcagcaagagcctgaaggagggcctgactgtgcaggagcggctgaagctgtttgagagccgggacctgaagaaggactag

SEQ ID NO: 274236 - DNA, 840 bp, Artificial Sequence
  derived and/or modified sequence
tgacaggaggccgagctgggggagccagaccctgagcagaagaggagccgggcccgggagcggcggcgggagggccgcagcaagacctttgactgggccgagttccggcccatccagcaggccctggcccaggagcgggtgggcggcgtgggccctgctgacacccatgagcccctgcggcctgaggccgagcctggagagctggagcgggagcgggccaggagaagagaggagaggaggaagagatttggcatgctggatgccacagatggccctggaacagaagatgctgccctgaggatggaggtggacaggagccctggcctgcccatgtctgacctgaagacccacaacgtgcacgtggagattgagcagcgctggcaccaggtggagaccacccccctgcgggaggagaagcaggtgcccatcgcccctgtgcacctgagcagtgaagatggaggagaccggctgagcacccatgagctgaccagcctgctggagaaggagctggagcagagccagaaggaggccagtgacctgctggagcagaaccggctgctgcaggaccagctgcgggtggccctgggccgggagcagagcgcccgggagggctacgtgctgcagacagaggtggccgccagccccagcggggcctggcagaggctgcaccgggtgaaccaggacctgcagagcgagctggaggcccagtgccagaggcaggagctgatcacccaccagatccagaccctgaagaggagctatggagaggccaaggacaccatccgccaccacgaggccgagatccgcagcctgcaggcccggctgagcaatgctgcctag

SEQ ID NO: 274237 - DNA, 4876 bp, Artificial Sequence
  derived and/or modified sequence
gctgctgctggagagctgtgagaaggagaagcaggcattgctgcagaacctaaaggaagtggaagacaaggccagcgcctatgaggaccagctgcagggtcaggcacagcaggtggagaccctgcagaaggagaagctgagcgccactttcgagggcagtgagcaggtgcaccagctggaggagcagctggaggcacgagaggccagcgtgcgcaggctcgcagagcacgtgcagagcctctgtgacgagcgggacctcctcagacagcggttccaggagctgacagagcgcgtggccacgtccgacgaggatgtggctgagctccgggaaaagctgaggagaagagaggctgacaaccagagcctggagcactcctaccagagggtctccagccagctgcagagcatgcacactctgctgagagagaaggaggaagagctggagcgcattaaggaagcacatgagaaggttctggagaagaaggagcaggacctcaatgaggctttggttaaaatggttgccttggggagcagcttagaggaaacagaaattaagctccaggcaaaagaagagattttaaggaaatttgcaagtgaatctccaaaggacatggaagagccacggagtacccctgaagagacagaaagggatggcactttgctcccaggccaaccagtccaagccactagggcacctctaggcctcccacacacaaggctcgaggatgaggacgaggacctgggggctcctccgggggaagagtacggtgatggcagccccagtagggaagacagcatggtgcccccaaagtcagtggaagtgcttgacagggagggccatcagcagggcacagccaaactcgaccaaggggcacctggtgttaaaaggcaaagaatccggttctccacaatccagtgccaaagatacattcaccccgaagggtctgagaagacctggaccagcagcacatcttccgacaccagccaggaccggtcaccctcggaagaaagcatgtcctcagagcctgcacccagtgtactgcctgcaactggcgactctgacacgtacctctccatcatccactccctggagaccaagctctacgtcacagaggaaaagctcaaagacgtgaccgtgaggctggagagccagcagggtcagagccgtgaggcactgctcgcactgcaccaccagtgggcgggcaccgaggcccagctgcgtgagcagctccgcgccagcctgctccaggttggcgcactggcctcccagctggagcaggagaggcaggagagggccaggagggttgaagggcatgttggagagcttggggacttccaggtcaagaatagtcaggccctgatgtgcctggaaaattgccgagaacaactgagatctctgcctagggccagccaggaggatgagcaggacgcacgcgcagcctccctggccagtgtggagagtgcactcgtcagcgccatccaagccctgcagcactggccggccccagcccatggcggggcccgtgcacagctggagacaggtggcaccgaggagaatgggaagcctgcctccctgcagcagtgctcccagtctgagttgacagagcaggagcaggtgaggcttctttctgaccagattgctctggaggcctcgctgatcagccagatagcagattccctgaagaacacaacatcagatgtctcccgaatgctccatgagatttcttggtcaggacagccaccgatggaatctgctggggcccccgtagacacctgggccaggaaggtcctagtggatggtgagttctggagccaggttgagtctctgaggaagcacttggggacactgggaggagaggcagtcggtgcctcaggagacgggcagcaaagcatcccacagggcctggcccccatcctggccaatgccacatgggtcagggcagagctcagctttgccacacagtcagtgagggagtcgttccaccgcaggctacagagcatccaggagaccctgcggggcacccagacggccctgcggcagcacaaatgcctgctgagggaaatcctgggagcctaccaaaccccagactttgaaagagtgatgcagcaggtcttggaagccctcaggcttccagcgggccatgaagatggtgttcagctgtcctgggacctgagccccttaggagaagtcctgggccgagactcagacagctctcaggagcccttcgatgtgtctgaccagagccctggggcctttgttgctattcaggaggagcttgcccagcagctgaaggagaaggccagcctcttagaggagatagcggctgccttaccatctctgccacctgtggaatcgctgagagattgccagaagcttctccaggtgtcccagagtctctcgtataacacttgtttgggaggcctcggtcagtattcttcattgttggttcaggatgccattattcaggcccaggtttgctatgcgtcctgcagaatccggctagaatatgagaaggagctccagctctgcaaggagtcctggcaaacccgggagccctcctgctcagagcaggcacaggcagcccgggccctgagggaggagtatgaggagcttctccgcaagcagaagagcgagtacctggatgtgatcgccattgttgaaagggagaatgcagagctcaaggccaaggccgcccagctagaccatcagcagcagtgtctggaggatgcagagagcaagcacagcatgagcatgttcaccctgcggggcaggtatgaggaggagattcggtgtgtggtggagcagctgaccaggaccgagagcacactgcaggctgagcgcagccgggtcctgagccagctggatgcctcggtcagagacaggcaggacatggagaggcatcatggtgagcagatacagaccctggaggacaggttccagctcaaggtccgggagctgcagacgatccacgaggaggagctgaggaccctgcaggagcactactcgcagagcctgaggtgccttcaggacaccctctgcctccaccaggggccacaccccaaggccctgccagcccctgcccccaactggcaggccacccagggagaggctgactccatgacggggctgagggagcgcatccaggagctggaggcccagatggatgtcatgcgggaggagctgggacacaaggacctggagggcgacgcggccacactgcgtgagaagtaccagagggacttggagagccttaaggccacgtgcgagcgagggtttgcagcaatggaagaaacgcaccagaagaagattgaagatctccagaggcagcaccagcgggagctagagaaacttcgagaagagaaagaccgcctcctagccgaggagacagcggccaccatctcagccatcgaagccatgaagaacgcccaccgggaggaaatggagcgggagctggagaagagccagcggtcccagatcagcagcgtcaactcggatgttgaggccctgcggcgccagtacctggaggagctgcagtcggtgcagcgggaactggaggtcctctcggagcagtactcgcagaagtgcctggagaatgcccatctggcccaggcgctggaggccgagcggcaggccctgcggcagtgccagcgtgagaaccaggagctcaatgcccacaaccaggagctgaacaaccgcctggctgcagagatcacacggttgcggacgctgctgactggggacggcggtggggaggccactgggtcaccccttgcacagggcaaggatgcctatgaactagaggtcttattgcgggtaaaggaatcggaaatacagtacctgaaacaggagattagctccctcaaggatgagctgcagacggcactgcgggacaagaagtacgcaagtgacaagtacaaagacatctacacagagctcagcatcgcgaaggctaaggctgactgtgacatcagcaggttgaaggagcagctcaaggctgcaacggaagcactgggggagaagtcccctgacagtgccacggtgtccggatatgatataatgaaatctaaaagcaaccctgacttcttgaagaaagacagatcctgtgtcacccggcaactcagaaacatcaggtccaagagtctgaaggaaggcctgacggtgcaagaacggttgaagctctttgaatccagggacttgaagaaagactaggtgtgtcccatccaagttgagcacgcgccttccccagcttgcagcagcacaccccaagcgctgcttttcacctgtacctttgttttattattattattattattgctgttgttgtcatcgttaactgtgggcatggaatgcgtgaggctggcttctgggttgtccacaccactctctgctgtgttgacttcctgttgtcttcatcaaagcttttttccgtggtattctaaaattaggccagcagtgggggctgggagggcatctgtgttagtcctttcctggctgtgacccgccacactcactgtcagtattaaggcccagcagcctgttgataagctaccctgtctcaccatgtgctggtgtggaaacggggcccagccagcacgcctcaaggtagatggaatccccactggtcagagaaaaagctatgcggacactccagcttggcctgggtcacagcactgactcctcacccgctagtctggctgttaagaggagaaagtgcactgccttccagcccaggaggaggacagcattttgtatttgttccactgatgcagcttagaaccacacccctgagagtcgtggcaaacctttcacaacctggaaaatgttgaaagcaaccattcctatttttgtttgttttttattaaatcttgcacaaaa

SEQ ID NO: 274238 - DNA, 527 bp, Artificial Sequence
  derived and/or modified sequence
gcggccgcgctgagcccctagcccgccgggagcgccaggccggccaggcctgcgccgccgccgccgccgccgtcgccgccgcgccgaccatgtcggcagccaaggagaacccgtgcaggaaattccaggccaacatcttcaacaagagcaagtgtcagaactgcttcaagccccgcgagtcgcatctgctcaacgacgaggacctgacgcagcaaaacacccacccccttgaaatgaaacgtggagctcacatatatgatgcacgaatgttctcatgttgaaggacaggaagaggaatggcatcagctatgagaccaccctgacccccacccgctgccccatcctacacccgaggtggcccctgaagcatgacctccagggatcttcacagtttgaagagccgctgatatactctaatacttgcagtaatattttttaatagaatgcaatattggatgtacacaaaaggatacaagcagcatacatttacaatataaatctaaataataaaaatgaatgctcgtgaa

SEQ ID NO: 274239 - DNA, 4043 bp, Artificial Sequence
  derived and/or modified sequence
tccggttctccacaatccagtgccaaagatacattcaccccgaagggtctgagaagacctggaccagcagcacatcttccgacaccagccaggaccggtcaccctcggaagaaagcatgtcctcagagcctgcacccagtgtactgcctgcaactggcgactctgacacgtacctctccatcatccactccctggagaccaagctctacgtcacagaggaaaagctcaaagacgtgaccgtgaggctggagagccagcagggtcagagccgtgaggcactgctcgcactgcaccaccagtgggcgggcaccgaggcccagctgcgtgagcagctccgcgccagcctgctccaggttggcgcactggcctcccagctggagcaggagaggcaggagagggccaggagggttgaagggcatgttggagagcttggggacttccaggtcaagaatagtcaggccctgatgtgcctggaaaattgccgagaacaactgagatctctgcctagggccagccaggaggatgagcaggacgcacgcgcagcctccctggccagtgtggagagtgcactcgtcagcgccatccaagccctgcagcactggccggccccagcccatggcggggcccgtgcacagctggagacaggtggcaccgaggagaatgggaagcctgcctccctgcagcagtgctcccagtctgagttgacagagcaggagcaggtgaggcttctttctgaccagattgctctggaggcctcgctgatcagccagatagcagattccctgaagaacacaacatcagatgtctcccgaatgctccatgagatttcttggtcaggacagccaccgatggaatctgctggggcccccgtagacacctgggccaggaaggtcctagtggatggtgagttctggagccaggttgagtctctgaggaagcacttggggacactgggaggagaggcagtcggtgcctcaggagacgggcagcaaagcatcccacagggcctggcccccatcctggccaatgccacatgggtcagggcagagctcagctttgccacacagtcagtgagggagtcgttccaccgcaggctacagagcatccaggagaccctgcggggcacccagacggccctgcggcagcacaaatgcctgctgagggaaatcctgggagcctaccaaaccccagactttgaaagagtgatgcagcaggtcttggaagccctcaggcttccagcgggccatgaagatggtgttcagctgtcctgggacctgagccccttaggagaagtcctgggccgagactcagacagctctcaggagcccttcgatgtgtctgaccagagccctggggcctttgttgctattcaggaggagcttgcccagcagctgaaggagaaggccagcctcttagaggagatagcggctgccttaccatctctgccacctgtggaatcgctgagagattgccagaagcttctccaggtgtcccagagtctctcgtataacacttgtttgggaggcctcggtcagtattcttcattgttggttcaggatgccattattcaggcccaggtttgctatgcgtcctgcagaatccggctagaatatgagaaggagctccagctctgcaaggagtcctggcaaacccgggagccctcctgctcagagcaggcacaggcagcccgggccctgagggaggagtatgaggagcttctccgcaagcagaagagcgagtacctggatgtgatcgccattgttgaaagggagaatgcagagctcaaggccaaggccgcccagctagaccatcagcagcagtgtctggaggatgcagagagcaagcacagcatgagcatgttcaccctgcggggcaggtatgaggaggagattcggtgtgtggtggagcagctgaccaggaccgagagcacactgcaggctgagcgcagccgggtcctgagccagctggatgcctcggtcagagacaggcaggacatggagaggcatcatggtgagcagatacagaccctggaggacaggttccagctcaaggtccgggagctgcagacgatccacgaggaggagctgaggaccctgcaggagcactactcgcagagcctgaggtgccttcaggacaccctctgcctccaccaggggccacaccccaaggccctgccagcccctgcccccaactggcaggccacccagggagaggctgactccatgacggggctgagggagcgcatccaggagctggaggcccagatggatgtcatgcgggaggagctgggacacaaggacctggagggcgacgcggccacactgcgtgagaagtaccagagggacttggagagccttaaggccacgtgcgagcgagggtttgcagcaatggaagaaacgcaccagaagaagattgaagatctccagaggcagcaccagcgggagctagagaaacttcgagaagagaaagaccgcctcctagccgaggagacagcggccaccatctcagccatcgaagccatgaagaacgcccaccgggaggaaatggagcgggagctggagaagagccagcggtcccagatcagcagcgtcaactcggatgttgaggccctgcggcgccagtacctggaggagctgcagtcggtgcagcgggaactggaggtcctctcggagcagtactcgcagaagtgcctggagaatgcccatctggcccaggcgctggaggccgagcggcaggccctgcggcagtgccagcgtgagaaccaggagctcaatgcccacaaccaggagctgaacaaccgcctggctgcagagatcacacggttgcggacgctgctgactggggacggcggtggggaggccactgggtcaccccttgcacagggcaaggatgcctatgaactagaggtcttattgcgggtaaaggaatcggaaatacagtacctgaaacaggagattagctccctcaaggatgagctgcagacggcactgcgggacaagaagtacgcaagtgacaagtacaaagacatctacacagagctcagcatcgcgaaggctaaggctgactgtgacatcagcaggttgaaggagcagctcaaggctgcaacggaagcactgggggagaagtcccctgacagtgccacggtgtccggatatgatataatgaaatctaaaagcaaccctgacttcttgaagaaagacagatcctgtgtcacccggcaactcagaaacatcaggtccaagtccgtaattgagcaggtctcgtgggatacctgaaatgcacccgcttcccggcccatgcaggagagtctgaaggaaggcctgacggtgcaagaacggttgaagctctttgaatccagggacttgaagaaagactaggtgtgtcccatccaagttgagcacgcgccttccccagcttgcagcagcacaccccaagcgctgcttttcacctgtacctttgttttattattattattattattgctgttgttgtcatcgttaactgtgggcatggaatgcgtgaggctggcttctgggttgtccacaccactctctgctgtgttgacttcctgttgtcttcatcaaagcttttttccgtggtattctaaaattaggccagcagtgggggctgggagggcatctgtgttagtcctttcctggctgtgacccgccacactcactgtcagtattaaggcccagcagcctgttgataagctaccctgtctcaccatgtgctggtgtggaaacggggcccagccagcacgcctcaaggtagatggaatccccactggtcagagaaaaagctatgcggacactccagcttggcctgggtcacagcactgactcctcacccgctagtctggctgttaagaggagaaagtgcactgccttccagcccaggaggaggacagcattttgtatttgttccactgatgcagcttagaaccacacccctgagagtcgtggcaaacctttcacaacctggaaaatgttgaaagcaaccattcctatttttgtttgttttttattaaatcttgcacaaaa

SEQ ID NO: 274240 - DNA, 837 bp, Artificial Sequence
  derived and/or modified sequence
agcaagaggcagagctgggggagccggaccctgagcagaagaggagccgcgcacgggagcggaggcgagagggccgctccaagacctttgactgggctgagttccgtcccatccagcaggccctggctcaggagcgggtgggcggcgtggggcctgctgacacccacgagcccctgcgccctgaggcggagcctggggagctggagcgggagcgtgcacggaggcgggaggagcgccgcaagcgcttcgggatgctcgacgccacagacgggccaggcactgaggatgcagccctgcgcatggaggtggaccggagcccagggctgcctatgagcgacctcaaaacgcataacgtccacgtggagattgagcagcggtggcatcaggtggagaccacacctctccgggaagagaagcaggtgcccatcgcccccgtccacctgtcttctgaagatgggggtgaccggctctccacacacgagctgacctctctgctcgagaaggagctggagcagagccagaaggaggcctcagaccttctggagcagaaccggctcctgcaggaccagctgagggtggccctgggccgggagcagagcgcccgtgagggctacgtgctgcagactgaagtggccgcctccccatcgggtgcctggcagaggctccatagagtcaaccaagaccttcaaagtgagcttgaagcccagtgccagcgccaggagctgattacacaccagattcagaccctgaagcgtagctatggggaggccaaggacacgatccggcaccacgaggctgagatccggagccttcaggcacggctcagcaatgcggccg

SEQ ID NO: 274241 - DNA, 4212 bp, Artificial Sequence
  derived and/or modified sequence
tgactgctgctggagagctgcgagaaggagaagcaggccctgctgcagaacttgaaagaggtggaggacaaggcttcagcgtacgaggatcagctgcaggggcaggcgcagcaagtagaaacgctgcagaaggagaaactaagcgcaacttttgaggggtcagaacaggtccaccagcttgaggaacagctggaagcccgggaagccagcgtcagaagattggcggaacacgtacagagtctctgcgacgagcgggatctgctcagacagcgttttcaggagctcaccgaaagggtcgcgactagcgacgaggacgtggccgagctgcgcgagaaactcagacggagagaggctgacaatcagtcattagaacattcttaccagcgtgtgtcatcacagctgcaatccatgcacacattattacgagagaaggaggaagaacttgaacggatcaaagaagcccacgagaaagtccttgaaaagaaggaacaggatctcaacgaagccctcgtgaaaatggtggccctgggttcatcactcgaggagacagaaatcaaactgcaggcgaaagaagaaattctccggaaattcgcctcagagtctccaaaggacatggaagaacctcggtcaacccctgaagaaaccgaacgggatgggacactcttgccggggcaacctgtccaggccacacgcgccccactcggcctgcctcacacacggcttgaggacgaagacgaagaccttggggcccctcctggcgaggaatatggagatggaagcccaagccgcgaagactctatggtgcccccaaagagcgtagaagtacttgatcgggaagggcatcaacagggaacagctaaactggaccagggggcacccggcgtcaagcggcagagaatacggttcagtacgatccaatgtcagcggtatatccaccccgaaggaagtgaaaaaacctggacttctagtacttcttcagatacatcccaagaccggtcaccatctgaagaaagtatgtcgtcagagcctgcccctagcgtcttgcccgccaccggagactccgacacttacctcagcatcattcattcccttgaaaccaaactgtacgtgaccgaggagaaattgaaggacgtgaccgttagactggaatctcagcaggggcaaagcagggaagccctgctggcattacaccaccagtgggcagggaccgaagcccagctacgcgagcagcttcgggcctccctcctgcaggtaggcgcgctagcgtcgcagcttgaacaggaacggcaggaacgggcacgcagagttgaagggcatgtgggagaactcggagacttccaggtaaagaatagtcaggccctgatgtgtctggaaaattgccgagagcagttgcgctcactccccagggcatcccaggaggacgagcaggacgctagggccgccagcctggcctccgtggagtctgccctggtgtccgccatccaggctctgcagcactggcccgcacctgctcacggcggagccagggcccaactggaaaccgggggaaccgaggaaaacggtaaacccgccagcctccagcagtgttcccagtccgaacttactgaacaggagcaggttcgactcctgagcgatcagatcgccctcgaagcgtccctgatttcccaaatcgcagattctctcaagaacaccacaagcgacgtctcccgcatgcttcatgaaatttcttggagtggtcagcccccaatggagagcgctggggcaccagtcgacacttgggcaagaaaggtcttggtcgacggggagttctggagccaggtcgaaagcttgcggaagcacctggggacgctcggaggagaagcagtgggcgcctcgggcgatggacaacagagcataccacagggcttagcccccattctggccaatgctacctgggtcagagcggagctttctttcgctactcaatctgttcgcgagagcttccataggcgcctacagtcgatacaagaaacactgcgaggcacacagacagcgcttagacagcacaaatgtttactcagagagatcctgggcgcgtaccagacacctgatttcgagcgcgtgatgcaacaggtactggaagctttaagactcccagctggacacgaggacggagtgcaactctcttgggacctctccccactcggcgaagtcctcgggagggactcagattccagccaggaacctttcgacgtgtctgatcaaagccccggcgcctttgtcgctatccaggaggagctcgcccagcaattgaaggagaaagcaagcttactggaagagatcgcagccgccctgccatctttaccccctgttgagtctctccgagactgccagaaattgctgcaggtttcccagtccctctcttataacacctgcctgggtggactgggtcagtatagcagccttctggtgcaggatgctattattcaggcacaggtgtgttatgcatcctgccgcatcagattagaatacgaaaaggagttacagctgtgcaaggagagttggcaaacaagggaaccctcttgttccgaacaggcccaggcagcgagagccctacgggaagagtatgaggaattgctacgtaagcaaaagtccgagtatctggatgtaatcgcgatcgtcgaacgggaaaatgcagagttgaaggcaaaagctgcccagctggatcaccagcagcaatgcctcgaggatgctgagtctaaacattccatgagcatgtttactctgaggggtagatacgaagaggagatccgctgtgtagtggagcagctgaccagaaccgagagcactctgcaggctgaacgaagtcgagtactttcacaactagatgctagtgtgcgtgatcgccaggacatggaaaggcaccacggggagcagatccagacgttagaagatcgctttcaattgaaagtgagggaactgcaaacaatccacgaagaagaactgcggacgctacaggagcattatagccaaagcctccgctgtctacaggataccctctgcctacaccaggggcctcatccaaaggctttgcctgctccggcacccaactggcaagcaacccagggtgaagcggactcaatgacggggctcagggagaggattcaagaactcgaggctcagatggacgtgatgagagaggaactgggccacaaggatctcgagggagatgctgccacactgagagagaagtaccagagagacctggagagcctgaaagcaacatgtgagagagggttcgcagccatggaggagacacaccagaaaaaaattgaggatctgcagcgccagcatcaacgggagcttgaaaagctacgcgaggaaaaggaccgcctcctggccgaggaaactgccgctacaatttccgccatagaggcgatgaagaacgcccatagggaagagatggagcgggagctggagaagtcacagaggtctcagatttctagcgtgaattctgacgttgaagcattaaggaggcaatacctcgaagagcttcagtctgtgcagagagaactggaagtacttagcgaacagtactcgcagaagtgtctcgaaaacgctcatctagcacaggcactagaggctgagagacaggcccttagacagtgccagagagagaaccaggagctgaatgcccataatcaggagctgaacaacaggttggctgcggagatcacaaggttacgcacattgcttaccggcgacggaggtggcgaagcaactggctctcctctggcccagggcaaggatgcctatgagttggaggtcctcctgcgagtcaaggaatcagaaatacagtatctaaaacaagagatcagctctttgaaagacgagcttcagacagcactccgggataaaaagtatgcctccgataagtataaggatatttacactgaactgagcattgccaaggccaaggccgactgcgacattagcagattgaaggagcagctgaaagctgctactgaagccctcggggaaaaatctccagatagcgctactgtgtccggctacgacataatgaagagtaagtccaaccccgactttctaaagaaggatcgatcctgtgtcaccagacagctccggaatatcagatcgaaaagcctgaaggagggattgacagttcaagagaggctgaagctgtttgagagcagagatctcaagaaggactag

SEQ ID NO: 274242 - DNA, 840 bp, Artificial Sequence
  derived and/or modified sequence
tgacaggaggccgagctgggcgagcccgaccccgagcagaagcggtctcgagcgcgggagaggcggagggagggcagatctaagaccttcgattgggctgagtttcggccgatccaacaagccctcgcacaggagcgggtcggtggggtgggaccagctgacacacacgagcctctcagacccgaagcagagcccggcgagctggagcgcgaacgagcacggagacgcgaagaacggcgcaaaagattcggtatgctagatgcaactgacggacctggcactgaagatgcagcactgaggatggaagtggacaggagtcccgggttacccatgagcgacttgaaaacccataatgtgcacgtcgaaatcgaacaaaggtggcaccaagtggaaacgactcctctgagggaagagaagcaagtccccatcgctcctgtacacctctcttcagaagacggaggcgatcgactttctacccacgagctcacatccttgctggagaaagaattggagcagtcacagaaagaggctagcgaccttttggaacagaaccggcttctgcaggaccagttacgcgtggcgctgggcagagagcagagcgccagagaaggttatgtgcttcaaaccgaagtcgccgcgtctccgtctggggcttggcagcgcctgcatagagttaaccaagatctccagtctgagctggaagcccagtgtcagaggcaggagctgattacccaccagatccagactcttaagcgctcttacggcgaggctaaggatacaattcgacaccatgaagccgagatacgcagcttgcaggcccgcctcagcaacgccgcttag

SEQ ID NO: 274243 - DNA, 4212 bp, Artificial Sequence
  derived and/or modified sequence
tgactgctgctagaaagctgtgagaaggagaagcaggcacttctgcagaatctgaaggaggtcgaggacaaagcctccgcctacgaagatcaactccagggacaagcacaacaggtcgagaccctccagaaggagaagcttagcgcaacatttgagggtagtgaacaggtgcatcagctggaggagcagctggaggcccgagaggcttccgttcgccgtctggctgaacatgtgcaatccctatgtgatgagcgagatctcctgcgccagcggttccaggagctaaccgagagggtggccacctcagacgaggatgtggctgaactgcgcgaaaagcttcggcgacgcgaggctgataaccagagcctggagcatagctaccagagagttagcagtcagctccagtcaatgcatactctcctgcgagaaaaggaggaagagttggaacgaatcaaagaagcacacgagaaggtgctggaaaaaaaggagcaagacttgaacgaggcgctggtgaagatggtggcactcggaagcagcctggaagagactgagatcaaactccaggccaaggaagaaattctgcggaagttcgccagtgaatcacccaaagacatggaggagcctcggtcaaccccggaggagactgaaagggacggtactctacttcctggacagcctgtgcaggcgacaagggctcccctcgggttaccccacactcgattggaagacgaggatgaggacctcggggcacccccaggggaagaatatggcgatggctctccgtctcgtgaggattcaatggtgccccctaagtccgtagaggtgctggaccgggagggccaccagcaggggacagcgaagctggatcagggagctcctggagtcaagcgtcagcgcatcagatttagcacgatacagtgccagcggtatatccaccccgagggctcggagaagacctggacatcatcaacatccagtgatacttcccaggaccgctctccaagcgaggagagtatgtcgagtgagccagcgccttccgtgctgccagccaccggggattctgatacctatttgtccattatacattccctggagaccaagctgtatgttactgaagagaagctgaaagatgtgaccgtgagactagagagtcagcagggtcaatccagggaggccctgcttgccctacaccatcaatgggcgggaaccgaggcccaattgcgggaacagctgcgcgcaagcctgctccaggtgggggctttggccagccagctggagcaagagagacaagaacgggctcggagagttgaaggtcacgtcggggagctgggcgatttccaggtgaaaaactctcaggctctgatgtgtctcgagaattgcagagagcaactgcgctccttgcccagagcttctcaggaagacgagcaggatgctagggcagcctctctggcctccgtggagtctgcgctggtttctgctatacaggctcttcaacactggccagctccagcccatggcggagccagggcacagctagagacaggtggcactgaggaaaatggcaagcccgcatcgttgcagcagtgttcccagtctgaactcactgaacaagaacaggtgcgtctgctctctgaccaaattgcgcttgaagcatcattaatatctcagattgctgatagcctcaaaaacacaacttcagacgtgtctaggatgcttcacgagatctcttggtctggccaacctccaatggagtccgccggtgcacctgtggacacgtgggctcgaaaggtgctcgtcgatggtgaattttggagtcaggtggagtcccttagaaagcacctgggaacattaggaggagaggcggtaggggcaagcggggatggtcagcagagtatacctcaggggctggcccctattctggctaacgccacttgggttcgcgctgaactctcctttgctacgcaaagcgttagagagtcctttcaccgacggctgcagtccatccaggaaactctgcgcggaactcagaccgcgctacgacaacacaaatgtctgttgcgggaaattctgggggcttaccaaactcctgatttcgaacgggtcatgcagcaggtgctcgaagcgctgaggttgcccgctggccatgaagatggggttcagttgagctgggacctgtcaccgttaggagaagtactggggagagattctgactccagccaggaaccctttgacgtcagcgatcagagcccgggagcattcgtagctatccaagaagagctcgctcagcagctgaaggagaaggcttccctgctggaggaaattgccgcagctctgccctccttaccccctgtggagagtctccgcgactgtcagaaactgctccaggtatcccaatcgctgagctataacacctgtctggggggtctgggtcagtacagttctttgctcgtgcaggacgccattatccaggcccaggtatgttatgctagctgcagaatcaggttggagtatgagaaggagcttcagttgtgtaaggagagttggcagaccagggagccaagctgttcggaacaagcacaagccgctcgcgcacttcgagaggagtatgaggagctgctgagaaagcaaaagtcagaatacttggatgtcatcgctatcgtggaacgcgagaatgctgagcttaaggcaaaagctgcacagttagatcaccagcagcagtgcttagaggacgccgaatcgaagcacagtatgagcatgttcaccttgcgcggtaggtacgaagaagagatacgctgtgtggttgaacaacttacccgcaccgaaagtactctacaagcggagcggagccgggtgttatcacagttggacgccagcgtccgggatcggcaggatatggaacgtcaccacggggagcagatccagactctggaggaccgctttcaacttaaagttagagaactgcagactatccatgaggaggagctgagaacccttcaggagcattattcccagtctctccgatgtctccaggacactctgtgtctccaccagggtccccaccccaaagcgcttcccgctcctgctcccaattggcaggccacacagggtgaggcagactccatgaccggcctccgggaacgcattcaggaactggaggcccagatggacgtgatgagggaagagcttggacataaagacctcgagggcgacgcagcgactttacgggaaaaatatcagcgcgacttagaatcccttaaggccacctgcgaaagaggctttgcggcaatggaggagacgcatcagaagaagatcgaggatttgcaacgccaacatcagcgggaactcgaaaaactgcgggaggagaaggatcgactccttgccgaggagacagcagcaacaatctctgccatcgaagccatgaaaaacgcacatcgggaagaaatggaaagggagctggaaaagagtcagagatctcagatcagttccgttaatagcgatgtcgaggcattgcgccgacagtatcttgaagaactgcaatcagtccagagggagctggaagtgctgtccgagcagtatagccagaaatgtttggagaacgcccacctcgcccaggccctggaggcagagaggcaggcactgaggcagtgccaacgggaaaatcaggagcttaatgctcataatcaggaacttaataaccgcctggccgcagagattacgcggctgcgtacattattaaccggcgacggcggtggcgaagctaccggttccccactcgcccagggaaaggatgcgtacgagcttgaggtcctgcttcgagtcaaggaatctgagattcagtacctcaagcaagaaatatcttcgctaaaggacgaactgcagaccgctttgagagataaaaaatatgcctctgacaagtacaaggatatatacactgagctctccatagcgaaagccaaggccgattgtgatatcagcagactgaaagagcagctgaaggctgcaacggaagccttgggcgagaagtctccagactccgcgactgtaagcggctacgacattatgaagagtaagagcaaccccgatttcctaaaaaaggaccggtcatgtgttacaagacagctgagaaatatccgctccaagtcgcttaaagaaggactgacagttcaagaacgcctgaagttgtttgagagcagggacctaaaaaaggactag

SEQ ID NO: 274244 - DNA, 840 bp, Artificial Sequence
  derived and/or modified sequence
tgacaggaagccgagttaggcgagccggaccccgaacagaagcgctcgcgagcacgggagagaaggcgcgagggacgcagcaagacctttgactgggcggaatttagaccaatccagcaggcactcgcgcaggagcgagtaggcggagtgggcccagcagatacgcacgagccccttagacctgaagctgaacccggtgagttggaacgtgagcgggctcgaagacgcgaagaaaggcgtaagaggttcggaatgctggacgcaacagatggacccggaaccgaggatgccgctttaaggatggaagtcgatagaagcccgggactcccaatgtcagaccttaaaacacacaatgtgcacgtggaaatcgaacaacggtggcaccaagtggaaactacccccctgagagaagaaaaacaggtgcccatcgcccctgtgcacttgagtagtgaggatggcggtgatcgactctctacacacgagctgacgagtttgttagagaaggagctggagcagagccaaaaggaggccagcgacctgctggagcaaaatcgtctgctccaggaccagctgagggtcgccctgggacgggagcagtctgcccgagaaggctacgtgctccaaaccgaggtcgccgcatcaccctccggagcttggcaaaggctgcatagagttaatcaggacttgcagagcgaattggaggcccagtgtcagcgccaggagctcatcacccaccagatacagactttgaaacgctcctacggagaggctaaggacactattaggcaccatgaggctgagattagatctctgcaggccaggctgagcaacgccgcatag

SEQ ID NO: 274245 - DNA, 4212 bp, Artificial Sequence
  derived and/or modified sequence
tgactgctgctggagagctgcgagaaggagaagcaggccctgctgcagaacctgaaggaggtggaggacaaggccagcgcctacgaggaccagctgcagggccaggcccagcaggtggagaccctgcagaaggagaagctgagcgccaccttcgagggcagcgagcaggtgcaccagctggaggagcagctggaggccagagaggccagcgtgagaagactggccgagcacgtgcagagcctgtgcgacgagagagacctgctgagacagagattccaggagctgaccgagagagtggccaccagcgacgaggacgtggccgagctgagagagaagctgagaagaagagaggccgacaaccagagcctggagcacagctaccagagagtgagcagccagctgcagagcatgcacaccctgctgagagagaaggaggaggagctggagagaatcaaggaggcccacgagaaggtgctggagaagaaggagcaggacctgaacgaggccctggtgaagatggtggccctgggcagcagcctggaggagaccgagatcaagctgcaggccaaggaggagatcctgagaaagttcgccagcgagagccccaaggacatggaggagcccagaagcacccccgaggagaccgagagagacggcaccctgctgcccggccagcccgtgcaggccaccagagcccccctgggcctgccccacaccagactggaggacgaggacgaggacctgggcgccccccccggcgaggagtacggcgacggcagccccagcagagaggacagcatggtgccccccaagagcgtggaggtgctggacagagagggccaccagcagggcaccgccaagctggaccagggcgcccccggcgtgaagagacagagaatcagattcagcaccatccagtgccagagatacatccaccccgagggcagcgagaagacctggaccagcagcaccagcagcgacaccagccaggacagaagccccagcgaggagagcatgagcagcgagcccgcccccagcgtgctgcccgccaccggcgacagcgacacctacctgagcatcatccacagcctggagaccaagctgtacgtgaccgaggagaagctgaaggacgtgaccgtgagactggagagccagcagggccagagcagagaggccctgctggccctgcaccaccagtgggccggcaccgaggcccagctgagagagcagctgagagccagcctgctgcaggtgggcgccctggccagccagctggagcaggagagacaggagagagccagaagagtggagggccacgtgggcgagctgggcgacttccaggtgaagaacagccaggccctgatgtgcctggagaactgcagagagcagctgagaagcctgcccagagccagccaggaggacgagcaggacgccagagccgccagcctggccagcgtggagagcgccctggtgagcgccatccaggccctgcagcactggcccgcccccgcccacggcggcgccagagcccagctggagaccggcggcaccgaggagaacggcaagcccgccagcctgcagcagtgcagccagagcgagctgaccgagcaggagcaggtgagactgctgagcgaccagatcgccctggaggccagcctgatcagccagatcgccgacagcctgaagaacaccaccagcgacgtgagcagaatgctgcacgagatcagctggagcggccagccccccatggagagcgccggcgcccccgtggacacctgggccagaaaggtgctggtggacggcgagttctggagccaggtggagagcctgagaaagcacctgggcaccctgggcggcgaggccgtgggcgccagcggcgacggccagcagagcatcccccagggcctggcccccatcctggccaacgccacctgggtgagagccgagctgagcttcgccacccagagcgtgagagagagcttccacagaagactgcagagcatccaggagaccctgagaggcacccagaccgccctgagacagcacaagtgcctgctgagagagatcctgggcgcctaccagacccccgacttcgagagagtgatgcagcaggtgctggaggccctgagactgcccgccggccacgaggacggcgtgcagctgagctgggacctgagccccctgggcgaggtgctgggcagagacagcgacagcagccaggagcccttcgacgtgagcgaccagagccccggcgccttcgtggccatccaggaggagctggcccagcagctgaaggagaaggccagcctgctggaggagatcgccgccgccctgcccagcctgccccccgtggagagcctgagagactgccagaagctgctgcaggtgagccagagcctgagctacaacacctgcctgggcggcctgggccagtacagcagcctgctggtgcaggacgccatcatccaggcccaggtgtgctacgccagctgcagaatcagactggagtacgagaaggagctgcagctgtgcaaggagagctggcagaccagagagcccagctgcagcgagcaggcccaggccgccagagccctgagagaggagtacgaggagctgctgagaaagcagaagagcgagtacctggacgtgatcgccatcgtggagagagagaacgccgagctgaaggccaaggccgcccagctggaccaccagcagcagtgcctggaggacgccgagagcaagcacagcatgagcatgttcaccctgagaggcagatacgaggaggagatcagatgcgtggtggagcagctgaccagaaccgagagcaccctgcaggccgagagaagcagagtgctgagccagctggacgccagcgtgagagacagacaggacatggagagacaccacggcgagcagatccagaccctggaggacagattccagctgaaggtgagagagctgcagaccatccacgaggaggagctgagaaccctgcaggagcactacagccagagcctgagatgcctgcaggacaccctgtgcctgcaccagggcccccaccccaaggccctgcccgcccccgcccccaactggcaggccacccagggcgaggccgacagcatgaccggcctgagagagagaatccaggagctggaggcccagatggacgtgatgagagaggagctgggccacaaggacctggagggcgacgccgccaccctgagagagaagtaccagagagacctggagagcctgaaggccacctgcgagagaggcttcgccgccatggaggagacccaccagaagaagatcgaggacctgcagagacagcaccagagagagctggagaagctgagagaggagaaggacagactgctggccgaggagaccgccgccaccatcagcgccatcgaggccatgaagaacgcccacagagaggagatggagagagagctggagaagagccagagaagccagatcagcagcgtgaacagcgacgtggaggccctgagaagacagtacctggaggagctgcagagcgtgcagagagagctggaggtgctgagcgagcagtacagccagaagtgcctggagaacgcccacctggcccaggccctggaggccgagagacaggccctgagacagtgccagagagagaaccaggagctgaacgcccacaaccaggagctgaacaacagactggccgccgagatcaccagactgagaaccctgctgaccggcgacggcggcggcgaggccaccggcagccccctggcccagggcaaggacgcctacgagctggaggtgctgctgagagtgaaggagagcgagatccagtacctgaagcaggagatcagcagcctgaaggacgagctgcagaccgccctgagagacaagaagtacgccagcgacaagtacaaggacatctacaccgagctgagcatcgccaaggccaaggccgactgcgacatcagcagactgaaggagcagctgaaggccgccaccgaggccctgggcgagaagagccccgacagcgccaccgtgagcggctacgacatcatgaagagcaagagcaaccccgacttcctgaagaaggacagaagctgcgtgaccagacagctgagaaacatcagaagcaagagcctgaaggagggcctgaccgtgcaggagagactgaagctgttcgagagcagagacctgaagaaggactag

SEQ ID NO: 274246 - DNA, 840 bp, Artificial Sequence
  derived and/or modified sequence
tgacaggaggccgagctgggcgagcccgaccccgagcagaagagaagcagagccagagagagaagaagagagggcagaagcaagaccttcgactgggccgagttcagacccatccagcaggccctggcccaggagagagtgggcggcgtgggccccgccgacacccacgagcccctgagacccgaggccgagcccggcgagctggagagagagagagccagaagaagagaggagagaagaaagagattcggcatgctggacgccaccgacggccccggcaccgaggacgccgccctgagaatggaggtggacagaagccccggcctgcccatgagcgacctgaagacccacaacgtgcacgtggagatcgagcagagatggcaccaggtggagaccacccccctgagagaggagaagcaggtgcccatcgcccccgtgcacctgagcagcgaggacggcggcgacagactgagcacccacgagctgaccagcctgctggagaaggagctggagcagagccagaaggaggccagcgacctgctggagcagaacagactgctgcaggaccagctgagagtggccctgggcagagagcagagcgccagagagggctacgtgctgcagaccgaggtggccgccagccccagcggcgcctggcagagactgcacagagtgaaccaggacctgcagagcgagctggaggcccagtgccagagacaggagctgatcacccaccagatccagaccctgaagagaagctacggcgaggccaaggacaccatcagacaccacgaggccgagatcagaagcctgcaggccagactgagcaacgccgcctag

SEQ ID NO: 274247 - protein, 63 aa, Artificial Sequence
  derived and/or modified sequence
MSAAKENPCRKFQANIFNKSKCQNCFKPRESHLLNDEDLTQQNTHPLEMKRGAHIYDARMFSC

SEQ ID NO: 274248 - protein, 1000 aa, Artificial Sequence
  derived and/or modified sequence
MSAAKENPCRKFQANIFNKSKCQNCFKPRESHLLNDEDLTQAKPIYGGWLLLAPDGTDFDNPVHRSRKWQRRFFILYEHGLLRYALDEMPTTLPQGTINMNQCTDVVDGEGRTGQKFSLCILTPEKEHFIRAETKEIVSGWLEMLMVYPRTNKQNQKKKRKVEPPTPQEPGPAKVAVTSSSSSSSSSSSIPSAEKVPTTKSTLWQEEMRTKDQPDGSSLSPAQSPSQSQPPAASSLREPGLESKEEESAMSSDRMDCGRKVRVESGYFSLEKTKQDLKAEEQQLPPPLSPPSPSTPNHRRSQVIEKFEALDIEKAEHMETNAVGPSPSSDTRQGRSEKRAFPRKRPDLLNFKKGWLTKQYEDGQWKKHWFVLADQSLRYYRDSVAEEAADLDGEIDLSACYDVTEYPVQRNYGFQIHTKEGEFTLSAMTSGIRRNWIQTIMKHVHPTTAPDVTSSLPEEKNKSSCSFETCPRPTEKQEAELGEPDPEQKRSRARERRREGRSKTFDWAEFRPIQQALAQERVGGVGPADTHEPLRPEAEPGELERERARRREERRKRFGMLDATDGPGTEDAALRMEVDRSPGLPMSDLKTHNVHVEIEQRWHQVETTPLREEKQVPIAPVHLSSEDGGDRLSTHELTSLLEKELEQSQKEASDLLEQNRLLQDQLRVALGREQSAREGYVLQATCERGFAAMEETHQKKIEDLQRQHQRELEKLREEKDRLLAEETAATISAIEAMKNAHREEMERELEKSQRSQISSVNSDVEALRRQYLEELQSVQRELEVLSEQYSQKCLENAHLAQALEAERQALRQCQRENQELNAHNQELNNRLAAEITRLRTLLTGDGGGEATGSPLAQGKDAYELEVLLRVKESEIQYLKQEISSLKDELQTALRDKKYASDKYKDIYTELSIAKAKADCDISRLKEQLKAATEALGEKSPDSATVSGYDIMKSKSNPDFLKKDRSCVTRQLRNIRSKSLKEGLTVQERLKLFESRDLKKD

SEQ ID NO: 274249 - DNA, 192 bp, Artificial Sequence
  derived and/or modified sequence
atgtccgcagcaaaggaaaatccctgtcggaaatttcaggccaacatttttaacaaatccaaatgtcaaaattgctttaaaccgagagaaagccacctcctcaacgacgaagatttgacacagcagaatacgcacccattggaaatgaagagaggtgcccacatttatgacgcccgcatgttcagttgttag

SEQ ID NO: 274250 - DNA, 3003 bp, Artificial Sequence
  derived and/or modified sequence
atgtccgctgcgaaagagaatccgtgccgaaagtttcaggctaatatattcaataagtctaagtgtcagaattgttttaagccccgcgaaagccatttgctgaatgatgaagacctcacacaagctaaaccaatttatggcggatggctgctgctggcgcccgacggcacagattttgacaatccagtgcaccgttcgcggaagtggcagcgccgcttttttatcctgtacgagcacggactgttgcgctacgctttagatgagatgcccacaactttaccccaggggaccatcaacatgaaccagtgcacggatgtcgtggatggggaaggaaggaccggtcagaagttctcgctttgtatcctcacgcctgaaaaagagcattttatacgggctgagacgaaagagatcgtttctggctggctggaaatgcttatggtctatcccaggactaacaaacagaatcaaaaaaaaaaaagaaaggtggagccaccaactccacaggagccgggtccggctaaggtggcagtcaccagctcttctagctcgagttccagctcttcttctattcccagcgctgagaaggtgccaacgacgaaatccaccctgtggcaggaggagatgcgcaccaaggaccaacccgatggctcatcgctgtcacctgcccaatcaccttctcaatctcagccccctgctgcaagcagcctgagggaacccggattggaatctaaagaagaggagagcgctatgtcgagcgatagaatggattgtgggcgtaaagtaagggtagagtctggctatttctcccttgaaaagactaagcaggatctcaaggctgaagagcagcaacttccaccaccactcagtcctccttcgccttccacacccaatcaccggcgctcgcaggttatcgaaaaattcgaagcactggatattgagaaggctgaacacatggagactaacgctgtcggcccttctccttccagtgacaccaggcagggccggagcgaaaagagggctttccctagaaagcgccctgatcttctcaactttaagaaaggctggctcacgaaacaatatgaggatggacagtggaagaaacattggtttgtccttgctgatcagagcctgcggtactacagggattcagttgccgaggaggcagctgatctggatggcgagatcgatttgtcagcctgctatgatgtcaccgagtatcctgttcagcgcaattacgggtttcagatccatacgaaagagggcgaatttaccttgagcgctatgacatccgggatccgtagaaattggatacagacaatcatgaaacacgttcacccaactacagcccctgacgtcacatcatccctgccagaagaaaagaataagtcaagttgcagctttgaaacttgcccgagacccaccgagaagcaagaagccgagttaggggagcccgatcccgaacagaagagatctagagcccgcgaacgaagacgggaagggcgttccaaaacattcgactgggcagaattcaggcctattcagcaggctttagcacaggagagagttggtggagtcggacccgccgatacccacgagcccttgcgccctgaggcggagccgggtgaattggagagagagcgagccaggagacgcgaagagcggcgaaagagatttggaatgttggatgcaactgatggtcctggtaccgaggatgcagccctccggatggaagttgaccgatctccaggcctgcctatgagcgacctaaagacacataatgtgcacgtggaaatagaacagagatggcaccaggtggagactacaccactacgcgaagagaagcaggtgcccatcgcccctgtgcacctaagtagcgaggatggtggggaccgtctgtccactcacgagctgacatctctgctcgagaaagagttagaacagtcacagaaggaagcaagcgaccttttggagcagaatcgtcttctccaagaccagctgagagtggcgctgggaagagagcaatctgctcgcgaaggctatgttctccaggctacatgcgaacgtgggttcgccgcaatggaggagactcaccagaaaaagattgaagatctccagcgacagcaccaacgggagctggaaaagctccgcgaggagaaagatagattattggcggaggagacagccgccactataagcgctattgaggctatgaagaacgcccacagggaagagatggaaagagagttagaaaagagtcagagaagccagatcagctctgtcaatagcgacgtcgaagctttaaggagacagtatttggaggagctacaatccgtccagagagagctcgaagtactgagtgaacaatatagccagaaatgtttagagaatgctcatcttgcccaggctctcgaagctgagcggcaggcgctgcgccaatgccagcgggaaaatcaagagttgaacgcgcacaatcaggagctgaataacagactcgccgctgaaatcacgagattgaggaccctcctgaccggggacggtgggggcgaggccacaggctccccactggctcagggaaaggatgcctacgaactcgaagtcttattaagagtgaaagagtccgaaattcaatacctgaaacaggagatctcctcacttaaggacgagcttcagacagcactaagagacaaaaagtatgccagtgataagtataaagacatatataccgagctgagcattgcaaaggccaaagctgactgtgacatatcaagactaaaggagcaactgaaggcggccactgaggctctaggcgaaaaaagccccgattccgccacagtctcaggctatgacataatgaagtcaaagagcaacccggactttctgaaaaaagatcggtcatgcgtgacaagacagcttcggaatatcagatccaagagcctgaaggaggggctcaccgtgcaagagcgcttaaagctgttcgaatcccgggacctgaagaaggattag

SEQ ID NO: 274251 - DNA, 192 bp, Artificial Sequence
  derived and/or modified sequence
atgtctgctgccaaggagaacccctgcaggaagttccaggccaacatcttcaacaagagcaagtgccagaactgcttcaagccccgggagagccacctgctgaatgatgaggacctgacccagcagaacacccaccccctggagatgaagagaggagcccacatctatgatgccaggatgttcagctgctag

SEQ ID NO: 274252 - DNA, 3003 bp, Artificial Sequence
  derived and/or modified sequence
atgtctgctgccaaggagaacccctgcaggaagttccaggccaacatcttcaacaagagcaagtgccagaactgcttcaagccccgggagagccacctgctgaatgatgaggacctgacccaggccaagcccatctacggcggctggctgctgctggccccagatggaacagactttgacaaccctgtgcacaggagcaggaagtggcagaggcgcttcttcatcctgtatgaacatggcctgctgcgctatgccctggatgagatgcccaccaccctgccccagggcaccatcaacatgaaccagtgcacagatgtggtggatggagagggccgcacaggccagaagttcagcctgtgcatcctgaccccagagaaggagcacttcatccgggcagagaccaaggagatcgtgtctggctggctggagatgctgatggtgtaccccaggaccaacaagcagaaccagaagaagaagaggaaggtggagccccccaccccccaggagcccggccctgccaaggtggccgtgaccagcagcagcagcagcagcagcagcagcagcagcatccccagcgctgagaaggtgcccaccaccaagagcaccctgtggcaggaggagatgaggaccaaggaccagccagatggcagcagcctgagccctgcccagagccccagccagagccagcccccagctgccagcagcctgcgggagcccggcctggagagcaaggaggaggagagcgccatgagcagtgacaggatggactgtggcaggaaggtgcgggtggagagcggctacttcagcctggagaagaccaagcaggacctgaaggccgaggagcagcagctgcccccacccctgagcccccccagccccagcacccccaaccacagaagaagccaggtgattgagaagtttgaggccctggacatcgagaaggccgagcacatggagaccaatgctgtgggccccagccccagcagtgacacccggcagggccgctctgagaagagggccttccccaggaagaggccagacctgctgaacttcaagaagggctggctgaccaagcagtatgaagatggccagtggaagaagcactggtttgtgctggccgaccagagcctgcgctactacagagattctgtggccgaggaggccgctgacctggatggagaaattgacctgagcgcctgctatgatgtgacagagtaccctgtgcagaggaactacggcttccagatccacaccaaggagggggagttcaccctgagcgccatgaccagcggcatcagaagaaactggatccagaccatcatgaagcacgtgcaccccaccacagccccagatgtgaccagcagcctgcctgaggagaagaacaagagcagctgcagctttgagacctgcccccggcccacagagaagcaggaggccgagctgggggagccagaccctgagcagaagaggagccgggcccgggagaggagaagagagggccgcagcaagacctttgactgggccgagttccggcccatccagcaggccctggcccaggagcgggtgggcggcgtgggccctgctgacacccatgagcccctgcggcctgaggccgagcccggggagctggagcgggagcgggcccggcggcgggaggagaggaggaagcgcttcggcatgctggatgccacagatggccctggaacagaagatgctgccctgaggatggaggtggacaggagccctggcctgcccatgtctgacctgaagacccacaacgtgcacgtggagattgagcagcgctggcaccaggtggagaccacccccctgcgggaggagaagcaggtgcccatcgcccctgtgcacctgagcagtgaagatggaggagaccggctgagcacccatgagctgaccagcctgctggagaaggagctggagcagagccagaaggaggccagtgacctgctggagcagaaccggctgctgcaggaccagctgcgggtggccctgggccgggagcagagcgcccgggagggctacgtgctgcaggccacctgtgagcggggctttgctgccatggaggagacccaccagaagaagattgaggacctgcagaggcagcaccagcgggagctggagaagctgcgggaggagaaggaccggctgctggccgaggagacagctgccaccatcagcgccatcgaggccatgaagaatgcccaccgggaggagatggagcgggagctggagaagagccagaggagccagatcagctctgtgaacagtgatgtggaggccctgcggcggcagtacctggaggagctgcagagcgtgcagcgggagctggaggtgctgtctgagcagtacagccagaagtgcctggagaatgcccacctggcccaggccctggaggccgagcggcaggccctgcggcagtgccagcgggagaaccaggagctgaatgcccacaaccaggagctgaacaaccggctggccgctgagatcacccggctgcggaccctgctgactggagatggcggcggggaggccaccggcagccccctggcccagggcaaggatgcctatgagctggaggtgctgctgcgggtgaaggagagcgagatccagtacctgaagcaggagatcagcagcctgaaggatgagctgcagacagccctgcgggacaagaagtatgccagtgacaagtacaaggacatctacacagagctgagcatcgccaaggccaaggctgactgtgacatcagccggctgaaggagcagctgaaggccgccacagaggccctgggggagaagagcccagacagcgccaccgtgtctggctatgacatcatgaagagcaagagcaacccagacttcctgaagaaggacaggagctgtgtgacccggcagctgaggaacatccgcagcaagagcctgaaggagggcctgactgtgcaggagcggctgaagctgtttgagagccgggacctgaagaaggactag

SEQ ID NO: 274253 - DNA, 893 bp, Artificial Sequence
  derived and/or modified sequence
gccaggccggccaggcctgcgccgccgccgccgccgccgtcgccgccgcgccgaccatgtcggcagccaaggagaacccgtgcaggaaattccaggccaacatcttcaacaagagcaagtgtcagaactgcttcaagccccgcgagtcgcatctgctcaacgacgaggacctgacgcaggcaaaacccatttatggcggttggctgctcctggctccagatgggaccgactttgacaacccagtgcaccggtctcggaaatggcagcgacggttcttcatcctttacgagcacggcctcttgcgctacgccctggatgagatgatgtcttcccagtgactctccttggggcctggggaaaccacaagggagcttggattcattcacccattgctgccttgctgtgtgcctcagaggggctcagaggtggaaaataaatatgaaaaagcatccttgtcttctagaatctcgtcggctgctgggaagaccaaggggccagccatcgcagggagcataagcactgagacaggcacacgtgcctgcccggctatcgtagccaggctggcagccttgcaactccctggggaagaacaatctaggaacattctggggtgtggagcaggaagggagtgtcacatgcaaaaggcaggatcagccaaagcagaggggctgaagaagcagtgattcccccacctaatgtcagaagtaaaatcagttcatggtgaaaatttggggaaacaaaatcatgcagcaaaattgcctattaaaccccacacggaggtaaaaatcggttcatattgtggttatgtatctattctcttatgatgtgtatttatgtgcttatgtaagacctaaaaacaataatttttaaataaaccagttatttttaataag

SEQ ID NO: 274254 - DNA, 3244 bp, Artificial Sequence
  derived and/or modified sequence
ctgagcccctagcccgccgggagcgccaggccggccaggcctgcgccgccgccgccgccgccgtcgccgccgcgccgaccatgtcggcagccaaggagaacccgtgcaggaaattccaggccaacatcttcaacaagagcaagtgtcagaactgcttcaagccccgcgagtcgcatctgctcaacgacgaggacctgacgcaggcaaaacccatttatggcggttggctgctcctggctccagatgggaccgactttgacaacccagtgcaccggtctcggaaatggcagcgacggttcttcatcctttacgagcacggcctcttgcgctacgccctggatgagatgcccacgacccttcctcagggcaccatcaacatgaaccagtgcacagatgtggtggatggggagggccgcacgggccagaagttctccctgtgtattctgacgcctgagaaggagcatttcatccgggcggagaccaaggagatcgtcagtgggtggctggagatgctcatggtctatccccggaccaacaagcagaatcagaagaagaaacggaaagtggagccccccacaccacaggagcctgggcctgccaaggtggctgttaccagcagcagcagcagcagcagcagcagcagcagcatccccagtgctgagaaagtccccaccaccaagtccacactctggcaggaagaaatgaggaccaaggaccagccagatggcagcagcctgagtccagctcagagtcccagccagagccagcctcctgctgccagctccctgcgggaacctgggctagagagcaaagaagaggagagcgccatgagtagcgaccgcatggactgtggccgcaaagtccgggtggagagcggctacttctctctggagaagaccaaacaggacttgaaggctgaagaacagcagctgcccccgccgctctcccctcccagccccagcacccccaaccacaggaggtcccaggtgattgaaaagtttgaggccttggacattgagaaggcagagcacatggagaccaatgcagtggggccctcaccatccagcgacacacgccagggccgcagcgagaagagggcgttccctaggaagcggcccgacctgctgaatttcaagaaaggctggctgactaagcagtatgaggacggccagtggaagaaacactggtttgtcctcgccgatcaaagcctgagatactacagggattcagtggctgaggaggcagccgacttggatggagaaattgacttgtccgcatgttacgatgtcacagagtatccagttcagagaaactatggcttccagatacatacaaaggagggcgagtttaccctgtcggccatgacatctgggattcggcggaactggatccagaccatcatgaagcacgtgcacccgaccactgccccggatgtgaccagctcgttgccagaggaaaaaaacaagagcagctgctcttttgagacctgcccgaggcctactgagaagcaagaggcagagctgggggagccggaccctgagcagaagaggagccgcgcacgggagcggaggcgagagggccgctccaagacctttgactgggctgagttccgtcccatccagcaggccctggctcaggagcgggtgggcggcgtggggcctgctgacacccacgagcccctgcgccctgaggcggagcctggggagctggagcgggagcgtgcacggaggcgggaggagcgccgcaagcgcttcgggatgctcgacgccacagacgggccaggcactgaggatgcagccctgcgcatggaggtggaccggagcccagggctgcctatgagcgacctcaaaacgcataacgtccacgtggagattgagcagcggtggcatcaggtggagaccacacctctccgggaagagaagcaggtgcccatcgcccccgtccacctgtcttctgaagatgggggtgaccggctctccacacacgagctgacctctctgctcgagaaggagctggagcagagccagaaggaggcctcagaccttctggagcagaaccggctcctgcaggaccagctgagggtggccctgggccgggagcagagcgcccgtgagggctacgtgctgcaggccacgtgcgagcgagggtttgcagcaatggaagaaacgcaccagaagaagattgaagatctccagaggcagcaccagcgggagctagagaaacttcgagaagagaaagaccgcctcctagccgaggagacagcggccaccatctcagccatcgaagccatgaagaacgcccaccgggaggaaatggagcgggagctggagaagagccagcggtcccagatcagcagcgtcaactcggatgttgaggccctgcggcgccagtacctggaggagctgcagtcggtgcagcgggaactggaggtcctctcggagcagtactcgcagaagtgcctggagaatgcccatctggcccaggcgctggaggccgagcggcaggccctgcggcagtgccagcgtgagaaccaggagctcaatgcccacaaccaggagctgaacaaccgcctggctgcagagatcacacggttgcggacgctgctgactggggacggcggtggggaggccactgggtcaccccttgcacagggcaaggatgcctatgaactagaggtcttattgcgggtaaaggaatcggaaatacagtacctgaaacaggagattagctccctcaaggatgagctgcagacggcactgcgggacaagaagtacgcaagtgacaagtacaaagacatctacacagagctcagcatcgcgaaggctaaggctgactgtgacatcagcaggttgaaggagcagctcaaggctgcaacggaagcactgggggagaagtcccctgacagtgccacggtgtccggatatgatataatgaaatctaaaagcaaccctgacttcttgaagaaagacagatcctgtgtcacccggcaactcagaaacatcaggtccaagagtctgaaggaaggcctgacggtgcaagaacggttgaagctctttgaatccagggacttgaagaaagactaggtgtgtcccatccaagttgagcacgcgccttccccagcttgcagcagcacaccccaagcgctgcttttcacctgtacctttgttttattattattattattattgctgttgttgtcatcgttaactgtgggcatggaatgcgtgaggctggcttctgggtt

SEQ ID NO: 274255 - DNA, 192 bp, Artificial Sequence
  derived and/or modified sequence
atgagcgccgccaaggagaacccctgccggaagttccaggccaacatcttcaataaatctaaatgccagaattgctttaaaccacgggagagccacctactgaacgatgaagatctcactcagcaaaacacccaccctcttgaaatgaaacgcggggctcacatttacgatgctcggatgttttcctgctag

SEQ ID NO: 274256 - DNA, 3003 bp, Artificial Sequence
  derived and/or modified sequence
atgagcgccgccaaggagaacccctgccggaagttccaggccaacatttttaataaatccaagtgtcagaattgcttcaaaccacgagaatcgcatctgctcaacgacgaggacctgacccaggccaaaccaatctatggaggatggctgctgttagccccagacggaacagactttgataatcctgtgcaccgcagtaggaaatggcaacggagattttttatcctctacgaacatgggctgcttagatacgcgctggatgaaatgcctactaccctaccacagggtaccatcaacatgaaccagtgcacagatgtggtcgatggtgagggtaggacaggacaaaagttctccttgtgtattttaaccccggaaaaagagcatttcattagagcggagactaaagaaattgtgtcggggtggctcgagatgctgatggtgtatccgcgtacaaataaacagaatcaaaaaaaaaaaagaaaagtggagccgcctacccctcaggaacccgggccagctaaagttgctgttaccagttcttcaagctcctcttcatcgagcagctccattccaagtgccgaaaaagtgcccactactaaaagcacactctggcaggaggaaatgcgaactaaggatcaacccgacggttcctcactctcccccgctcagtccccaagccagagccagccacctgcagcaagctctctgagggaaccggggctcgagagcaaggaggaagaatctgcgatgtcgtccgatcgtatggattgtgggcgcaaagtacgggtcgagagtggctacttctccctggagaagactaagcaggatcttaaagccgaagaacaacagctgccccctcccctgtcaccaccatccccgtcaacgcctaatcaccggcggtctcaggtgatcgaaaagttcgaggctttagatattgagaaggcggaacatatggaaacgaacgccgttggacccagcccgtcgagcgacaccaggcagggacgatctgaaaagcgggcatttccacggaaacgcccggacctgctcaattttaaaaagggttggctcaccaagcagtacgaagatggtcagtggaaaaagcactggttcgttctggctgaccagagccttcggtactaccgcgattccgtagccgaggaggcagctgatttggatggagaaatagatttgagcgcatgttatgacgttaccgagtatccagtgcagaggaattacggcttccagatacacaccaaagagggtgagtttactctttccgcaatgacgtctggcatccgccgaaattggattcagactatcatgaagcatgtgcacccgacaacagccccagacgtcacttcctccctaccggaggaaaaaaataagagttcgtgttccttcgagacttgcccccgacccactgagaagcaagaggccgagctgggcgaacccgatcctgaacaaaagagatcgagggctcgcgagaggcgtagggaaggacgctcgaagacctttgactgggcagaatttcgcccgatccagcaagcactcgcgcaggagagggtcggcggagttgggcctgcagatacccacgaacccctgcgccccgaggctgaacccggcgaacttgagcgcgagcgcgcccgtcggagagaggaacgacgcaagcggttcggtatgctagatgccaccgacggacctggcactgaagacgccgctcttaggatggaagtggaccggtcgcctgggcttcctatgagcgatttaaaaacacacaacgtccatgtggagatcgaacagcgctggcaccaggtcgagactactcccctgagagaggaaaaacaggtccctattgctcccgttcacttatccagcgaggatggaggggaccgcctgtccacccacgaactgaccagcctgttggagaaagaactggaacagagccagaaggaggcatcagatctcctggagcagaacagactcctccaagatcagctaagagtggctctgggtagggagcagtccgcccgcgagggctacgtgctgcaggccacatgtgagcgcggctttgcagcaatggaggaaacccatcagaaaaagattgaagacctgcagaggcagcaccagagggaactggagaaattgagagaagaaaaagatcggctgctggcagaggagactgcggccacgatttccgctattgaagctatgaagaacgcgcaccgcgaggaaatggaaagagaactggagaaaagccaacggagtcaaataagcagtgtgaattccgatgttgaagctcttagacgccaataccttgaggagctccaatcagttcagcgtgagctcgaggtcctgagtgagcaatattctcagaagtgcctggagaatgcccaccttgctcaggctctggaagcagaaaggcaggctctccgccagtgtcaacgagaaaaccaggagctgaatgcccataaccaggagcttaataaccgcttggccgctgaaatcactcggcttcgcacgctgcttacgggagacggaggcggtgaagccacaggaagcccactggcacagggcaaggacgcgtacgaacttgaggtcttgcttcgagtgaaggaaagtgaaatccaatatctaaagcaagagatctccagtctgaaagacgaactgcagacagcacttcgggataagaagtacgctagcgataaatataaagatatttacactgaactgtcaattgccaaggctaaagccgattgcgatattagtcggttgaaggagcagctgaaggcagccacagaggctctcggtgagaagagtcctgactccgcaacagtgtcaggctacgatattatgaaatcaaagagtaatcccgacttcttaaagaaagacagatcttgcgtgacgcggcagttgcgtaatatacggagtaagagcctcaaagagggcttgactgtccaagaacggctgaagttgttcgaaagtagagacttgaaaaaggactag

SEQ ID NO: 274257 - DNA, 192 bp, Artificial Sequence
  derived and/or modified sequence
atgtccgcggctaaggagaatccctgtcgcaaattccaggccaacatcttcaacaagagcaagtgtcagaactgctttaagccccgagagtctcatcttcttaacgacgaggacctgactcagcagaatacccacccactggagatgaaaaggggagcacatatttacgatgcaaggatgttcagctgctag

SEQ ID NO: 274258 - DNA, 3003 bp, Artificial Sequence
  derived and/or modified sequence
atgtcagcagcaaaagaaaacccatgccgcaaattccaggccaatattttcaataagtctaaatgtcagaattgcttcaagcccagagaatcacacttgttgaatgatgaggatcttactcaggctaaacctatttatggagggtggctgctcttagcacccgacggtaccgacttcgacaatcccgtacacaggtctaggaagtggcagcggaggtttttcattttgtatgagcacggactgctgcggtacgctctggacgagatgcctaccaccctgccacagggcacaataaacatgaatcagtgcacagatgtggtcgacggagaaggccgtacgggtcaaaaattctccttgtgcatcctgacccctgagaaggaacatttcattagagccgaaacaaaggaaatagtgtcaggatggctggaaatgctaatggtgtacccacgcaccaacaaacagaaccagaagaaaaaacggaaagtggaacctcctactccacaagagcctgggcctgcaaaagttgccgttacatcaagttctagtagctcgtccagcagcagtagcatcccaagcgctgaaaaagtgccgaccactaaatcgacactgtggcaggaggaaatgaggaccaaggatcagcccgatgggtcatctctcagcccagcacagtctccttctcagtcccaacccccagccgcatcttcgttgagagaaccaggcctcgaatctaaagaagaggagtccgcgatgtcatccgatagaatggactgtggtcgaaaagttcgcgtggagtccggatattttagcctggagaagaccaagcaggacctgaaggccgaagagcagcagcttccgccaccactctcacccccttcaccctccaccccgaatcatcgtaggagtcaggtgatcgaaaaattcgaggctctagacatagagaaggcagagcacatggaaactaatgctgtgggtcctagccccagctcagacacccgccagggacgttcagagaagagagcattccctcggaagcgacctgatctcctcaacttcaagaagggctggttaactaaacagtatgaagatggacagtggaaaaaacactggtttgtgttagcagaccagtctctgaggtactacagagactctgtagcggaggaagcagccgacctcgatggcgagatcgatctgtcagcctgttacgacgttacagaataccctgtgcaacggaactacggcttccagatccatactaaggagggcgagtttactcttagcgcgatgacctccggcattcgccgaaattggattcaaacaatcatgaagcatgttcatcccaccacagctcctgatgtgacctctagcctgccggaggagaaaaacaagtcatcttgcagctttgaaacttgtccaaggcctactgagaagcaggaagccgagctgggggagcccgatcccgagcagaaaaggtctcgcgctcgcgaacgaaggcgagaagggaggagtaaaacttttgattgggccgaattcagaccaatccaacaggctctagcacaagagagggtgggaggcgtgggtccagccgatacacatgagccactccgcccagaggcagagcccggagagttggaaagggagcgcgctcggcgaagagaggaaagacggaaacgctttggcatgctcgacgctacggacggcccagggaccgaagatgcggctctacggatggaagtagaccggtccccaggcctcccaatgtccgacctaaagacacataatgtgcatgtggaaatcgaacagcgctggcatcaagttgagacaactccccttcgcgaagaaaagcaggtacccatcgctcctgtccatctgtcaagtgaagacggcggagatcggcttagtacccatgaactcacttcactgctggaaaaagagctagagcagtcacagaaggaagcaagtgacctgctcgagcagaatcgcctgcttcaagatcagctcagagtggcactgggaagggagcaatctgctcgggagggttacgtgttgcaggcgacttgcgaaaggggtttcgccgctatggaggaaacacaccagaagaagatcgaagacttgcagagacagcatcagcgcgaactggaaaaactaagagaggagaaggatcgccttcttgccgaagagaccgccgcaacaatttccgctattgaggccatgaaaaacgcacaccgcgaggagatggagagggaacttgagaagtcccaaaggtctcagatctcatctgtgaacagcgacgtcgaggctctccggagacagtaccttgaagaactgcagtcggtgcagagggaactggaggtgctgtccgaacagtatagccagaaatgcttggagaacgctcacttggcgcaggccctggaggccgaacgccaggccctgcgtcaatgccagcgcgagaatcaggagcttaatgcgcataatcaggaacttaacaatcgcctggctgccgaaatcactcggctgcgcacactactgacgggcgatgggggtggggaagctacgggaagtcctctggcccagggaaaagacgcttacgagctcgaggtgctgttgagggtgaaagaaagcgaaatccagtacctcaagcaggagattagctcactgaaggatgaactccagaccgcactccgcgataagaagtacgcaagcgacaaatacaaagacatttacacagagctgtctatcgctaaagcgaaagccgattgtgacatttctagactcaaagagcagttaaaagctgccaccgaagcacttggggaaaagtcacctgactctgcaacagtaagcggctacgacatcatgaagtcgaaaagcaatcccgattttctgaagaaggacaggtcatgtgtaactagacaacttcgaaacatcaggtcaaagtcgctcaaggaaggccttacagtacaggaacggctgaaactgttcgaatcgcgggatttgaaaaaagattag

SEQ ID NO: 274259 - DNA, 192 bp, Artificial Sequence
  derived and/or modified sequence
atgagcgccgccaaggagaacccctgcagaaagttccaggccaacatcttcaacaagagcaagtgccagaactgcttcaagcccagagagagccacctgctgaacgacgaggacctgacccagcagaacacccaccccctggagatgaagagaggcgcccacatctacgacgccagaatgttcagctgctag

SEQ ID NO: 274260 - DNA, 3003 bp, Artificial Sequence
  derived and/or modified sequence
atgagcgccgccaaggagaacccctgcagaaagttccaggccaacatcttcaacaagagcaagtgccagaactgcttcaagcccagagagagccacctgctgaacgacgaggacctgacccaggccaagcccatctacggcggctggctgctgctggcccccgacggcaccgacttcgacaaccccgtgcacagaagcagaaagtggcagagaagattcttcatcctgtacgagcacggcctgctgagatacgccctggacgagatgcccaccaccctgccccagggcaccatcaacatgaaccagtgcaccgacgtggtggacggcgagggcagaaccggccagaagttcagcctgtgcatcctgacccccgagaaggagcacttcatcagagccgagaccaaggagatcgtgagcggctggctggagatgctgatggtgtaccccagaaccaacaagcagaaccagaagaagaagagaaaggtggagccccccaccccccaggagcccggccccgccaaggtggccgtgaccagcagcagcagcagcagcagcagcagcagcagcatccccagcgccgagaaggtgcccaccaccaagagcaccctgtggcaggaggagatgagaaccaaggaccagcccgacggcagcagcctgagccccgcccagagccccagccagagccagccccccgccgccagcagcctgagagagcccggcctggagagcaaggaggaggagagcgccatgagcagcgacagaatggactgcggcagaaaggtgagagtggagagcggctacttcagcctggagaagaccaagcaggacctgaaggccgaggagcagcagctgcccccccccctgagcccccccagccccagcacccccaaccacagaagaagccaggtgatcgagaagttcgaggccctggacatcgagaaggccgagcacatggagaccaacgccgtgggccccagccccagcagcgacaccagacagggcagaagcgagaagagagccttccccagaaagagacccgacctgctgaacttcaagaagggctggctgaccaagcagtacgaggacggccagtggaagaagcactggttcgtgctggccgaccagagcctgagatactacagagacagcgtggccgaggaggccgccgacctggacggcgagatcgacctgagcgcctgctacgacgtgaccgagtaccccgtgcagagaaactacggcttccagatccacaccaaggagggcgagttcaccctgagcgccatgaccagcggcatcagaagaaactggatccagaccatcatgaagcacgtgcaccccaccaccgcccccgacgtgaccagcagcctgcccgaggagaagaacaagagcagctgcagcttcgagacctgccccagacccaccgagaagcaggaggccgagctgggcgagcccgaccccgagcagaagagaagcagagccagagagagaagaagagagggcagaagcaagaccttcgactgggccgagttcagacccatccagcaggccctggcccaggagagagtgggcggcgtgggccccgccgacacccacgagcccctgagacccgaggccgagcccggcgagctggagagagagagagccagaagaagagaggagagaagaaagagattcggcatgctggacgccaccgacggccccggcaccgaggacgccgccctgagaatggaggtggacagaagccccggcctgcccatgagcgacctgaagacccacaacgtgcacgtggagatcgagcagagatggcaccaggtggagaccacccccctgagagaggagaagcaggtgcccatcgcccccgtgcacctgagcagcgaggacggcggcgacagactgagcacccacgagctgaccagcctgctggagaaggagctggagcagagccagaaggaggccagcgacctgctggagcagaacagactgctgcaggaccagctgagagtggccctgggcagagagcagagcgccagagagggctacgtgctgcaggccacctgcgagagaggcttcgccgccatggaggagacccaccagaagaagatcgaggacctgcagagacagcaccagagagagctggagaagctgagagaggagaaggacagactgctggccgaggagaccgccgccaccatcagcgccatcgaggccatgaagaacgcccacagagaggagatggagagagagctggagaagagccagagaagccagatcagcagcgtgaacagcgacgtggaggccctgagaagacagtacctggaggagctgcagagcgtgcagagagagctggaggtgctgagcgagcagtacagccagaagtgcctggagaacgcccacctggcccaggccctggaggccgagagacaggccctgagacagtgccagagagagaaccaggagctgaacgcccacaaccaggagctgaacaacagactggccgccgagatcaccagactgagaaccctgctgaccggcgacggcggcggcgaggccaccggcagccccctggcccagggcaaggacgcctacgagctggaggtgctgctgagagtgaaggagagcgagatccagtacctgaagcaggagatcagcagcctgaaggacgagctgcagaccgccctgagagacaagaagtacgccagcgacaagtacaaggacatctacaccgagctgagcatcgccaaggccaaggccgactgcgacatcagcagactgaaggagcagctgaaggccgccaccgaggccctgggcgagaagagccccgacagcgccaccgtgagcggctacgacatcatgaagagcaagagcaaccccgacttcctgaagaaggacagaagctgcgtgaccagacagctgagaaacatcagaagcaagagcctgaaggagggcctgaccgtgcaggagagactgaagctgttcgagagcagagacctgaagaaggactag

SEQ ID NO: 274261 - DNA, 1536 bp, Artificial Sequence
  derived and/or modified sequence
atggagaccttccccgccgtggccgagaaggtgctgaaggagttccaggtgctgctgcagcacagccccagccccatcggcagcaccagaatgctgcagctgatgaccatcaacatgttcgccgtgcacaacagccagctgaaggactgcttcagcgaggagtgcagaagcgtgatccaggagcaggccgccgccctgggcctggccatgttcagcctgctggtgagaagatgcacctgcctgctgaaggagagcgccaaggcccagctgagcagccccgaggaccaggacgaccaggacgacatcaaggtgagcagcttcgtgcccgacctgaaggagctgctgcccagcgtgaaggtgtggagcgactggatgctgggctaccccgacacctggaaccccccccccaccagcctggacctgcccagccacgtggccgtggacgtgtggagcaccctggccgacttctgcaacatcctgaccgccgtgaaccagagcgaggtgcccctgtacaaggaccccgacgacgacctgaccctgctgatcctggaggaggacagactgctgagcggcttcgtgcccctgctggccgccccccaggacccctgctacgtggagaagaccagcgacaaggtgatcgccgccgactgcaagagagtgaccgtgctgaagtacttcctggaggccctgtgcggccaggaggagcccctgctggccttcaagggcggcaagtacgtgagcgtggcccccgtgcccgacaccatgggcaaggagatgggcagccaggagggcaccagactggaggacgaggaggaggacgtggtgatcgaggacttcgaggaggacagcgaggccgagggcagcggcggcgaggacgacatcagagagctgagagccaagaagctggccctggccagaaagatcgccgagcagcagagaagacaggagaagatccaggccgtgctggaggaccacagccagatgagacagatggagctggagatcagacccctgttcctggtgcccgacaccaacggcttcatcgaccacctggccagcctggccagactgctggagagcagaaagtacatcctggtggtgcccctgatcgtgatcaacgagctggacggcctggccaagggccaggagaccgaccacagagccggcggctacgccagagtggtgcaggagaaggccagaaagagcatcgagttcctggagcagagattcgagagcagagacagctgcctgagagccctgaccagcagaggcaacgagctggagagcatcgccttcagaagcgaggacatcaccggccagctgggcaacaacgacgacctgatcctgagctgctgcctgcactactgcaaggacaaggccaaggacttcatgcccgccagcaaggaggagcccatcagactgctgagagaggtggtgctgctgaccgacgacagaaacctgagagtgaaggccctgaccagaaacgtgcccgtgagagacatccccgccttcctgacctgggcccaggtgggctag

SEQ ID NO: 274262 - DNA, 1536 bp, Artificial Sequence
  derived and/or modified sequence
atggagactttccctgccgtcgctgaaaaagtgctgaaggaatttcaggtgcttctacagcattccccctctcccatcggttctacacggatgctgcagctcatgaccataaacatgtttgccgtgcataatagtcaacttaaagactgtttctcagaagagtgccggagcgtgattcaggagcaagccgcggcgctcgggttggcaatgttttcgctcctcgtacgaagatgcacttgcctcctgaaggagtccgcgaaggcccagctgagttcccccgaagatcaggatgaccaggatgacataaaggtttcgtcatttgttcccgatctgaaagagctgctcccctccgtgaaggtatggtctgactggatgctcggttatcctgatacgtggaacccccctcctaccagtctggatctcccttcacacgtggccgtggacgtctggagcacacttgccgacttctgcaacattttgactgccgtaaaccagtctgaggtgccattgtacaaagatcctgacgatgatttgaccctgttgatcctggaagaggaccgcctgctcagcggcttcgtgcctctgctggccgctccacaggatccatgttatgtcgaaaaaacaagcgacaaggtgatcgccgcagattgtaaaagagtgacggtgttgaaatatttcttggaagctttgtgtgggcaagaagaaccactgctcgcgtttaagggcgggaaatatgtgagcgtggctccagtgcccgatacaatgggtaaggagatggggtcgcaggaggggacacgcctggaagatgaagaagaagacgtcgtcattgaggactttgaggaggacagcgaagccgaggggagcggcggtgaggacgatattcgcgaattgagagcgaagaaattggctcttgcccggaagatcgcggagcagcagcgccgtcaggaaaagatccaggcagtcctggaggatcactcacagatgaggcaaatggaactggaaatccggcccttgttcttagtcccggatacaaacggattcatcgaccatctggcaagtttagccaggctgcttgagagcaggaagtatattctggtcgtgccattaatcgtgatcaatgagttagatggcctagccaaggggcaggaaacagatcaccgggctgggggctatgcccgggttgtgcaagagaaggcccgaaaaagcatcgagttcctggaacagcgtttcgagagtagggattcatgcttacgggcactcacgtctagaggcaatgagctggagtctatagctttccgctctgaggacatcacaggccagctcggaaataatgatgacctcatcctaagttgttgcctgcactactgtaaggacaaggccaaggacttcatgccagccagcaaagaagaaccaatcagactactgcgcgaggtcgtgctgctgaccgatgaccgcaatctccgcgttaaagcactcactcgtaacgtcccagtgagggacatcccagcattcctgacatgggcccaggtgggctag

SEQ ID NO: 274263 - DNA, 1536 bp, Artificial Sequence
  derived and/or modified sequence
atggagaccttccctgctgtggccgagaaggtgctgaaggagttccaggtgctgctgcagcacagccccagccccatcggcagcaccaggatgctgcagctgatgaccatcaacatgtttgctgtgcacaacagccagctgaaggactgcttcagcgaggagtgccgcagcgtcatccaggagcaggccgccgccctgggcctggccatgttcagcctgctggtgcggcgctgcacctgcctgctgaaggagagcgccaaggcccagctgagcagccctgaggaccaggatgaccaggatgacatcaaggtgagcagctttgtgcctgacctgaaggagctgctgcccagcgtgaaggtgtggagcgactggatgctgggctacccagacacctggaaccccccacccaccagcctggacctgcccagccacgtggccgtggatgtgtggagcaccctggccgacttctgcaacatcctgacagctgtgaaccagagcgaggtgcccctgtacaaggaccctgatgatgacctgaccctgctgatcctggaggaggaccggctgctgagcggctttgtgcccctgctggccgccccccaggacccctgctacgtggagaagaccagtgacaaggtgattgctgctgactgcaagagggtgacagtgctgaagtacttcctggaggccctgtgtggccaggaggagcccctgctggccttcaagggcggcaagtatgtgtctgtggcccctgtgcctgacaccatgggcaaggagatgggcagccaggagggcacccggctggaggatgaggaggaggatgtggtgattgaagattttgaagaagattctgaggccgagggcagcggaggagaagatgacatccgggagctgcgggccaagaagctggccctggccaggaagattgctgagcagcagaggcggcaggagaagatccaggccgtgctggaggaccacagccagatgaggcagatggagctggagatccggcccctcttcctggtgcctgacaccaacggcttcatcgaccacctggccagcctggcccggctgctggagagcaggaagtacatcctggtggtgcccctcatcgtcatcaatgagctggatggcctggccaagggccaggagacagaccaccgggccggcggctacgcccgggtggtgcaggagaaggccaggaagagcattgagttcctggagcagagatttgagagccgggacagctgcctgcgggccctgaccagcagaggaaatgagctggagagcatcgccttccgctctgaggacatcaccggccagctgggcaacaatgatgacctgatcctgagctgctgcctgcactactgcaaggacaaggccaaggacttcatgcctgccagcaaggaggagcccatccggctgctgcgggaggtggtgctgctgacagatgacaggaacctgcgggtgaaggccctgaccagaaatgtgcctgtgcgggacatcccagccttcctgacctgggcccaggtgggctag

SEQ ID NO: 274264 - DNA, 1536 bp, Artificial Sequence
  derived and/or modified sequence
atggagaccttccccgccgtggccgagaaggtgctgaaggagttccaggtacttctgcagcactcccccagtccaatcgggagtacccgcatgctccagttgatgaccataaatatgttcgcagtgcataattctcagctcaaagactgtttcagtgaagagtgtagaagtgtgattcaggagcaagccgccgcattaggacttgctatgttctctttgctcgtgagacgttgcacctgcctcctcaaggagtccgctaaggctcagctttcatctcctgaggaccaggatgatcaagacgacataaaggttagctcttttgtgcctgatcttaaagaattgctccccagtgtgaaggtgtggagcgactggatgctcgggtatcctgatacctggaacccacctcctactagtctcgatcttcccagtcatgttgcagttgatgtttggtctacactggcagacttctgtaatatattgacagccgtaaatcaatctgaggtgccactctataaagaccccgatgacgacctcactttactcatcctagaggaggataggttgctgagtgggttcgtgccgttgctggcagctccacaagacccctgctatgtcgaaaagacatcagataaggtcatcgctgctgactgcaagcgcgtcactgtgctgaagtatttcctggaagcactgtgtggccaagaagagcccctgcttgcatttaaaggtggcaagtatgtgagtgtggcgccggttccggacacaatgggtaaagaaatgggctctcaagaggggacccgcctggaagatgaagaggaggacgttgtgattgaagacttcgaagaggactcagaagccgaagggtccggcggtgaagacgacatcagagaactgagagccaagaagttagccctggcccgcaagatagcagagcagcagcgcagacaggagaaaatacaagctgtgctggaggatcactctcaaatgcgccaaatggagctcgagataagacccctgtttctggtgcctgacacgaacggcttcatagaccacctcgcatccctggcacggctcctcgaaagccgcaaatacatcctggtggttcctctcatcgttatcaatgagttggacggattagccaagggtcaagagacagatcatagagcaggcggctacgctcgggtggtccaggagaaggctaggaagagtattgaattcctggaacagaggtttgagtccagagatagttgcctccgcgctctgacctcacgcggcaatgagcttgagtctatcgctttccggtcagaagacatcaccggccaactgggtaataacgacgatctgatcctatcatgttgccttcactactgcaaggataaggccaaggacttcatgcccgcaagtaaggaagaacccatacgcctgctcagggaagtcgtcctcctcactgacgacaggaacctgcgagttaaagctctcactagaaacgtgccagtgcgagacatccctgcctttctcacttgggctcaggtgggctag

SEQ ID NO: 274265 - DNA, 1536 bp, Artificial Sequence
  derived and/or modified sequence
atggagaccttcccggcagttgcagagaaagtcctgaaagagttccaggtgttgctgcagcatagcccttcccctatcgggtcaacgcgaatgctgcagctaatgaccattaacatgttcgcagtgcataatagccagctgaaggattgctttagcgaagagtgcagatctgtcattcaggagcaggctgccgctctgggcctagccatgttcagtctgctggtccgcaggtgtacgtgcctgctcaaagagtccgccaaagcccagttatcctcaccagaagatcaggacgatcaggacgacatcaaagtgtctagcttcgtgccagatttgaaagaactcctccccagtgtgaaagtttggtcagattggatgttgggctatccagatacgtggaaccctcctcccacttcccttgatttaccttcacacgtggctgtcgacgtatggtctaccttggccgatttctgcaatatcctgactgccgtgaatcaatccgaggtgccactctacaaggacccagacgacgacctcacactgctgatcttagaagaggataggctgctgagtggcttcgtccccctgctagcagctcctcaagatccctgctacgtggagaagaccagcgataaggtcattgccgctgattgtaaacgcgtcacagtcttaaagtattttctggaggcattatgtggacaggaggaacccttgctcgcattcaagggtggtaagtacgtgtcggtagcacccgtgcctgacactatgggcaaagagatgggctcccaggaaggaacaaggcttgaggacgaggaagaggacgtggtgatcgaggatttcgaggaagatagcgaagctgaaggaagcggcggtgaagacgacattagagaattaagagcaaagaagttggctctagctcgcaagatcgcggaacagcagagacgacaggagaaaattcaagcagttctagaggatcacagccagatgagacaaatggagctcgaaatccgccctctgtttttggtaccagatacaaacggattcattgatcacctagccagtctagccaggctcctcgagtcccgaaaatatatcctggtggtccctctcattgttatcaacgagctggacggtcttgctaaaggccaggagactgatcacagggccggaggatatgcaagagttgtgcaggagaaggctcggaagtccattgagtttctggaacagcgtttcgagagtcgtgacagctgtttgcgtgctctgaccagccgcggaaatgaacttgaaagcattgcctttcggagcgaggatatcacaggccagctgggtaataatgacgacctgattttatcctgctgtctgcactactgcaaagataaagcaaaggattttatgcccgcttcgaaagaagagccaattcggctgctgcgtgaagtggtcctcctgaccgacgatcgcaatctgcgagtgaaagcactgacgcgaaacgtgcctgtgagggacattcctgcattccttacctgggcccaggtgggctag

SEQ ID NO: 274266 - DNA, 1675 bp, Artificial Sequence
  derived and/or modified sequence
ctgaaaactcctttatcttgaatttgttcaaaattgcaggataccgggaaggatggagacattccctgcagtggctgagaaggtcctcaaggagttccaggtgttactgcagcacagcccctctcccattggaagtacccgcatgctgcagcttatgaccatcaatatgtttgcagtacacaactcccagctgaaagactgcttctcggaggagtgccgctctgtgatccaggaacaagccgcagctctgggcttggccatgttttctctactggtccgccgctgcacctgcttacttaaggagtccgccaaagctcagctgtcctctcctgaggaccaggatgaccaagacgacatcaaggtgtcttcctttgtcccggacctgaaggagctgctccccagtgtcaaagtctggtcagattggatgctcggctacccggacacctggaatcctcctcccacatccctggatctgccctcgcatgttgctgtggatgtatggtcgacgctggctgatttctgtaacatactgactgcagtgaatcagtctgaggtgccactgtacaaggacccggatgatgacctcacccttcttatcctggaagaggatcggcttctctcgggctttgtccccttgctggctgcccctcaggacccctgctacgtggagaaaacctcggataaggttattgcagctgactgcaaaagggtcacagtgctgaagtattttctggaagccctttgtggacaagaagagcctctgctggcattcaagggtggaaagtatgtgtcagtggcacccgtcccagacaccatgggaaaggaaatgggaagccaagagggaacacgactggaagatgaggaggaggatgtggtgattgaagactttgaggaagattcagaggctgaaggcagcggaggcgaggatgacatcagggagcttcgggccaagaagctggctctggccaggaagatagctgagcagcagcgtcgccaggaaaagatccaggctgtcctggaggaccacagtcagatgaggcagatggagctcgaaatcagacctttgttcctcgtaccagacaccaacggcttcattgaccacctggccagtctggcgcggctgctggagagcaggaagtacatcctggtggtgcccctcatcgtgatcaatgagctggacggcctggccaaggggcaggagacagaccaccgggctgggggctacgcccgtgtggtacaagagaaggcccgcaagtccatcgagttcctcgagcagcgattcgagagtcgggactcttgcctgcgagccctgaccagccgtggcaatgaactcgaatccatcgccttccgcagtgaggacatcactggccagctgggtaacaacgatgatctcatcctgtcctgctgcctccactactgcaaagacaaggctaaggacttcatgcccgccagcaaagaggagccaatccggctactgcgggaggtggtgctgttgacggatgaccggaacctgcgtgtgaaggcgctcacaaggaatgttcctgtacgggacatcccagccttcctcacgtgggcccaggtgggctgagggagccacactggggccccccccccgtggaaccgttcctgaaaggccaccaggcgcccagtgtagcacggaagatgcccacgtgcc

SEQ ID NO: 274267 - protein, 161 aa, Artificial Sequence
  derived and/or modified sequence
MATASPSVFLLMVNGQVESAQFPEYDDLYCKYCFVYGQDWAPTAGLEEGISQITSKSQDVRQALVWNFPIDVTFKSTNPYGWPQIVLSVYGPDVFGNDVVRGYGAVHVPFSPGRHKRTIPMFVPESTSKLQKFTSWFMGRRPEYTDPKVVAQGEGREAQPG

SEQ ID NO: 274268 - DNA, 486 bp, Artificial Sequence
  derived and/or modified sequence
atggccacagcgagcccctctgtctttctactcatggttaacggtcaggtggaaagcgcccagttcccagaatatgacgatctgtactgcaaatactgctttgtttatggacaggactgggcgccgacagctggactagaggaaggcatctcgcagataacctctaaatctcaagacgtgcgacaggccctggtgtggaatttcccgatagacgtcacattcaagagtactaatccctacggttggccgcagatcgtgctaagtgtgtacggtcctgacgtgtttggcaacgacgtggtgcggggctatggtgccgttcacgttcccttcagtcctgggaggcataagcgcactatcccaatgttcgttcctgaatccacaagcaagctgcagaagttcacttcttggttcatggggcggaggcccgaatacacagatcccaaagtcgttgcccagggagaggggcgggaggctcagcctggctag

SEQ ID NO: 274269 - DNA, 486 bp, Artificial Sequence
  derived and/or modified sequence
atggccacagccagccccagcgtcttcctgctgatggtgaatggccaggtggagagcgcccagtttcctgaatatgatgacctgtactgcaagtactgctttgtgtatggccaggactgggcccccacagctggcctggaggagggcatcagccagatcaccagcaagagccaggatgtgcggcaggccctggtgtggaacttccccattgatgtgaccttcaagagcaccaacccctacggctggccccagatcgtgctgtctgtgtatggcccagatgtgtttggaaatgatgtggtgcggggctatggagctgtgcacgtgcccttcagccctggccgccacaagaggaccatccccatgtttgtgcctgagagcaccagcaagctgcagaagttcacctcctggttcatgggccggcggcctgagtacacagaccccaaggtggtggcccagggcgagggccgggaggcccagcccggctag

SEQ ID NO: 274270 - DNA, 486 bp, Artificial Sequence
  derived and/or modified sequence
atggccaccgccagccccagcgtgttcctgctgatggtgaacggccaggtggagtcagcccagttccccgaatacgatgatctctattgtaagtactgtttcgtctacggccaggactgggctccaaccgccgggttggaggagggtatctcccaaatcaccagtaaatcccaagacgtgcgacaggctttggtgtggaatttcccaatcgatgttactttcaagtctaccaatccatacgggtggccccagatagtgctgagtgtttacggccctgacgtgttcggcaacgacgttgtgcgcgggtatggggcagtccatgtgccttttagccccggacgccataaacgaactattccaatgttcgtgcctgagagtacctctaagctgcagaagtttacctcctggtttatgggacggcgccccgaatatacagatcccaaggtggttgcacaaggggagggccgggaggcgcagcctggctag

SEQ ID NO: 274271 - DNA, 486 bp, Artificial Sequence
  derived and/or modified sequence
atggctactgccagtccctccgtgttcttactcatggtcaatggacaggttgagagcgcccagtttcccgaatatgatgacctctattgcaagtattgcttcgtgtacggtcaggattgggcccctaccgcagggctggaggagggaattagtcagattacaagcaaatcacaggacgtgcgtcaggccttagtgtggaacttccccattgacgttacctttaaaagcaccaatccgtacggatggccacagatcgtgcttagcgtttatggcccagacgtgttcggaaatgatgtcgtgcgcggatatggcgcagtgcacgtgcctttcagccctgggagacacaaacgcaccattcctatgttcgtccccgagtcaacatcaaagctccagaagttcacgagctggttcatggggaggcggcctgaatacactgatcctaaggtagtcgcccagggggaggggagggaggcccagccaggatag

SEQ ID NO: 274272 - DNA, 805 bp, Artificial Sequence
  derived and/or modified sequence
acctgccatggcgaccgcgagtcctagcgtctttctactcatggtcaacgggcaggtggagagcgcccagtttccagagtatgatgacctctactgcaagtactgctttgtgtacggccaggactgggcccccacagcgggtctggaggaggggatctcacagatcacatccaagagccaagatgtgcggcaagcactggtgtggaacttccccattgatgtcacctttaaaagcaccaacccctacggctggccacagatcgtgctcagcgtgtatggaccagatgtgttcgggaacgatgtggttcgaggctatggggccgtgcacgtgcccttctcacctggccggcacaaaaggaccatccccatgtttgtcccagaatctacgtctaaactgcagaagtttacaagctggttcatggggcggcggcccgagtacacagaccccaaggtggtggctcagggtgaaggccgggaagcccagcctggctgatgctgcccttctgtccccagtgacccgtgtccgttctcagggctttgtcaccctcctcttcaacgtggtgaccaaggacatgaggaaactgggctatgacactgggccttctgatacacagggtgtgttggggcccagcccaccccagagcttcccccagtgaaggctccacaggctgcacagtctctgataatgaagggctgccttcccgaagtcagccgctgcccatcggcctgaggggcagcctggtggccagagctgggggcacacagaatagttttgtataataaagtctcattttcagagagccta

SEQ ID NO: 274273 - DNA, 486 bp, Artificial Sequence
  derived and/or modified sequence
atggccaccgccagccccagcgtgttcctgctgatggtgaacggccaggtggagagcgcccagttccccgagtacgacgacctgtactgcaagtactgcttcgtgtacggccaggactgggcccccaccgccggcctggaggagggcatcagccagatcaccagcaagagccaggacgtgagacaggccctggtgtggaacttccccatcgacgtgaccttcaagagcaccaacccctacggctggccccagatcgtgctgagcgtgtacggccccgacgtgttcggcaacgacgtggtgagaggctacggcgccgtgcacgtgcccttcagccccggcagacacaagagaaccatccccatgttcgtgcccgagagcaccagcaagctgcagaagttcaccagctggttcatgggcagaagacccgagtacaccgaccccaaggtggtggcccagggcgagggcagagaggcccagcccggctag

SEQ ID NO: 274274 - protein, 153 aa, Artificial Sequence
  derived and/or modified sequence
MATASPSVFLLMVNGQVESAQFPEYDDLYCKYCFVYGQDWAPTAGLEEGISQITSKSQDVRQALVWNFPIDVTFKSTNPYGWPQIVLSVYGPDVFGNDVVRGYGAVHVPFSPGRHKRTIPMFVPESTSKLQKFTSLCLVASSDLQAAPPTEDK

SEQ ID NO: 274275 - DNA, 462 bp, Artificial Sequence
  derived and/or modified sequence
atggcaaccgcttcccctagcgtgttcctcttgatggtcaatggtcaggtggagtcagcacaatttcctgaatacgacgatctgtattgcaaatattgcttcgtgtacggtcaggattgggcgcccacagcgggactggaggaaggtatcagtcagatcaccagtaagtcacaggatgtgcggcaagccctagtgtggaattttcccatagacgtgaccttcaagtctaccaatccatacggctggccccaaatcgtcctcagcgtttatggcccagacgtatttggcaacgacgtcgtacgcggatacggcgccgtgcacgtcccattcagtcctgggcgccataaacgcaccattcctatgtttgtccccgaatccacatctaaactgcagaaatttacttcattatgcttagtggcgtcgtctgaccttcaagctgccccccccaccgaggacaagtag

SEQ ID NO: 274276 - DNA, 462 bp, Artificial Sequence
  derived and/or modified sequence
atggccacagccagccccagcgtcttcctgctgatggtgaatggccaggtggagagcgcccagtttcctgaatatgatgacctgtactgcaagtactgctttgtgtatggccaggactgggcccccacagctggcctggaggagggcatcagccagatcaccagcaagagccaggatgtgcggcaggccctggtgtggaacttccccattgatgtgaccttcaagagcaccaacccctacggctggccccagatcgtgctgtctgtgtatggcccagatgtgtttggaaatgatgtggtgcggggctatggagctgtgcacgtgcccttcagccctggccgccacaagaggaccatccccatgtttgtgcctgagagcaccagcaagctgcagaagttcaccagcctgtgcctggtggccagcagtgacctgcaggccgccccacccacagaggacaagtag

SEQ ID NO: 274277 - DNA, 462 bp, Artificial Sequence
  derived and/or modified sequence
atggccaccgccagccccagcgtgttcctgctgatggtgaacggccaggttgaaagtgcccaattccccgagtacgacgatctgtactgtaagtattgttttgtctacggtcaggattgggctccaaccgcaggactggaggagggcatctcccagatcacttctaaatctcaagatgtgcgccaagctttggtgtggaattttcccatagatgtaacattcaaatccactaatccttacggctggccccagatagtattgagcgtgtatggacctgatgttttcggaaacgacgttgtccgcggatacggagccgtgcatgtgccctttagtcctggtaggcacaaaagaacgatacccatgttcgtacctgaatcaacgtccaagctgcaaaaatttaccagcctctgtctcgtggcaagcagcgatctgcaggccgccccacctaccgaagacaagtag

SEQ ID NO: 274278 - DNA, 462 bp, Artificial Sequence
  derived and/or modified sequence
atggccacagcctcaccatcggtattcctgctgatggtaaacggtcaggtcgagtccgctcagtttcctgagtacgacgacctgtattgcaaatactgctttgtctatggccaagactgggccccaacggcaggcctggaggaagggattagccagatcacaagcaagtctcaggacgtccggcaggctctagtgtggaatttcccaattgacgtgactttcaagagcaccaacccttatggttggcctcagattgtgctgtccgtgtatggaccagacgtcttcggaaatgacgtggtacgtgggtatggcgctgtgcacgttccgtttagccctggacgacacaagcgcaccatccccatgtttgtccccgagtcaacgagcaagctccagaaattcacttctctctgccttgtagcctcttccgacttacaggccgctcctcccacggaagataagtag

SEQ ID NO: 274279 - DNA, 755 bp, Artificial Sequence
  derived and/or modified sequence
gtgtcctgcgcgctacgccgtctgtttctagggcaacgccggcgtctcttagcaaccgcgcgcggcctaggtgggtccccccggcacccccagacctgccatggcgaccgcgagtcctagcgtctttctactcatggtcaacgggcaggtggagagcgcccagtttccagagtatgatgacctctactgcaagtactgctttgtgtacggccaggactgggcccccacagcgggtctggaggaggggatctcacagatcacatccaagagccaagatgtgcggcaagcactggtgtggaacttccccattgatgtcacctttaaaagcaccaacccctacggctggccacagatcgtgctcagcgtgtatggaccagatgtgttcgggaacgatgtggttcgaggctatggggccgtgcacgtgcccttctcacctggccggcacaaaaggaccatccccatgtttgtcccagaatctacgtctaaactgcagaagtttacaagtttgtgcctggtcgcctcctcagatctgcaagctgctccacccactgaggacaaatagaaacaggtcccctgggagtgctgagtcacggggctcccttcagccctgttccagcagcagaaggccgggcgattttaccctgtgccctgtgaaaaatctttgtgtctgagggagcagaggaaaaactcttgtcagatgggaaaaatgctcatgacataatgtgacattaaaaggtgggaaacaagaggatata

SEQ ID NO: 274280 - DNA, 462 bp, Artificial Sequence
  derived and/or modified sequence
atggccaccgccagccccagcgtgttcctgctgatggtgaacggccaggtggagagcgcccagttccccgagtacgacgacctgtactgcaagtactgcttcgtgtacggccaggactgggcccccaccgccggcctggaggagggcatcagccagatcaccagcaagagccaggacgtgagacaggccctggtgtggaacttccccatcgacgtgaccttcaagagcaccaacccctacggctggccccagatcgtgctgagcgtgtacggccccgacgtgttcggcaacgacgtggtgagaggctacggcgccgtgcacgtgcccttcagccccggcagacacaagagaaccatccccatgttcgtgcccgagagcaccagcaagctgcagaagttcaccagcctgtgcctggtggccagcagcgacctgcaggccgccccccccaccgaggacaagtag

SEQ ID NO: 274281 - protein, 133 aa, Artificial Sequence
  derived and/or modified sequence
LLMVNGQVESAQFPEYDDLYCKYCFVYGQDWAPTAGLEEGISQITSKSQDVRQALVWNFPIDVTFKSTNPYGWPQIVLSVYGPDVFGNDVVRGYGAVHVPFSPGRHKRTIPMFVPESTSKLQKFTRSASCSTH

SEQ ID NO: 274282 - DNA, 402 bp, Artificial Sequence
  derived and/or modified sequence
ctcttgatggtgaacggacaagtagagtccgcccagtttcctgagtatgacgatctgtattgcaaatattgttttgtttacgggcaggactgggctccaacggcaggactcgaggagggcattagtcagatcacgagcaagtcacaagacgtgcggcaggccctggtgtggaattttcccattgatgtcaccttcaaatccaccaatccctacggctggcctcagattgtgctgtccgtgtacggtcccgatgtgttcggcaacgacgtggtgagaggctacggcgccgttcatgtgccctttagccctggtcggcacaaacgcacaatccctatgttcgtacctgagtccacatccaaactgcagaagttcaccaggtcagccagctgcagcactcactag

SEQ ID NO: 274283 - DNA, 402 bp, Artificial Sequence
  derived and/or modified sequence
ctgctgatggtgaatggccaggtggagagcgcccagtttcctgaatatgatgacctgtactgcaagtactgctttgtgtatggccaggactgggcccccacagctggcctggaggagggcatcagccagatcaccagcaagagccaggatgtgcggcaggccctggtgtggaacttccccattgatgtgaccttcaagagcaccaacccctacggctggccccagatcgtgctgtctgtgtatggcccagatgtgtttggaaatgatgtggtgcggggctacggggctgtgcacgtgcccttcagccctggccgccacaagaggaccatccccatgtttgtgcctgagagcaccagcaagctgcagaagttcaccaggtctgccagctgcagcacccactag

SEQ ID NO: 274284 - DNA, 402 bp, Artificial Sequence
  derived and/or modified sequence
ctgctgatggtgaacggccaggtggagagcgcccagttccccgagtacgacgacctgtactgcaaatattgcttcgtctatggccaagactgggcacccaccgccggtctggaagaaggcataagtcaaatcacaagcaagagtcaggacgtgcggcaggctctcgtgtggaactttcccatagatgtgaccttcaagagcaccaatccctatgggtggccccagatagtgctttctgtatatggccccgacgttttcggcaatgatgttgtgcgcggatatggtgccgtccacgtgccattctcacccgggcgccacaaacgaaccattcctatgtttgtacctgagtcaacttccaagctccagaagtttacgaggtctgcatcttgctcaactcactag

SEQ ID NO: 274285 - DNA, 402 bp, Artificial Sequence
  derived and/or modified sequence
ctcctgatggtcaatggtcaggtggagtctgcgcagttcccagagtacgacgacctttattgcaagtactgcttcgtatacggtcaggactgggctcccactgcgggtctagaggaagggatctctcagattactagcaagagtcaggacgtgcggcaggcgctcgtgtggaattttcccatcgacgtcacttttaaatctacgaatccctacggctggccacagatcgtgctctcagtgtacggcccagatgtgttcggcaacgacgtggtgcgaggctacggagcagtccacgtcccatttagtcctggacgacacaaacgcacaattcctatgttcgtgccagaatccacaagcaagctgcagaagttcactcgttcagcatcatgcagtacacactag

SEQ ID NO: 274286 - DNA, 601 bp, Artificial Sequence
  derived and/or modified sequence
ctactcatggtcaacgggcaggtggagagcgcccagtttccagagtatgatgacctctactgcaagtactgctttgtgtacggccaggactgggcccccacagcgggtctggaggaggggatctcacagatcacatccaagagccaagatgtgcggcaagcactggtgtggaacttccccattgatgtcacctttaaaagcaccaacccctacggctggccacagatcgtgctcagcgtgtatggaccagatgtgttcgggaacgatgtggttcgaggctatggggccgtgcacgtgcccttctcacctggccggcacaaaaggaccatccccatgtttgtcccagaatctacgtctaaactgcagaagtttacaagatctgcaagctgctccacccactgaggacaaatagaaacaggtcccctgggagtgctgagtcacggggctcccttcagccctgttccagcagcagaaggccgggcgattttaccctgtgccctgtgaaaaatctttgtgtctgagggagcagaggaaaaactcttgtcagatgggaaaaatgctcatgacataatgtgacattaaaaggtgggaaacaagagga

SEQ ID NO: 274287 - DNA, 402 bp, Artificial Sequence
  derived and/or modified sequence
ctgctgatggtgaacggccaggtggagagcgcccagttccccgagtacgacgacctgtactgcaagtactgcttcgtgtacggccaggactgggcccccaccgccggcctggaggagggcatcagccagatcaccagcaagagccaggacgtgagacaggccctggtgtggaacttccccatcgacgtgaccttcaagagcaccaacccctacggctggccccagatcgtgctgagcgtgtacggccccgacgtgttcggcaacgacgtggtgagaggctacggcgccgtgcacgtgcccttcagccccggcagacacaagagaaccatccccatgttcgtgcccgagagcaccagcaagctgcagaagttcaccagaagcgccagctgcagcacccactag

SEQ ID NO: 274288 - protein, 203 aa, Artificial Sequence
  derived and/or modified sequence
MWRLALGGVFLAAAQACVFCRLPAHDLSGRLARLCSQMEARQKECGASPDFSAFALDEVSMNKVTEKTHRVLRVMEIKEAVSSLPSYWSWLRKTKLPEYTREALCPPACRGSTTLYNCSTCKGTEVSCWPRKRCFPGSLGSQDSAPLHLRSFPASGCSEPPGGVPPPPSKKWLVKTLKTSQPPALRGMHSQLPHPLEGNQSAP

SEQ ID NO: 274289 - DNA, 612 bp, Artificial Sequence
  derived and/or modified sequence
atgtggagactggccctgggcggcgtgttcctggccgccgcccaggcctgcgtgttctgcagactgcccgcccacgacctgagcggcagactggccagactgtgcagccagatggaggccagacagaaggagtgcggcgccagccccgacttcagcgccttcgccctggacgaggtgagcatgaacaaggtgaccgagaagacccacagagtgctgagagtgatggagatcaaggaggccgtgagcagcctgcccagctactggagctggctgagaaagaccaagctgcccgagtacaccagagaggccctgtgcccccccgcctgcagaggcagcaccaccctgtacaactgcagcacctgcaagggcaccgaggtgagctgctggcccagaaagagatgcttccccggcagcctgggcagccaggacagcgcccccctgcacctgagaagcttccccgccagcggctgcagcgagccccccggcggcgtgccccccccccccagcaagaagtggctggtgaagaccctgaagaccagccagccccccgccctgagaggcatgcacagccagctgccccaccccctggagggcaaccagagcgccccctag

SEQ ID NO: 274290 - DNA, 273 bp, Artificial Sequence
  derived and/or modified sequence
atgtggcactacattggcgctgccgagtgtccttatctgcaacttccgaggtgtcgcgggtcgagtacaaggtattggcataagaagtcacgggggcggttgacttggccatggctgttgatgtcacaattgcggacttgtcatatcaatagtcccttcccactggcggtgacctgcggagtcaagttcagtgaggctgccgtgcctgtgcatctgtcaggatgcgtgcagaagatgaatatctgcctacaactgcagttctctaacgattag

SEQ ID NO: 274291 - DNA, 612 bp, Artificial Sequence
  derived and/or modified sequence
atgtggagattggccctgggtggcgtgtttctggcggccgctcaagcctgtgttttctgccggcttcccgcacatgacctctcaggcaggctagctcggttgtgctcacaaatggaggcacggcaaaaagaatgtggtgcatcccctgacttctcagctttcgcacttgacgaggtatctatgaacaaggtgacagaaaaaactcaccgggtcctccgtgtcatggagattaaagaagcagtgtctagtctacccagctactggagttggttgcgcaaaacgaaactgccagaatatacacgtgaggctctttgcccacctgcttgcagaggctctaccaccctgtataattgcagcacatgtaaaggaaccgaggtctcttgttggccgaggaaacgttgctttccaggaagccttggatcccaggactctgcccctttgcatcttcgcagcttcccggcatcgggctgctccgagccccccgggggtgtgcctccccccccgagtaaaaagtggctcgttaaaacactgaagaccagccagcccccggcactgaggggcatgcatagccagctgccacacccgctggaaggcaatcagtctgccccctag

SEQ ID NO: 274292 - DNA, 612 bp, Artificial Sequence
  derived and/or modified sequence
atgtggaggctggccctgggcggcgtcttcctggccgccgcccaggcctgtgtgttctgccgcctgcctgcccatgacctgagcggccgcctggcccggctgtgcagccagatggaggcccggcagaaggaatgtggggccagcccagacttcagcgcctttgccctggatgaggtgtccatgaacaaggtgacagagaagacccaccgggtgctgcgggtgatggagatcaaggaggccgtgagcagcctgcccagctactggagctggctgaggaagaccaagctgcctgagtacacccgggaggccctgtgccccccagcctgccggggcagcaccaccctgtacaactgcagcacctgcaagggcacagaggtgtcctgctggcccaggaagcgctgcttccctggcagcctgggcagccaggacagcgcccccctgcacctgcgctccttccctgccagcggctgcagcgagcccccaggaggagtgcccccaccacccagcaagaagtggctggtgaagaccctgaagaccagccagcccccagccctgcggggcatgcacagccagctgccccaccccctggagggcaaccagagcgccccctag

SEQ ID NO: 274293 - DNA, 612 bp, Artificial Sequence
  derived and/or modified sequence
atgtggcggctggccctgggcggcgtgttcctggccgccgcccaggcgtgtgtcttttgtaggctgcctgcccacgatctaagcggccgactggcccgcctatgctcccagatggaggccaggcaaaaggagtgcggagcgtctccagattttagcgctttcgccctcgacgaggtgagcatgaacaaggtgacggagaagacacatcgcgtgctacgcgtgatggaaatcaaagaggccgtttctagtctgccaagctattggagctggctacgaaagacaaaattgcctgagtacactagagaagcactttgcccgcccgcatgcagagggtcaacaaccctctataactgtagcacctgtaaaggcacagaagtgtcttgctggccgcgcaaaaggtgttttcccggttccctgggatcccaagacagcgcccccctgcacttgaggagctttccagcctcgggatgctcagaacctcctgggggagtgcctcctccccctagtaagaaatggcttgtgaaaactctcaaaacaagccaaccacccgctctccgaggcatgcattctcaactgcctcacccactcgaagggaaccagagcgccccctag

SEQ ID NO: 274294 - DNA, 612 bp, Artificial Sequence
  derived and/or modified sequence
atgtggcggcttgcgctgggaggtgtattccttgccgcagctcaggcgtgcgtgttctgtcgccttcctgctcacgatctttcaggcaggctggctaggctctgctcccaaatggaagccagacaaaaggagtgtggagcctcacccgatttttccgcctttgcactggatgaggtgagcatgaataaagtaacagaaaaaacacatcgagtactgagggtcatggagatcaaagaagccgtgagttctttgccgagttactggtcatggctgaggaaaacaaagctcccagaatacactcgggaggctctctgtccaccggcatgtagagggtctacaactctatataattgcagcacatgcaaggggactgaggtgagttgttggccacggaagagatgcttcccaggctccctggggtctcaagatagcgctcccctccacttaaggtcatttcccgcttcagggtgtagtgaaccaccaggaggcgtgccacccccaccttccaagaagtggctcgtcaagacactgaagacttcccagccgcctgctctgcgagggatgcattctcaattgccacacccccttgaaggcaatcagagcgccccatag

SEQ ID NO: 274295 - DNA, 1191 bp, Artificial Sequence
  derived and/or modified sequence
tccaggcaagggctggagccagggctgcagagcattcctcggctcagctggggcagcgccgccccatcccccagtggtcctcatgtggaggctggcactaggcggggttttcctggcagccgcccaggcttgtgtcttctgtcgcctcccagcccacgacttgtcaggccgcctggctcggctctgcagccagatggaggccaggcagaaggaatgtggggcctccccagacttctcggcctttgccttagatgaggtgtccatgaacaaagtcacagagaagactcacagagtcctgagggtcatggaaatcaaagaggctgtctcctcactcccttcatattggagttggcttcgaaagaccaagctccctgagtacaccagggaagctctctgtccccccgcctgccggggcagcaccacgctgtacaactgctccacctgcaaggggacggaggtgtcctgctggccccgaaagcgctgcttcccaggatctttgggaagccaagattctgctcctctccatcttcggagctttcctgcttctgggtgttctgagcctcctggtggagtcccaccacctccaagcaaaaagtggcttgtgaagacgctgaaaacctcccagcctccagctctaaggggtatgcactcacaacttccacatcccttggaggggaaccagtcagccccttagtcccagctccaaagacagtctccagaccctaaaacccagacatccctgcttctggttggtgagataatgaaaaacaagaaaatccccaaaaacccagatcccccacaatcccagtgtcagatggcctcccgggaacccaggcacccacagctggaaagttcctcccctccagccctcaaccaatcacatggctgtcaacaatgccaggaaaatatctacagaaggaaagaatcccctacgccactcccaccacacccacacccccttctgcctgttccgggaaagcgggggcatctgccccagaagctattccaggccctcctatgactgatggggaatccgggaatgcatgttctggaaaactcaccccactagagtgagatcacatcagtgggttcgcgggcatgccctccctccatcgtgttaacagtttgaaatcctggcctccctcagaggcctccatcctgccaggcctaagtaaaacttgctgttcatgg

SEQ ID NO: 274296 - protein, 150 aa, Artificial Sequence
  derived and/or modified sequence
MAPALWRACNGLMAAFFALAALVQVVYTIPAVLTLLVGLNPEVTGNVIWKSISAIHILFCTVWAVGLASYLLHRTQQNILHEEEGRELSGLVIITAWIILCHSSSKNPVGGRIQLAIAIVITLFPFISWVYIYINKEMRSSWPTHCKTVI

SEQ ID NO: 274297 - DNA, 453 bp, Artificial Sequence
  derived and/or modified sequence
atggcccccgccctgtggagagcctgcaacggcctgatggccgccttcttcgccctggccgccctggtgcaggtggtgtacaccatccccgccgtgctgaccctgctggtgggcctgaaccccgaggtgaccggcaacgtgatctggaagagcatcagcgccatccacatcctgttctgcaccgtgtgggccgtgggcctggccagctacctgctgcacagaacccagcagaacatcctgcacgaggaggagggcagagagctgagcggcctggtgatcatcaccgcctggatcatcctgtgccacagcagcagcaagaaccccgtgggcggcagaatccagctggccatcgccatcgtgatcaccctgttccccttcatcagctgggtgtacatctacatcaacaaggagatgagaagcagctggcccacccactgcaagaccgtgatctag

SEQ ID NO: 274298 - DNA, 453 bp, Artificial Sequence
  derived and/or modified sequence
atggcccccgccctctggcgagcttgcaacggactcatggccgcctttttcgcactcgctgcactcgtgcaggtagtctatacgatcccagcagttttaacattactggtcggtcttaaccccgaggtcacagggaacgtcatttggaaatctatcagtgctattcatatcctgttctgtaccgtgtgggcagtcggcttagcttcctatctgctacaccgaacccagcagaatatcctacacgaggaagagggccgagaactctctggcctcgttatcatcacggcttggatcattttgtgtcacagttcatcaaaaaaccccgtgggcggtcgaatccagttagcaattgccattgtgatcacactattcccctttatttcctgggtctacatttatataaacaaggagatgcggtcaagttggcctacacactgcaaaacagttatttag

SEQ ID NO: 274299 - DNA, 453 bp, Artificial Sequence
  derived and/or modified sequence
atggccccagccctgtggagggcctgcaatggcctgatggccgccttctttgccctggccgccctggtgcaggtggtgtacaccatcccagctgtgctgaccctgctggtgggcctgaaccctgaggtgactggaaatgtcatctggaagagcatcagcgccatccacatcctcttctgcaccgtgtgggccgtgggcctggccagctacctgctgcacaggacccagcagaacatcctgcacgaggaggagggccgggagctgagcggcctggtgatcatcacagcctggatcatcctgtgccacagcagcagcaagaaccctgtgggcggccgcatccagctggccatcgccatcgtcatcaccctcttccccttcatctcctgggtgtacatctacatcaacaaggagatgaggagctcctggcccacccactgcaagacagtcatctag

SEQ ID NO: 274300 - DNA, 453 bp, Artificial Sequence
  derived and/or modified sequence
atggcccccgccctgtggcgggcctgcaacggcctgatggccgccttctttgccttggctgcattggtgcaggtggtgtacacaattcctgctgtgttgaccctcctggttgggctcaaccctgaagttaccggtaatgttatctggaaatccataagtgctattcatatcctgttctgcaccgtgtgggcagttggcctggcatcatatctgctgcatagaacgcagcagaacatcctccacgaagaagaagggcgcgagctgtcaggcctggtgataatcactgcttggataatactgtgtcactcatcatcgaaaaacccagtgggcggcagaatccagctcgcaatcgctatcgtgatcacgctgttcccttttatttcttgggtgtacatttacataaacaaagaaatgcgttccagctggcccactcattgtaagactgtcatatag

SEQ ID NO: 274301 - DNA, 453 bp, Artificial Sequence
  derived and/or modified sequence
atggcccctgccctgtggcgcgcatgcaacggactgatggccgctttctttgcattggcagcactggtgcaggtggtttataccatcccagcagtcctaaccctccttgtgggccttaatcctgaggtgactgggaatgtgatctggaagagtatctctgctattcacatcctgttttgcacagtgtgggctgtgggactggcctcctacctgctccacaggacacaacaaaacatactgcatgaagaagaaggacgggagctctcaggcttggtcattatcaccgcctggattatcttatgtcactcctcatcaaaaaaccccgtgggagggcgtatccagctggcaatcgccattgtgattaccctgtttccctttataagctgggtgtacatctacattaacaaggagatgcggagcagctggcccacccactgcaagacagtcatctag

SEQ ID NO: 274302 - DNA, 3089 bp, Artificial Sequence
  derived and/or modified sequence
tctttccttctttctttttctttctttctctttcttcctctctcccctcccgcctgccttccttccttttttccttcttttttttctttcttctttttttttttttttgtgaggaaggtagctttagtgaaaacagggtttggagttgaacctatacgggttcaaattcgacttccgtccaccaccgagacctgcgctccctgagggactcgctttcccatccgcgaaaccaggacggcgccgcctacaccccgcggcgttcggggcgggctgaatgggtcgctgagtgggggctacacccacgcccttcgctccccgcccccgggcggagcgacggccacggcagtgtccccaaggcaccgaaaccgaggcgggggtctcggtccctccgcgcaaggaggaaggcggaccgtacgtggcaggactcaccgccccgcacgtggcaggactcaccgccccgcgccgtgttctccgagccatggcgccagcgctgtggcgggcctgcaacggactcatggccgccttcttcgcgctggcggccttggtgcaggtggtgtacacaatccctgcagtactgaccctgcttgttggacttaaccctgaagtcacaggtaatgttatttggaaaagtatctctgcaatacacatactcttttgtacggtgtgggctgttggcttggcgtcctacctcttgcatcgtacacaacagaacatcttacatgaggaagaaggcagggagctgtctggtctggtgattattacagcatggattatcctgtgccacagttcctcaaagaatccagttggtggaagaattcaattggctattgccattgtaatcacacttttcccatttatctcatgggtctacatatatattaacaaggaaatgcggtcctcttggccaactcactgcaagacagtaatttaaataaattcaagaacttcgtttttaaaatgaatattttcaatcaattttttataaacattaggggaacaagccaggagtttatttcaggtaatttgggctaatagttttaaaactccaaataactttttaagggtgcatataattcgatgtaagattggatgggacaagtaagagatggtctgatattttccagacgactttctgcagggtcttgtgtcataatgtagtggaaaaggctagagaatagaagtttaaaaatacgagttctaacttaactttgtaactatgtaatttgggcaaatatataaacctcctggtggatatttatctataaaataggattaatgccagatctacttacttacacagtaacaaggatcaatctagataatgtaagaacactctgaagatataaagtgtttggaaagattacggagggctgcccatgattaaaatagaggggagcagggattgggtaatatactgaaatagacattcaagagagggctataccccgatctttttttttttttaagacagtcccactctattgcccaggctggagtgcagtggcatgatcatggctcactgcagtcctgacctcccggggctcaggtgatcctcctacctcagcctcccaagaagctacgactacaagtgtgcaccaccatgcccggctaaatttttttaaattttttgtagaggcagggtttcaccgtgttgtccaggctggtcttgaattcctgagttcaagcgatctgtccaccttggcctcccaaagtgctgggattacaggtgtgagccaccatgcccagtccagccctaaactaatcttatccagagctggcatagtgcagtgaactaaaggagaactctagatgaatcaaatgagcaggcatgtcttggaaagaaagggaagctggatagaataaaggaattagggaccaaacaagaaggcaatagggactataactacattctaaatgagaaataaggtcaaaatctatatacattctttataaatggatgtccaaagtaatcctagggaggagagcttttttttttttcatttccattttcatttaaaaatggatacttgattattggaaaacttacaattgtgtttggaacaacttgggtatttgaatctaattttccaattgcaaattttatgatacctaaatacagataaagtatttccaatgaaaatttagtgtccaaatgagtggggctataaatgtaaaatacactggattttaaagacatggtagaaaaagaacagaaaatattttttgtattgattacatgttgaaacaatattttggctataatgggttaaatatactattaaagttgattttatctgtttctgtttacttttatttacgtggcttacattgcatttctgttggacagtcctgtatttaagtatctagatggcaacattttacatacacaagcatcaaactctgtggtcagatactgttttttctgatctaggaaagagatctgggaaatacttcactcaaaaagaacgagtagtgccttccacaggttaggagagtgtaaatgagtctggtagtttgtctatttttattgtctttattactatagtaaatattctataaatatttgttaaaggaggtatgtgtattttgtttttgttattggcacagtggccactgaatggtgagaaattatctaagattaagacttgaatgagtaaaaagggggaaaacaaatctagttgatattaaaacagtcaaagtgaaacttaagggtcagtaaaatacacataaaggatttgagttttccagtgtatattttgcttacatatttgtggcttttataactcctttagtattaataaactactgaagtcacatgcaaaaaaaaaacagactcatttgcaaattccctgtgggctctatccattgaccaagtcatgtttacttctgtgcttaaagacagtaatgttcaagatgtgctttcatcatgtatgcctctcccatatcagactacgaaattatgtgactattcatagtctctttcgcatcttcagttaagcatataaaaggcacttttggtggaatagtcttttgaagagtattaatgaaattgaatttaagtattattattaaatttaatatttctatta

SEQ ID NO: 274303 - DNA, 2244 bp, Artificial Sequence
  derived and/or modified sequence
agttgggccaagatggcggccgccgagggaccggtgggcgacggcgagctgtggcctcggcggagagcttttcctgtgggacggagaagacagctccttcttagtcgttcgccttcggggccccagcggcggcggcgaagagcccgccctgtcccagtaccagagattgctttgcataaatccacccctgtttgaaatctatcaagtcttgttaagcccaacacaacatcatgtagcacttataggaataaaaggacttatggtattagaattacctaaaagatgggggaagaattctgaatttgaaggtggaaaatcaacagtgaattgtagtaccactccagttgcggagagatttttcaccagttccacctctctgactctaaagcatgctgcatggtatccaagtgaaatcctggatccccacgtagtgctgttaacatcagacaacgtaatcagaatttactcactacgtgagccgcagacacccactaacgtgataatactttcagaagccgaagaggaaagtctagtactcaataaaggaagggcgtataccgcatctctaggagagacagcagttgcatttgactttgggccattggcagcagtcccaaagactctatttggacaaaacggcaaagatgaagtagtggcatacccactgtacatcttatatgaaaatggagagactttcctgacatacatcagtctgttacacagccctggaaatattggaaagctgttgggtccattgcccatgcatcctgcggctgaagataactatggttatgatgcgtgtgctgtactctgcttaccctgtgtccccaatatcttagtgatcgctactgaatcaggaatgctgtatcactgtgtcgtgctagaaggggaagaagaagatgaccacacgtcagaaaagtcctgggattccaggattgacctcattccttctctgtatgtgtttgaatgtgttgagttggagcttgctttgaaactggcatctggagaggatgacccttttgattctgacttttcttgtccagtcaaacttcatagagatcccaagtgtccttcaagatatcactgtactcatgaagctggtgtacatagtgttgggctaacttggattcataaacttcacaaatttcttggatcagatgaagaagataaggatagtttacaggaactctctacagaacagaaatgctttgttgaacacatcctttgtacgaagccattgccctgcaggcagccagctccaattcgaggattttggattgtacctgacattctgggacccacgatgatctgcatcaccagtacctatgaatgcctcatatggccgttattaagtacagtccatccagcgtctcctcccctgctttgtactcgagaagatgttgaagtggcagagtctcccctccgtgttctggctgaaaccccagattcctttgaaaagcatattagaagcattttgcaacgtagtgttgccaatccagcatttttgaattgttttactcagctaaggaaaataaaggtagaaactttgtttttaagagcttctgaaaaggacatagcccctcctcctgaagaatgccttcagctcctcagcagagccacccaggtgttcagagagcagtacattctcaaacaggacttggcaaaggaggagattcagcggagggtcaaattattatgtgaccaaaaaaagaaacaactagaagatctcagttattgtcgagaagagaggaaaagtctgcgggaaatggctgagcgtttagctgacaaatatgaggaagctaaagaaaaacaagaggatatcatgaacaggatgaaaaaactacttcacagttttcactctgagctcccagttctctctgatagtgagcgagacatgaagaaagaattacagctgatacctgatcaacttcgacatttgggcaatgccatcaaacaggttactatgaaaaaggattatcaacagcaaaagatggagaaggtgttgagtcttccaaaacccaccattattctcagtgcctaccagcgaaagtgcattcagtccatcctgaaagaggagggtgaacatataagggaaatggtgaagcaaatcaatgatatccgcaatcatgtaaacttctgacaccaccaggagctgactcacacctgaactgaacaccattgaaggcttaaacccatattgtaaaacaggtagaattatctaatttataaaaaggtgttttgatg

SEQ ID NO: 274304 - DNA, 336 bp, Artificial Sequence
  derived and/or modified sequence
atgggcgaccccgcccccgcccggagcctggacgacatcgacctgagtgccctccgtgccctgtggtttcagtttttctatcactcgggaagcagtttggagtccccaggtatgctgaacgggccattccaacaccggaactccaggatcatgacacaccgtagcgctgagaagaccctgttaggttctctgagtctatggaggtggagtgccatggagcctacagacaggtgcacacgggtggggatgagtcgccgcggatcttggctgccatctcggagttggatgagcaggcgcacccgaagaaagcgatcaaatcggaggtcaacttgctag

SEQ ID NO: 274305 - protein, 487 aa, Artificial Sequence
  derived and/or modified sequence
MAEEEVAKLEKHLMLLRQEYVKLQKKLAETEKRCALLAAQANKESSSESFISRLLAIVADLYEQEQYSDLKIKVGDRHISAHKFVLAARSDSWSLANLSSTKELDLSDANPEVTMTMLRWIYTDELEFREDDVFLTELMKLANRFQLQLLRERCEKGVMSLVNVRNCIRFYQTAEELNASTLMNYCAEIIASHWDDLRKEDFSSMSAQLLYKMIKSKTEYPLHKAIKVEREDVVFLYLIEMDSQLPGKLNEADHNGDLALDLALSRRLESIATTLVSHKADVDMVDKSGWSLLHKGIQRGDLFAATFLIKNGAFVNAATLGAQETPLHLVALYSSKKHSADVMSEMAQIAEALLQAGANPNMQDSKGRTPLHVSIMAGNEYVFSQLLQCKQLDLELKDHEGSTALWLAVQHITVSSDQSVNPFEDVPVVNGTSFDENSFAARLIQRGSHTDAPDTATGKARASRRGDAGVCRRQEMACKCLHPKFRN

SEQ ID NO: 274306 - DNA, 270 bp, Artificial Sequence
  derived and/or modified sequence
atggacgtgctgagccccctgagcttcatcaaggtgagccacgtgagaatgcagggcatcctgctgctggtgttcgccaagtaccagcacctgccctacatccagatcctgagcaccaagagcacccccaccggcctgttcggctactggggcaacaagggcggcgtgaacatctgcctgaagctgtacggctactacgtgagcatcatcaactgccacctgcccccccacatcagcaacaactaccagagactggagcacttcgactag

SEQ ID NO: 274307 - DNA, 1119 bp, Artificial Sequence
  derived and/or modified sequence
atggacgtgctgtctccactttcgtttatcaaggtgtcgcacgtgcgaatgcaggggatcctgctcctggtcttcgctaaataccagcaccttccatacattcagatcctgtctacaaagtccacccccaccggcctgttcggttactgggggaacaagggcggcgtcaacatctgtctgaagctttacggctattacgtttctatcatcaactgccatctcccaccccacatcagtaataactaccagaggctggagcactttgatcggatcctcgagatgcagaattgcgaaggcagagatatccccaatatcttggaccatgatctgatcatctggtttggagatatgaactttcgcattgaagatttcgggctgcattttgtccgcgagagtatcaaaaatcggtgttacggcggtctatgggaaaaagaccagctaagtatcgctaaaaagcacgaccctctgcttagggagttccaggaaggccggctgctgttccctccaacatataagtttgaccggaactctaacgactatgatacatctgagaaaaagagaaaaccagcttggacagaccgcatactgtggaggctgaagcggcagccttgtgccggaccggacaccccaatccccccagcttctcatttctcactgtccctcaggggctattcaagccatatgacgtatgggatctccgatcacaagcctgtgagcgggacgtttgacttagaattaaaaccactggtcagcgctcccctcatcgtgctcatgcccgaagatttgtggactgtggagaacgatatgatggtctcttactcttccacttctgactttccttcatccccctgggactggatcggactctataaagtaggacttcgcgatgttaatgactacgtgagttatgcttgggtaggtgatagtaaggtgtcctgcagtgataacctcaatcaggtgtacattgacatatccaatatccctacaactgaagacgagttcctgctgtgttactacagcaacagccttcgcagcgtcgttgggataagccgcccttttcagatccctccaggatccctgcgggaagacccactcggagaagctcaacctcagatttag

SEQ ID NO: 274308 - DNA, 1119 bp, Artificial Sequence
  derived and/or modified sequence
atggacgttctctcccctttaagcttcattaaagtgtctcacgtgaggatgcagggtattctgctgttagtcttcgctaagtatcagcacctgccttatatccaaatactgagtacaaagtccacccccactggtctgttcggctactggggcaataaaggcggggtcaacatttgtctgaaactgtatggttactatgtgagtatcattaattgtcatctgccgccacatatttcaaacaactaccaaagactggagcactttgataggatactcgagatgcaaaactgtgaggggcgagacattcctaatatcttggatcacgacctgattatctggttcggcgatatgaattttcgcatcgaggattttggtttacatttcgtgagagagtccattaagaataggtgctacggaggcctttgggaaaaggaccagctttccatagccaagaagcacgacccactgctgcgcgagtttcaggagggaagactgctgttcccccctacatataaatttgacagaaattccaacgactacgacacatccgaaaagaagcggaagccggcctggaccgatagaatactgtggcgcctaaagaggcagccttgtgcaggccctgacactccgatcccccccgccagccatttttcattgtcactacgcgggtactccagtcacatgacttacgggatctcagatcacaaaccagtatctgggaccttcgatctggagctcaaacctctcgtgagtgcaccgctgatcgtgctaatgccggaagatctatggactgtggaaaacgatatgatggtctcttattcttctaccagcgatttcccttcatctccatgggattggataggcctgtacaaggtaggcctgagagacgtaaatgattatgtgagttacgcctgggtgggcgattccaaggtttcttgctctgacaacctcaatcaagtttatatcgatataagtaatatccctaccaccgaggatgaattccttctgtgctactacagtaattcactcaggtcagtggtcggaatctcgcggccatttcagatccccccaggaagtctcagggaggatcccttaggagaagcccagccgcaaatatag

SEQ ID NO: 274309 - DNA, 1119 bp, Artificial Sequence
  derived and/or modified sequence
atggacgtattatcccctctgtcattcatcaaggtgagtcacgtgcgcatgcaagggattctgctgctagtattcgcaaaatatcagcatctcccttatatccaaattctcagcacaaagagcacacctacaggtctgttcggatattgggggaataaaggtggagtgaacatatgcctgaaactatatggatattatgtgtctattatcaactgccatctgccgccacatattagtaacaattaccagcggttggaacacttcgacagaatcttggaaatgcaaaattgtgagggccgcgacattcctaacatcttagatcacgacttgataatctggttcggggatatgaattttcgtattgaagacttcgggctgcactttgtgcgggaaagcatcaagaacagatgctatggtggcctgtgggagaaggatcagctgagtatcgcaaagaagcatgaccctctcttgcgcgagttccaggaaggccggcttctgttccctcctacatacaagtttgatcggaattcaaatgactacgataccagcgaaaagaagcgaaaaccagcatggacagatagaatcctgtggaggctgaagcggcagccatgcgccggaccagacaccccaattccgcccgcaagccacttttccctgtccctccgggggtattcatctcacatgacttacggcatttctgatcacaagccggtgagcggaacttttgacctggaattgaagcccctggtgagcgcgccactcatagtcctcatgcccgaggatttatggacagtggagaacgacatgatggtgagttactcctcaaccagtgactttccttcgtcaccgtgggattggattggcctgtataaagtggggttaagagacgtaaatgattatgtgtcctacgcctgggtaggcgacagcaaggtgagctgtagtgataatttgaaccaggtgtatattgatatttcaaatatccccacaacagaggacgaattcctcctgtgctattacagtaacagtttgcgttctgtggttgggatcagccgcccctttcaaatccccccaggctcactgagggaggaccccctaggcgaggctcaacctcagatttag

SEQ ID NO: 274310 - DNA, 270 bp, Artificial Sequence
  derived and/or modified sequence
atggacgtgctatctccactctcatttatcaaggtgtctcacgtccggatgcagggtatcttactactggtgtttgcgaagtatcagcatctgccttacatccagatcttgagtacaaaaagcactcccaccgggctattcggctactggggtaacaaggggggggtgaacatctgtctcaagctatatggttattacgtgagcatcatcaactgccacctgccccctcatatttcgaacaattatcaacgcctcgaacatttcgactag

SEQ ID NO: 274311 - DNA, 1119 bp, Artificial Sequence
  derived and/or modified sequence
atggatgtgctgagccccctgtccttcatcaaggtgagccacgtgaggatgcagggcatcctgctgctggtgtttgccaagtaccagcacctgccctacatccagatcctgagcaccaagagcacccccaccggcctgtttggctactggggcaacaagggcggcgtgaacatctgcctgaagctgtatggctactacgtgtccatcatcaactgccacctgcccccccacatcagcaacaactaccagaggctggagcactttgaccgcatcctggagatgcagaactgtgagggccgggacatccccaacatcctggaccatgacctgatcatctggtttggagacatgaacttcagaattgaggactttggcctgcactttgtgcgggagagcatcaagaaccgctgctacggcggcctgtgggagaaggaccagctgagcatcgccaagaagcatgaccccctgctgcgggagttccaggagggccgcctgctcttcccccccacctacaagtttgacaggaacagcaatgactatgacaccagcgagaagaagaggaagccagcctggacagaccgcatcctgtggaggctgaagaggcagccctgtgccggccctgacacccccatccccccagccagccacttcagcctgagcctgcggggctacagcagccacatgacctacggcatcagtgaccacaagcctgtgtctggcacctttgacctggagctgaagcccctggtgtctgcccccctgattgtgctgatgcctgaggacctgtggacagtggagaatgacatgatggtgtcctacagcagcaccagtgacttccccagcagcccctgggactggattggcctgtacaaggtgggcctgagagatgtgaatgactatgtgtcctatgcctgggtgggggacagcaaggtgtcctgcagcgacaacctgaaccaggtgtacatcgacatcagcaacatccccaccacagaagatgagttcctgctgtgctactacagcaacagcctgcggtctgtggtgggcatcagccggcccttccagatccccccaggcagcctgcgggaggaccccctgggggaggcccagccccagatctag

SEQ ID NO: 274312 - DNA, 270 bp, Artificial Sequence
  derived and/or modified sequence
atggatgtgctgagccccctgtccttcatcaaggtgagccacgtgaggatgcagggcatcctgctgctggtgtttgccaagtaccagcacctgccctacatccagatcctgagcaccaagagcacccccaccggcctgtttggctactggggcaacaagggcggcgtgaacatctgcctgaagctgtatggctactacgtgtccatcatcaactgccacctgcccccccacatcagcaacaactaccagaggctggagcactttgattag

SEQ ID NO: 274313 - DNA, 1119 bp, Artificial Sequence
  derived and/or modified sequence
atggacgtgctgagccccctgagcttcatcaaggtgagccacgtgcggatgcaaggaatcctgttattggtattcgccaagtatcaacacttgccttacatacagattctgtcaacaaaaagcactccgacgggactgttcggttactggggcaataaaggcggggtcaatatctgccttaagctctatggctactatgtgtccatcatcaactgtcatctgcccccccatatttctaataattatcagagacttgaacactttgataggattttagagatgcagaattgcgagggtagggatattccgaatatcctggaccacgatctgataatttggttcggtgatatgaacttcagaatcgaggactttggactgcactttgtgagggagtcaatcaagaatcgatgttatgggggactctgggaaaaggaccagctgtcgatcgccaagaagcacgacccgctcttgcgggaattccaagaaggcaggcttctgttcccacctacgtacaagttcgatcggaatagtaacgactatgacacctcagaaaaaaagcggaaaccagcatggacagacaggatactgtggcggctgaaacgccagccgtgtgcaggcccagatacgcctataccccccgcgagccattttagcctatccctccgaggctattcctctcatatgacctatgggatcagcgatcacaaaccagtgtcaggtacgttcgacctagaacttaaacctttggtttccgctccccttattgtgctgatgcctgaagacctatggactgttgagaatgatatgatggtgtcttattctagcacgagcgactttccttcttccccttgggactggattggcctctacaaggtcggcctgagggatgttaacgattacgtatcgtacgcatgggtgggggactcaaaagtttcgtgctccgacaaccttaaccaggtttacatcgatatcagtaatatccctacgacggaggatgagtttctcctgtgctattatagcaactctctccgatcggtcgtcggaatttcccggcccttccagatacctcccggcagtctcagggaggacccactaggggaggcccagccccagatttag

SEQ ID NO: 274314 - DNA, 1507 bp, Artificial Sequence
  derived and/or modified sequence
agaaaaacagtccgcgacagctaggcgcgtgagaccggccgcccgcagggctgctctggccgggacccgctggccgggagacgcgaacctgccggaccaccgcgcggggacgacggcggccatgagctcgcggaagctgagcgggccgaaaggcaggaggctcaggtctcccatgtccgtatgcaggggatcctcttactggtctttgccaagtatcagcatttgccctatatccagattctgtctactaaatccacccccactggcctgtttgggtactgggggaacaaaggtggagtcaacatctgcctgaagctttatggctactatgtcagcatcatcaactgccacctgcctccccacatttccaacaattaccagcggctggagcactttgaccggatcctggagatgcagaattgtgaggggcgagacatcccaaacatcctggaccacgacctcattatctggtttggagacatgaactttcggatcgaggactttgggttgcactttgttcgggaatccattaaaaatcggtgctacggtggcctgtgggagaaggaccagctcagcattgccaagaaacatgacccgctgctccgggagttccaggagggccgcctactcttcccgcccacctacaagtttgataggaactccaacgactatgacaccagtgagaaaaaacgcaagcctgcatggaccgatcgcatcctgtggaggctgaagcggcagccctgtgctggccccgacactcccataccgccggcgtcacacttctccttgtctctgaggggctacagcagccacatgacgtacggcatcagcgaccacaagcctgtctccggcacgttcgacttggagctgaagccattggtgtctgctccgctgatcgtcctgatgcccgaggacctgtggaccgtggaaaatgacatgatggtcagctactcttcaacctcggacttccccagcagcccgtgggactggattggactgtacaaggtggggctgcgggacgttaatgactacgtgtcctatgcctgggtcggggacagcaaggtctcctgcagcgacaacctgaaccaggtttacatcgacatcagcaatatccctaccactgaagatgagtttctcctctgttactacagcaacagtctgcgttctgtggtggggataagcagacccttccagatcccgcctggctccttgagggaggacccactgggtgaagcacagccacagatctgagccaggatgggagtgaatcccaggcggaggccagagctggcagccagctctgcctttccactgccgggagtgctgggggcccagcctggccccctgaagagacagccaagtgtcgtccacatactcctcccagagtgagctctaaccaggctcatttgctctctccactactcatctctggaattagccgcttaaatacaggtttttgttgctgagatgtgagtgaaaccagctagtgtgtcaacagtgaagacct

SEQ ID NO: 274315 - DNA, 1119 bp, Artificial Sequence
  derived and/or modified sequence
atggacgtgctgagccccctgagcttcatcaaggtgagccacgtgagaatgcaaggtattctcctactagtgtttgcaaagtaccagcatctaccatacatccagatcctgtccacaaagtcaacacccacaggattgtttgggtattggggaaataagggcggagtgaacatttgtttgaagctgtacggctattacgtctcaatcatcaattgccacctcccaccgcatatcagcaataactaccagcgattagagcactttgatagaatcttggaaatgcaaaattgcgagggtcgtgatattccaaatatattagatcacgatcttataatctggttcggcgatatgaattttcgtatcgaagactttggcctacactttgttagggaatccattaaaaataggtgctatggtggcctgtgggagaaagatcagctgtccatcgcaaagaaacatgatccactgctgcgtgagttccaggagggtcggctgcttttccctccaacatacaaattcgacagaaatagcaatgactacgatacatccgagaagaagcggaagccagcttggaccgatcggattttgtggcgactgaaacgacagccctgtgccggacccgacaccccgataccacctgccagccacttctctctaagtctaagaggctattcaagccacatgacatacgggatctcagaccataaacctgtgtccggcacgtttgacctggagctgaagcccctggtgagtgcacccctaatcgtccttatgcctgaggatctgtggacagtggagaacgacatgatggtgtcatattcatccacttccgactttccatccagcccctgggattggataggactgtataaggtgggactccgggatgttaacgattatgtgtcctatgcatgggttggtgattccaaggtgtcatgtagcgataatctgaaccaagtgtacattgacatttcaaatatcccaaccactgaagatgagttccttctctgttactatagcaattctcttcggtctgttgtgggtatcagtcgcccgttccagatcccgcccggcagcctgagggaggaccccctcggggaagcacagccgcagatttag

SEQ ID NO: 274316 - DNA, 1119 bp, Artificial Sequence
  derived and/or modified sequence
atggacgtgctgagccccctgagcttcatcaaggtgagccacgtgaggatgcaggggatcctgttactggtgttcgcgaaataccagcacttaccctacattcaaatcttgtctactaagtccacccccaccggactgttcgggtactgggggaataaaggtggcgtgaacatttgcctgaaattgtacgggtactatgtgtcgatcatcaactgccacctgcccccccatattagtaataactatcagcgactggagcacttcgaccgtatattagaaatgcagaactgtgagggcagggatatccccaacattctcgaccacgacttgattatttggtttggagatatgaatttcagaattgaggatttcgggctgcattttgtaagggaatcaatcaagaacaggtgctatggcggactatgggaaaaagaccagctgagtatcgccaaaaaacacgatcctttgttgcgagagtttcaggagggaagactgctgtttcctccaacgtataaattcgacaggaacagcaacgattacgacaccagcgagaaaaagaggaaacccgcatggacagaccgcattctttggaggctgaagcggcagccttgcgctggacccgatactcccatacctccggcctcccacttctctctgtccctccgcgggtacagttcacatatgacctacggaatcagtgatcacaagcctgttagtggaacattcgaccttgaactcaaacccctggttagtgcccccctcatcgtgttaatgccagaggatttgtggacagtcgagaatgatatgatggtaagctatagctccacatctgattttccatcgtcaccatgggattggatcgggctctacaaagtcggcttgcgggatgtgaatgactatgtgtcctatgcctgggttggggattctaaggtctcctgtagcgataatttgaaccaagtatatatagacatcagcaatattccaaccactgaagatgaatttctgctctgttattattctaatagtctgcgatccgtcgtggggataagcagaccgttccagattcctcctggcagtctgcgggaggacccacttggcgaggcccagccacagatctag

SEQ ID NO: 274317 - DNA, 270 bp, Artificial Sequence
  derived and/or modified sequence
atggacgtgctgagccccctgagcttcatcaaggtgagccacgtgagaatgcaaggtattctcctgctcgtcttcgctaaataccagcatctgccctacatccaaatattgtcaacaaaatcaactcctaccgggttatttggctactggggaaataagggaggagtgaacatctgtctcaaactgtatgggtactatgtatcaataatcaattgccacctgcctccccacatcagcaacaactatcagagactcgaacatttcgattag

SEQ ID NO: 274318 - DNA, 1119 bp, Artificial Sequence
  derived and/or modified sequence
atggacgtcctgtcccccctcagctttatcaaggtgtcacacgtgcgaatgcagggcatactgcttctggtgttcgccaaataccagcacctaccctacatacagatactgagcactaaatctacccctaccgggctgtttggttattggggtaacaaaggaggggtcaacatctgtctaaaactgtacggatattatgtgtcaatcattaactgccacttgccccctcacatatcaaacaattatcagaggctggaacacttcgatcgaatccttgaaatgcagaactgcgaaggccgagacattcctaacattctggaccatgacctgattatatggttcggggatatgaactttcggattgaggattttgggttacacttcgtgagagagagtattaagaatcgatgctacgggggtctctgggaaaaggaccagttgagcatagcaaaaaaacatgatcccctgctgcgcgagttccaagagggaaggctcctatttcctcccacgtacaaattcgataggaattccaatgattacgacacatcagagaaaaagagaaagccagcttggaccgaccgcatcctgtggcgcctcaaacgacagccttgcgccggacctgacaccccgatcccgcctgcatcccattttagcctctcattgaggggctacagctctcacatgacctacgggatcagcgaccataaacctgtatccggaacattcgacctggaactgaagcccctggtgtctgctcccctgattgttctaatgccagaggacctgtggacagtagagaacgacatgatggtatcttactcaagtacgtccgactttccaagttcaccatgggattggataggcctgtacaaggttggactccgcgacgtgaacgattacgtgagttatgcatgggtgggggatagcaaagtctcatgtagcgacaacttgaatcaggtgtacattgacatctctaacatacccaccaccgaagacgaattcctgctgtgctattattcaaatagcctccggagcgttgtgggtatcagccgcccttttcagatcccccctggctcactcagggaggatcctctgggggaagcgcagccgcagatttag

SEQ ID NO: 274319 - DNA, 1119 bp, Artificial Sequence
  derived and/or modified sequence
atggacgtgctgtccccactgagcttcatcaaagtgtcacacgtgcgtatgcagggaatcctcctgttagtgttcgcaaagtaccagcatctcccttatatacagattctctcaactaagtcgacacctacgggcttattcggttattggggcaataaaggtggggttaatatctgtcttaaactctatggttactacgtctctataattaactgccatttgcctcctcacatctctaataattaccagagactggaacactttgatcggatcctcgaaatgcagaactgtgaaggcagagatatccctaatatcctcgatcacgacctgattatttggtttggtgatatgaacttcagaatcgaggattttggcctgcattttgtcagggagtcaatcaaaaatcggtgctatggaggactgtgggagaaggaccaactgagtattgccaaaaagcacgatccattgttacgagaattccaggaaggcaggctcctgttcccaccaacttataaatttgacagaaacagcaacgattatgacacatcggagaagaaaagaaagccggcttggactgacagaattttatggaggcttaagagacagccttgtgcaggacctgataccccaatacctcccgcaagccatttctcactgtccctgaggggctactcctctcatatgacatatggcattagtgaccataagcctgtctctgggacctttgacctagagctgaaacccctggtgtccgcgccattaatcgtgctgatgcccgaggacctgtggacggtagagaacgacatgatggtgtcctactccagtacctcagatttcccctcatccccttgggactggatcggcctgtataaggtgggtctccgggatgtcaatgattatgtctcttacgcctgggtaggcgacagcaaggtcagttgctctgacaatctgaatcaggtgtacatcgatatttccaacataccaacaactgaggacgagttcctgctatgctactactccaatagcctgaggtctgtagtcgggatctctaggccatttcagatccctcctggctctctgcgggaggaccccctgggagaagctcagcctcagatctag

SEQ ID NO: 274320 - DNA, 1119 bp, Artificial Sequence
  derived and/or modified sequence
atggatgttctctcgcccttgtcctttatcaaggtatctcatgtgcgcatgcagggtattctcctgctggtgtttgcaaagtaccagcatctgccctacatccagattctatccacaaaatctacacccaccgggctgtttgggtactggggtaacaaaggcggtgtcaacatctgtctcaagctctacggatattatgtctccatcattaactgccatttaccaccccacattagtaacaattatcagcggcttgaacacttcgacaggattctcgagatgcagaattgcgaagggagggatattccaaacatattggatcatgacctcatcatctggtttggcgatatgaacttccgcatcgaggacttcggactacatttcgtgagggaaagtattaagaacagatgctatggcggtctatgggagaaagaccaactgagcatcgctaagaagcatgacccactgctgcgagaattccaggaaggcaggctgttgttccccccaacttacaaatttgatcgcaatagtaacgactatgataccagtgagaagaagcgaaagcctgcctggacagacaggattctctggcgactgaagagacagccatgtgcgggaccggataccccgattccaccagcctcccattttagcctctcacttcgcggatactcatctcatatgacctatgggatttctgatcacaaacccgtttccggaacctttgacctcgaactgaagccacttgtcagtgcgcctctgattgtattgatgccagaagatctgtggaccgtagaaaacgacatgatggtgagttactcttccacctctgatttcccatctagtccatgggattggataggcttgtacaaggtggggctccgcgatgttaacgattacgtgagctacgcctgggtgggtgactctaaagtgagttgctccgataacctgaaccaggtgtatatcgatatatccaatatccccaccacagaagacgagttcctactgtgctactacagcaactccctgcggtccgtggtcgggatctcacggccatttcaaataccaccgggatctctaagagaagatcccctcggggaggcccagccccagatctag

SEQ ID NO: 274321 - DNA, 270 bp, Artificial Sequence
  derived and/or modified sequence
atggacgttctctcacctctgtcattcattaaagtgtctcatgtgcgcatgcagggcatactactcctggtatttgctaagtaccaacacctgccttacattcagatcttgagcaccaagagcactccaaccggtttgttcggatattggggaaataagggtggcgtgaatatatgtttaaaattatacgggtactatgtcagcatcataaattgtcatctaccaccccacatctcaaataattatcaacgcctggaacattttgactag

SEQ ID NO: 274322 - DNA, 1119 bp, Artificial Sequence
  derived and/or modified sequence
atggacgtgctgagccccctgagcttcatcaaggtgagccacgtgagaatgcagggcatcctgctgctggtgttcgccaagtaccagcacctgccctacatccagatcctgagcaccaagagcacccccaccggcctgttcggctactggggcaacaagggcggcgtgaacatctgcctgaagctgtacggctactacgtgagcatcatcaactgccacctgcccccccacatcagcaacaactaccagagactggagcacttcgacagaatcctggagatgcagaactgcgagggcagagacatccccaacatcctggaccacgacctgatcatctggttcggcgacatgaacttcagaatcgaggacttcggcctgcacttcgtgagagagagcatcaagaacagatgctacggcggcctgtgggagaaggaccagctgagcatcgccaagaagcacgaccccctgctgagagagttccaggagggcagactgctgttcccccccacctacaagttcgacagaaacagcaacgactacgacaccagcgagaagaagagaaagcccgcctggaccgacagaatcctgtggagactgaagagacagccctgcgccggccccgacacccccatcccccccgccagccacttcagcctgagcctgagaggctacagcagccacatgacctacggcatcagcgaccacaagcccgtgagcggcaccttcgacctggagctgaagcccctggtgagcgcccccctgatcgtgctgatgcccgaggacctgtggaccgtggagaacgacatgatggtgagctacagcagcaccagcgacttccccagcagcccctgggactggatcggcctgtacaaggtgggcctgagagacgtgaacgactacgtgagctacgcctgggtgggcgacagcaaggtgagctgcagcgacaacctgaaccaggtgtacatcgacatcagcaacatccccaccaccgaggacgagttcctgctgtgctactacagcaacagcctgagaagcgtggtgggcatcagcagacccttccagatcccccccggcagcctgagagaggaccccctgggcgaggcccagccccagatctag

SEQ ID NO: 274323 - DNA, 1071 bp, Artificial Sequence
  derived and/or modified sequence
atgcagggcatcctgctgctggtgttcgccaagtaccagcacctgccctacatccagatcctgagcaccaagagcacccccaccggcctgttcggctactggggcaacaagggcggcgtgaacatctgcctgaagctgtacggctactacgtgagcatcatcaactgccacctgcccccccacatcagcaacaactaccagagactggagcacttcgacagaatcctggagatgcagaactgcgagggcagagacatccccaacatcctggaccacgacctgatcatctggttcggcgacatgaacttcagaatcgaggacttcggcctgcacttcgtgagagagagcatcaagaacagatgctacggcggcctgtgggagaaggaccagctgagcatcgccaagaagcacgaccccctgctgagagagttccaggagggcagactgctgttcccccccacctacaagttcgacagaaacagcaacgactacgacaccagcgagaagaagagaaagcccgcctggaccgacagaatcctgtggagactgaagagacagccctgcgccggccccgacacccccatcccccccgccagccacttcagcctgagcctgagaggctacagcagccacatgacctacggcatcagcgaccacaagcccgtgagcggcaccttcgacctggagctgaagcccctggtgagcgcccccctgatcgtgctgatgcccgaggacctgtggaccgtggagaacgacatgatggtgagctacagcagcaccagcgacttccccagcagcccctgggactggatcggcctgtacaaggtgggcctgagagacgtgaacgactacgtgagctacgcctgggtgggcgacagcaaggtgagctgcagcgacaacctgaaccaggtgtacatcgacatcagcaacatccccaccaccgaggacgagttcctgctgtgctactacagcaacagcctgagaagcgtggtgggcatcagcagacccttccagatcccccccggcagcctgagagaggaccccctgggcgaggcccagccccagatctag

SEQ ID NO: 274324 - DNA, 1071 bp, Artificial Sequence
  derived and/or modified sequence
atgcagggaattttgctgttggtgtttgccaagtaccagcacctgccatacatccagatcttgagcactaagtccacccctacagggttgttcggctattgggggaataagggtggggtgaacatttgtctgaagctgtacgggtactatgtaagtattattaattgtcacctgcccccccacatcagcaacaattatcaacgactggaacacttcgatcggattttagaaatgcagaattgtgaagggcgggacatccccaatatcctagatcatgatcttatcatctggttcggggacatgaacttccggatagaagatttcggactgcattttgtccgtgagtctattaagaacagatgctacggaggactatgggagaaagaccagctctccattgccaagaaacacgatccccttctgcgcgaatttcaggagggccggctgcttttcccacccacatataagttcgatcggaatagtaatgattatgataccagtgagaagaaacggaagccagcatggaccgataggatcttatggagactcaaaagacaaccgtgcgctggacccgacacacctatccctccagcctcgcatttcagcctgtcccttagaggttatagctcgcacatgacatacgggattagtgaccacaaacctgtttccggcacatttgatcttgagctcaagcccctcgtcagcgcccccctgattgtgctgatgccggaggatttatggacagtggagaatgacatgatggtgtcttattccagtacaagtgatttccctagctcaccgtgggactggataggactgtacaaggttggattgagagatgttaacgattacgtgtcttacgcttgggtgggggattccaaagtgtcatgttccgacaacctgaaccaggtatacattgacatcagtaatatccccaccactgaagatgaattcctactctgctactacagcaattctcttcgctcagttgtcgggatctcccgtccattccagatcccgcccggtagcttacgagaggaccctctcggcgaggcacagcctcagatctag

SEQ ID NO: 274325 - DNA, 1071 bp, Artificial Sequence
  derived and/or modified sequence
atgcagggcatcctgctgctggtgtttgccaagtaccagcacctgccctacatccagatcctgagcaccaagagcacccccaccggcctgtttggctactggggcaacaagggcggcgtgaacatctgcctgaagctgtatggctactacgtgtccatcatcaactgccacctgcccccccacatcagcaacaactaccagaggctggagcactttgaccgcatcctggagatgcagaactgtgagggccgggacatccccaacatcctggaccatgacctgatcatctggtttggagacatgaacttcagaattgaggactttggcctgcactttgtgcgggagagcatcaagaaccgctgctacggcggcctgtgggagaaggaccagctgagcatcgccaagaagcatgaccccctgctgcgggagttccaggagggccgcctgctcttcccccccacctacaagtttgacaggaacagcaatgactatgacaccagcgagaagaagaggaagccagcctggacagaccgcatcctgtggaggctgaagaggcagccctgtgccggccctgacacccccatccccccagccagccacttcagcctgagcctgcggggctacagcagccacatgacctacggcatcagtgaccacaagcctgtgtctggcacctttgacctggagctgaagcccctggtgtctgcccccctgattgtgctgatgcctgaggacctgtggacagtggagaatgacatgatggtgtcctacagcagcaccagtgacttccccagcagcccctgggactggattggcctgtacaaggtgggcctgagagatgtgaatgactatgtgtcctatgcctgggtgggggacagcaaggtgtcctgcagcgacaacctgaaccaggtgtacatcgacatcagcaacatccccaccacagaagatgagttcctgctgtgctactacagcaacagcctgcggtctgtggtgggcatcagccggcccttccagatccccccaggcagcctgcgggaggaccccctgggggaggcccagccccagatctag

SEQ ID NO: 274326 - DNA, 1071 bp, Artificial Sequence
  derived and/or modified sequence
atgcagggcatcctgctgctggtgttcgccaagtaccagcacctgccttatatccagattctttctaccaaaagcactcccaccggtctctttggctattgggggaacaaaggaggcgttaacatttgccttaagctgtacggttactacgtgagcatcattaactgccacctacccccacacatatctaacaactatcagcggctggagcactttgacaggatcctggagatgcagaactgtgaaggccgggacatccccaacattctggaccacgatctgatcatctggtttggagatatgaatttccggatagaagattttggcttacacttcgtgcgagaatctatcaagaaccgttgctacggaggcctgtgggagaaggaccagctgagtatcgcaaaaaagcacgacccgttgctccgcgaattccaagaggggcggctcttgtttcctccaacctacaagttcgatagaaactctaacgactacgacacctccgagaaaaagcggaagccagcctggaccgaccggattttgtggaggcttaagaggcaaccatgcgccggccctgacacacctattcctccggcttcacatttctccctgtctttgaggggctatagtagccacatgacgtacggcatcagtgatcataagccagtctccggcaccttcgacctggagctgaagcccctggtctcagccccacttatagtccttatgcccgaagacttatggacagttgagaacgatatgatggtgagctacagttcaaccagtgattttccctcaagtccatgggactggattgggctgtacaaggtggggcttagagacgtcaatgactatgtgtcatacgcctgggtgggggactctaaagtgagttgttccgacaatctcaaccaggtttatatcgacatctccaatattcctacaactgaagatgaatttcttctgtgctactattctaactccctgcgttccgtagtgggcatatccaggcccttccaaatcccccctggatcacttagagaagatccactcggcgaagcccagccccaaatttag

SEQ ID NO: 274327 - DNA, 1071 bp, Artificial Sequence
  derived and/or modified sequence
atgcagggcattttgctactcgttttcgcgaagtatcagcacctgccctacattcagatattgagtacaaagagtactcctaccggcttgtttggctactggggcaataaagggggtgtgaatatttgtcttaaactatacggttactatgtgtctattattaactgtcatctgcccccacatatttccaacaactaccagaggctcgaacactttgaccggattttagagatgcagaattgtgaaggtagggatattcccaatatattggaccatgatctgattatctggtttggggacatgaacttcaggatcgaagacttcggtctgcattttgtgcgggagtctatcaagaatcgttgctacgggggactatgggaaaaggaccaattgtccattgcaaaaaaacatgaccccttgctccgggagttccaggagggcaggttgctctttcccccaacttataagtttgacagaaacagcaatgactacgacacgtcagaaaagaaaagaaagcccgcatggactgataggattctgtggagacttaagcggcagccctgcgcgggtcccgatactcctattcccccagcttcacacttttccctgtctctccgcggatactctagtcacatgacctacggtatcagcgaccacaagccagtatccggaaccttcgatctcgaacttaaacctcttgtttccgcccctttgattgtgctgatgccagaagacctctggactgttgagaacgatatgatggtctcctattcctcgacttcagattttcccagcagtccctgggattggatcggactttacaaggtgggactgagagatgtcaatgattacgtaagctatgcatgggtgggtgattctaaagttagttgtagcgataatcttaatcaggtgtacatcgacatctccaatatcccaaccacggaagatgagtttcttctgtgctactactccaattcccttcgcagtgtcgtgggtataagtcggcctttccagatccctccaggcagcctgagggaggaccctcttggagaagcccagccacagatatag

SEQ ID NO: 274328 - protein, 491 aa, Artificial Sequence
  derived and/or modified sequence
MALLWGLLVLSWSCLQGPCSVFSPVSAMEPLGRQLTSGPNQEQVSPLTLLKLGNQEPGGQTALKSPPGVCSRDPTPEQTHRLARAMMAFTADLFSLVAQTSTCPNLILSPLSVALALSHLALGAQNHTLQRLQQVLHAGSGPCLPHLLSRLCQDLGPGAFRLAARMYLQKGFPIKEDFLEQSEQLFGAKPVSLTGKQEDDLANINQWVKEATEGKIQEFLSGLPEDTVLLLLNAIHFQGFWRNKFDPSLTQRDSFHLDEQFTVPVEMMQARTYPLRWFLLEQPEIQVAHFPFKNNMSFVVLVPTHFEWNVSQVLANLSWDTLHPPLVWERPTKVRLPKLYLKHQMDLVATLSQLGLQELFQAPDLRGISEQSLVVSGVQHQSTLELSEVGVEAAAATSIAMSRMSLSSFSVNRPFLFFIFEDTTGLPLFVGSVRNPNPSAPRELKEQQDSPGNKDFLQSLKGFPRGDKLFGPDLKLVPPMEEDYPQFGSPK

SEQ ID NO: 274329 - DNA, 2263 bp, Artificial Sequence
  derived and/or modified sequence
gggacttgaaaaactggagcctgttcttggcaagaagattctaatgcccaggaacatggcgctgctctgggggctcctggtgctcagctggtcctgcctgcaaggcccctgctccgtgttctcccctgtgagcgccatggagcccttgggccggcagctaactagcgggccgaaccaggagcaggtgtccccacttaccctcctcaagttgggcaaccaggagcctggtggccagactgccctgaagagtcccccaggagtctgcagcagagaccccaccccagagcagacccacaggctggcccgggccatgatggccttcactgccgacctgttctccctggtggctcaaacgtccacctgccccaacctcatcctgtcacccctgagtgtggccctggcgctgtctcacctggcactaggtgctcagaaccacacgttgcagaggctgcaacaggtgctgcacgcaggctcagggccctgcctcccccatctgctgagccgcctctgccaggacctgggccccggcgcgttccgactggctgccaggatgtacctgcagaaaggatttcccatcaaagaagatttcctggaacaatccgaacagctatttggggcaaagcccgtgagcctgacgggaaagcaggaagatgacctggcaaacatcaaccaatgggtgaaggaggccacggaggggaagattcaggaattcctctctgggctgccggaagacaccgtgttgcttctcctcaacgccatccacttccagggtttctggaggaacaagtttgacccgagccttacccagagagactccttccacctggacgagcagttcacggtgcccgtggaaatgatgcaggcccgcacgtacccgctgcgctggttcttgctggagcagcctgagatccaggtggctcatttcccctttaagaacaacatgagctttgtggtccttgtacccacccactttgaatggaacgtgtcccaggtactggccaacctgagttgggacaccctgcacccacctctggtgtgggagaggcccaccaaggtccggctgcctaagctgtatctgaaacaccaaatggacctggtggccaccctcagccagctgggcctgcaggagttgttccaggccccagacctgcgtgggatctccgagcagagcctggtggtgtccggcgtgcagcatcagtccaccctggagctcagcgaggtcggcgtggaggcggcggcggccaccagcattgccatgtcccgcatgtccctgtcctccttcagcgtgaaccgccccttcctcttcttcatcttcgaggacaccacaggccttcccctcttcgtgggcagcgtgaggaaccccaaccccagtgcaccgcgggagctcaaggaacagcaggattccccgggcaacaaggacttcctccagagcctgaaaggcttcccccgcggagacaagcttttcggccctgacttaaaacttgtgccccccatggaggaggattacccccagtttggcagccccaagtgaggggccgtggctgtggcatccagagtccctgcctggaccagcctctccactcatgtgactctttccaaccggctttgtggcactggggcaggggccgggggcagtctgagagaggccattctttcccaacacctcttggggagtttagggtggggggggggcgcggctgggaggagggcaggcatcggggagccgggagcctgaccctcatctttcttccaaacaggctcagagggtgtcctgcaccggggcctgggcaggagggaggtgcttctagttctgccaggagacaggttagctgctccccacgtcagctgggacaccccgacttttgtttaccagagaaaaagggagggggagagggctgcctttggacttgtcccgggacacctaggctagggtggggagagacgggccctggtggtggctcgggaggcgaagcgttgtcctcagccccgcgtggaactcgtgtctggcacagcctggctgtggcctaacctgccgagagtccatcagcctccatcctaccccctgtgccttgtcacgccagacttcccacggctcctcgagatcccaacactgccagcatttcccttccttcctctcctgtctccctcctctgcccgggagctcaggaaccgaggcagggaaggatcccatgagctccttaaggctcttttgtaaggtttttgtagtgatttttatgccacctgaataaagaatgaatgggcc

SEQ ID NO: 274330 - DNA, 842 bp, Artificial Sequence
  derived and/or modified sequence
cctgggcagagagtgaggagcacccaagtggggccagaggaacgttgtgtgtggcagcaaggagcccgcagaggaacatggcgctgctctgggggctcctggtgctcagctggtcctgcctgcaaggcccctgctccgtgttctcccctgtgagcgccatggagcccttgggccggcagctaactagcgggccgaaccaggagcaggtgtccccacttaccctcctcaagttgggcaaccaggagcctggtggccagactgccctgaagagtcccccaggagtctgcagcagagaccccaccccagagcagacccacaggctggcccgggccatgatggccttcactgccgacctgttctccctggtggctcaaacgtccacctgccccaacctcatcctgtcacccctgagtgtggccctggcgctgtctcacctggcactaggtgctcagaaccacacgttgcagaggctgcaacaggtgctgcacgcaggctcagggccctgcctcccccatctgctgagccgcctctgccaggacctgggccccggcgcgttccgactggctgccaggatgtacctgcagaaaggatttcccatcaaagaagatttcctggaacaatccgaacagctatttggggcaaagcccgtgagcctgacgggaaagcaggaagatgacctggcaaacatcaaccaatgggtgaaggaggccacggaggggaagattcaggaattcctctctgggctgccggaagacaccgtgttgcttctcctcaacgccatccacttccagggtttctggaggaacaagtttgacccgagccttacccagagagactccttc

SEQ ID NO: 274331 - DNA, 1473 bp, Artificial Sequence
  derived and/or modified sequence
atggccctgctgtggggcctgctggtgctgagctggagctgcctgcagggcccctgcagcgtgttcagccccgtgagcgccatggagcccctgggccgccagctgaccagcggccccaaccaggagcaggtgagccccctgaccctgctgaagctgggcaaccaggagcccggcggccagaccgccctgaagagcccccccggcgtgtgcagccgcgaccccacccccgagcagacccaccgcctggcccgcgccatgatggccttcaccgccgacctgttcagcctggtggcccagaccagcacctgccccaacctgatcctgagccccctgagcgtggccctggccctgagccacctggccctgggcgcccagaaccacaccctgcagcgcctgcagcaggtgctgcacgccggcagcggcccctgcctgccccacctgctgagccgcctgtgccaggacctgggccccggcgccttccgcctggccgcccgcatgtacctgcagaagggcttccccatcaaggaggacttcctggagcagagcgagcagctgttcggcgccaagcccgtgagcctgaccggcaagcaggaggacgacctggccaacatcaaccagtgggtgaaggaggccaccgagggcaagatccaggagttcctgagcggcctgcccgaggacaccgtgctgctgctgctgaacgccatccacttccagggcttctggcgcaacaagttcgaccccagcctgacccagcgcgacagcttccacctggacgagcagttcaccgtgcccgtggagatgatgcaggcccgcacctaccccctgcgctggttcctgctggagcagcccgagatccaggtggcccacttccccttcaagaacaacatgagcttcgtggtgctggtgcccacccacttcgagtggaacgtgagccaggtgctggccaacctgagctgggacaccctgcacccccccctggtgtgggagcgccccaccaaggtgcgcctgcccaagctgtacctgaagcaccagatggacctggtggccaccctgagccagctgggcctgcaggagctgttccaggcccccgacctgcgcggcatcagcgagcagagcctggtggtgagcggcgtgcagcaccagagcaccctggagctgagcgaggtgggcgtggaggccgccgccgccaccagcatcgccatgagccgcatgagcctgagcagcttcagcgtgaaccgccccttcctgttcttcatcttcgaggacaccaccggcctgcccctgttcgtgggcagcgtgcgcaaccccaaccccagcgccccccgcgagctgaaggagcagcaggacagccccggcaacaaggacttcctgcagagcctgaagggcttcccccgcggcgacaagctgttcggccccgacctgaagctggtgccccccatggaggaggactacccccagttcggcagccccaag

SEQ ID NO: 274332 - DNA, 1473 bp, Artificial Sequence
  derived and/or modified sequence
atggcactgttgtgggggctcctggtcctgtcgtggtcctgcctccaagggccctgcagcgtcttttcgccagtgtccgccatggaacctctcggtagacagcttacgagcgggcccaaccaggaacaagtttcccctcttacccttttgaagctcggaaaccaggaaccaggaggccagaccgcactgaagtcgccacctggagtgtgctcgcgagatcctacccctgagcagacgcatcgtcttgcaagagcaatgatggcatttactgcagatttgttcagcctggtcgcacagacttcgacttgtcctaaccttattctctcacctctctcagtggcacttgcactgagccaccttgccctgggtgcgcagaaccataccctgcaaagacttcagcaagtcttgcatgctggaagcggaccatgccttcctcatcttctctcccgactgtgtcaagaccttggaccaggagcttttagactggcggcacggatgtacctgcaaaagggttttccaattaaggaggatttccttgagcagagcgaacagctgtttggtgccaagccagtctcgcttactggcaagcaagaagatgaccttgcaaacatcaaccagtgggtgaaggaagcgactgaaggtaagatccaagagttccttagcggactgcccgaggataccgtgctgcttcttctgaatgcaattcacttccaggggttctggcggaacaagtttgatccatcactgactcagagagactcctttcatctggatgagcaatttaccgtccctgtggaaatgatgcaggcaagaacttaccctctgcgctggttcttgctggaacaaccagagatccaggtcgcacattttccgttcaaaaacaacatgtcctttgtcgtccttgtgcccactcactttgaatggaatgtgagccaagtgctggcaaacttgagttgggataccctgcatcctcctctggtgtgggagcggcccaccaaggtcagactgccgaagttgtacctgaagcaccaaatggatctggtggcaactctgtctcagcttggactgcaggaattgtttcaagctccagaccttcgggggatttccgaacagtcactggtcgtgtccggagtgcagcatcaatcaacccttgaactttcggaggtgggcgtcgaagcggcagcagcaacctcaatagctatgtcccgcatgtctctctcgtccttttcggtgaaccgccccttcctgttcttcatctttgaagatactactggcctgcctctctttgtcggttcagtgaggaaccctaatccttcggcaccccgggaacttaaggaacaacaagattctcctggtaataaggatttccttcaatcactcaagggtttccctagaggggataagttgtttgggcctgaccttaagctcgtgccacccatggaagaagattacccacagttcggatcacccaag

SEQ ID NO: 274333 - DNA, 1473 bp, Artificial Sequence
  derived and/or modified sequence
atggcactgctatggggactgctagtcctttcttggagctgtttgcagggcccatgttccgtcttctctcccgtgtcagccatggagcctctgggccggcagctcaccagcggacccaaccaggagcaggtatcacccctgaccctcctgaagcttgggaaccaggagcccggcggccaaacagcgctgaagtcaccccctggggtgtgcagcagagaccccacccccgagcagactcacagattggcaagagctatgatggcattcaccgcagacttgttctccttagtggcccagacatctacctgccccaatctgatcctgtcccctctgtcagtcgcacttgcattgtcgcatctggccctaggcgcacagaatcatacactccagcgcctgcagcaggttctgcacgccggaagcggtccctgtctgcctcatctgctgtccaggctttgtcaagatcttggcccaggggccttcagactggccgctagaatgtacctgcagaaggggttccccatcaaggaagatttcctcgagcagagtgagcagcttttcggcgctaaaccagtgtctctgaccggcaagcaggaagacgacctggctaacatcaaccagtgggtgaaggaagctacagagggtaagatccaagagttcctgagcggccttcccgaagataccgtgctgttgctgctgaatgcaattcactttcaaggcttctggcgaaataaatttgacccatccttgactcagcgggacagtttccacctggacgagcagtttacagtcccagtagagatgatgcaggccagaacataccctttacgttggtttttgttggagcagccagagatacaggtcgcgcatttcccgtttaagaacaatatgagtttcgtcgttctggtgcctacccatttcgagtggaatgtcagccaggtgctggcaaacctgtcttgggataccctccaccccccactcgtctgggagcggcccacaaaggtacggctccccaaactgtaccttaaacaccagatggatctggtggctacactgagccagttaggtctgcaggagttattccaagcccccgatctgcgcggcatctcagaacagtcactggtagtttccggcgtccagcatcaaagtactctggaactttccgaggtcggcgtcgaagccgcagccgccaccagcatagctatgtcaagaatgtcactgagctccttctctgtgaaccggcccttcctgtttttcatcttcgaggacaccacagggttacccctattcgttggctccgttcggaacccaaacccttctgccccacgcgagcttaaggaacaacaggattcgcctggtaataaagattttctgcaatctctcaaaggcttccctcggggggacaagctgttcgggcctgatctgaagctggtgccgccaatggaggaagactatccgcagtttggttcgcctaag

SEQ ID NO: 274334 - DNA, 1473 bp, Artificial Sequence
  derived and/or modified sequence
atggctcttctatgggggctgctcgtattaagctggagctgcctgcagggaccttgctctgtgttctctccagtgtctgctatggagcccttgggaaggcaactgacctcaggtcctaaccaggaacaagtctctcctctaacgctgctgaagctgggtaatcaagaacctggcgggcaaacagctctaaagtccccgccaggcgtgtgtagtagagacccgacacctgaacaaactcaccgactggcacgggctatgatggctttcaccgccgacctattctccctcgttgctcagaccagcacatgccccaatttgattctctcacctctgagtgtggcattagccctgtcgcacttggcacttggagctcagaaccacacacttcaaagattgcagcaggtgctgcacgctgggtctggaccgtgtttgccccatctattaagtagactgtgccaggatttgggccccggcgccttcagactggcagcccgaatgtaccttcagaaaggttttccgatcaaagaagattttctcgaacagtcagagcagctgttcggcgctaaacccgtgagcctgacagggaagcaggaggacgatttagctaacatcaaccagtgggtgaaggaagccacagagggcaaaatacaggaatttttgtccggccttccagaggatactgtcttactgctgcttaacgccattcactttcaaggcttctggcggaacaagttcgatccctcactgacacagcgggatagctttcatctggatgagcagttcaccgttccagtcgagatgatgcaggcgcgcacataccctctgagatggttccttttggaacaacccgaaatccaagtggctcactttcccttcaagaataatatgagcttcgtggtgctcgtgccgacccacttcgaatggaacgtctcccaggtgcttgctaatctgagctgggacactttgcatcctcccctcgtgtgggaacgccccacgaaggttcgtctccctaagctgtatttaaagcaccaaatggaccttgtcgctactctgagccaattgggcctccaagaactgtttcaagccccggacttaagaggcatctcggaacagtccctcgtggtctcgggcgtccagcatcagtccactctggaattgtcagaggttggagtcgaagctgctgccgccacctcaatagcaatgtcgcgcatgtcattaagcagcttctcggtgaacagaccattccttttctttatattcgaagatacaacagggcttcctctgttcgtagggtctgtgcggaatccaaaccctagtgccccccgagagctgaaggagcagcaggactccccgggtaacaaggattttctgcagtccctgaaagggtttccgcgcggggacaaattgttcgggcccgacctgaaattagttccacccatggaggaggactatcctcagttcggcagccccaaa

SEQ ID NO: 274335 - DNA, 1473 bp, Artificial Sequence
  derived and/or modified sequence
atggcactgctgtggggcctgctggtgctgtcatggtcatgtctgcagggaccttgctcagtgttctctccggtgagcgcgatggagccgctgggtcgccaactgactagcggccctaatcaagaacaggtgtcgcccctcaccctgctgaagctcggaaaccaggagccaggcggacaaacggctttgaaatcccctccaggcgtgtgctcgcgcgacccgactccagagcagactcatcggctggccagggcgatgatggcatttacggccgacctgttttcccttgtcgcccagacctcgacctgccctaatctgatcctctccccattgtccgttgctttggcgctctcccatctggctctcggggcgcagaaccataccctccagcgccttcagcaggtgctgcatgcaggatcgggaccgtgtttgccccacttgctgagccggctctgtcaggatctggggccaggagcctttagactggccgcccgcatgtatctgcaaaagggctttcccatcaaggaggatttcttggaacagtcggagcagctgttcggtgccaagccagtaagcctgaccggaaagcaagaggacgacctcgcaaatatcaatcagtgggtgaaagaggccaccgaaggcaaaattcaggagtttctgtccggtttgcctgaagatactgtgctgctgctcctgaatgccatccacttccagggattttggcggaacaaattcgatccttctctgacccagcgcgattcctttcacctggacgaacaattcaccgtgccagtggagatgatgcaggcccggacgtacccactgagatggttcctgctggaacagccggagatccaagtggcacatttcccgttcaaaaacaacatgtcctttgtggtcctcgtgccaactcatttcgagtggaacgtgtcgcaagtgcttgccaacctctcctgggacactctgcaccctccgctggtgtgggaaagaccgaccaaagtgcgccttccaaagctgtacctcaaacaccagatggacctcgtggccacgctgtcccaacttggcctccaggaactgttccaggccccggatttgagaggaatcagcgaacagagcctcgttgtgtcgggagtgcaacatcaatccactctggaactctccgaagtcggggtcgaagccgctgccgccacttcgatcgctatgtccagaatgagcctctcatccttctccgtgaatagacccttcctcttcttcatcttcgaggacactactggtctgcctctcttcgtcggatcggtccgaaacccaaacccgtcagcccctcgcgagctcaaggaacaacaagactcccctggaaataaggatttcctgcagtccttgaaggggttcccaaggggagacaagctgttcggacctgatctcaagctcgtgcccccgatggaggaggactatccgcaattcggatcccctaaa

SEQ ID NO: 274336 - DNA, 1473 bp, Artificial Sequence
  derived and/or modified sequence
atggctttgctgtgggggctccttgtgctctcttggtcatgcttgcaaggaccgtgctccgtgttttccccagtgtcggccatggaaccgctgggtcggcaactgactagcggaccgaaccaggagcaggtgtctcctctgaccctcctcaagctcggaaatcaggagccaggaggccagactgccctgaagtcgcctccgggcgtttgctcaagggatcccactccggaacaaactcacaggctcgcccgggctatgatggcatttactgccgacctcttctcgttggttgcccagacttccacttgcccgaatctgatcctttcaccgctgtcggtggcgctggcgctgtctcatctggccctcggcgcacagaatcacaccctgcagcggcttcagcaggtgctgcatgctggatcaggaccgtgtctgccgcatctcttgtccaggctttgccaggatctggggccaggagcgtttcgcctcgctgcgcggatgtaccttcagaaaggattcccgatcaaggaagatttccttgagcaatccgaacaactcttcggagctaaaccggtcagcctgactggaaagcaggaggacgacctggcgaacatcaaccagtgggtcaaggaagcaaccgaaggaaagatccaagagtttctgagcggactccccgaggacaccgtgctgctgcttcttaacgccatccattttcaaggattctggcgcaacaaattcgatccttcgctgactcagagagactctttccacctggacgaacagtttaccgtgcctgtcgaaatgatgcaagcgcgcacctaccccttgcgctggttcctcctggagcagccggaaatccaggtcgcccacttcccgttcaagaataacatgagcttcgtggtgttggtcccgacccatttcgaatggaacgtgtcacaggtgctcgcaaatctgtcctgggacaccctccacccaccactggtctgggagcgcccgaccaaggtgagactgcctaaactgtacctgaagcatcagatggatctggtcgcaacgctctcgcaacttgggctccaagaattgttccaagccccggaccttagagggatctccgaacagtcgctcgtggtcagcggagtgcagcatcagagcacccttgagctgagtgaagtgggagtcgaggcggcggccgcaaccagcatcgccatgtcaagaatgagtctcagctcattctccgttaacaggccatttctgtttttcatcttcgaggatactactgggctcccactcttcgtcggaagtgtgcgcaatccgaatccgagcgctccgcgcgagctgaaggaacagcaggactcgccaggcaacaaggatttcctgcaatcgctcaagggtttccctcgcggagataagctcttcggaccggacctgaaattggtgccgccaatggaggaagattacccacaatttggcagcccgaag

SEQ ID NO: 274337 - DNA, 1473 bp, Artificial Sequence
  derived and/or modified sequence
atggctttgctttggggcctgttggtgctcagctggtcttgcctgcagggtccttgttccgttttctctccagtaagcgctatggagccgctcggcagacaactgacctcaggacccaatcaggagcaggtatctccactcactctcctgaaattgggtaatcaggaacctggtggccagacagcgctcaagagccctccaggagtgtgctcaagggacccaaccccagagcagacgcaccgcctggcgagggccatgatggcatttacagctgacctgttcagcctcgttgcacaaaccagcacttgccccaatctgatactctcccccctgtccgtggctctggcactgtcacatctggcgctgggtgcgcagaatcatactctgcaaagactccagcaggttctgcacgcgggaagtggaccgtgtctgccacatctgctgagccgcctctgtcaagaccttggaccaggtgcttttagactggccgccagaatgtatctgcagaagggcttccctatcaaagaagacttcctggagcagagtgagcagctgttcggcgccaagcccgtcagcttgaccggaaaacaagaagacgatcttgcgaatataaaccagtgggtaaaggaggcaactgagggtaagatccaagagttcctgtctggactgcctgaggatacagtgctgctcctgttgaacgctattcactttcagggattttggagaaacaagttcgatcccagccttacgcagcgcgactccttccacttggacgaacagttcactgtcccggtggagatgatgcaagctcgcacctaccctctgcgctggttccttctggagcaaccggaaatacaagtggcccacttcccgttcaagaataatatgtccttcgtcgtgctcgtaccaacacacttcgaatggaacgtcagccaggtcctggccaacctctcttgggataccctgcaccctccactggtctgggaacgcccaaccaaggttaggctccccaagctttatttgaagcatcagatggacctcgtcgcgacgctttctcagcttggtctccaggaactgtttcaggcccctgatcttagaggtatctcagagcagtccctggttgtgtcaggcgtgcagcatcagtccaccctcgagctgtctgaggtgggtgtagaagcagctgccgccacctccatagcgatgtcaaggatgtccctctcctctttcagtgtcaacaggccctttctcttctttatattcgaagacacgaccggcctgccgctgttcgtgggcagtgtgaggaacccaaacccttcagcccccagggagctgaaggaacagcaggactctcctggcaacaaggatttcctccagtcactgaagggtttcccgaggggcgacaagcttttcggcccggacttgaagctcgtgccccccatggaagaagactacccacagtttggatcacccaag

SEQ ID NO: 274338 - DNA, 1473 bp, Artificial Sequence
  derived and/or modified sequence
atggccctgctctggggactgctcgtgctctcctggtcatgcctgcaaggaccgtgctcggtcttttcgcccgtgtcggccatggagccactgggtcgacaactcacctcaggaccaaatcaggaacaagtgagcccgctcacgctgctcaaactcggaaatcaggaaccgggtggacaaaccgcgctcaagtcgccaccgggagtgtgtagcagagatccgacccctgaacagactcaccgcctggcgcgggcaatgatggccttcaccgccgacctcttctcccttgtggcccagacttctacctgtcccaacctgattctgagcccgctctccgtcgctcttgcgctttcccacctggctctgggcgcgcagaaccatactctgcaacgactgcagcaggtgctccatgcaggctcgggaccatgcctgccgcaccttctgtcccggctgtgccaagacctgggacccggagcatttcgcttggcggcacgcatgtacctgcaaaaaggcttcccgatcaaggaggattttcttgaacagtccgagcaactcttcggagcaaagccggtgtcgctgaccgggaagcaggaggacgacctggccaatatcaaccagtgggtgaaggaggccaccgaaggaaagatccaagagtttctcagcggcttgcccgaggacactgtgcttctcctgctgaacgctatccacttccagggattctggaggaataagttcgatccatccctcactcagcgggatagcttccaccttgacgagcagttcactgtgcctgtggaaatgatgcaggccagaacgtacccactgcgatggtttctgctcgaacagcccgaaattcaggtggctcatttcccgtttaagaacaacatgagcttcgtggtgcttgtgcctactcatttcgaatggaacgtgtcccaagtcctcgcgaacttgtcgtgggacaccttgcacccgccgctggtgtgggagcggccgactaaggtccggctcccgaagctctaccttaaacatcagatggatcttgtcgccaccctgtcgcaactgggattgcaggaactcttccaagcaccggatctgaggggcatctcagagcaatccctggtggtcagcggggtccaacaccaatccaccctggaactgtccgaagttggagtcgaagccgccgcggcaacttccatcgcaatgagccggatgtccctcagctcattttcggtgaatagacccttccttttcttcatcttcgaggacaccactggactgccgctgtttgtgggatcggtgcgcaacccaaatccatccgcgccacgggagctgaaggaacagcaggactcgccaggaaacaaggacttcctgcaatcacttaagggcttccctcgcggggataaactgtttggcccggatctcaagctggtccctccgatggaagaggattacccacagtttggtagccccaag

SEQ ID NO: 274339 - DNA, 1473 bp, Artificial Sequence
  derived and/or modified sequence
atggcacttctttggggactgctcgtacttagctggtcgtgccttcagggcccgtgtagcgtcttttcgcccgtgtcggcaatggagccacttggtagacagctgaccagcggaccaaaccaggagcaagtgtccccccttaccctccttaaacttggaaaccaagagcctggcgggcagaccgctctcaagtctcctccaggggtgtgttcccgtgaccctacccctgaacagactcatcgcttggcaagggcgatgatggcattcaccgcagacttgttttccctggtcgcacagacgtccacgtgtcccaaccttattctttcgcctctgtcagtggcactggcactgtcgcaccttgccttgggtgcccaaaatcatacccttcagagacttcaacaggtccttcacgcaggctccggtccttgtctgccacaccttctttcacggttgtgccaggatcttggcccaggcgcctttcgcctggccgcacgaatgtacctgcaaaagggattcccaataaaggaagattttctggagcagtcggagcagctttttggagcgaaacctgtgtcattgactggcaaacaagaggatgatctcgccaacatcaaccaatgggtgaaagaggcaactgaaggcaaaatacaagaatttctctctgggcttcctgaggacaccgtgctgctgcttctcaatgcaatacatttccagggattttggcggaataagtttgaccccagcctgacccaacgagatagctttcacctggatgaacagttcaccgtccctgtcgaaatgatgcaagcccgcacctacccacttcggtggtttctcctggaacagccagaaatccaggtcgcacactttcctttcaagaacaatatgtccttcgttgtcctggtgccaacccattttgaatggaacgtctcccaagttctcgcaaacctgtcgtgggacactctgcatccgcctctggtctgggaaaggcctaccaaggtgaggttgcccaaactgtacctgaaacatcaaatggaccttgtggccaccctgtcacaacttggccttcaggagctgtttcaggcaccagatttgagagggatttcggaacaaagccttgtggtgtccggggtgcagcatcagagcaccctggaattgtcagaggtgggcgtcgaagcagcggcagcaactagcattgcaatgtcacgcatgagcctgtcgagcttttcagtcaaccgcccttttctgttctttatctttgaagatactactggactgccgctgttcgtgggatccgtccgtaatccaaacccatctgcaccgagggagctgaaggaacagcaagatagccctgggaataaggattttctgcagtctctcaagggtttcccaagaggagataagctctttgggccagatctgaaactggtgcctcctatggaagaggattaccctcaattcggtagccctaag

SEQ ID NO: 274340 - DNA, 1473 bp, Artificial Sequence
  derived and/or modified sequence
atggcgcttctttggggcttgcttgtgctgagctggagttgcttacaaggtccgtgttcagtattttcgcctgttagcgcaatggaacctctggggcgacaactcacatcaggaccaaatcaggaacaggtttcgccactgacccttctgaagttaggcaaccaagaaccgggagggcagacggctctgaaatctcctccgggcgtgtgcagccgcgaccctacgccggaacagactcacaggttagctagagctatgatggcatttacggccgatctgtttagcttggtagcgcaaaccagcacgtgccctaatcttattctttctccgctatctgttgcactagcactgtcccatcttgcgcttggagctcagaaccatacgctgcaacgtcttcagcaagttttgcatgcaggctctggaccctgcctcccacatttattaagccggctgtgccaagatcttgggcctggagcatttagacttgctgctcgaatgtacctccagaagggctttccaattaaagaagatttcttagagcagagcgaacagttgtttggagcaaaaccggtcagcctgactggtaagcaagaagatgacttggcaaatattaaccaatgggtgaaagaggcgactgaaggcaaaattcaggaattcctgtcaggattacctgaagatacagtactgttgcttctcaacgcaatacactttcaaggcttttggcgtaacaaatttgacccttcactgacacaacgtgatagtttccacttagatgaacagtttaccgttccggttgaaatgatgcaagcgcgtacatatcctttgcgatggtttctgctggaacaacctgaaattcaagttgcacacttcccgttcaaaaacaacatgagtttcgtggttcttgtaccgacacatttcgaatggaatgtttctcaggtcctggcaaacctttcctgggatacgcttcatcctccgttagtttgggaacgtccaacaaaagtgcgcctccctaaattgtatttgaaacatcagatggacctagtggcgacgctcagccaactggggttgcaagagctattccaggccccggacctgcgtgggatttcagagcagtccttagtagtgtcaggagtacaacatcaatctacactggagctgtctgaagtgggcgtggaagcagccgcggccacttcaatagctatgtcgcgaatgtccctttcttctttctcggttaatcgtccatttctgtttttcatttttgaggacaccacaggccttccgctctttgttggctcagtccggaatcctaatccatctgcgccgagagaactgaaagaacaacaggattctcctgggaacaaggattttctgcaatctcttaaaggatttccgagaggcgataagctttttggcccggatctgaaacttgtgcctccaatggaagaagattatcctcagtttggaagtccaaaa

SEQ ID NO: 274341 - DNA, 1473 bp, Artificial Sequence
  derived and/or modified sequence
atggccctgctctggggactcctggtcctgtcatggagctgccttcaggggccatgttccgtctttagcccagtgtccgcaatggaacccctcgggagacagctgaccagcgggcctaaccaggaacaggtgagccctctgactttgttgaaacttggcaaccaagaacccggcggacagaccgcactgaagtccccgccaggggtgtgttcccgcgatcccactcccgaacaaacccaccgtctggcacgtgcaatgatggccttcaccgcggatttgttttcgctggtggcacagacgtcaacctgtcctaatttgatcctctcccccctttccgtcgcccttgcgctcagccacttggcactcggagcacagaaccatactctgcaacggctccagcaggtgctccacgcaggatcgggtccctgtctcccccatctgctttcgcgcctgtgtcaggacctgggaccaggagcattcagacttgcagcaagaatgtaccttcagaaaggctttcctattaaggaagattttctcgaacaatccgaacaactgtttggcgctaagccagtgtcactgactggtaaacaggaggacgatctggcaaacatcaaccaatgggtgaaggaagcgactgaaggaaagatacaggagtttctctcggggcttcctgaggacactgtgcttctgctgctgaatgcaatacattttcagggattctggaggaacaagtttgatccttcgcttacgcaaagagacagctttcatctggatgaacaatttacggtccctgtcgaaatgatgcaagcacggacctatcctctccgctggttcctcctcgaacaacctgaaatccaagtggcacattttccatttaagaacaatatgtccttcgtggtccttgtgccaacccactttgaatggaacgtgagccaagtgctggcgaacctgtcatgggatactctgcatccacctctcgtgtgggaaaggcctactaaggtgcgactgcccaagctgtacctgaagcaccaaatggacctcgtggctaccctctcacagcttggattgcaggagttgtttcaagcacctgatcttcggggaattagcgaacaatcgctggtcgtcagcggagtccaacatcagagcactcttgaactctcggaagtgggcgtcgaggcagctgcagccacctccatcgccatgagcagaatgtcactgtcctcattctccgtgaatcgacctttccttttcttcattttcgaagataccactggactccctctgtttgtgggctcggtgcgaaacccaaacccttcggcacccagagaacttaaggagcagcaagattcccccggaaacaaggacttcctgcagtccctcaagggctttccgcgcggtgataagctgttcggacccgacctgaaactggtgccacctatggaagaggactacccgcaattcggttctcctaag

SEQ ID NO: 274342 - DNA, 1473 bp, Artificial Sequence
  derived and/or modified sequence
atggctctgctgtggggacttctggtcctgagctggagctgcttgcagggaccctgcagtgtgttctcgccggtcagcgctatggagcccttgggacggcaactgacttcagggccaaatcaggaacaagtgtcaccattgaccctgttgaagctgggcaaccaagaacccggcggccaaaccgccctaaagagccccccaggagtttgcagtagagatcctacccccgaacagacccaccgcctggctcgcgccatgatggcttttaccgccgacctgttctctttggtggcccagacgagtacgtgccccaacctcatcctgtccccactgtctgtggcactcgctttatcccatctagccctcggcgcacagaaccacacgctgcagagattgcaacaggtgcttcacgcaggttctgggccgtgcctacctcatctccttagcaggctgtgccaagacttggggcccggagctttccgtctggccgcaaggatgtacctgcagaagggctttccaatcaaggaggattttctggagcaatcagaacaactgtttggcgctaaacctgtgtccctgaccggcaagcaggaagatgatctcgccaacataaaccaatgggtgaaggaagccacagaaggaaagatccaggagttcctatccggactaccagaggataccgtgctactcctcctgaatgcaattcacttccagggcttttggagaaataaatttgatcccagtttgacgcagcgcgatagtttccatctagatgagcagttcacagttcctgttgagatgatgcaggcgcggacttatccattaagatggtttctgctggagcagcctgagatccaggtagcacatttcccatttaaaaataatatgagttttgtggtcctggtgcccactcatttcgaatggaacgttagtcaggtgctggcaaatttgtcctgggatactctacacccacctctagtgtgggaaaggcccaccaaagtgaggctacccaaactctatttgaaacaccagatggatcttgtggccactttaagccagctgggtttgcaggagttgttccaggcccccgatctacggggcatatctgaacaaagtctcgtagtatccggagtgcaacaccagtcaacactggaactaagcgaggttggagtggaagccgctgcagccacgtcaatcgcgatgagccgaatgagcctgtcatcctttagcgtgaatagaccctttctattttttatattcgaggacacaacaggcttgcccttgttcgtgggaagtgtgcgtaatccaaacccgagcgcccctcgcgaacttaaagagcagcaggattctcccggcaataaggattttctgcaaagtctcaaggggtttcccaggggcgataagctgttcggtcctgacctaaaactggtgcctccaatggaagaagactatccgcaattcggctcccccaaa

SEQ ID NO: 274343 - DNA, 1473 bp, Artificial Sequence
  derived and/or modified sequence
atggcacttctgtggggactgcttgtgctcagctggtcctgcctgcaaggtccatgttcggtcttttcaccagtgtcggcaatggaacctcttggacgacaacttactagcggacctaatcaagaacaggtgtcccctcttactcttctgaaacttggaaaccaagagcccggcggacagactgccctgaaaagtcccccaggtgtctgctcgcgcgatcctactccagaacaaactcatcggcttgcccgtgccatgatggcattcactgcagatcttttttcgctggtcgcccaaacttcaacttgtcctaatctcattctgtcgcctctgtccgtggcactggcactgtcccatcttgcattgggagcccagaaccacactcttcagcgcctgcagcaggtgctgcatgcaggatcaggaccttgccttccgcatttgctttccaggctttgtcaggatctgggtcctggtgcctttcgtcttgcagcaaggatgtacctgcagaaggggttcccgattaaagaggactttctcgagcaatccgaacagcttttcggggctaagccagttagcctgacggggaagcaggaggacgatctcgcaaacattaaccagtgggtgaaagaggcaacggaaggcaaaattcaagaattcctgtcgggtctgccagaggacactgtcctgctcctgctcaacgcaattcattttcagggtttttggcggaacaaatttgaccccagccttacccagagggactccttccatcttgatgaacaatttacggtgcccgtggaaatgatgcaagcgcgaacttaccctctgcgatggtttctgctggagcaacccgaaattcaggtggcacactttccgtttaagaacaacatgagctttgtcgtgctggtccccacccatttcgagtggaacgtgtcacaagtgctggctaatctgtcatgggatactttgcacccgccactcgtttgggaacgaccaactaaggtgcggctccctaaactctacctgaagcatcagatggacctggtcgccactttgtcacagcttgggcttcaggagctgtttcaagcaccggacttgcgtggaatatcggaacaatccctggtggtttcgggtgtccaacaccagagcaccctggaactgtcggaagtgggagtggaagcggctgccgccacttccattgcaatgtcccgcatgtctcttagctctttctcggtcaaccgcccgttcctgttcttcatatttgaagatacgaccgggttgcctctgtttgtgggttccgtgagaaatcccaatccctcagcaccaagagaactgaaggaacaacaagattcgcctggcaataaagatttcctccaatccctgaagggttttcccaggggggataaacttttcgggcctgatcttaagctcgtgccaccaatggaagaagattacccacagtttggatcaccaaaa

SEQ ID NO: 274344 - DNA, 1473 bp, Artificial Sequence
  derived and/or modified sequence
atggcgcttctgtggggattgctggtgctgtcctggtcctgtctgcagggcccgtgttccgtgttttcacctgtgtccgcaatggagcctctcggtcggcagctgacttcgggtcccaatcaggaacaggtgtcgccgcttactctgctgaaactgggaaaccaggagcccggaggacagactgctctgaagtccccgccaggcgtttgctcaagagatcctaccccggagcaaacgcatcgcctggcccgcgcgatgatggcgttcaccgccgacctcttcagcctggtcgcacagaccagcacctgcccgaacctgatcctgtcaccgttgagcgtagcactcgcactgagccacttggccctcggagctcaaaaccataccctgcagagattgcagcaggtgcttcatgctggttcgggaccatgcctcccgcacctgctcagccgcctgtgccaggacctcggaccgggggctttcagactggcagctaggatgtacctgcaaaaagggttcccaatcaaggaggacttcttggaacagtcggaacaactgtttggtgccaagcctgtctcccttacgggcaaacaggaagatgacctggcgaacatcaatcaatgggtgaaggaggccactgaaggaaagattcaggagtttctttctggactcccggaggataccgttctcttgctgctcaacgcaatccacttccaaggattctggagaaacaagttcgacccatcactcactcagcgggactcattccacctcgatgaacagttcactgtgccggtcgagatgatgcaggcacggacttaccccttgcggtggttcctccttgaacagcccgaaatccaggttgcgcattttccatttaagaataacatgtcgttcgtggtcctcgtacccacccactttgaatggaatgtgtcccaagtcctggccaacctgtcgtgggacaccctgcacccgccgcttgtttgggaacgccctacgaaggtccggctgcctaaattgtatcttaaacaccagatggatctcgtggccacgcttagtcagctggggctgcaagaactcttccaagcgccggatttgcgtggcatctccgaacaatcattggtcgtgagcggcgtgcaacatcaatcgactctggagctctccgaggtcggggtggaagccgccgcggccacttcgattgccatgagcaggatgagcctgtcctccttctctgtgaatcgaccgtttctcttcttcatattcgaagataccactggactgcctctcttcgtggggtcagtgcggaacccaaacccatctgcacctcgcgaactcaaggaacagcaggactcgcccggaaataaggactttctccagtctctcaagggattccctcgcggcgacaagctcttcggtccagacctgaagctggtgcctcctatggaggaggattaccctcaattcggctctcccaaa

SEQ ID NO: 274345 - DNA, 1473 bp, Artificial Sequence
  derived and/or modified sequence
atggccctgttgtgggggctgctggtcctgagttggtcttgcctgcagggcccgtgttctgtgttttccccggtgagcgccatggagccactgggaaggcagctgacaagcggccccaaccaggagcaggtgtcaccacttaccctgctgaaactgggcaaccaagagcctggaggccagaccgccctcaagagccctcccggtgtgtgtagtcgcgatcccacccccgagcagacacacagattggcaagagctatgatggccttcacggcagacttgtttagcctggtcgcgcagactagcacatgtcctaatctcatcctgagtcctctgagcgtcgcccttgccctgtcacacctggccctgggtgctcagaatcacacacttcagcgcctgcaacaggtcctgcacgctggttctggcccatgcctgccccatttgctgagcagactctgccaagacctcggtcccggggccttcagactcgctgcacgcatgtacctgcaaaaaggatttccgatcaaagaagacttcctcgaacagagtgagcagctgttcggcgctaaacccgtgtccctgacagggaagcaggaggacgaccttgcgaacatcaatcagtgggtcaaggaagctaccgaaggaaagattcaggaatttctgagtggcttgccagaagatactgtcctgctcctgttgaatgccatccacttccagggattctggcggaataaattcgatccgagcctgactcagagagactcttttcaccttgacgagcaattcaccgtccccgtagagatgatgcaagccagaacgtatcccctcagatggttccttctggaacaacccgagatccaggtggctcatttcccttttaaaaacaacatgtcattcgttgtcctggtgcccacccatttcgaatggaatgtctcccaggtgctggccaatttgtcctgggacactctgcacccaccactcgtttgggagcgccctactaaggtgagactgccgaagttgtatcttaagcaccagatggatcttgtcgcgacattgtcacagctgggcctgcaggagctttttcaggctccggacttgagaggcatctctgaacagagcctggtggtgtcaggcgtccagcaccagagcacactcgagctgagcgaggtgggggtcgaagctgccgcagccacatctattgcaatgtctcggatgtccctgagttctttctctgtaaacagaccatttctctttttcatttttgaagatactacgggattgcctctgttcgtgggctctgtccgaaaccctaacccgtctgcccccagggagctcaaggagcagcaagactcaccggggaacaaggacttcctgcagagcctcaagggctttccgcgcggggacaagttgtttggccccgacctgaaactggtgccccccatggaggaggattacccccagtttggctcccccaag

SEQ ID NO: 274346 - DNA, 1473 bp, Artificial Sequence
  derived and/or modified sequence
atggccctgttgtggggtctcctcgtgttaagctggagctgtctccagggcccttgctcggtattttcccccgtttccgcaatggaacctttgggcagacagctcacgtccggtccgaatcaagaacaagtttcccctctgacattgttaaagctcggcaaccaggaaccaggcggccagacggccttgaaatcgccaccaggcgtctgcagccgggacccgactcctgagcagacacaccgtctggcccgggccatgatggcttttacagccgacttgttttctctggtggcccagacctccacttgtcccaacctcattctttcccccctgtccgttgcgcttgcgctatcccatctggcattgggggcgcagaatcacacgctacagaggctccagcaggtgctgcatgcaggctctggcccatgcctgccccacctactcagccgcctgtgccaggatctcggtccgggagcattccggctcgccgctcgaatgtatctccagaagggcttccccataaaagaggactttctggaacagtcggagcagctgtttggggccaaacctgtttcgctcactggcaaacaagaggatgacctggctaacatcaatcaatgggtcaaggaggcaaccgagggcaagatacaggagtttctgtcggggcttcccgaggacacggtgctgttgcttctgaatgcaattcacttccaagggttttggagaaacaagttcgatccttcactgacacaacgagacagctttcacttagatgaacagtttaccgttcccgtggaaatgatgcaggcccgcacttaccccctgcggtggttcctcctggaacagccggaaattcaagttgctcacttcccctttaaaaataacatgtctttcgtcgttctggttcctacccactttgagtggaacgttagccaggttttagccaacctgtcttgggataccctgcaccctcccctcgtgtgggaacgtcctacaaaagtccggttacccaagttatacctgaagcatcagatggaccttgtagctacgctttcgcagttgggccttcaggagctcttccaggctccggatctgaggggcatctccgaacagtccttagtggtcagtggtgtccagcaccagagcaccctggaactgtctgaagttggcgtggaggcggctgcagccacgtctatcgcaatgagcagaatgtccctctcaagttttagcgttaaccgcccctttctgttcttcattttcgaggacacgactggtcttcccctgttcgtgggcagtgtacggaatccgaatcctagtgccccaagagagctgaaggaacagcaagattctccagggaacaaggatttcctgcaaagcctgaaaggattcccaagaggagacaagttatttggccccgatctcaaattggttcctcccatggaggaggactaccctcagtttggctcccccaag

SEQ ID NO: 274347 - DNA, 1473 bp, Artificial Sequence
  derived and/or modified sequence
atggccctgttgtgggggctcctggttctgagctggagttgcctgcaaggcccgtgcagcgtgtttagtcctgtcagcgcaatggaaccgctgggtcgccagctgacgagcggtccgaatcaggagcaagtctcacccctgacgctgctgaaattgggtaaccaggagccagggggtcaaaccgctctgaagtctccacctggggtctgtagtcgcgatccaacacctgagcagactcacaggctggcgcgcgcgatgatggccttcacggcagacctgttctcactggtagctcagacgagcacttgtcctaatctgatcttgagcccactatctgttgctctggccctgagccacctggcactaggcgcacaaaaccacacgctgcagcgactgcagcaggtgttgcatgccggcagcggtccgtgcctaccacacctgttgtcacgcctttgtcaggacctcggtccaggtgctttccgtttggcagcccgaatgtacctccagaaaggctttcctattaaagaggattttctggagcaatccgaacagctgtttggggccaaaccggtgtctctgacggggaaacaggaggacgacctggccaacatcaaccagtgggtgaaggaggcaacggagggtaagattcaggagtttctgtctggccttcctgaggacactgtcctcctgttgttgaatgccatccatttccagggtttttggcgcaataagtttgacccgtccctgactcaacgcgacagcttccatctggacgagcaatttactgtgccagtcgagatgatgcaagcccgcacgtatcctctgcgttggttcttgttggagcaacctgagattcaggtggctcatttcccctttaaaaacaatatgagtttcgttgtgttggtgcctacccactttgagtggaatgtaagccaagttctggctaatctgtcttgggacacactgcatcctccgctcgtttgggagaggccgactaaagttagactgcccaaactatatctgaaacatcaaatggatctggttgctacactgagccagctgggtctgcaggaactgttccaagcgccagacctacgcggcataagcgaacagtctctggtcgtttccggggttcaacaccagtcgacgctggagctgagcgaagtgggagtggaagcagctgccgccaccagcatcgcgatgtctcgcatgtccttgagctcctttagcgttaatcgtccttttctgtttttcattttcgaggacaccacgggtctgccgctgtttgtgggttctgtgcgcaatcctaacccgtcagcccccagagaattaaaggaacagcaagattccccgggaaataaggactttctccagtcattgaaaggctttccacgcggcgacaaactcttcggtcctgatttaaaactggtccctccgatggaggaggactacccgcagtttggttctccgaag

SEQ ID NO: 274348 - DNA, 1473 bp, Artificial Sequence
  derived and/or modified sequence
atggcgctgctgtgggggctcttggtactgtcctggtcttgtctccagggcccctgtagcgttttcagccccgtgtcagctatggagcccctgggccgccagctcacatccgggcctaaccaggaacaggtaagtccgttgacccttctgaaactgggcaaccaggagccaggcggccagactgctttgaaatctccgcctggtgtgtgtagtcgggatcccacgcctgagcagactcacagactcgctagggccatgatggcctttacggccgatctcttctctctcgtggcccagaccagcacatgtcccaacctgattttgtcaccgctttccgtggctctggctctttcccacctggcacttggggcacagaaccataccctccagcgccttcagcaggtattgcacgccgggagcggcccatgcctgccccatctgctgtctaggctctgccaggacctgggacccggggcattccggctcgccgcaaggatgtacctgcagaagggcttccccatcaaagaggactttctggaacaatctgaacagctgtttggcgcgaaaccagttagcctcacaggtaagcaggaggatgatctcgctaacataaaccaatgggttaaggaagccaccgagggaaagatccaagaattcctctccgggctgcctgaggatacagtccttctgttgctgaacgctattcatttccaggggttttggaggaacaagttcgatccctctctgactcagcgggactcctttcatctcgacgaacagtttactgtgcccgtggagatgatgcaggccagaacctaccctttgcggtggtttctcctcgagcagccggaaatccaggtagcgcactttccattcaagaacaacatgtcctttgtggtcctggtacctacccattttgagtggaatgtcagccaggtgcttgctaacctttcttgggataccctccatccaccgctggtgtgggaaaggcccacgaaggtccgcctgcctaaactgtatctgaagcaccaaatggacctggtcgctactctttcccagctgggcctccaggagctttttcaggctcctgacctgcgaggtattagtgagcaaagtctcgtggtgagtggcgtgcagcaccagagtacactggagctgagcgaggtgggtgttgaggcagccgctgcgacatccattgccatgtccaggatgtcccttagcagcttctcagtgaatcggccattcctttttttcatttttgaggatacaacaggactccctttgtttgttgggagtgtccgaaaccccaatccgtccgcacctagggagctcaaagagcagcaggactcccctggaaataaggatttccttcagagcctgaaaggcttccctcgaggagacaagctctttggccccgacttgaagctcgtcccgcctatggaggaagattatcctcagttcggctcacccaaa

SEQ ID NO: 274349 - DNA, 1473 bp, Artificial Sequence
  derived and/or modified sequence
atggcactcttgtggggtctgttggtactgtcatggtcctgcttgcaggggccttgcagtgtgtttagccccgtgtccgcaatggagcctctgggacggcagctaacttccggcccgaaccaagaacaggtctcgcccctgacactgctgaaactgggcaatcaggaacctggcggtcagaccgctttgaagtcgccccctggagtctgttcaagagaccccacccccgagcagacccaccggctggcgagagccatgatggcctttacagctgatctgttttctttggtcgcccaaacaagcacttgccccaacctcattttatccccactaagcgtggcactggctctgtctcatctggctttgggtgcacagaaccacacactgcaacgtctacaacaggtcttgcacgcaggcagcggcccttgcctgcctcacctgctctcaaggctctgccaggatctgggacccggcgcatttagactagctgctcgaatgtatctgcagaagggcttcccgattaaggaagattttctggagcaatcagagcaactttttggcgcaaagccagttagtctgactgggaagcaggaggatgacttggcaaatatcaatcaatgggtcaaagaggccactgaaggcaaaattcaggagttcctcagcgggctgccggaggatactgttttattgctcctcaacgcaatccatttccagggattctggcgtaacaagtttgaccctagccttacccagcgcgattcgtttcacctggacgagcagtttacggtgccggttgaaatgatgcaggccagaacctatcctttgcgatggttcctcctggaacaaccagagatccaggtagcacatttcccatttaagaacaatatgtccttcgtggttctcgtgcccacccacttcgagtggaacgttagccaggtacttgccaacctgtcctgggataccttgcacccacccctcgtctgggaaaggccaactaaggtgcgtctaccgaaactgtatcttaagcatcagatggatctcgtggcgacattgagccagttgggactacaagagctttttcaggccccagatcttcgcggtatttctgagcagtccctcgttgtaagcggggtgcagcaccagtccacgctggaactaagcgaggttggggttgaggccgcagccgctacatcgattgctatgtctagaatgagtctctcaagcttctcagttaacagacctttcctgttttttatcttcgaggacaccactgggctgccactgttcgtgggttcggttcggaaccctaatccctctgcccccagagaactgaaggagcagcaggatagccctggtaacaaagacttcttgcagtcactcaaaggctttcccaggggagacaagctctttggacccgatttgaagctggtcccaccaatggaggaggattacccacagttcggcagcccaaaa

SEQ ID NO: 274350 - DNA, 1473 bp, Artificial Sequence
  derived and/or modified sequence
atggccctcctctggggactgctggtcctttcatggtcgtgtctccagggaccttgctcagtgttctcaccagtttcagctatggagccgctgggcagacagctgacctccggcccaaatcaggagcaggtgtcacctttgacgctgctgaagctggggaaccaggaaccaggaggccaaacggccctcaagagcccgccgggtgtgtgctccagagatccaacgcccgagcagacgcaccggctcgcacgcgccatgatggcctttaccgcggatctgttttcgctggtcgcacagacttccacgtgtccgaacctgatcctgtcgcccctgtccgtggcgctggccctcagccatctggcgctcggcgcccaaaatcacactctccaacggctgcagcaagtgctccatgccggaagcggcccatgcctgccacacctcctctcgcgcttgtgccaagatctgggtccgggtgctttccgcctggcggcgcgcatgtacctgcagaaaggcttcccgattaaggaggatttcctggaacagtccgagcagctgtttggcgccaagcctgtgtccctgactggaaagcaagaagatgaccttgccaacatcaaccagtgggtgaaggaggcaaccgagggtaagatccaagagtttttgtccggcctccccgaggacaccgtgctgctcctgttgaacgctatacacttccaagggttctggcgaaacaagtttgatccgtccctgacccaaagggacagctttcatttggacgaacagttcaccgtccctgtcgagatgatgcaagcccggacctacccgctgcgctggttcctgctggaacagccagagatccaggtggctcatttccccttcaaaaacaacatgtctttcgtggtgctggtccccacgcactttgaatggaatgttagccaagtcctggcgaatctctcctgggacaccctgcacccacccctggtgtgggaacgccctacgaaagtcaggcttccgaagttgtacctgaagcaccagatggatctcgtggcaactctgagccagctcggcctccaggagcttttccaggcacccgatttgcggggcatttcagaacagagcctcgtcgtgagcggagttcaacaccaaagcaccctggaattgagcgaagtgggggtggaggccgctgctgcaacttctatcgcaatgagcagaatgagcctcagctcgttctcagtgaatagaccgtttcttttctttatctttgaggatactaccggactgcccctctttgtcggatccgtgcggaatccaaatccatccgcgccgcgggaactcaaagagcaacaggactcaccaggcaacaaggacttcttgcaatccctcaagggcttcccccggggtgataaacttttcggaccggatcttaaactggtgccgccaatggaagaggactacccgcagttcggatcgcctaaa

SEQ ID NO: 274351 - DNA, 1473 bp, Artificial Sequence
  derived and/or modified sequence
atggcacttttgtgggggctattggtgctctcatggagttgtctccagggaccctgctctgtattcagccctgtctcagccatggagcctctgggtagacagttaacgtccggccctaaccaggagcaggtatccccattaacgctactaaagctggggaatcaagaaccgggaggccaaacagccttgaaatcccccccaggggtgtgttcccgcgaccccacccccgagcaaacccaccgcttagctagagctatgatggccttcaccgcagacctgtttagtctggtggcgcaaacctccacttgtccaaacctcatactgagtcctctgagtgtcgcactggctcttagtcatttggcactgggagcccaaaatcataccttgcagaggttacagcaggtgctgcacgccggatctggaccgtgcctcccccatttgttatcccggttatgccaagacctggggcccggtgccttccgcctggctgcccggatgtaccttcagaagggattcccaattaaggaagacttcctcgagcagtccgagcagttattcggggccaagccagtatccctcaccgggaagcaggaggatgatctcgctaatataaaccagtgggtgaaggaagcaactgagggtaagatccaagagtttttgtctggcctgcccgaggacaccgtcctgctgctgctgaatgcgatccattttcagggcttttggaggaataaattcgatccaagtttaactcagcgtgacagcttccacctagacgagcagttcacagtgccagttgaaatgatgcaggctagaacatatccactccggtggttcctgctagaacagcccgaaattcaggtcgcgcatttcccgtttaagaacaacatgtctttcgtggtattagtccctacccactttgagtggaatgtcagccaggtgctcgcgaacctctcctgggatacgctgcatcctcccctggtctgggaacgacctaccaaggtacgtctgccaaaactgtacttgaagcaccagatggatctggtggcaaccctctctcaactgggactgcaggagctgtttcaggcaccagatcttcgaggaatatccgagcaatctctcgtggtgagtggagtacagcatcagtccacactggagttgtctgaggtgggtgttgaagctgccgccgcaacctccattgctatgagtcgtatgtcactctcgtcctttagcgtcaaccgtccctttctgttcttcattttcgaggacacaaccgggctccccttattcgtgggatccgtgaggaacccaaacccatccgccccccgggaattgaaggagcaacaagattcccccggcaacaaagattttctccagtcgctgaagggcttccctaggggcgataaactgtttggaccagatttgaaactggttccgccaatggaggaggattatccccaattcggatcacccaag

SEQ ID NO: 274352 - DNA, 1473 bp, Artificial Sequence
  derived and/or modified sequence
atggcgcttctatgggggctgttggtcttatcttggtcttgtctgcagggaccatgttctgtcttttcaccggttagcgcaatggagccgcttggccgtcaactgacttccgggcccaatcaggaacaagtgtcccccctcacattgctgaagctgggtaaccaagaaccaggcggtcaaactgcgctgaaaagcccccctggcgtgtgctcaagagacccgacacctgagcaaacccacagactcgcacgtgccatgatggcatttaccgcagatttgttttccctggtcgcgcagactagtacctgccctaatcttatcctgagccccctctcagtggcgctggccttgtcacacctggccttgggcgcacagaaccacacactacaaagactgcagcaggtgctccacgctggaagtggaccttgtcttccccacctcttaagtcggctctgccaggacctgggacccggtgccttccgattggccgccaggatgtatctccagaagggatttcccatcaaggaggatttcctcgagcagtcggagcagttatttggggccaagcctgtttctctcaccggtaaacaggaagacgatctggccaacattaatcagtgggtaaaagaagccaccgagggtaagatccaggagttcttgtccggtctccccgaggatacagtgctcttgcttttgaacgcaatacatttccaggggttttggcggaacaagttcgacccaagtttgacccagcgcgactcgtttcacctcgatgaacagttcacagtgccagttgagatgatgcaggctagaacctacccactgcgatggtttctcctcgagcaacccgagatccaagtggcacactttcccttcaagaacaatatgagctttgtagtcctcgtacctacccacttcgaatggaacgttagccaggtcttggccaacttgtcttgggacaccctgcatccccccctggtctgggagaggcctactaaggttcgtctgcccaagctctacctgaaacaccagatggatctcgtggctacactgagccagctgggtctacaggagctgtttcaggctcctgaccttagaggcatttccgagcagtctctggtggtatctggtgttcaacaccaatctacattggagctatccgaggtgggagtcgaagccgctgctgcaacaagtatagcgatgtcacgcatgtctcttagtagttttagcgtgaaccgcccattcctttttttcattttcgaagataccaccgggttgccactctttgtcgggagtgtgaggaacccaaatcctagcgccccacgcgaacttaaggagcaacaggattcccccggtaacaaggatttcttgcagagtctgaagggattccctaggggtgacaaactgttcggacctgatcttaaactggtgcccccaatggaagaggattatccgcagtttggcagccccaaa

SEQ ID NO: 274353 - DNA, 1473 bp, Artificial Sequence
  derived and/or modified sequence
atggcgctgctgtggggcctgctggttttgagctggagctgcctccagggcccttgcagcgtgttcagccccgtcagcgcaatggaacccttgggtagacagcttacaagtggtcccaaccaggaacaggtatcccctttgacacttctgaagctcgggaaccaggagccaggaggccaaaccgctttgaaatcaccaccaggtgtgtgttctcgggaccccacgcccgaacagacccatcgattggccagagcaatgatggctttcacagcagacctattttccctggtggcccaaaccagtacttgccctaacctgattctgtccccgcttagcgtggccttggcactgtcccatctggcattaggtgcacagaaccacactctccagcgtctacaacaggtgctacatgctggaagcggtccatgtctaccccacctgctctccagactctgtcaggacttgggcccgggcgcttttcgtcttgcagcacggatgtatctgcagaagggttttcctataaaggaggacttccttgaacagtctgagcagctgttcggcgcaaagcctgtgtccctgactgggaagcaggaggacgatctcgccaatattaaccagtgggtgaaggaagcaacagaaggcaagattcaggagtttctgtcgggtttgcccgaggataccgttctgttgctgctaaacgccattcatttccagggattttggcgcaataaattcgacccctcactaactcagagagatagctttcatctggacgagcagttcacggtgcccgttgaaatgatgcaagcccgcacctatcctctgaggtggttcttgctggaacagcctgaaatccaggtcgctcatttcccatttaagaacaatatgtcatttgtagtcctggtgccaacacatttcgagtggaacgtcagccaggtccttgctaatctctcgtgggataccctccaccctcctctggtgtgggaacgaccaacaaaagtcagactacccaagctataccttaagcaccagatggacttggtggccacactgtctcagctcggccttcaggagttgttccaggcccctgacctccgcggtataagcgagcagtccctcgtagtgagtggcgtccagcaccagtcaacactggaactatctgaggtgggtgtggaggctgctgcagctaccagcatagcaatgtccagaatgtctctgagctctttttcggtgaatcgtccctttctcttcttcatttttgaggatacgaccgggttgcctctgttcgtggggtccgtccggaaccctaacccttcggcaccgcgcgagctcaaagagcagcaagattccccaggtaataaggattttttgcagtcactgaagggcttcccaaggggcgacaagttattcggtcccgatctgaagctggtgcctcccatggaggaggattacccgcagttcgggtctccgaag

SEQ ID NO: 274354 - DNA, 1473 bp, Artificial Sequence
  derived and/or modified sequence
atggcgctgctttggggcctgctggtgctcagctggagctgcctgcaaggtccatgtagtgtattttctcccgtgagtgccatggagcctttgggaaggcagttgacatctggccctaatcaggagcaagtgtcccccttgactctgctgaagctgggtaatcaggagcctggggggcaaaccgctcttaaaagcccacctggagtgtgttctagggatccgacccctgagcagacacataggctggcccgggcaatgatggcttttacagctgacctcttcagtttggttgcccaaacttctacctgcccaaatctgattcttagccccctgtcagtcgcacttgctctgtctcatctcgctcttggggctcaaaaccatacgctgcagcgattgcagcaggtgctgcatgcaggctccggcccatgtcttcctcatcttctgagtcggctgtgtcaagatctggggcccggcgcctttaggcttgccgctcggatgtacctccagaagggatttcccatcaaggaggatttcctcgaacagtcagagcagctgtttggcgccaaaccagtgtccctgaccggcaaacaagaagatgatcttgccaacatcaatcagtgggtgaaggaagctaccgagggtaagatccaggaatttctgtccgggttgccagaagacactgtccttttgcttttgaatgcaattcatttccagggattctggcggaataaattcgatccgtctctcactcagcgggattcttttcaccttgacgagcaattcactgtgccagtcgaaatgatgcaggcaaggacatacccactcaggtggttcctgctggagcagccagagatccaggtggcccactttccatttaagaataatatgtcctttgttgtcctggttcccacccatttcgaatggaacgtcagccaggtgttggctaacctgagttgggatacgctccatcccccactcgtctgggaacggcctaccaaagtccggctgcctaaactttatctgaagcatcagatggatctggtggccacgttgtcacagctgggcctgcaggagctgtttcaggcgcccgacttgcgaggcatttcagagcaatctctggttgtgtccggggtgcagcatcagagtactctcgagttgagcgaagtcggagttgaggccgcagcggcaacctctatcgccatgagcagaatgagcctgagctccttctccgtcaaccggccttttctcttttttatctttgaagataccactggacttccactgttcgtgggttctgtgcggaaccctaatccctcagctccaagagagctgaaggagcaacaggatagcccagggaataaggactttctccagagtctgaaggggttccctcgaggggataaactcttcgggcctgatctcaaactggtcccacccatggaggaagactatccgcagttcgggtctcccaag

SEQ ID NO: 274355 - DNA, 1473 bp, Artificial Sequence
  derived and/or modified sequence
atggcacttctctgggggcttctggtattgtcatggtcgtgtttacagggcccctgcagtgtttttagtccagtgtcagctatggagcctttgggcagacagctcacttccggtcccaaccaagagcaagtttcccctcttacactgctcaaattggggaatcaggaacccggtggccagaccgctcttaagtcaccgccaggagtgtgttcccgagatccaactcccgaacagactcacaggctggctcgggccatgatggcctttaccgccgatttattttccctggttgcgcagacctcaacctgtccgaacctaatcctgagccctttatcagtcgcccttgcactctcccacctcgccctaggcgcccagaatcacactctacagaggctgcagcaggtcttgcacgcaggatctggaccttgtctgccccatctgttgagcagactctgtcaagacctggggcctggagccttcaggctagctgcacggatgtacctacagaagggctttccaattaaggaagacttcctggagcagtcggagcagttattcggagctaaaccggtgagtttgactggtaagcaggaagacgatctggccaatataaaccagtgggtaaaggaagccacagaggggaaaatccaggaatttctcagcgggctgcctgaggacacggtcctcctcttgctgaatgccatacattttcaggggttttggcgaaataagtttgatccaagtctcacgcaacgcgattctttccacctagacgaacagttcactgttccggtggagatgatgcaggcgaggacctacccgctgagatggtttctgttggagcaacctgagatccaggtggcacacttcccctttaaaaacaacatgagtttcgtagtgctggttccaacacactttgaatggaatgtctcccaggtgctggcgaacctgtcgtgggacacactgcacccaccactggtctgggagcgtcccactaaagtccgccttcccaagctctatctcaagcatcagatggatttggtagccactctgagtcaactgggtctgcaggagctgtttcaggcacccgatttacggggaattagcgaacaatctttagtcgtatctggtgtgcaacatcagtcaaccctggaattatctgaggtaggcgtggaggcagccgctgctacctctatcgcgatgagcaggatgtcattgtctagttttagcgtaaatcgccccttcctcttttttattttcgaggacactactggccttcctctgtttgtgggttccgtgcgaaatccaaatccctcagccccacgggaattgaaggagcaacaggacagtcctgggaacaaggacttcctccagtccctaaagggatttccccgaggggacaagctgttcggtcccgatctgaagctggtgcctcccatggaggaagactacccccagttcggatctcctaag

SEQ ID NO: 274356 - DNA, 1473 bp, Artificial Sequence
  derived and/or modified sequence
atggctctactgtgggggctgcttgttctttcctggtcttgcctccagggcccatgtagcgtattttctcccgtcagcgctatggagcctctgggaaggcagctaacaagcggtccaaaccaggagcaagtttcccccctgaccctgctgaagctgggaaatcaggaacctggcgggcagacggcactgaaatctcctccaggcgtgtgcagtagagaccccacccccgagcaaacgcataggctcgcgcgagccatgatggcatttactgccgaccttttctctctcgtggcacagactagtacatgtcctaacctgatcttatcaccgctgagcgtagctctggccctatcacacttggcgctgggcgcccagaaccacaccctccaacggctgcagcaggtgctgcacgcaggtagtggaccttgtctgcctcacctcctttcgaggttgtgtcaagacctggggccaggtgcatttaggttagcagctaggatgtatctccaaaagggattccctatcaaagaggacttcctcgagcagtccgagcagcttttcggggctaagccagtatccctgaccggaaagcaggaggatgatctagcgaatattaaccagtgggtcaaggaagccaccgaaggaaagattcaggagttcctttctggtctcccagaggacacagttttactcttgctgaatgccattcatttccagggcttctggcgcaacaaattcgacccaagcctcacccagcgagattccttccacctggacgagcagtttacggtcccagtggaaatgatgcaagcacgaacctatcctctccgatggtttctcctggagcaacctgaaatccaggtggcccacttccccttcaaaaataatatgtctttcgtggttctcgtacccacgcactttgaatggaatgtgtctcaggtgcttgccaatctctcttgggacacactgcaccccccattggtgtgggaacgaccaacaaaggtccgactccctaagctgtatctgaaacaccagatggacctggtggcaacgttaagccagctcggtctccaagagctcttccaggcccctgacctgcggggcatcagcgaacagtccttggtggtctcaggagttcagcaccagtcaacgttggaactcagtgaggttggtgtagaagctgccgcggctacatctatcgctatgtctagaatgagcctgtcttctttttctgtaaaccgccccttcctgttcttcatctttgaagacactactgggttgcccctttttgttggttccgtgaggaatcctaacccatctgcaccccgggaactgaaagaacaacaagactcgcccggcaacaaagactttttacaatccctgaaaggattcccccggggtgataaactgttcgggcctgacctgaagctcgtccctccaatggaagaggattacccacagttcggctccccaaaa

SEQ ID NO: 274357 - DNA, 1473 bp, Artificial Sequence
  derived and/or modified sequence
atggcactcctatggggcctgctcgtcctgtcttggagctgtctgcaggggccctgtagtgtgttcagccctgtgagtgctatggagcccctcggtcgccaactcactagcggcccgaatcaagaacaagtgagccccctcactttgctaaagcttggaaaccaagagccaggcggacagacggcgctgaagagtccacctggggtgtgcagccgcgacccaaccccggagcagactcacagacttgcaagggctatgatggcctttacagctgatcttttttctctcgtggctcagaccagcacgtgccctaatctaatcctgtctcccctttccgtggcacttgctctgagtcatctggcgctgggcgctcagaatcacacacttcagcggttgcagcaggttctgcatgccgggagtggtccgtgtctcccgcatcttctgtcccggctgtgccaggacctgggccctggggcttttaggctcgccgcacggatgtacctacaaaagggttttccaattaaagaggactttctggaacagtccgagcagctatttggagcaaagccggtttccctgaccggcaaacaagaggatgatttggccaatatcaaccagtgggtgaaggaggccaccgaggggaagatccaggagtttctgagcgggcttcccgaggacacagtgctgctgctcctaaatgccattcattttcagggcttttggaggaataagtttgacccctctctgactcagagagattcctttcatctcgatgagcagttcactgttcccgtggagatgatgcaagcccggacctatcccctgcggtggttcttgttagagcagcctgagattcaggtggcacacttcccctttaaaaataacatgtcctttgtggtcctggtgcctacacacttcgagtggaatgtgagccaggtgttagctaacctatcctgggatacattgcaccccccgcttgtatgggaaaggcctaccaaggtcaggctgcccaagctgtacctcaagcatcagatggatctggtggccacactatcccagttgggtctgcaagagctctttcaagcccctgatctaagagggataagcgagcagtcattagttgttagtggcgtccagcatcaaagcactctggaactctccgaggtgggcgttgaggccgctgctgccacctctattgccatgtcacggatgtcgctcagctcgttctcagtaaataggccattcctctttttcatcttcgaggatactaccggactccccctgttcgtaggctctgttagaaatccgaacccgtccgcccctcgcgaactgaaggaacagcaagacagccccgggaacaaggactttctccagtcgctgaaaggctttcctcgtggagacaagctgttcggacccgatctgaaactggttcctccaatggaggaggactatcctcagtttggcagccccaaa

SEQ ID NO: 274358 - DNA, 1473 bp, Artificial Sequence
  derived and/or modified sequence
atggctctcttgtggggcctgctagtcttgagctggtcttgcttgcaggggccctgctcagtattctcaccagtctccgctatggagcctcttggcagacagttgacaagtgggcccaatcaggagcaagttagtccattgaccctattgaaattgggcaaccaggagcctggcggccagacggcactcaagagtccacctggagtttgttcccgtgatccgacaccagaacagactcaccggctcgcccgcgccatgatggccttcaccgctgatcttttttccctcgtagcccaaacaagcacgtgtccgaatctcatattgtctcccttgtccgtggcgctggccctatcgcatttagctttgggcgcgcaaaaccacacgttacagcggctgcagcaagtgctacacgcgggctccgggccgtgtttgcctcacctccttagccgattgtgccaggatcttggacctggcgcattccgacttgccgcccgaatgtatctccagaaaggtttcccgatcaaagaagattttctagagcagagtgagcaattatttggtgccaaacccgtcagtctaacgggcaagcaggaagatgatctcgctaatatcaaccagtgggtaaaggaagcaacagagggcaaaatacaagaattcctctcaggtcttccagaagatactgttcttctactgctgaatgcaattcactttcagggattctggcgaaacaagttcgacccctctctgactcagcgcgacagctttcacctcgacgagcagttcacagtgcctgtggaaatgatgcaagctaggacttaccctctgcggtggttcttgctggaacaaccagagatccaggtagcgcactttccattcaaaaataacatgtccttcgtcgtcctagtcccaacgcacttcgaatggaacgtttctcaagtcttggcgaacctctcgtgggatacccttcacccccctctggtttgggagaggcccaccaaggtgcgccttccgaagctttatctcaagcaccaaatggatctcgtggcgaccctctcgcagctgggcctgcaagagcttttccaggcgccagacctgcgcgggatcagcgagcagagcctagtagtgagtggtgtacagcaccagagcacattggaactttcggaagtaggggtcgaagctgccgcagcgacgtccatcgcgatgtctcggatgagtctatcctccttcagcgtcaaccgaccattcctgttctttatctttgaggacacgaccggtctccctcttttcgttggctctgtcagaaatcctaatccctcggcacctcgcgagcttaaggagcagcaagactctccgggcaacaaagactttcttcagtctctgaaaggttttcccagaggagacaaattgtttgggccagacttaaaactggtgccccctatggaggaagattatccgcaatttgggtctccgaag

SEQ ID NO: 274359 - DNA, 1473 bp, Artificial Sequence
  derived and/or modified sequence
atggcgctgctgtggggcctgttggtgcttagttggtcctgcttacaggggccctgttctgttttttcccccgtaagtgcaatggaaccattaggccggcagttgacaagcgggcccaaccaggagcaggtaagccccttgacactccttaagttggggaaccaggagccaggaggacagactgcccttaaatcacctccaggggtttgcagccgcgatcccaccccggagcagacccataggttggcacgcgcaatgatggccttcacagccgacctgttttccttggtcgctcagacgtccacctgccctaatctcattttatcgcccttaagtgtcgctctcgcactctcccaccttgccctcggtgctcagaaccacactctgcagcgactccagcaggtattgcatgcaggcagcgggccctgcttgccgcatctcctaagtcgtctctgccaagacctcgggcctggcgccttcagactcgccgcaaggatgtacttgcagaaaggatttccaatcaaggaggatttcctcgaacagagcgagcaactgtttggtgccaagcctgtctccctaacaggaaagcaggaggacgacctggccaacataaatcagtgggtcaaggaggccacagaaggaaagatccaagaattcttgtctggcttgccagaagacacggttttgttgctactaaacgcgattcacttccagggcttttggagaaacaaatttgatccttccctgacccagcgggactcattccatctggacgaacaatttaccgttcctgttgagatgatgcaggcccggacttaccctctaagatggttcctgctggagcagcccgagatccaggtcgcacatttcccctttaaaaacaacatgtcgttcgtcgtgctggtgcctactcacttcgagtggaacgtgtcccaagtgctcgccaacctctcgtgggacaccctccacccccccctggtctgggagaggcccaccaaagttcggcttccaaaactgtatctgaagcaccagatggatctagtcgccacgctgtcgcagctgggactccaagaattgttccaggcacccgacttgcgtggcatctcagagcagtctttagtggtcagcggggttcagcatcagagcacgctcgaattgtcggaagtcggcgttgaggccgctgcggctacgtccatcgccatgtcacggatgagcctgtcatctttctctgttaatcgtccctttctttttttcatcttcgaggacaccaccggattgccattgtttgtgggatcagtgcggaaccccaatccgtctgctccccgggagttaaaggagcagcaagacagccctggcaataaggatttccttcagagccttaaggggttcccccgcggtgacaagctttttggccctgatctgaagttggtgccaccaatggaggaagactacccgcagttcggctcccctaaa

SEQ ID NO: 274360 - DNA, 1473 bp, Artificial Sequence
  derived and/or modified sequence
atggccctgctctgggggttattggtattgtcttggtcatgtctgcaggggccctgttctgtcttcagtcctgtctcagcaatggaacccctcgggcgacagctcacttctggacctaatcaggaacaggtcagtcctctcactctgctcaaattagggaaccaggaacctgggggacagactgccctaaaaagtccccccggggtttgcagtcgtgatcctactccagaacagacacaccgactggcaagagcaatgatggcctttactgccgatttattttccctggtcgcccagacaagtacatgccccaacctcatcttgtcccctctttctgtcgcccttgccctgtcccatttggcactcggggcccaaaaccacactctccagcgacttcaacaggttctccacgccgggagtggaccctgcttaccacacctcttatctagattatgccaagatcttgggcccggagcattccggctagccgccagaatgtatttacagaaagggtttcccattaaagaagattttcttgaacagtctgaacaattattcggggccaagcccgtgtctctaactgggaaacaggaagatgatctggcaaatatcaaccagtgggtgaaagaagctacagaagggaaaatacaggaatttcttagtggactacccgaagacactgtccttttactactcaacgctatccattttcaggggttttggaggaataagttcgatccttctttaacacagcgagatagtttccaccttgatgagcagttcactgtgcctgttgaaatgatgcaggctcgaacgtatccacttcgctggttcctattagagcagccagagattcaggtggcgcatttccccttcaaaaacaatatgtctttcgtcgtgttggtccctacacactttgagtggaatgtgtcccaggtacttgcaaacttatcttgggatactctccacccacctcttgtgtgggaacggccaactaaagtgagactgcctaaattgtatcttaaacatcagatggatctggtggccactttgagtcagctggggcttcaggaactctttcaggcccctgacctgcggggaatctcagaacaatcactagtagtaagtggggtacaacatcagtctacgctagagctcagtgaagttggagtcgaagctgcagccgcaacatccatcgcaatgtcccgaatgtctctttccagtttctcggtaaatcgacctttcttatttttcattttcgaggatactactggactcccactgttcgttgggtctgtacgcaaccccaatccttccgccccacgggaattaaaagagcagcaggattctcccgggaataaagattttctccagtcactcaaagggttcccccggggggacaaactcttcggaccagatctcaaattggtgccaccaatggaagaagattatccccagtttggatccccaaaa

SEQ ID NO: 274361 - DNA, 1473 bp, Artificial Sequence
  derived and/or modified sequence
atggcgctattatggggtctactagttctatcgtggtcgtgtttacaaggtccgtgttcggtattttcgccggtatcggcgatggaaccgttaggtcgtcaactaacgtcgggtccgaatcaagaacaagtatcgccgttaacgctattaaaattaggtaatcaagaaccgggtggtcaaacggcgttaaaatcgccgccgggtgtatgttcgcgagatccgacgccggaacaaacgcatcgactagcgcgtgcgatgatggcgtttacggcggatttattttcgttagttgcgcaaacgtcgacgtgtccgaatctaatattatcgccgttatcggtagcgttagcgttatcgcatctagcgctaggtgcgcaaaatcatacgctacaacgactacaacaagttctacatgcgggttcgggtccgtgtctaccgcatctattatcgcgtttatgtcaagatttaggtccgggtgcgtttcgattagcggcgcgaatgtatttacaaaaaggttttccgataaaagaagattttttagaacaatcggaacaactatttggtgcgaaaccggtttcgctaacgggtaaacaagaagatgatctagcgaatataaatcaatgggtaaaagaagcgacggaaggtaaaatacaagaatttttatcgggtctaccggaagatacggtattattactactaaatgcgatacattttcaaggtttttggcgaaataaatttgatccgtcgttaacgcaacgagattcgtttcatctagatgaacaatttacggtaccggttgaaatgatgcaagcgcgtacgtatccgctacgatggtttttactagaacaaccggaaatacaagtagcgcattttccgtttaaaaataatatgtcgtttgtagtattagtaccgacgcattttgaatggaatgtatcgcaagtattagcgaatctatcgtgggatacgctacatccgccgttagtatgggaacgtccgacgaaagttcgtttaccgaaattatatctaaaacatcaaatggatttagtagcgacgttatcgcaactaggtctacaagaactatttcaagcgccggatttacgtggtatatcggaacaatcgttagtagtatcgggtgtacaacatcaatcgacgttagaattatcggaagtaggtgttgaagcggcggcggcgacgtcgatagcgatgtcgcgtatgtcgctatcgtcgttttcggtaaatcgaccgtttttattttttatatttgaagatacgacgggtttaccgctatttgtaggttcggtacgtaatccgaatccgtcggcgccgcgagaattaaaagaacaacaagattcgccgggtaataaagattttttacaatcgctaaaaggttttccgcgaggtgataaattatttggtccggatttaaaactagttccgccgatggaagaagattatccgcaatttggttcgccgaaa

SEQ ID NO: 274362 - DNA, 1473 bp, Artificial Sequence
  derived and/or modified sequence
atggccttgctttggggtttgcttgtcctctcatggagctgccttcagggaccatgttcggtcttttcgcccgtgtcagcaatggaacctctcggtaggcagctgacttcagggcctaaccaagaacaagtgtcgccccttacgctgctcaagctcggcaaccaagagcctggcggtcaaaccgcgcttaaatcgccccccggagtttgttcccgggatcccaccccagagcagactcataggcttgcaagggctatgatggcattcacggccgatctcttctccctggtcgcccaaacctcgacttgcccgaatcttatactcagcccactttcagtggcacttgccctctcacacctggcactgggggcacaaaaccataccctccagagacttcagcaggtgctgcacgcaggatcgggaccatgtctcccacatctcctttcgcggctttgtcaggatctgggcccaggagcattcagactcgcggcaagaatgtacctccaaaaggggttcccaattaaggaggattttctcgaacaaagcgagcaacttttcggtgcaaagcccgtctcactcaccgggaagcaggaagatgacctggcgaatatcaatcaatgggtgaaggaagccactgaagggaagattcaggagtttctctccggcctccccgaggatactgtcctgctgctgctgaacgccatccattttcaaggtttctggagaaacaagtttgacccgtcgctgactcagagggattccttccatttggatgagcagttcactgtgccagttgaaatgatgcaggccaggacctacccactccgatggtttctcctggaacaaccagaaattcaagtggcgcacttccccttcaagaacaatatgagctttgtggtgctggtcccgacccattttgagtggaacgtgtcgcaggtgctggcgaacctctcgtgggacactcttcaccccccacttgtgtgggaacgccctactaaagtgcgtctgcctaaactctacctcaagcatcagatggatcttgtggcaacgctctcgcaactcgggctgcaagaactgttccaagcacccgaccttaggggtatctcagagcagtcgcttgtggtatctggtgtgcagcatcaatccactctcgaactttcggaagtcggtgtggaggctgcagccgccacctctatagcaatgtcacggatgtccctgagctctttctccgtcaaccgcccattccttttcttcattttcgaagataccactggtctgcctctgtttgtgggaagcgtccgcaacccaaatcctagcgcacctcgggaactgaaggagcaacaggactcgcccggaaacaaggactttctgcagagcctcaaaggcttcccacgaggcgataagctgttcggtcctgacctgaaactggtgccaccaatggaagaagattacccacagtttgggagccccaag

SEQ ID NO: 274363 - DNA, 1473 bp, Artificial Sequence
  derived and/or modified sequence
atggcacttctctggggcctccttgtgctttcctggtcatgcctgcagggcccttgctcagtctttagccccgtgtcggcaatggagccactcggtaggcaactgactagcggacccaatcaggagcaagtgtcccccctgaccctccttaagttggggaaccaggaacctgggggtcagaccgcactgaaatctccaccgggagtctgctcccgggatcccaccccagaacagacccatagacttgcacgcgccatgatggcatttaccgcggatctcttttcacttgtggcgcaaacctcaacttgcccaaaccttattctttcgcctctttccgtggcactcgcactgtcccatctcgccctcggggcacagaatcatacgttgcaaagactgcagcaggtgcttcatgcaggatcaggcccatgtctcccacatcttctttcccgactgtgtcaagacctcgggcctggagctttccgccttgcagctcgaatgtaccttcagaaaggttttcccatcaaggaagatttccttgaacaatcggaacagctgtttggagcaaagccagtctcgctcaccggaaagcaagaagatgatcttgctaacataaaccaatgggtgaaggaagcaactgaaggtaagatacaggagttcctttctggtctgcccgaagataccgtgttgcttttgttgaacgcaattcatttccaggggttctggcggaacaagtttgatccatcgctgactcaaagagattcgtttcatctggacgaacagttcactgtgcccgtcgaaatgatgcaggctagaacttacccccttagatggttcctcctggagcagccagaaattcaagtggcacatttcccatttaagaacaacatgtcttttgtggttcttgtgccaactcattttgaatggaatgtgagccaagtcctggcgaatctgtcatgggacactttgcatcctccactggtctgggaacgacccaccaaagtgcgcctgccgaagttgtacctgaagcaccagatggatctggtggctaccctttcgcagctgggactccaagagcttttccaggcccctgatctgcgcggaatttcagagcagagcctggtggtgtccggcgttcagcaccaaagcactttggagctgtcggaagtcggcgtggaggcagcagcagcgaccagcattgcgatgtcacgaatgtccctgtcctcgtttagcgtgaaccggccgtttcttttcttcatatttgaggacaccaccggacttcccctctttgtgggatccgtgcgcaatcctaatccatctgcacctagggagctgaaggagcaacaagattctcccggtaacaaagactttctgcagagcctcaagggttttcctaggggagacaagctctttggtcctgacctgaaactggtgcctccaatggaagaagattacccacagtttggatcacctaag

SEQ ID NO: 274364 - DNA, 1473 bp, Artificial Sequence
  derived and/or modified sequence
atggccctactgtggggcttgctggtcctaagctggtcttgtctgcagggcccttgttcagttttctcacctgtgtccgccatggaacctctaggaagacaactgacaagcggccctaaccaagaacaggtttcccccttaactctgctgaaactggggaaccaagagcctggggggcagaccgccctgaagtcccccccgggggtatgttcgagggatcccacacccgagcagacacatagactcgcccgtgcaatgatggcatttacggctgacctatttagtctcgttgcccagacctccacctgtcccaacctgattctcagccctctgagcgtggcactagcactttctcaccttgctctgggggcccaaaaccataccctccaacgattacagcaagtgctgcacgctggaagcgggccttgcttgccccatctgctgtctaggttgtgtcaggatttaggccccggcgccttccgtttggcagcacggatgtatttacagaaagggtttcctattaaggaggactttctagaacagtccgaacagctattcggtgcaaaacccgtgagcttgactggtaaacaggaagatgacttggcaaacataaaccagtgggtgaaggaggccactgaaggaaaaatccaagagttcctaagcggattgcctgaagacactgtactgctcctgctcaatgctatccatttccagggcttctggagaaataagttcgacccttctctgactcaacgcgactccttccacctagacgagcaattcacggttcccgtggagatgatgcaggcaaggacgtatcccctgagatggtttcttctggaacagccagagattcaggtcgcccacttcccttttaaaaacaatatgtcctttgtcgtattggtgccaacgcatttcgaatggaacgtgagccaggttctggccaacctgtcttgggatacccttcacccacccttggtgtgggaaaggcccactaaagtgaggctccccaagctctaccttaagcaccagatggacctcgtggccaccctctcccagctcggtctacaagagctgttccaggctcccgacctacgtggcattagcgaacagagcctggtggtctccggggtgcaacatcagtctacgctggagctgagcgaagtgggagttgaggcagcagccgccactagtatcgctatgtcacgcatgagtctgtcctcctttagcgtaaatcgaccttttttgtttttcatttttgaggacactaccggacttccacttttcgtgggcagcgttcgtaatccaaacccaagtgccccccgagagctgaaagagcagcaagacagcccgggcaacaaagatttcctgcagtcccttaagggtttcccgaggggcgacaagctattcggacctgatctgaagcttgtcccacccatggaggaagactatcctcaatttggctcccccaaa

SEQ ID NO: 274365 - DNA, 1473 bp, Artificial Sequence
  derived and/or modified sequence
atggcacttctctggggcctgctcgtcctttcctggtcatgcctgcaaggtccctgttcagttttttcgcctgtgtcagcgatggaacctctgggacgccagttgacctctggaccaaaccaagagcaagtgagccctctgactcttcttaagctcggcaaccaagagcctggcggtcaaactgccctcaagtcccctccaggagtctgttcaagggaccctactccagagcagactcaccgcctggcgcgggccatgatggcatttaccgccgatttgttctcactggtggcacaaaccagcacgtgtcccaatcttatcctttcgccactgtcggtcgcactggccctgtcacatctggcgctcggtgcacagaaccacactcttcagcgactgcagcaagtgctgcatgcagggagcggaccctgtctgcctcatcttctttccagactttgtcaagatctgggacctggagcctttagacttgcagcacgcatgtacctgcagaaaggatttcctatcaaggaggattttctcgaacagagcgaacaactctttggggcgaagccagtctctctgaccgggaagcaagaagatgacttggccaacattaatcagtgggtcaaggaagcaactgaaggaaaaatccaggaatttctcagcggacttccggaagataccgtgcttctccttcttaacgctattcatttccaggggttttggcgcaacaagtttgatccgtcgcttactcaacgcgattcgtttcatctggacgaacagtttaccgtccccgtcgaaatgatgcaagcgcggacctacccactgcggtggttccttcttgaacagcctgagattcaagtggcacactttccttttaagaacaacatgtcctttgtcgtgctggtgccaacccatttcgaatggaatgtgtcccaggtgcttgcaaaccttagctgggatactctgcaccctccccttgtctgggaaaggcctaccaaggtgagactcccgaaactttaccttaagcatcagatggatctggtggcaacgctttcgcagcttggtctgcaggaactttttcaagcaccagatctccgcggaattagcgagcaaagtttggtggtcagcggagtgcagcatcaatccactcttgaactgtccgaagtgggtgtggaagcagcagcagcaacctctatagcaatgtcaagaatgtcgctctcatcatttagcgtcaataggccatttctcttctttatctttgaggacactaccggccttcctctttttgtgggctcagtgcgcaacccaaatccatcggcaccacgggaactgaaggaacagcaagactcgccaggaaataaggattttctccaaagcctgaaggggtttcctcgaggagataagctgttcggcccagacctgaagctggtgccacctatggaggaggattatccacagttcgggtcccccaaa

SEQ ID NO: 274366 - DNA, 1473 bp, Artificial Sequence
  derived and/or modified sequence
atggcattgctgtggggactgctcgtcctgtcgtggagctgtttgcaaggcccctgctcggtgttttccccagtctccgcgatggagccgctgggacggcagctgacctcaggaccgaatcaggaacaggtgtccccgctcactctgctcaaacttggcaaccaggagccaggaggccagactgctctgaaaagccccccgggagtgtgctcgagggatccgacccctgagcaaactcacagactcgcgcgcgccatgatggccttcactgcagatctgttcagcctggtggcccagacctcaacctgcccgaaccttatcttgtcaccactgtcggtggctttggcgttgtcccacctggcccttggagcccagaaccatactctgcaaagactgcagcaggtgctccacgctggaagcggaccgtgtctgccccacctcctgtcgcgcctctgtcaggacctgggtcccggagccttccggctggccgcccggatgtacctccaaaagggcttcccaatcaaggaggatttcctggaacaatcagagcagctcttcggagccaagcctgtgtcattgactggcaagcaagaagatgatctggctaatatcaaccagtgggtgaaggaggccaccgaaggaaagattcaggagttcctcagcggactgccggaggacactgtcctgctccttctcaatgccatccatttccaaggtttttggcgcaacaagtttgatccttctctgactcagcgggactcgtttcacctggacgaacagttcactgttccggtcgagatgatgcaggctcgcacgtatccgttgcgctggttcctgttggaacagccggagatccaagtggcccatttcccattcaagaataacatgagcttcgtcgtccttgtccctactcacttcgaatggaacgtctcccaagtgctggcaaacctgagctgggacaccctgcacccgccactggtttgggagaggccgaccaaggtgagactcccgaaactttacttgaagcatcaaatggatctggtggccactctgtcgcagcttgggctgcaggagcttttccaagcaccagacctcagagggatcagcgaacagtccttggtggtgtcaggcgtgcaacatcaaagcaccctcgaactttccgaagtgggagttgaggccgcggctgccacctccatcgcgatgagccggatgtcgctgagctcctttagcgtgaaccgcccgttcctgttcttcatattcgaagataccaccggcctgccgctgtttgtgggatcggtcagaaacccgaatcccagcgcgccgcgggaactgaaggaacagcaagactcgccgggcaacaaggatttccttcagtcactgaagggattcccgaggggggacaaactgttcggacctgacctgaaattggtgccgccgatggaagaagattacccgcagtttggaagcccaaaa

SEQ ID NO: 274367 - DNA, 1473 bp, Artificial Sequence
  derived and/or modified sequence
atggctctgttgtgggggttgctggtgctgtcttggagttgcctccagggtccttgcagcgtgttcagcccggttagcgcgatggaaccacttggtagacagctaacatcggggccaaatcaagagcaagtgagccccctcacactgctgaagctgggcaatcaggaaccgggcgggcaaacagctctcaagtcccctcccggcgtctgctcccgggatcctacccctgagcagactcatcgcctggccagagcaatgatggcgtttactgccgatctgttctcactagtggctcaaacaagtacctgccctaatctgattctgagccctctctccgtggctctcgctctttctcaccttgcactgggcgcgcagaatcataccttacagagactgcagcaggttttgcacgccggatctggtccttgcctgcctcacctcctgagtaggctgtgccaagacctaggacctggtgcctttaggctggccgctaggatgtacctgcagaagggcttcccaattaaagaagacttcctcgaacagagcgagcaattgttcggggctaagccagtgtcactgaccggaaagcaagaggacgacttagctaatatcaaccagtgggtgaaagaagctactgagggcaaaatccaagaattcctgtccggactgcccgaagacaccgttcttctcctgctgaacgcaatccattttcagggattttggcgaaacaaattcgacccctccctaacgcagcgggatagcttccacctggatgaacagttcaccgtgcctgtcgagatgatgcaggccagaacttatcccctcagatggttcctgctcgagcaacccgagattcaggtcgcgcactttccattcaagaacaatatgtccttcgtcgttctcgtgccgactcatttcgagtggaacgtctcccaggtgctagctaatctgagctgggacacacttcatccccccttggtgtgggagaggcccaccaaagttcgcctccctaaactctatttgaaacaccagatggacctcgtcgccactttaagccagctggggctgcaggagctgtttcaggcgcctgaccttcggggtatctccgagcagagtctggtggtaagcggtgtgcaacatcagtcaactcttgaactctccgaagttggagttgaggcagcagcggcgacgagtattgcgatgtctcgaatgagcctgagcagtttttccgtgaatcgcccctttctgttctttatcttcgaagacactaccggtttacctctgtttgtcggcagtgttcgcaaccccaacccctccgcgcctagggaacttaaggaacagcaagactcccccgggaacaaggattttcttcagagcctgaagggcttccccaggggggataaactgtttggccctgacctcaaactggtgcccccaatggaggaggattaccctcagtttggctcccccaaa

SEQ ID NO: 274368 - DNA, 1473 bp, Artificial Sequence
  derived and/or modified sequence
atggcactgctgtggggcttgctcgttttgtcgtggtcgtgcttgcagggaccttgctcggtctttagcccggtgtcggcgatggaaccgctgggccggcaacttacctcaggaccaaatcaagaacaagtgtcccctcttacgcttctgaaacttggaaaccaggaaccgggaggacagaccgccctcaaatcacctccgggagtgtgtagcagagatcctaccccggaacaaacccatcggttggcgcgggccatgatggcattcaccgctgacctgttcagtctggtggcccagacctcgacttgcccgaatctgatcctgtcaccactgtccgttgccctggcgctgtcccacttggccttgggagcgcagaaccatactctccagcgcctgcagcaggtgctccacgctggatctggtccgtgtctcccgcatctgctttcgaggttgtgccaagacctcggaccgggtgccttcagactcgcggctcgcatgtacctgcagaagggatttcccattaaggaggactttctcgaacagtcggagcaactcttcggcgccaaaccggtgtccctgaccggtaaacaggaggacgatctggctaacattaaccaatgggtcaaggaggcaaccgaaggaaaaatccaggagtttctgtccggactcccggaagatactgtgctgctgctcctgaatgcgatacacttccaaggcttctggcggaataagttcgacccttctctgacccagagagacagttttcacctggatgagcagttcactgtcccggttgagatgatgcaggcgagaacctacccgctgcgatggttcctgttggagcagcctgaaatccaggtcgcccatttcccgttcaagaataacatgtcattcgtggtgctggtgcctactcactttgagtggaatgtgtcgcaggtcctcgccaacctctcatgggatactctgcaccctccgctcgtatgggaacgcccgacgaaggtgcgtctgccaaagctctatctgaagcatcaaatggatctggtggcaactttgtcccaactcggactgcaagaactgtttcaagccccggacctgcggggaatctcggagcagtcgctcgtcgtgtccggggtgcaacaccagagcactttggaattgtccgaggtgggtgtggaagcagctgccgcgacttccatcgctatgtcacggatgtcactgagctcctttagcgttaacagaccattcctgtttttcatctttgaggacactactggactgccactcttcgtggggagcgttagaaaccccaacccaagcgcgccgcgcgagcttaaagaacaacaagactcgccagggaataaggacttccttcagagcctcaaggggttcccgcggggtgacaagctctttggacctgacctcaaactcgttccgcctatggaagaggattaccctcagttcgggtcgccgaag

SEQ ID NO: 274369 - DNA, 1473 bp, Artificial Sequence
  derived and/or modified sequence
atggccttactgtggggccttcttgttctctcctggtcatgtttgcagggtccgtgctccgtcttttctcccgtgtcggcaatggaaccactgggcaggcaacttacctcaggccctaatcaagagcaggtatctcccctgacactactgaagttgggaaatcaagaacctgggggacaaacagccttaaagtccccccccggtgtatgctcccgtgaccctaccccagagcaaacacataggttggcaagggcgatgatggctttcactgcagacctcttctcacttgtggcacagacatccacctgtcctaatctgatcctttctccgctgagtgtggcactggctttgtctcatctggccctcggagcccagaaccatactcttcaacgcctgcaacaggtgctgcacgccggctctgggccctgtctgccgcacctcttatcacggttatgccaggacctgggaccaggggccttccgtcttgccgcccgcatgtatctccagaaaggtttccctatcaaggaagacttcctcgagcagagcgagcaactgttcggagcaaaacctgtgagcctgaccggtaaacaggaggatgacctggccaatattaatcaatgggtaaaggaagctacagaaggcaaaatccaggagtttctgtccgggctgccagaggataccgttctgttactgcttaacgccatccacttccagggattttggcgcaacaagttcgatccatcccttacacaacgagactctttccacctggatgagcagttcacagttcctgttgagatgatgcaggcgagaacgtaccctttaaggtggttcttactggagcaacccgaaattcaggtggcacactttccattcaagaacaatatgtctttcgtcgtgctggtcccaacacactttgaatggaacgtgtcccaggttttagcgaatctatcatgggacactcttcatccaccactggtgtgggaaaggccaaccaaggtgcggctgccgaagctttacctgaagcatcagatggatctggtagcgaccttatcccaactaggcctccaagagctgttccaagcacccgatctgcgagggatttcagaacagagcctcgtagtcagcggggtgcaacaccagagcaccttagagctgagtgaagtcggcgtcgaagctgccgcagctacttcaatcgccatgagccggatgtctctgtcaagcttttcagttaaccgcccttttttgttcttcatctttgaagacactaccgggttgccactgtttgtggggtctgtacgcaatcctaacccttcagctccccgggaactaaaggaacagcaagactcccccgggaataaagactttctgcaaagtctgaaggggtttcccagaggggataagctctttgggccagacctgaaactcgtcccacccatggaagaggactatccccaatttgggagccctaaa

SEQ ID NO: 274370 - DNA, 1473 bp, Artificial Sequence
  derived and/or modified sequence
atggctctgctatggggtttgcttgttttaagctggtcttgccttcaggggccctgttcggtgttttcacccgtctcggccatggagcccctcgggcggcagctgacgtccggacctaatcaagaacaggtgagccctcttaccctgttgaagctgggcaatcaagaaccaggcgggcagaccgccctaaaatccccacctggggtctgcagcagggatcctactcctgaacagacacatcgcctggcacgcgcgatgatggcctttacggccgatctcttctcgctggtggcacagacatcaacatgccccaaccttattctatccccgttgtcggttgcattggctctcagtcaccttgccctaggagcccaaaatcataccttacaacgcctccagcaagtgctgcatgccgggtcggggccctgcctcccccatctgctatcgcgtctgtgccaggacctggggcctggtgcattccggctagccgcaaggatgtatctccaaaagggatttcctatcaaggaggactttctggagcaaagtgagcagctgttcggcgctaagccagtctcactgaccgggaaacaggaggacgacctggcaaatatcaaccaatgggtcaaggaagctaccgagggcaagattcaggagttcctgtctggcctgcccgaggacaccgtactcctgctgctgaacgcaattcactttcaagggttttggcggaacaagttcgatccgagtttgacacaaagggacagctttcacctggatgagcaattcacagttccggtagaaatgatgcaggctaggacctatcctctgagatggtttttgctggagcaacctgagatccaggtcgcacactttccatttaagaacaatatgagctttgtagtacttgttcccactcacttcgaatggaatgtgtcacaggtgctggcaaacctctcttgggatactttgcacccccccctcgtctgggaaaggcccaccaaggtgcggctacctaagctgtacctaaagcaccagatggacctcgtcgccaccttaagccaactcggcctacaggagcttttccaggccccagatcttaggggaatttcagaacagagtcttgtggtgagcggcgtgcagcaccaatccactctggaactgtcagaggtaggggttgaagctgccgcagcaactagcatcgcaatgagtcggatgtctctgagcagtttcagcgtgaatcggcccttccttttttttatatttgaggatacaaccggccttcccctatttgtgggctcagtgcgaaaccccaacccctcggctcctagggaactgaaagagcagcaggattcaccaggtaataaggactttctccagagcctgaaggggttcccccgaggggacaaattgttcgggccagatttaaagcttgtgccaccaatggaagaggattaccctcagttcggtagcccaaag

SEQ ID NO: 274371 - DNA, 1473 bp, Artificial Sequence
  derived and/or modified sequence
atggcacttctttggggacttcttgtgctgtcctggtcctgccttcagggaccctgctccgtgttttcaccggtgtcggcaatggaaccactggggagacaactgacttcaggcccaaatcaggagcaggtgtcccctctgactctgctcaagctgggtaaccaggaacctgggggacagactgctctgaagtcccctcctggagtctgtagcagagatccaaccccagaacagactcatcgactggccagagctatgatggcgttcactgcagacttgttcagccttgtggcacaaacttcgacctgcccgaacctcatactgagcccactgagcgtggcactggcacttagtcacttggccctgggtgcccaaaatcatactctgcaacggctccagcaagtgcttcacgcgggatccggaccctgcctgcctcatctgctgtcaaggctgtgtcaagatctgggtccaggcgcatttcgcctggcagcccggatgtacttgcagaaagggtttccgataaaggaagattttctggaacagtccgaacagctttttggcgcaaagccagtgagccttaccggaaagcaagaagatgaccttgcgaacatcaaccagtgggtcaaggaagcgactgaagggaaaattcaagaatttctgagcggacttccagaagataccgttctgctgcttcttaatgcaattcacttccagggtttctggcgcaacaagtttgacccttccctgacgcaaagagattcctttcacctggatgaacagttcacggtgcctgtggaaatgatgcaagcccggacctatcctcttcggtggtttctccttgagcaacctgaaatccaagtcgctcatttcccctttaagaataacatgtcctttgttgtcctggtgcctacgcattttgagtggaatgtctcccaagtgcttgccaacctctcatgggacaccctccacccgcccctggtctgggaaaggcctaccaaggtgcgattgccaaagctgtaccttaagcaccaaatggatctggtggcaaccctgtcccaacttggcctccaggaactgtttcaggcgcccgaccttcgcggaatttcagaacaatcgctggtggtgtcgggggtgcagcaccagagcaccctggaacttagcgaggtcggagtggaagcagcagccgcaacttcgatcgcgatgtcgcggatgagtctctcgtcgttctcggtcaataggcctttcctcttcttcatttttgaggacaccactggcctccctctgttcgtcggaagcgtgcgcaaccccaatccgagcgcccctagagagctgaaagaacagcaggattccccaggaaacaaggattttctccagagcctgaagggtttcccccgaggagataaacttttcggccctgatctcaagctggtgccacctatggaagaggactacccccagtttggctcgccaaag

SEQ ID NO: 274372 - DNA, 1473 bp, Artificial Sequence
  derived and/or modified sequence
atggccctcctttgggggttactcgtgttatcctggtcttgcctacaggggccttgtagtgtgttcagccctgtttccgcaatggaacccctgggcaggcaactcacatctggaccaaaccaggagcaggtcagcccactgaccctgcttaagctgggaaaccaggaaccaggaggtcagacagccttaaagagccctccaggagtgtgcagtagggacccaacacccgagcagacccacaggctggctcgcgctatgatggcctttacggctgacctgtttagcttggtcgcccagacttccacctgcccaaatctaatcttgagcccactctctgtggccctcgccctctcacacctcgctttaggggcacagaaccacaccctgcagaggctgcagcaggttttgcacgctgggtccggtccttgccttccccatctgctgtcacgtctttgccaggacttgggcccgggtgcttttcgcttggctgcccggatgtacttgcagaaggggttccccattaaggaggacttcctggaacagtcagagcagctgttcggcgcaaagcccgtcagtttgactggtaaacaagaagacgacctagcaaacatcaatcagtgggtgaaagaagctactgagggaaagatccaagagttcctttccggcctgccagaagatactgtgcttttactcctaaatgcaatccatttccaggggttttggagaaataaattcgatccgtctctcactcagagggactcctttcacctggacgaacagtttacagtaccagtagaaatgatgcaagctcgtacataccccctgcggtggtttctgcttgaacagccggaaatccaagttgcccattttcccttcaagaacaatatgagctttgtcgtcctggtgccaacccattttgaatggaacgtcagtcaagtccttgctaatctgagttgggacaccctgcatcctccactggtctgggagcggcccaccaaggtccgcctgccaaagttatatttgaaacaccagatggatcttgtggccaccttaagtcagctgggcttgcaggagctgttccaggcccctgatctgcgcggcatcagcgagcagtcgctggttgtgagcggggtgcagcatcagtcgacgctggagctttcggaagtgggagtggaagcagccgctgccacctctatcgccatgtctcgcatgtccctgtcaagtttcagcgttaacaggccctttttattcttcatcttcgaggatactaccggactgcccttatttgtgggatctgtccggaacccaaaccccagtgccccaagggagctaaaagaacagcaggacagccccggcaacaaggactttttacagtccctaaagggattccctcgcggggacaaactgtttgggcctgatctgaaactcgttcctcctatggaggaggactatccacaattcgggtcaccaaag

SEQ ID NO: 274373 - DNA, 1473 bp, Artificial Sequence
  derived and/or modified sequence
atggccctgttatgggggttgctagtgctgtcctggagctgtctacaggggccgtgtagtgtgttttctccagtcagtgctatggaaccgctcggacgccagttgacgtcagggcccaatcaggagcaggtgagccctctgaccctcctgaaacttgggaaccaggagccaggtggtcagacagcgcttaaatctcctcccggggtgtgctctagggatcccactccggaacagacacaccgcttggctagagcgatgatggctttcacagctgatctgttttcattggttgcccagacatctacctgtccaaacctgattctgtcacccctgagtgtggcccttgccctcagccacctggctctgggcgcacagaaccacactctacagcgcttacagcaggttctgcacgcaggctctggcccgtgcttacctcaccttttatcgagactctgccaggacctgggccccggcgcctttcgattggcggccaggatgtatctacagaaaggatttcccattaaagaggacttcttagaacagtccgagcaactgtttggcgcaaaaccagtcagcttgaccggcaagcaagaagatgatctggctaatatcaatcagtgggtgaaagaggctactgaagggaagatccaagagttcctctccggtctgccagaagatacggtgttattgttgctgaacgccattcacttccagggattttggcgtaataagttcgacccaagcctgacccaacgcgattcattccacctggacgaacaattcaccgtgccagtggagatgatgcaggcgagaacctaccctctgcgatggttcttactggagcaacccgagattcaggttgctcacttcccatttaagaataacatgtcctttgttgtgctcgtgcctactcattttgagtggaacgtcagtcaagtcctcgcaaacctttcttgggatacccttcatccacctctggtctgggagagacctaccaaggtgcggctgccaaagctatatctcaaacaccagatggacctggttgccacactgtcccaactcggacttcaggagctgtttcaagctcccgacctcaggggcatatctgagcagtctttggtggtgtctggcgtccagcaccagtccactctcgaactgagcgaggtgggtgtggaagcagctgccgccacgagtatcgcgatgagcagaatgtcactgtcttcgtttagcgtcaacagaccgtttctgttctttatcttcgaggacactaccggattgcctctctttgtcggttcagtacgtaacccgaaccctagcgccccacgagaattgaaagagcaacaggatagcccggggaacaaagatttcctgcagtcactgaaagggtttcctaggggggataaactatttggtccagacctcaaactcgtgcctccgatggaggaagattacccgcagttcgggtcccctaag

SEQ ID NO: 274374 - DNA, 1473 bp, Artificial Sequence
  derived and/or modified sequence
atggccttactctgggggctgctggttctgtcatggtcttgtctgcagggcccgtgtagcgtgttctcacctgtttcagccatggaacctctgggtcgacagctgactagcggaccaaaccaggaacaggtctcccccctgacccttctaaagctcggaaaccaggaaccgggcggacagaccgccctgaaatctccacctggggtgtgtagtcgcgatcctactcccgaacagacccatcggctcgctcgcgccatgatggcctttacagcagacctgttctccctggtggcccagacatccacgtgtcccaatctgatactcagcccgctgagtgtcgccctcgctctgtcacacctggctcttggggcccagaaccataccctgcagcggttgcagcaggtcctgcacgctgggtctggcccttgcctcccccatttgctctctcgtttgtgccaggacctcgggccaggcgccttcaggctggctgcaaggatgtacctgcagaaggggtttcccatcaaggaggactttctggagcagtccgagcaattatttggcgccaagccagtaagcctcaccggaaaacaggaggacgacctggccaatatcaatcaatgggtcaaggaggcgacggagggcaaaatccaagaattcctctctggccttcccgaggatacagtccttctattgctgaacgccatccattttcagggcttttggaggaacaaattcgatcccagcttaacccagcgcgatagttttcatcttgatgaacagttcaccgtgcccgtcgagatgatgcaagctaggacctaccccttgcgctggtttctgctggaacagcctgaaattcaggtggcccattttccttttaagaataacatgagctttgtggtgctggttccaactcatttcgaatggaacgtatctcaggttctggcgaatttgtcctgggataccctacacccaccccttgtatgggaaaggcccactaaagtcaggctgcctaagttatatctcaagcaccagatggatttggtagcaacactgagccagctcggcctccaggaactgttccaggctcccgacctgcgcggcattagtgaacagagtttagtggtttccggcgtacagcatcagtccactctggagttgtccgaggtgggggtggaggcggctgccgctacatccattgccatgtcccggatgtccctgtcttccttctccgtgaataggccatttctgttctttatcttcgaggacaccaccggtctcccgctgtttgtgggaagcgtgagaaacccaaatcccagcgccccccgtgagctcaaagaacagcaggattcgcctggtaataaggatttcctgcaatcgctaaagggattccctcgcggcgacaaacttttcggccccgatctgaagttggtcccgcccatggaggaagattatccccagtttggatctccaaaa

SEQ ID NO: 274375 - DNA, 1473 bp, Artificial Sequence
  derived and/or modified sequence
atggcactcctgtggggtctgttggtgctttcatggagctgtctccagggaccttgttccgtgttttcgcccgtatcggccatggaaccactcggtagacagctgacttcgggacctaaccaagagcaggtgtccccattgaccctgctgaaactgggtaatcaagaacccggtgggcagactgcacttaagtctccaccaggtgtgtgttcccgcgatcctacccccgaacagactcatagactggcacgcgccatgatggcattcacggccgatctgttcagccttgtggcacaaaccagcacctgtccaaacctcattctctcgcctcttagtgtcgccctggcattgtcccatcttgcgcttggtgcacaaaatcacaccctgcaacggctgcagcaagtccttcatgcaggatccggaccttgcctgcctcatcttcttagccgcctctgtcaagatctcgggcctggagcatttaggctcgcagcacgcatgtacctgcaaaagggatttccaataaaggaggacttcctggaacaatccgaacagctgtttggggccaaaccagtctccctgaccggtaagcaggaggacgatcttgcaaacattaaccaatgggtgaaagaagccaccgaaggaaagatccaagaattcctgtccggactccctgaggataccgtgctgcttctcctcaatgcgatacacttccaagggttctggcggaacaagttcgatccatcactcacccagcgcgactcatttcacctcgatgaacagttcaccgtgcccgtggaaatgatgcaagcacgaacctaccccctgcgctggttccttctggaacagccagagatccaagtggcacactttccgtttaagaacaacatgtcattcgtggtcctggtccctactcactttgagtggaatgtgtcacaggtcctggctaacctctcctgggataccctgcacccgccacttgtgtgggagcgcccaacgaaggtgcggctgcctaagctctacctgaaacatcagatggacctggtggcgacgctttcccaactcggtttgcaggaactctttcaggcccctgacctgcgcgggattagcgagcagtcgctggtggtttcgggggtccaacatcaaagcaccctcgagcttagcgaagtgggggtggaggcggctgccgcaacgtcgattgccatgagccgaatgagcttgtccagcttttccgtcaatagaccgtttttgtttttcatctttgaagatactaccggtttgccactttttgtgggatcagtcagaaaccctaatcccagcgcaccgagggaacttaaggagcaacaggactctccgggaaacaaagattttctccagagcctgaagggattcccaagaggtgataagctctttgggccagacctcaagctcgtgcctcctatggaagaagattacccccagtttggatcaccgaaa

SEQ ID NO: 274376 - DNA, 1473 bp, Artificial Sequence
  derived and/or modified sequence
atggcccttctgtggggactgcttgtgctttcctggtcatgtctgcaagggccctgttcagtgttctccccggtgtccgcaatggagccgttggggcgccaactgacctcaggacccaatcaggaacaggtgtcaccacttactcttctcaaactgggaaatcaggaaccgggaggccaaactgcgctgaagtcccctcctggcgtctgtagcagagatccgacgcccgaacaaacccacagactggcacgggcaatgatggcattcaccgcagacctcttttctctcgtggcacagacctcgacttgccccaaccttatcctgtcgcctctgtcggtggctcttgccctgtctcacttggcccttggggcacaaaaccatactctgcaaagactgcaacaagttcttcacgcgggtagcggaccctgtctcccgcatctgctttcacgcctctgccaggatctgggtcctggagcattccgccttgcagcgcgtatgtacttgcaaaagggtttccctattaaggaagattttcttgaacaatctgaacaactcttcggagcaaagccagtctcgctgactggcaaacaagaggacgatctcgccaatatcaaccagtgggtgaaggaagccaccgaaggaaagatacaggagtttctgtcgggcctcccagaagatactgtgttgttgctgcttaacgcaatacatttccaagggttttggaggaacaagtttgacccttccctgacccagcgggactccttccatctggacgagcagtttaccgtcccagttgaaatgatgcaagctaggacgtatcctctgcgttggttccttcttgaacagcctgaaattcaggtggcacattttccatttaagaacaacatgtcatttgtggtgttggtgcctactcattttgagtggaatgtgagccaggtgttggccaacctcagctgggacacgcttcaccctcctctggtgtgggaaagacccaccaaagtgagactgccaaaactctatttgaagcatcaaatggacctcgtggcaaccttgagccagttgggcctccaagagctgttccaggctccggatttgagaggtatttccgagcagtccctggtcgtctctggtgtgcaacaccagtccacccttgaactcagcgaggtcggggtcgaggccgcagcagccacctccattgcgatgtcgaggatgagcctttcatccttcagcgtgaatcggccgttcctgttcttcatctttgaagatactactggactgcctctctttgttgggagcgtgcgaaatccaaacccttcggccccaagagaactcaaggagcaacaagactcgcccggaaacaaggattttctgcaatcccttaaaggatttcctcgcggcgataagttgtttggaccagatctgaaactcgtcccaccaatggaagaagattacccccagtttggatcgcccaag

SEQ ID NO: 274377 - DNA, 1473 bp, Artificial Sequence
  derived and/or modified sequence
atggctctgttgtgggggctgctcgtactgtcctggtcatgtctccagggtccatgctcagtcttctcccctgtatccgcaatggaaccactaggtcgccagctcacgagcgggccaaaccaggagcaagtgtctcccctgactttgctcaagctagggaatcaggagcctggaggacagactgcgctgaaatctccacccggagtgtgcagccgggatcctacacccgagcagacccacagactggcccgcgctatgatggcctttacagcggatttgttctccctagtggcccagacctcaacgtgccctaacctaatcctgtctcccttgtctgtcgcactggccttatctcatcttgccctgggagcccaaaatcacaccctgcagcgcctgcagcaggtgctgcacgcggggtcggggccgtgtctgcctcacctgctctccaggctgtgccaagacctcgggcctggagccttccgtctcgctgcgagaatgtacttacaaaagggctttcccattaaggaggatttcctggagcagtctgaacagctgttcggcgcaaaaccagtcagcttgaccgggaaacaagaggacgacctcgcaaacatcaaccaatgggtaaaagaagcgacagagggcaagatacaggagtttctcagcggactgccggaggacacggttctgctgctactgaacgctatccactttcagggtttttggcgcaataagttcgaccctagcctgacacagcgtgattcatttcacttggatgaacagtttactgtgccggtcgagatgatgcaagccagaacttatccgctaaggtggttccttctggagcagcctgaaatccaggtggcgcactttccattcaagaataatatgtcttttgtggtgctggtgcccacacatttcgaatggaacgtgtcccaagtcctggcgaacctctcttgggacacgcttcacccacctctggtgtgggaacggcccactaaggtccgcctgcctaagttgtacctgaagcaccagatggacctggtggctactctgtcccagcttgggttgcaagagctgttccaggcacccgatcttcggggaatctctgagcagtcgctcgtggtttccggtgtgcagcaccagtctaccttggagctttctgaggtaggcgtggaggctgccgcggcaacatctattgcaatgtcccggatgtctctgtcttctttttcagtgaacagaccctttctatttttcatctttgaagacacaactggacttccactcttcgttggctcagttcggaaccctaacccgagcgcgccacgtgagctgaaagaacagcaagattctccgggaaacaaagattttctgcagagcctgaaagggttcccacggggtgacaagctgtttggccctgatctaaaattggttcccccaatggaagaagactacccgcagttcggtagtcctaag

SEQ ID NO: 274378 - DNA, 1473 bp, Artificial Sequence
  derived and/or modified sequence
atggccctcctctggggtctgctcgtgctgtcgtggagttgccttcagggcccgtgctcggttttctcaccagtgtcggccatggaaccgttgggaaggcagctcaccagcgggcctaaccaggagcaggtgtcccccctcactctgctgaagctgggcaatcaagagcctggagggcagactgcgctcaagagcccacccggagtttgctcacgagatcccacgcccgagcagactcaccggctggcccgcgcaatgatggccttcaccgcagatctcttctcgctggtcgcccagacttctacctgtccaaacctcatcctcagccccctgtcggtcgctctcgccctctcgcatctggccctcggggcccaaaaccacacccttcagaggctgcaacaggtactgcatgccggatctggcccatgtctcccgcatctgctctcccgtttgtgtcaagatctcggcccaggagcgttccggctcgcggctagaatgtaccttcagaaaggatttcctatcaaggaggacttcctggaacaatctgagcagcttttcggagcaaagccggtcagcctgaccggaaagcaggaagatgacctggccaatatcaaccaatgggtgaaagaagctactgaaggtaagattcaggagttcctttccggacttccagaggacaccgtcttgctcctcctgaatgccatacacttccagggcttctggcggaacaagtttgacccgtccctcactcaacgcgacagcttccaccttgacgaacagttcacggtgcctgtggaaatgatgcaggcgcgaacttacccgcttcggtggtttctcctggaacagccagaaatccaagtggcccattttccatttaagaataacatgtctttcgtcgtgctggtcccgacccatttcgagtggaacgtgtcacaggtgctggcaaatctctcctgggatacccttcacccgcctctggtgtgggaacggccgaccaaggtcagactccctaagctgtacctcaaacaccaaatggacctggtcgcaactctgtcccaactcggcctgcaggaactgtttcaggcgccagaccttagaggaatctcagagcaatcactggttgtctcaggagtgcagcaccaatccacgctcgaattgagcgaagtgggagtcgaggcagccgctgccacgtcaatcgcgatgtcccggatgtcactctcgtccttttcagtgaatagaccattcctcttcttcatctttgaggacactaccggcctgcctctgttcgtgggttcggtgcgcaaccctaacccgtccgccccgcgcgaactcaaggagcaacaggactccccgggaaacaaggacttcctccagtctctgaaaggattcccgcggggcgacaaactgttcgggccggatcttaaactggtgcccccgatggaggaggactacccgcaattcggctccccgaag

SEQ ID NO: 274379 - DNA, 1473 bp, Artificial Sequence
  derived and/or modified sequence
atggccctgctctggggtctcctggttctttcatggagctgtctccagggaccttgtagcgtattttctccagtgtccgcaatggagccattgggtcgacagctgactagcggcccgaaccaggaacaggttagccccctgaccctcctgaaactcggcaaccaggagccgggcggtcaaacagcccttaagtcacctccaggcgtgtgttctagagaccctacgcccgaacagacccaccgcctggcaagagcgatgatggcttttacggctgatttgttctctctcgtggcacagacatcaacttgtcctaacctaattctgagccccctaagcgttgctctcgcccttagtcacttagctcttggggcacagaaccacacactccaacggcttcaacaagtgctccacgcaggttcgggtccatgtctgccacatctgctgtctaggctgtgtcaagacctgggaccaggcgccttccgactagcagcccggatgtacttgcagaagggcttcccaatcaaggaggacttcctcgagcaatcggagcagctattcggcgctaaaccagtgtccctcaccggaaagcaggaggacgacctggccaatatcaatcagtgggttaaagaggccactgagggaaagatacaggagttcctgtctggactcccagaggatacagtgctactgctactaaacgcgatccacttccagggcttttggcgtaacaagtttgatccgtcactgacccagcgggacagcttccacctggatgagcagttcaccgttcccgtggaaatgatgcaagcacggacatacccactccgctggtttctcctagagcagccggaaattcaggttgcccatttccccttcaaaaacaatatgtcgttcgttgtcttggtgcccacccattttgagtggaacgtgtcccaagtgctcgcaaacctgtcctgggataccctgcacccccccctggtgtgggaacgacccacgaaagtgagactccctaagctttatctgaagcatcagatggacttagtggccacattatcgcagctgggactccaggaattgttccaggccccagacttgaggggtataagtgagcagtccttggtagtttccggcgtgcagcaccagagcacactggagcttagtgaggttggggtggaggctgctgctgcaacaagcatagctatgtctaggatgagcctcagctcttttagtgtgaataggcccttcctgttcttcatttttgaagacaccacaggtcttcctctttttgtgggaagtgtcaggaaccccaatccatcagcacccagggagctcaaagagcagcaggacagcccggggaataaagatttcctgcagagcctgaagggatttcctcgcggagacaagctgtttggcccagatctcaagctcgtgccacccatggaagaggactaccctcagttcgggtctcctaaa

SEQ ID NO: 274380 - DNA, 1473 bp, Artificial Sequence
  derived and/or modified sequence
atggcgctcctctgggggttgctggtgctatcctggtcgtgcttacagggtccatgctccgtgttcagccccgtcagcgccatggaacctttgggaagacagttgaccagcgggcccaatcaggagcaagtgtcaccactgacgctcctgaaactgggcaatcaggaacccggcgggcagaccgctttaaaatcaccccccggcgtctgttcccgtgaccctacacccgaacagacccatagactcgctcgagcgatgatggcttttacggcagacctgttctctctggtcgctcagacgtcaacttgcccaaacttgattctcagccccctcagcgtggctctggcccttagccatctcgcccttggagctcagaaccataccctgcaaaggctgcagcaggttctgcacgccggatccggcccttgcctccctcacctcttgagcagactgtgccaggacctagggccaggcgcttttaggcttgccgcacgaatgtacctgcagaaggggttccctattaaagaagactttctggaacaatctgaacagctttttggagccaaacctgtgtcattgacaggtaagcaggaggatgacctggccaatatcaaccagtgggtgaaggaggccaccgaggggaagattcaagagttcctaagcgggctgcccgaggataccgttctcctcctgctcaacgcgatccatttccaggggttctggcgaaacaagtttgacccctccttaacccagcgtgactctttccaccttgatgagcagtttacggttccggtcgagatgatgcaggctaggacgtaccccttgcggtggtttctgcttgagcaacctgaaatacaggttgcgcattttcctttcaagaacaacatgagctttgtggtcctggtgcctactcactttgaatggaacgtgtctcaggtccttgctaacctgtcctgggacactttgcacccccccttggtgtgggagagaccgacaaaagtgcgtttgccgaaactgtacctgaagcaccagatggacctggtggcaaccctgagtcagctgggactgcaagagctgttccaggcccccgatctacgaggaattagtgagcaatcactcgtggtcagtggagttcaacatcaaagcaccctggagctgagcgaagtaggcgtcgaggccgcggctgcaacatctatcgccatgtcgagaatgtcactgtcctcattcagcgttaaccgccctttcctatttttcatcttcgaagacacgacaggtcttccgctgtttgttgggagtgtgaggaacccgaacccgagtgccccacgcgaactgaaggagcaacaggatagcccaggcaacaaggatttcctgcaaagtctgaaaggctttccacgtggcgacaagctgttcggccccgacctgaaactggtaccacccatggaggaggactaccctcagtttgggagtcccaag

SEQ ID NO: 274381 - DNA, 1473 bp, Artificial Sequence
  derived and/or modified sequence
atggcattgctgtggggcctgctggtgctgtcctggagttgcctgcaggggccttgctccgtgttcagtcctgtttcagccatggaacccctgggtaggcagctgacttcaggtcccaaccaggaacaggtttctcccctgacactactgaagctgggaaaccaagagccagggggccagaccgcattgaagtctccaccaggggtgtgttcaagagaccccacgccagaacagacacatcgcctggcccgggccatgatggcatttactgcggatctgttctcactggtggcccagacctccacctgtcctaatctcatattgtcaccgctctctgttgctcttgctctgtcacaccttgctttgggcgcacagaaccacaccttgcagcgcttacagcaggttctacacgctggctcaggcccctgtctcccacacctactgagccgattgtgtcaggacctggggccaggcgcgttccgcttggccgcccgtatgtacctgcagaagggcttccctataaaggaagacttcctggaacagtctgagcagctgttcggcgctaagcccgtctccctcactggcaaacaggaggacgatctcgcaaacatcaatcagtgggtcaaggaagcgactgaagggaaaatccaggagtttttaagcggactaccagaagatacagtgctcttacttttgaatgccatccattttcaggggttctggaggaataaatttgatccctccctgactcagagggattcattccaccttgatgagcagtttaccgtcccagttgaaatgatgcaggctaggacctatcctttgagatggttcctgctggaacagcctgagattcaggtagctcactttcccttcaagaataatatgagctttgttgtactggtacccactcatttcgaatggaatgtctctcaggtgttagcgaatctttcctgggatacgttgcatccacccctagtgtgggaaagaccaactaaggtgagactcccaaagctgtacctgaaacaccagatggatctggtagccaccttgtcccagttaggactgcaggaattgtttcaagctcccgacttgcgcggaatctctgagcagtcattagtggtgtccggcgtgcagcaccagagcacactggaattgagtgaagtgggggttgaagccgccgccgcaaccagcatcgcaatgtcaaggatgtccttgtcatccttcagcgtgaacaggccgtttctttttttcatattcgaggacaccacagggctcccattgttcgtgggctcagtgcggaaccctaacccttcagcccctagggagttaaaggagcagcaggacagcccagggaataaggacttccttcagagccttaaaggattccctcgaggcgataagttgtttggaccggatctaaaacttgtgccacctatggaagaagattacccacagtttggaagcccgaag

SEQ ID NO: 274382 - DNA, 1473 bp, Artificial Sequence
  derived and/or modified sequence
atggcacttctgtggggcctgctcgtgctttcctggtcatgcttgcagggtccttgcagcgtctttagccccgtgtccgcaatggaaccacttggtagacagctgacttcgggaccaaaccaagaacaagtttcccctcttactcttctcaagctcggtaaccaggaacctggtggccagaccgccttgaagtcaccacccggggtctgttcgcgcgatcccacccctgagcaaactcatcggcttgcacgcgccatgatggcattcaccgcagatctcttttcccttgtggcccaaacctctacctgtccaaaccttatacttagcccactctccgtggcactggcactttcccacctggcgctcggggcccaaaaccataccctgcaacgccttcaacaagtcctccatgctggttcaggaccttgtttgccacatctgttgtcgagactttgtcaagacctgggcccgggagcctttcgcctcgcggcaaggatgtacctgcaaaaagggttccccataaaggaagatttcttggaacagagcgaacagctgtttggagctaagccggtgtcgctgaccggaaagcaggaggacgatctggcgaacataaatcagtgggtcaaggaggcaacggaaggcaaaattcaagagtttcttagtgggcttcctgaggatacggtgctgctgctcctgaatgcaatccacttccaaggcttttggagaaacaaattcgatccttcccttacccagcgggatagcttccacctggatgaacagtttaccgtgcctgtcgagatgatgcaagcaaggacttacccactccgttggtttctgcttgaacaacctgaaatacaggttgctcatttcccttttaagaacaacatgtcatttgtcgttctcgtcccgactcatttcgagtggaatgtgtcgcaagtgcttgcaaatttgtcctgggacacccttcatcctcccctggtgtgggaaaggcctactaaggtgcgtctgcccaaactttaccttaaacatcaaatggacctggtcgcgacgctttcccagttgggacttcaagagctcttccaagcacctgatctgaggggaatttccgaacaaagcctggtggtcagcggagtgcagcatcaaagcactctcgagcttagcgaagtcggagttgaagctgcagccgccacttcgatcgcaatgtccagaatgagcttgagctccttttctgtgaaccggccttttctgttctttatctttgaggacaccactgggcttccactttttgttggatccgtgaggaacccgaacccctcggcgcccagagaactgaaggagcaacaagactcgccagggaataaagattttcttcaaagccttaaagggttcccgcgcggagacaagctgtttggccccgatctgaagttggtgccgccaatggaagaggattaccctcagtttggctctccaaaa

SEQ ID NO: 274383 - DNA, 1473 bp, Artificial Sequence
  derived and/or modified sequence
atggccctactgtgggggcttttagtgctgtcctggagctgtctgcagggtccatgcagcgtgtttagccctgtgagtgcaatggagcctttgggcagacagttgactagcggcccgaatcaggagcaggtttccccactgaccttgcttaagttggggaatcaggaacctgggggccagaccgcccttaagagcccccccggggtgtgtagcagagatcctacccctgagcagacgcaccgcctggccagggctatgatggccttcaccgcagaccttttttcactggtcgcgcagacctcaacatgcccaaacctgatcctgtcgccgctttctgttgccctcgcccttagtcatctggcactgggcgcgcaaaatcacactcttcaacgactgcagcaagtattgcatgccgggtcaggcccctgtctgcctcacttactttctagattatgtcaggatctggggccgggtgcctttagactcgccgctcgaatgtacctgcaaaaagggttccccatcaaagaagactttctggaacagtccgaacagctatttggcgccaagcccgtgtccttaacaggaaaacaggaggacgatctcgcaaacatcaatcagtgggtgaaggaggcaactgaaggaaaaattcaggaattcctgtccggcctcccagaagatacggtcctcctgctgctgaacgcaatccattttcaggggttctggcggaataagttcgacccttctcttacacagcgagactcgtttcaccttgatgagcagtttaccgtgcccgtcgagatgatgcaggcccgcacctacccattgcggtggtttctattggagcaacctgagattcaagtagcccattttccatttaaaaacaacatgagctttgtggtgcttgtgcccacccacttcgagtggaatgtttcccaggtactggccaatctctcttgggatacattgcatcccccactggtctgggagcggccaacaaaggtgcggttacctaagttgtacctaaaacatcaaatggatctggtggccacgctttcccagctcgggttgcaggagctgttccaggcgccagacttacgcggcatctccgagcagagcctggttgtgtccggggttcaacatcagtccactctggagttgagcgaggtgggggtggaagctgcagccgcgaccagcattgccatgtcccggatgagtttaagcagtttctctgttaacagacctttcctcttctttatcttcgaggatacaaccggtctccctctcttcgtcggcagtgttagaaatcctaatcctagcgcccctagggagttaaaagaacagcaggattctccaggtaataaggactttttgcagtctctgaagggctttccccggggcgacaaactctttggccccgacttaaaattggtaccacccatggaagaagactaccctcaatttgggtcacccaaa

SEQ ID NO: 274384 - DNA, 1473 bp, Artificial Sequence
  derived and/or modified sequence
atggcactgctctgggggctgttggtgctctcttggagctgtcttcagggaccgtgcagtgttttcagcccggtatccgccatggaacctctcggcaggcagttaaccagcggcccgaatcaggaacaggtgagtcctctaacgctgctgaaactcggcaaccaggagccaggcggccagaccgcccttaagtctccccccggagtgtgtagcagggacccaaccccggaacaaactcataggctggcacgcgccatgatggcatttaccgccgacctctttagcctcgtggcacagacaagcacatgtccaaaccttatcctatctcccttatccgttgccctggcccttagccatctggcactgggcgctcaaaatcacactctccagcgtctccaacaagtgctccacgccggttctggcccttgtctacctcacctgctgtctcgcttatgccaggacctgggccctggagcctttcggctggcagcccgtatgtatctacagaaggggtttcccattaaggaggacttcctggagcaatccgagcaattgttcggggcgaagccggtttctttgaccggcaagcaggaggacgatctcgctaacataaaccagtgggtgaaggaggctaccgaaggcaagatccaggagtttctgtccggccttccagaggatacagtacttcttcttctgaacgcgatccacttccagggattttggcgcaacaagtttgacccttccttaacccagcgagacagctttcacctcgatgaacaatttacagtgccagttgaaatgatgcaggcgaggacttaccccctgaggtggttcctcctggagcagccagaaatccaggtggcccattttccgttcaagaacaacatgagctttgtcgtcctggtgccaacgcatttcgagtggaatgtctcacaagtgcttgccaatctctcctgggatactctgcacccacccctggtttgggaacggccgaccaaagtgaggctgcctaaattatatctgaaacaccagatggacctagtggctactctatctcagcttgggcttcaggagctgtttcaagcccctgatctgcgtgggattagcgaacagtcactcgtagtgtctggtgtgcaacatcaatccaccctagagctctccgaagtcggcgtagaggccgcagccgccacatccatagcaatgtcgcggatgtccttatcaagcttctccgtgaatcgtccgttcctgttcttcatcttcgaggacaccacaggcctgccactgtttgtgggaagtgtccgtaacccgaatccctcagccccaagggagctaaaggaacagcaggatagccctgggaacaaggacttcctgcagtctttaaaggggttccctaggggggacaagctattcggacctgacctcaaactggtgcctcctatggaggaagactacccacagttcggttcacccaag

SEQ ID NO: 274385 - DNA, 1473 bp, Artificial Sequence
  derived and/or modified sequence
atggccctgctctggggcctgctggtgctgtcgtggagctgtctccagggcccttgtagtgtgttttcacctgtttccgctatggagcctttgggcagacagctaacctccggtcccaatcaggaacaggtgtcgcctctcaccttgttgaagctggggaaccaggagcctggcgggcagactgcactgaagtcaccccccggtgtgtgttcccgggatccaaccccagaacagacacaccggcttgcgagagcgatgatggcatttacggctgatctgttctctttggtcgctcagacctcaacttgccccaacttaatcctgtccccacttagtgttgctctggctttaagccatctggctctgggagcgcaaaatcacacacttcagcgcttgcagcaagtgctgcatgctggatccgggccatgtttgccgcaccttctttctcgactgtgtcaggacctagggcctggcgcatttcgcttggctgcaaggatgtacctgcagaaagggtttcccatcaaagaagattttctggagcagtccgaacaactgtttggcgctaagcccgtttcactaaccggtaaacaggaagacgacctggctaacatcaatcagtgggtgaaagaggccactgaaggcaaaatccaggagttcctgtctgggctgccagaggatacagtcctgctgctgctgaatgccatacacttccagggattctggaggaacaaatttgacccatccctgacccaaagagacagcttccacttggacgagcagtttacagtgcctgtcgagatgatgcaagcgcgcacttaccccctgagatggtttctcttggaacagcccgaaattcaggtggcccacttccccttcaaaaacaacatgagttttgtagtgctcgtgcccacccattttgagtggaatgtgtctcaggttctcgcaaacctgtcgtgggacactcttcatccccccctcgtgtgggaaagacctactaaagtgaggctgcccaagttgtatctgaagcaccagatggacttagtggccactctgagtcagctgggccttcaggaactgtttcaggcgccagacctgcgcggaatcagcgagcagagtctggtggtgtccggggtccagcaccagagcaccttggagctgtccgaagtgggcgtggaggcggctgcagcaacaagcatcgcgatgagccggatgtctctgagcagttttagcgttaatcgcccatttctatttttcatttttgaggacacaacaggccttccactgtttgtgggtagcgtccgtaaccccaatccatctgccccccgggagctgaaggaacagcaggattctccggggaacaaggacttcctgcagtctctgaagggattccccagaggtgataagctgttcgggcccgatctgaagcttgttcctcctatggaggaggattatccccagtttggaagccctaaa

SEQ ID NO: 274386 - DNA, 1473 bp, Artificial Sequence
  derived and/or modified sequence
atggcactgctttggggcctgctggtcctctcatggtcctgcttgcaaggtccgtgctcggtgttctcgcctgtttccgcgatggaaccattgggacgtcagctgacttcaggcccgaatcaggaacaggtgtccccattgaccctgctgaaactcggaaatcaggaaccaggggggcagaccgctttgaagtcgccgccgggcgtttgcagccgggacccaaccccagaacagacgcatcgcctggccagggccatgatggccttcacggcggacctgtttagcctggtcgcccagaccagcacttgccccaatttgatcctgtcgcctctctccgtggccctggcactctcccacctcgcactcggtgcccaaaatcacacgcttcagcgactccagcaagtgctgcacgcaggatccgggccatgtctgccgcacctgttgtctaggctctgtcaggatctgggacctggggccttcagacttgcggcacgcatgtatctgcagaaaggattcccaatcaaagaggacttccttgagcaatccgagcagctgttcggtgcgaagccggtttcacttactggaaagcaagaagatgatctggcgaacattaaccagtgggtgaaggaagccaccgaaggaaagatccaagagttcctgtcgggactgccagaggacacggtgctgctgcttctcaacgccatccactttcaaggcttctggcggaacaaatttgatccgagcttgacccaacgcgacagcttccacctcgacgaacaattcactgtgccggtcgaaatgatgcaggctaggacctacccgctccggtggttcctgttggagcagccagaaatccaagtcgctcattttccgttcaagaacaacatgagctttgtcgttctggtgcccacccatttcgagtggaatgtgtctcaagtcctggccaatctgtcctgggacactctgcatccaccgctcgtgtgggagaggccaactaaagtgcggctccctaaactctacctcaagcatcaaatggatctggtggccactctgtctcaactgggactccaagagctgttccaggcgccggacttgcggggaatctcggaacagtctttggtcgtgtcaggcgtgcaacaccagtccacccttgaacttagcgaagtgggagtcgaagcagcggcggccacctcaattgcaatgtctcggatgtcgctgtcctcattctcagtcaaccgccctttcctgtttttcatcttcgaggataccacgggactgcccctcttcgtgggcagcgtgcgcaaccctaacccgagcgcaccgcgagagcttaaggagcagcaggactcgccgggaaacaaggacttcctgcagtctttgaagggatttcccagaggcgataagctgttcggacccgatctgaagctggtgccgcctatggaagaggactacccgcagtttggttccccgaag

SEQ ID NO: 274387 - DNA, 1473 bp, Artificial Sequence
  derived and/or modified sequence
atggcactgctgtggggattactcgttctaagttggagctgcctgcagggcccctgtagcgtgttcagccccgtgagcgcaatggaacctctcggcaggcagttgaccagtggacctaatcaagagcaggtatcaccattgactttactgaaactgggcaaccaggagcctggcggccagacagctctgaaaagtcctccaggagtgtgtagccgggatcccacccccgagcagacccacagactggctagagctatgatggcttttacagccgatctgttttccctggtggctcaaaccagcacctgccctaatctcatcttgtctcccttgtcagtagccctggcactgagtcacctggccctgggagcccagaatcacacacttcaaaggctacagcaggtcctacacgccggctccggcccatgcctcccacacctgctatctcgcctgtgtcaggatctgggaccaggggccttcaggcttgcagctcgcatgtacctccagaagggttttcccatcaaagaagatttcctagagcaatctgaacagctgttcggggccaaacctgtgtctctaactgggaagcaagaggacgacctagctaatatcaaccaatgggtgaaagaggctaccgaggggaagatccaggagttcctgtccggcctgcccgaagacaccgtcctgctcctgctgaatgccatacatttccagggtttttggcggaacaagttcgaccccagtctgacccagcgggacagcttccacctggatgagcagttcacagtgccagtagaaatgatgcaggctcggacatatcctctcaggtggtttctactcgagcaaccagaaatccaggtggcacacttccctttcaagaataatatgtcttttgtcgtgctagtgccaacccacttcgaatggaatgtctcccaggtgttagctaacctgtcttgggatacattacaccctcctctggtgtgggaacgcccgactaaggtccggctgcccaagttatatttgaaacatcagatggatctggtggccactctgtcccagctgggccttcaggaactatttcaggccccggacctaaggggaatctccgagcagtctttggttgtaagcggcgttcagcatcagtcaacccttgagctgtctgaggttggggtggaagccgcagctgccacttcaatagccatgtccaggatgagtctctcttcattttctgtgaacagacccttcctgtttttcatttttgaggacaccacagggttacccttgtttgttggttctgtgcggaatccaaaccccagcgccccacgggaactaaaagaacaacaggactctcctggaaataaagacttcttgcaaagtctgaaaggtttcccacgtggagataaactgtttgggccagacttaaaacttgtgccacctatggaagaggactatcctcagttcggatctcccaag

SEQ ID NO: 274388 - DNA, 1473 bp, Artificial Sequence
  derived and/or modified sequence
atggccttattatggggtctgcttgtattatcttggtcctgtctacagggtccctgtagtgttttttccccagtgagcgccatggagcctcttggacggcagctgacttcagggcccaaccaagagcaggtttcaccgctcacattactgaaactgggaaatcaggaaccggggggacagaccgccttgaagtccccacccggcgtgtgcagccgcgaccccactcccgagcagacccaccggcttgctagggccatgatggcattcacggcggacctcttctctctggttgctcagacgtcaacttgcccaaatttgatcttgagcccgctatccgttgccctggctttgagccacttggcactcggggcccagaatcataccctccagagacttcaacaggtgctccatgcaggatccgggccctgtctgcctcatctgctctcaagactatgccaggatctagggcctggggccttcaggctcgcagcacgaatgtacctgcaaaagggtttccccatcaaggaagacttcctcgaacagtccgaacagctcttcggggctaagccggtgagcttgactggtaagcaggaggacgatttagccaatattaatcaatgggtcaaggaggctactgagggtaagattcaggaatttctgagcgggctccctgaggatactgtgctgctgctgctgaacgccatccactttcaaggattttggcgaaacaaattcgacccttcactgactcagcgcgattccttccacttggatgagcagttcacggttcctgtagagatgatgcaagctcgcacttatccactgaggtggtttctgttagagcagcctgagattcaggttgcacactttccattcaaaaataacatgagtttcgtcgtgttggtccctacgcacttcgagtggaatgtatcgcaggtcctggctaacctgtcttgggacactctccacccgcccctagtctgggaaagaccaactaaagtccgcctcccaaaactgtacttgaaacaccagatggacctcgtggcaaccctgtctcaattggggctgcaggaactgttccaggcacccgatcttagagggatttctgagcaatcgttggtcgtgtctggtgtgcaacatcagagtacactggagctgtcggaagtcggggtcgaggccgctgctgctacatctatcgccatgagtcggatgagtctatccagtttcagcgttaacaggccctttcttttcttcatctttgaggatactacgggacttcctctcttcgtgggaagcgtgcgcaatccgaacccgtcagctccgcgcgaactaaaagagcagcaagattctcctggaaataaggacttcttgcagtccttgaaaggcttcccccgaggtgacaagttatttggtccagatttgaagctcgtccccccaatggaagaggactaccctcaatttggttcccctaaa

SEQ ID NO: 274389 - DNA, 1473 bp, Artificial Sequence
  derived and/or modified sequence
atggcgctcctgtggggtctgctggtgctgagctggtcatgccttcagggtccttgttcggttttctccccagtgagtgcaatggaaccgctgggtaggcaactcacttccggacctaaccaggaacaagtgtcgccccttacccttttgaagctcggaaaccaagaaccagggggccaaactgcactcaagtcccctcctggggtgtgctcgcgggatccaaccccagagcagacccacagactcgctagagcgatgatggcgtttacggccgatctctttagccttgtcgcacagacgtcaacctgccccaatctgattctcagcccactttccgtcgcccttgccctgagccatctggcgcttggagcgcaaaatcacactctgcaacggctccagcaggtgctccatgcaggatccggcccttgcctgcctcacttgctgtcgagactgtgtcaggatctcggccctggtgcgtttcgcctggccgcacgcatgtacctccagaaagggttcccgatcaaagaggatttcttggagcaaagcgaacagctgtttggagccaaaccagtgtctcttactggcaagcaagaagatgacctcgcaaacatcaaccaatgggtgaaggaagccaccgaagggaagattcaagaatttctcagcggcttgcctgaggacactgtgttgcttcttcttaacgcaatccattttcagggtttttggaggaacaaattcgacccatccctgacgcagagagattcatttcacttggatgagcaatttaccgtgcctgtggagatgatgcaagcacgaacctacccactgcgatggtttctgcttgaacagccagagattcaggtcgcacattttccgtttaagaacaatatgtcctttgttgtactggtgcctactcatttcgagtggaatgtctctcaagtccttgccaacctttcatgggacacccttcacccccctctcgtgtgggaaagacctactaaggtgcgcctgcctaaattgtacctcaagcatcaaatggatctggtggcgacgctctcgcagcttgggcttcaagaactctttcaagctcctgatctgcggggaatttccgaacaaagcctggtggtgagcggcgtgcagcatcaatcgaccctcgaattgtctgaagtaggggtcgaagcagcggctgcaacttccatagcaatgtcgcgcatgtcgctttcgtccttctccgtcaatagacctttcctgttcttcatctttgaagataccacgggactgcctctgttcgtgggaagcgtgcggaacccgaatcctagcgcccccagagagctcaaagaacaacaggactcgccagggaataaggacttcttgcagtcgcttaaaggttttccgagaggtgataaacttttcggacctgatctgaagttggtccctcctatggaagaggattacccacaatttgggtcaccaaag

SEQ ID NO: 274390 - DNA, 1473 bp, Artificial Sequence
  derived and/or modified sequence
atggctttgctatggggattgttagttctcagctggtcttgtctgcaaggaccatgttcagtgtttagtccagtctcggccatggaaccacttggaagacaattgacgtcgggcccaaatcaagagcaagtttctccactaacattgctgaaactcggaaatcaagaaccgggaggacaaactgctttgaaatctcctcctggagtttgttcccgagatccaacaccggaacaaactcatagactagcacgtgcaatgatggcttttacggcggacctgtttagtttggttgcccagacttcgacatgtcctaatttgatcttatctccgttatctgtagcattagcgttgagtcaccttgctttaggtgcccaaaatcatactctccaacgtttacagcaagtcttacacgccggatcaggaccatgtctgcctcacctcttatcacgtctctgtcaggacttgggcccaggagccttccgattggctgcaaggatgtacctacaaaagggattcccaattaaggaggacttcttggagcaatctgagcagctctttggagcaaagcctgtctcactcacagggaagcaagaggatgatctagcaaatattaatcagtgggtcaaagaagctacagaaggaaaaattcaggagttcctaagtggactcccagaagataccgttcttctcttgttgaatgcaatccatttccaagggttttggagaaataagttcgatccttcacttacccaaagagacagctttcacctagatgaacaattcacagtcccagttgaaatgatgcaagcaaggacatatccgcttcggtggttcctcctagaacagcctgaaattcaagtcgcacattttccatttaagaataatatgtcattcgtcgtccttgtaccgacacatttcgaatggaacgtgtcacaggtgcttgccaatttgagctgggatactctgcacccgcctttggtttgggaaagacctacgaaagtacgcttgcctaaactctatctcaagcaccaaatggacctggtcgcgactttatcccaactcggtttgcaagaactcttccaagccccagatttgagaggtatctcagaacagagtcttgttgtgtctggagttcagcatcaaagcactctagagcttagtgaagtgggtgtggaagccgcagctgcgacgtcaatcgctatgagtcgaatgtccctatcatcattcagtgtgaaccgaccgtttctgttcttcatttttgaagacacgactggcttgccactatttgtcggatctgttcggaatccaaatccgtcagcaccgcgtgagcttaaagagcaacaagatagtcccggaaataaagacttcttgcagtctttaaaaggttttccaaggggagataagctcttcggaccagatctaaagctggttccacctatggaagaagattatccacagtttggtagtcctaaa

SEQ ID NO: 274391 - DNA, 1473 bp, Artificial Sequence
  derived and/or modified sequence
atggccctgctgtgggggctacttgtgctttcctggagttgccttcagggtccatgtagtgttttttctcctgtgtccgccatggaaccgctgggccgacagctgacatctggccccaatcaggagcaggtcagtccgctcaccctgctgaagctgggaaatcaggagcccgggggacaaacagcactaaaatccccgccaggggtatgttccagggacccgactcccgagcagacccatcggctggcacgggccatgatggcctttactgcagacctgttctctctggtcgcccagacctccacttgtcctaacttgattctatcaccactgtccgtggcgttggctctgagccatttggctctaggcgcccagaaccacacactgcagcgactccagcaagtattacacgctggatcgggaccttgtttacctcacctcctctcccggctctgtcaggacctggggccaggagccttcagactggccgctagaatgtacctccagaaggggtttcctatcaaggaagactttttagagcagtccgagcagttgttcggggccaagcccgtgtcgctgacggggaagcaggaggatgacctggccaatattaatcagtgggtgaaggaagcaactgaaggcaaaatccaagagtttctgagcggccttccggaggatactgtgctactcttactcaacgctatacactttcagggattttggcggaacaagtttgacccctcccttacacaacgggacagctttcatctggatgagcagtttaccgtcccagtagagatgatgcaggcaagaacataccctctccggtggtttctgcttgagcaacctgaaatccaagtcgcccattttccattcaaaaacaatatgtcatttgttgtgttagttcccactcacttcgaatggaacgtatcccaggtactggcaaacctctcatgggatacccttcatccacctctagtatgggaaagacccacgaaggttagactgccaaagctctatctgaagcatcagatggacttggttgcaacactgtcccaactcgggttgcaggaattgtttcaggctccagatctgagggggatctcggagcagtccttggtggtatctggagtgcagcatcagagcacgctggagctttctgaagtgggcgtggaagccgcagccgctaccagcatcgctatgtctcggatgtcgttgtcaagtttctcggttaaccgcccctttctcttttttatcttcgaggatacaaccgggctccctctatttgtgggctccgtgcgcaatccaaatccgtcagcccctcgcgagctgaaggagcaacaggacagtcccggaaataaggacttcttgcaatctctcaagggcttcccaaggggtgacaagctattcggtcctgacttgaagctggtgcctcctatggaggaggactacccacaatttggcagtcccaag

SEQ ID NO: 274392 - DNA, 1473 bp, Artificial Sequence
  derived and/or modified sequence
atggctttgctttgggggctcctcgttctttcatggtcttgtctccaagggccttgttctgtgttttccccagtaagtgccatggaaccgttgggccgtcaacttacctctggtcctaaccaagagcaggtcagccctcttacacttcttaaacttggaaatcaggaacctggaggtcaaacagcattgaaatcccctcccggcgtttgtagtcgcgatcctaccccagaacagacccaccgacttgcccgtgctatgatggcattcaccgccgatttgtttagtttggttgctcaaacttccacctgccctaatttgattctctctcccttgtctgtagctcttgcattgagccatcttgcattaggtgctcaaaatcacacactccaaaggttacaacaagttttgcatgctggttctggcccttgtctcccccaccttcttagccgactttgtcaagacttggggcccggagcgttcagattagcagcaaggatgtacttgcagaaaggctttcctattaaggaagattttctggagcagtccgaacaacttttcggcgccaagcctgtgtctctcacaggcaagcaggaagatgatcttgccaatattaatcagtgggtgaaggaagcaacagagggcaagattcaagaattcttgtcgggcttgccagaagacacggttcttctccttctaaacgctatccattttcagggattctggaggaataaattcgatccgtcattgacacagagagattctttccatttagacgaacagtttaccgttcccgttgaaatgatgcaagctaggacctatccattgcgatggttccttttggaacaacctgagattcaggtcgctcatttcccgttcaagaacaatatgagttttgtggttctagttcctacccattttgaatggaacgttagtcaggttttggcgaatctctcttgggacactttacatccaccactggtttgggaacgtccaactaaggttaggctcccaaaattgtatctcaagcatcaaatggatcttgtagctactctttcgcaacttgggctccaagagctctttcaggcacctgatttaagaggaatttccgaacaatcccttgtcgtctccggtgtccagcaccaatccaccctcgaactctctgaagttggagttgaagctgcggctgccacatccatcgctatgtcacggatgagcctgtcatccttctctgttaatcgtcccttcctgttctttatttttgaggacactactggcctgcctctttttgtaggttcagtgcgcaaccccaatcccagcgctccacgtgaattgaaggagcagcaagacagccccggaaacaaggatttcctgcagtctctcaagggattcccaagaggcgataagttgtttggacctgatttgaagttggtacccccaatggaggaggattatccacaatttggttcaccaaag

SEQ ID NO: 274393 - DNA, 1473 bp, Artificial Sequence
  derived and/or modified sequence
atggccctcctctggggcttgctggtcttgtcatggtcctgtctccagggcccatgctcagtcttttccccagtgtcggctatggagccgctgggacggcagctgacctcgggccctaatcaggaacaggtgtcccctctcaccctgctgaaactgggtaaccaagaaccggggggccaaactgccttgaagtcgcctcccggagtctgctcgcgcgatccgactcccgaacagactcataggcttgctcgtgccatgatggctttcactgcagatctgttctccctcgtggcccaaacttcaacctgtccgaacctcattctgtcgccgctgagcgtcgccctggcgctgagccatctcgcgctcggagcccagaaccataccctccagcgcctccaacaggtcctgcacgccggcagcggaccttgccttcctcacctcctgagccggctgtgccaggacctgggcccgggcgcattccgcttggcggccagaatgtacctgcagaagggattcccgatcaaggaggacttcctggaacagtcggagcagttgttcggcgcaaaaccggtgtcgttgactggtaagcaggaagatgacctggctaacatcaaccagtgggtcaaagaggcgactgaaggaaaaatccaggagttcctttcgggcctcccagaggacaccgtgctgctgcttctgaacgcgatccacttccaaggattctggcggaataagttcgacccttccctcacccagcgcgactccttccacctggacgaacagtttaccgtgcccgtggagatgatgcaggctaggacttacccgctccgctggttcctgctggagcaacccgaaatccaggtggcacacttcccttttaagaacaacatgagcttcgtggtgctggtgccaacccatttcgagtggaacgtgagccaagtcctggccaacctcagctgggatactctccatccgcccctcgtgtgggaaaggcctacgaaggtgcgccttccgaagctctacctgaagcaccagatggacctggtcgccactctgagccagctgggactgcaagaactcttccaagccccagacctcaggggcatctcagagcagtccctggtggtgtccggagtccagcatcaaagcaccctggagctgtcggaagtgggcgtggaggcggctgccgctacgagcatcgcgatgtcaagaatgtcgctgtcatcattctcagtgaatcggccttttctgttcttcattttcgaagatactactggactgccgctcttcgtcggcagcgtgcgcaaccccaacccttccgccccgagagaactgaaagagcagcaagactcgccgggcaataaggacttcctgcagtcacttaaaggattcccccgcggagataaactttttggcccagacctgaagctggtgcctccaatggaagaggattacccgcagttcggatcacccaaa

SEQ ID NO: 274394 - DNA, 1473 bp, Artificial Sequence
  derived and/or modified sequence
atggccttactttggggacttttagttttatcatggtcatgtttacaaggaccatgttcagttttctcaccagtttctgctatggaaccacttggtagacaacttacttcaggacctaatcaagaacaagttagtccacttactttattaaaattaggaaatcaagagccaggaggacaaacagctttaaaaagcccaccaggtgtatgttcaagagatccaactcctgaacaaactcataggcttgcaagggcaatgatggcttttactgcagatcttttttctttagtagctcaaactagtacttgtccaaatcttattttatcaccattatcagttgcattggcattatctcatcttgcacttggagcacaaaatcatacgttgcaaagattacaacaagtattacatgctggaagtggaccatgtttaccacatttgctatcaagattatgtcaagatttaggaccaggagcatttcgtttagcagcaagaatgtatctacaaaagggatttccaatcaaagaagattttcttgaacaatctgaacaattatttggtgctaagcctgtaagtttaacaggtaaacaagaagatgatttagcaaatattaatcaatgggtaaaagaagcaacagaaggaaagattcaagaatttcttagcggtttacctgaagatacagttcttttgttattaaatgcaattcattttcaaggattctggcgaaataaattcgatcctagtcttactcaaagagatagttttcatcttgacgaacaatttacagtaccagttgaaatgatgcaagcaagaacttatccattaagatggtttttacttgaacaaccagaaattcaagttgcacatttcccattcaagaataatatgtcatttgttgttttggttccaactcattttgaatggaatgtctcacaagtattagcaaatttatcatgggatactttacatccaccacttgtttgggaaagaccaactaaagttagattaccaaaattatatcttaaacatcaaatggatctcgtagctacattatcacaacttggtcttcaagaactttttcaagcacctgatcttaggggaatttcagaacagtctcttgtcgtatctggagttcaacatcaatcaactcttgaattatcagaagttggagttgaagccgcagccgctactagtatagcaatgtcaagaatgagtttatcttcattttctgttaatagaccatttttattttttattttcgaagacactacaggactaccattgttcgtaggatcagtacgaaatccaaatccaagtgcacctagagagttaaaagaacaacaagattcaccaggaaataaggattttttacaatcattaaaaggattcccaagaggagataagttatttgggccagatctaaaacttgttccacctatggaagaggattatccacaatttggaagtccaaaa

SEQ ID NO: 274395 - DNA, 1473 bp, Artificial Sequence
  derived and/or modified sequence
atggcactcttgtggggactgcttgtcctcagctggtcctgccttcaaggaccctgttctgtgttctcccccgtttccgccatggagccactcggacgccagctgaccagcggtcccaaccaggaacaagtgagcccgctgacccttctgaagctcggaaaccaagaacccggcggacagactgcgcttaagtcgccaccaggagtctgctccagggatccaacccccgaacagactcatagactggcacgtgctatgatggccttcaccgcagatctgttttcgttggtggcccagacctcgacttgtcctaaccttattctttcgcctctttccgtggcactggcactgtctcatcttgctcttggtgcccagaaccataccctgcaacgacttcagcaggtgctgcatgcggggtccggaccatgtctgcctcatttgcttagccgcctgtgccaggatcttggacctggggcattcagactcgcggcgcgaatgtacctgcaaaaggggttccctatcaaagaagattttctcgagcagagcgagcagttgttcggtgcaaagcctgtctcgctgaccggcaagcaagaagatgatctggccaacattaaccagtgggtgaaggaggcaaccgaagggaagattcaggagtttctttcgggactgcctgaagataccgtcctgctgcttctgaatgccattcatttccagggattctggcgtaataagttcgacccgtccctgactcaaagagacagttttcatctcgatgaacagtttaccgtgcctgtggaaatgatgcaggcaagaacttatccactccgatggttcctgcttgaacaacctgaaatccaagtcgcccattttccatttaagaacaatatgtccttcgtggtgctggtgccaacgcatttcgagtggaacgtttcgcaagtgctggcaaacctgtcgtgggatactcttcatcccccactcgtttgggagcgccctactaaagtccggctccctaagctctaccttaagcaccagatggatctggtggccaccctgagccagctgggacttcaggagctgtttcaggcacctgatctgagaggaatctcggaacaatccctggtagtctcaggagtccaacaccagtccaccctggaactctcggaagttggggtggaagcagctgcagcgacctcaatcgctatgtcgaggatgtcactgtcatcgttctcagtcaatcggccctttctctttttcatttttgaagatactactggccttcccctctttgttggctcggtgcgaaaccctaaccctagcgcccccagagagcttaaggaacaacaagactccccaggcaataaagactttctgcagtctctgaaagggtttccccggggagataaactcttcggacctgatcttaaacttgtgccccctatggaagaggactatcctcaattcggatcgccaaag

SEQ ID NO: 274396 - DNA, 1473 bp, Artificial Sequence
  derived and/or modified sequence
atggccctgctctggggcctcctggtccttagctggtcgtgcctgcaggggccatgtagcgtgttcagccctgtctcggcgatggaaccactggggagacagctcaccagcggaccaaaccaggagcaggtgtcgccgctcactctcctgaagctgggaaatcaggaaccgggcggacagaccgcactgaagagcccgccgggcgtctgcagccgcgatccgacccctgaacagactcatcgcctggcccgggcgatgatggcgttcactgcggacctgtttagcctcgtggctcagacctctacctgcccgaacctgatcttgagcccactgtcggtcgcattggcactctcgcatttggctctcggtgcccaaaaccataccctgcagcggctgcaacaggtcctccacgcgggctcagggccctgccttccacacctgctgtcacgcctctgccaagacctcggtccaggcgcctttcggctggccgccagaatgtacctccagaaaggattcccgatcaaggaagattttctggagcaatcggaacagctcttcggcgcaaagcctgtgtccctgaccggcaagcaggaagatgatcttgccaacatcaaccagtgggtcaaggaagcaactgagggtaaaatccaggagttcctttcgggtctgccagaggacaccgtcctcctgcttctgaacgccattcacttccagggcttctggcggaataagttcgaccccagcttgactcaacgggactcgttccacctggacgaacagttcacggtcccggtggaaatgatgcaggctaggacttaccctctgcgctggttcttgctcgaacagcctgaaatccaagtggcccatttccccttcaagaacaatatgtcatttgtcgtcctggtgccgacgcatttcgaatggaacgtcagccaagttcttgccaacctctcatgggacaccttgcacccgccccttgtgtgggaaagaccgactaaggtccgattgccgaaactctaccttaagcaccagatggatctggtcgcaactctctcccagctcggactccaagagctgtttcaagcgcccgacctcaggggtatctccgagcagtccctggtggtgtccggcgtgcagcatcaatcaaccctggaactgtccgaagtcggggtggaggcagcggccgccacttcaatcgccatgagcagaatgtcactctcatcgttcagcgtcaacaggccgttcttgttcttcattttcgaagataccactggactgccgctgtttgtcgggtccgtccggaacccgaacccttcggccccaagagaactgaaggagcagcaggactctccgggtaataaggacttcctgcaatcgctgaaagggttcccgcgcggcgacaagctgtttggaccggacctgaagctcgtgccgccgatggaggaggattacccccaattcgggtcaccaaag

SEQ ID NO: 274397 - DNA, 1473 bp, Artificial Sequence
  derived and/or modified sequence
atggctctactatggggactactcgtcttgtcttggtcttgtctccagggaccttgctcagtcttttccccagtatcagccatggaaccgcttgggcggcagctcacatccgggcccaatcaggagcaggtatctcccttaactctactcaagttagggaaccaagaaccaggaggacaaactgcattaaaatctccccccggggtatgctcgagggatcccacacccgaacagacacatcgcttagcacgggccatgatggcttttacagcagatctgttttctcttgtagcacagacatcaacatgccctaacctaatcctctccccattgtcagtggcgttagctctatctcatctcgccctcggggcccagaatcacacacttcagaggttacagcaggtgttacacgctggatccggaccctgccttccacatctcctctctcgattatgccaggatttgggacccggagcattcaggctcgctgccaggatgtatctgcaaaagggattccccataaaagaagatttcctagaacagtccgaacagttattcggagctaaaccagtaagtctcactggaaaacaggaggatgacctcgctaatattaaccagtgggtcaaggaagccactgaaggaaaaatccaggaatttctctccggactcccagaggatactgtgctcctgctcctgaatgcaatacatttccaggggttttggcgaaacaagtttgaccctagtcttactcagagggatagtttccatctggatgagcagtttactgtgcctgtggaaatgatgcaggccaggacatatcctctccgctggtttctgctcgaacagccagaaatacaggtcgcacactttcctttcaaaaacaacatgtcttttgtggtgcttgtgccaacacattttgagtggaatgtgtctcaggtgttggctaatctctcttgggatacattacacccacccttggtgtgggaaaggcccacaaaagtgcggctcccaaaactctacctcaaacaccagatggatctcgtcgcaacactgtctcagcttgggttacaggaactttttcaggcacctgacttgcgtgggatatccgaacagtcattagtcgtatctggggttcagcatcagtctactcttgagctctcagaggtgggagtagaagccgcagccgccacatccatagcgatgtcccgaatgtcattgtcttcctttagtgtaaataggccctttttatttttcatatttgaggatactacagggctccctctttttgtagggtctgttagaaatcccaatccctcagccccccgagaactgaaagaacagcaggattcccccgggaacaaagattttctccagtctttaaaagggtttccacggggagataaattatttgggcctgatttgaaactggtgcctcctatggaagaagattatcctcagttcggatctccgaaa

SEQ ID NO: 274398 - DNA, 1473 bp, Artificial Sequence
  derived and/or modified sequence
atggccttgctgtgggggctgctggtgctctcgtggtcgtgcctgcagggtccttgttcagtcttctcgcccgtgtcagcaatggaacccttaggccggcaattgacgagcggtccgaatcaggagcaagtgtccccgctgacgcttttgaagctggggaaccaggagcctggtggacagaccgccctgaagtctccccccggcgtgtgctcccgggatcccactcccgaacagacacatcgcctcgctcgcgctatgatggcgttcactgccgacctctttagtctagtagctcaaacttcaacatgcccgaatctgattctaagcccgctgtccgtcgcgctcgcactaagtcacttggccctcggcgcccagaaccatactctgcaacgtctgcagcaggtactgcacgcgggatcggggccgtgtctgccccacctgctgagtcgcctttgccaggatctgggccccggagctttcagactggccgccaggatgtacctacaaaagggcttcccaatcaaggaggacttcctggagcagtcggagcagctttttggcgctaaaccagtctcgctcacgggcaagcaagaagatgatctcgcgaatataaaccagtgggtgaaggaggctaccgagggaaagattcaagagttccttagtggcctgccagaggatacggttttgctcttgcttaacgcgatccatttccagggcttctggcgcaacaagttcgatccctctctcactcaacgtgacagttttcacttagatgagcaatttacagtgcccgtggaaatgatgcaagcccgcacttaccccctccgctggttcctgctggaacagcccgagatccaggtggcgcactttccgttcaaaaacaacatgtcgttcgtcgtgctggtccccactcactttgaatggaacgtgtctcaggtgctagccaatctgtcgtgggatacgttgcacccacccctggtctgggagcgcccaactaaagtgcggctaccgaagctgtatctgaagcaccagatggatctagtggccaccctgtcccagcttggattgcaggagctgttccaggctccagacctcaggggaattagcgagcaatccctcgttgtctctggcgtgcagcatcagtccaccctagaactgtccgaggtaggggtggaagctgcggcagcaacatctattgctatgtcccgcatgtcgctctcgtccttcagcgtcaaccgtccgtttctgtttttcatattcgaggacaccacgggtctacccttattcgtgggttccgtgcgcaaccccaatccctccgcccccagggaattgaaggagcagcaggacagtccaggcaacaaggactttttgcagtcgctgaagggtttcccgcgcggagacaagctgtttggtccagatctgaaactggttccgcccatggaagaggattacccacaattcggaagtcccaag

SEQ ID NO: 274399 - DNA, 1473 bp, Artificial Sequence
  derived and/or modified sequence
atggcgctcctttggggtcttctggtcctctcctggagttgcctgcagggcccatgctccgtcttctctcccgtgagcgccatggagccactgggccgccagttgacttctggtccgaatcaggaacaggtctctccgttaacacttctgaagctcggtaatcaggagccaggtggtcaaaccgccctcaagtcgccacctggcgtttgttcgcgtgatccgacccctgagcagacccatcgtctagcccgcgccatgatggcatttactgctgatctcttctcgcttgtggcgcaaacttctacgtgccctaacttgatcctttccccgttgtctgtcgctcttgccctgtcgcacctggcattgggggctcaaaatcatactttgcagcgtttgcaacaggtgctacatgcgggatccggcccatgcctcccccatctgttgagccgtctgtgtcaagatctcggccctggtgccttccgcctggccgctagaatgtacctgcaaaagggtttccctattaaggaggacttcctagagcagtcagagcaactgtttggggcgaagcccgtgtccctaaccggtaagcaggaagacgacttggcaaacataaatcagtgggtcaaggaagccacggaaggaaagatccaggagttcctaagcggtttgcctgaggacacggttttgctgctgctaaatgcaattcacttccagggcttctggcgcaacaaattcgacccttcccttacacaacgcgactcgtttcatctggacgagcagttcaccgtgcccgttgagatgatgcaggctcgtacctaccctctgagatggtttctgctggagcagcccgaaatccaggtcgcccactttccgttcaagaacaacatgtcattcgtggtgctggttcccactcatttcgagtggaacgtgtcgcaggtgctggcaaatctttcctgggatactttgcacccgccgctggtttgggagcgtcccacgaaggtgcgactgcccaagctctacttgaagcaccaaatggacctggtcgcaaccttgtcccagctcggattgcaggagctgttccaagccccggatttgagaggcatctccgagcagtctctggtcgtgtccggagtccagcaccagtctacactcgagttgtccgaggtcggagtggaggctgcagcggccacaagcatcgccatgtcacgaatgtctctgagctcatttagcgttaacagacccttcttgttcttcatttttgaagataccactggactgcccctgtttgtcggttctgttcgcaacccgaacccgagcgcaccgcgggagttgaaggagcagcaggactcaccgggtaataaagatttcttgcaatccctgaagggattcccgagaggcgacaagctttttggccccgatctgaagctggtaccgcctatggaagaggattacccccagttcggaagtccaaag

SEQ ID NO: 274400 - DNA, 1473 bp, Artificial Sequence
  derived and/or modified sequence
atggccctcctgtggggactgctggtcctctcatggtcctgtctccagggcccgtgctcggttttctcaccggtcagcgccatggagcctttgggtcggcagctgactagtggaccgaatcaggaacaggtgagccctctcactctgctgaagttggggaaccaggagccgggcggacagaccgctctcaaatcaccaccaggagtgtgttccagggacccgaccccagaacagacgcatcggctggcgcgggccatgatggcatttactgccgatctgttcagcctcgtggcccaaacctcgacctgcccgaacctgatcctttcgccattgtccgtggccctggcactctctcacctggcgttgggagcacaaaaccacaccctccagagacttcagcaagtgctgcacgccgggtcaggcccatgcctcccccatctgctgtccagactgtgtcaggacctcggcccgggagcgttccgccttgccgcccgcatgtacctgcaaaaaggattcccaatcaaagaggacttcctggagcaatcagaacagctgtttggcgcaaagcccgtctcactcaccgggaagcaagaggatgacctcgcgaacatcaaccaatgggtgaaggaggcgactgaaggaaaaatccaagaattcctctccgggttgccagaggatactgtgttgctgttgctcaacgccattcacttccagggcttctggcgcaacaagttcgacccaagcctcacccaaagagactccttccacttggatgagcagttcacggtgccagtggaaatgatgcaggcgaggacgtacccactgcgctggttcctgctggaacagccggagatccaagtggctcacttcccgtttaagaataacatgtcgttcgtcgtcttggtccctacgcacttcgagtggaacgtgtcacaggtgctggcaaacctgagctgggacacgctgcatcccccgctggtgtgggagcggccgaccaaggtgcgcctgccaaagctgtacctcaaacatcagatggatctcgtcgctactctgtcacagctcggcctccaggaactgtttcaggcacctgatctgcgcggaatctccgaacagtcgctcgtcgtgagcggcgtgcaacatcaatcgactctggagctctcggaagtgggagttgaagcagctgctgctacttcgatcgctatgtcgcgtatgtcgctgtcatcattctccgtgaaccgcccgttcctgttcttcatcttcgaggacacgaccggcctgccgctgtttgtcggatccgtgagaaacccgaacccgtccgcaccgcgcgaactgaaggaacagcaggattcgccaggcaacaaagacttccttcaaagcctgaaaggcttcccgaggggtgataaactgttcggcccggatctgaaactggtgccgcctatggaggaggactatccccagttcggatccccgaag

SEQ ID NO: 274401 - DNA, 1473 bp, Artificial Sequence
  derived and/or modified sequence
atggcactcctgtggggtttgctcgtgctttcctggtcttgccttcagggaccgtgctcggtgttttcgccagtgtccgcaatggaacctcttggccgccaacttacttccggccctaatcaggaacaagtgtcgcctctgacgcttctgaaactgggcaaccaagagcctggcggccaaaccgcactgaaatccccaccaggagtgtgttcaagagatccaaccccggagcaaactcatagactcgcgagagcaatgatggcatttactgccgacctgttttcgctcgtggcccagaccagcacttgtccaaacctgattctgtcgccactgtcagtggcgttggcgctgtcgcatcttgcacttggagctcagaaccataccctgcagcggctgcaacaagtgcttcatgcgggatcgggaccttgtctccctcaccttctttcgcggctgtgccaggatctcggtcccggtgctttcagattggccgcacgaatgtacctgcaaaagggctttcctatcaaagaggacttcctggaacaatcagagcaacttttcggggcaaagcctgtgtcgcttacgggcaaacaagaagatgacctggcaaacattaaccagtgggtcaaggaagctaccgaaggtaagatccaagaattcctctcgggcctgcctgaggacactgtgctcctccttttgaatgctattcattttcagggtttttggcgcaacaaatttgatccgtcccttactcaacgggacagctttcatcttgatgaacaatttactgttcccgtggagatgatgcaagcacggacttacccactgcggtggtttcttctggagcaacctgagatccaggtggcacattttcctttcaagaacaacatgagcttcgtggtcctggtccctacgcactttgaatggaatgtcagccaggtgcttgcaaacctctcgtgggatactctgcatcctcctcttgtgtgggaacgccccactaaagtgaggcttcccaagctctaccttaagcatcaaatggaccttgtcgcaactctcagccagctcggactgcaggaacttttccaagcccctgaccttcggggtatttccgaacaatctcttgtcgtgtccggtgtccaacaccaaagcacccttgaactcagcgaagtgggagtggaagcagcagcggcaacctcgatagctatgtcaagaatgtcactgtcgtcgtttagcgtcaaccgacctttcctcttcttcatattcgaagatacgaccggcttgccactgtttgtcggaagcgttagaaacccaaacccatctgcacctagggaactcaaggaacagcaagattccccaggaaataaggacttccttcagagcctcaaaggttttcccagaggcgacaaactttttgggcccgatcttaagctcgtgcctcctatggaggaagattaccctcaatttggatcaccaaag

SEQ ID NO: 274402 - DNA, 1473 bp, Artificial Sequence
  derived and/or modified sequence
atggccctcctgtggggcttgctcgttcttagctggagctgcctgcagggaccctgttccgtgtttagtccggtgagcgccatggagcctctgggcagacaactgacgtccggcccaaatcaggagcaagtgtccccgctcaccttgctgaaactcggaaaccaagagccaggaggtcagactgcactgaagtccccgccaggagtctgctcgcgcgatccgacgccggagcagactcaccggctcgcgcgggccatgatggcgttcacggccgaccttttctccctcgtggcgcagacctcgacctgcccaaatctgattctgagccctctttcggtggccctcgcactgagccacctggccctcggtgcccaaaatcatactttgcagcgactgcaacaagtgctgcacgccggttcgggtccatgcctgccgcacctcctgagccgcctttgtcaggatctcggtccgggagccttccgactggccgcacggatgtacctgcagaaaggattcccgatcaaggaggacttcctcgagcagtccgaacagttgttcggcgctaaaccggtgtcactgaccggcaagcaggaagacgatctcgctaatatcaaccagtgggtcaaagaggccaccgaaggaaagatacaagagttcctttccggccttcctgaggacactgtgctgttgctgctgaacgccatccacttccaagggttttggcggaacaagttcgacccttcactgactcagcgcgacagctttcatctggacgaacaattcaccgtcccggtcgagatgatgcaggcccgcacgtaccccctgcggtggttcctgctcgaacagccggagattcaggtcgcccacttcccgttcaagaataacatgtcgttcgtggtgctggtgccgacccatttcgaatggaatgtgtctcaagttctggccaacctctcgtgggacactctccacccgccactcgtgtgggaacgcccgactaaagtgcgcctcccgaagctgtacctgaagcatcagatggaccttgtcgcgactctgtcccaactcggactccaggaactctttcaggcgccggatcttaggggaatctccgagcagagcctcgtcgtctcaggggtgcagcaccagtcgacccttgagctgtctgaggtcggcgtggaggccgcggcggcgacctcaatcgcgatgtcccggatgtcgctgtcgagctttagcgtcaaccggccctttctcttcttcattttcgaagacaccaccggcctgcctttgtttgtgggaagcgtgagaaaccctaatccgtccgcgcccagagaactgaaggaacagcaagactccccaggtaacaaagactttctccagagcctgaagggttttccgagaggagacaagctgttcggtccggatctgaagctggtccctccaatggaggaggattatccgcaattcggctccccgaaa

SEQ ID NO: 274403 - DNA, 1473 bp, Artificial Sequence
  derived and/or modified sequence
atggcactcctctggggcctgctggtactgtcgtggtcttgtctgcaggggccctgctccgttttctcgccagtctccgccatggaacccttgggcagacaactcacctctggaccgaaccaggagcaggtatccccattgaccctactaaaactcgggaaccaggagcccggaggccagactgcacttaagagtccacccggagtttgttcaagggatccaacccccgaacaaacccaccgcctggccagagccatgatggcttttaccgcagacctgttctccctggtagctcaaacctccacctgcccaaatctgatactctcgcccctgtccgtggcactcgctctgtcccacctggcgctgggcgcacagaaccataccctgcagcgactccaacaggtgttacacgctggttccggaccatgcttgccccatctgctgagtcggttgtgccaggatctcgggcctggtgcattccggctggccgcacgaatgtatctacagaagggattcccaatcaaggaggacttcctcgaacagtcagagcaattgttcggagccaagcccgttagtctgacgggaaaacaggaagacgacctggccaatatcaaccagtgggtgaaggaggccaccgagggaaaaatccaagagttcttgagcgggctcccagaggacactgtgttgttgctgcttaacgccatccattttcagggcttttggcgcaacaagttcgacccaagcttaacccagcgggatagtttccacctggacgagcaattcactgtgccagtggaaatgatgcaggccaggacttatcctctgagatggttccttctcgagcagcccgaaatccaagtggctcatttcccattcaaaaacaatatgagcttcgtcgtactcgtacccactcattttgaatggaatgtcagtcaggtgctcgcaaatctgtcttgggatacactgcaccctcctcttgtgtgggaacgccccacaaaggttaggctcccgaagctgtacctgaaacaccagatggatctggttgccacactgagccagctcggacttcaggaattgttccaagctccagacctgaggggcatcagcgagcagagtttggtggtatctggtgttcagcaccaaagtacgcttgaactgtccgaagtaggcgtggaagccgcggcagctacctccattgccatgagtcgcatgtccctgtcctcgttttccgtgaataggccattcctgttttttatatttgaggacacaaccggattgccattgtttgtcgggtctgtacggaatccgaaccctagcgcaccccgcgaactcaaggagcaacaggactcacctggcaataaagattttctccagagcctgaaaggtttccccaggggcgacaaactgttcggccccgacctgaagctcgtgcccccaatggaggaagattatcctcagttcggcagccccaaa

SEQ ID NO: 274404 - DNA, 1473 bp, Artificial Sequence
  derived and/or modified sequence
atggcactgctgtggggtctgttggtcctttcatggagttgtctgcaaggcccttgttccgtgttttcgccagtgtccgcaatggaaccgcttgggcgacaactcacttcaggccccaaccaagaacaagtctcacccctcactctcctcaaactcggaaaccaggaacctggtggtcaaactgctctgaaatcgccacccggtgtttgctcacgtgatcctaccccggaacagactcatcggttggcacgagcaatgatggcctttactgcggatctttttagcctggtggcacagacctccacctgtcctaatcttatactgagtccactttcagtggcactggcacttagccatctggcactcggtgcccagaaccatactcttcaaagacttcaacaggtccttcacgcagggtcgggaccttgtctgccgcatttgttgtcgcgcttgtgccaagatctgggacctggtgcgtttcgtttggcggcccgaatgtacctgcagaagggatttcccatcaaagaagattttctggagcagtccgaacaactctttggagcaaaacctgtttcactcaccggtaaacaggaggacgaccttgccaacatcaatcagtgggtgaaggaagcaactgaaggtaagattcaggagtttctgtcggggcttccagaagataccgtgctgctgctgctcaatgcaattcattttcagggattctggagaaacaagtttgatcctagcctcacgcaacgcgactcgtttcaccttgatgaacaattcacggtcccagtggaaatgatgcaagcccggacgtacccactgaggtggttcctcttggagcaacctgaaattcaagtggcccactttccttttaagaacaatatgagcttcgtggtccttgtccctacccactttgagtggaatgtctcacaggtgttggcgaacttgtcgtgggatactttgcatcctccgcttgtgtgggaaagacctaccaaggtacgtttgcccaagctgtacctgaagcatcagatggatcttgtggctaccctgtctcaactgggccttcaagagcttttccaggcaccagacctccggggaatctcagaacagtccttggtggtgtcaggagtgcagcaccaatcgacccttgagctttctgaagttggagttgaagccgccgcagctaccagtattgctatgtcgcggatgtccctgagcagtttttcggtgaacagaccctttttgttcttcattttcgaggacactacgggactgccactttttgtgggcagcgtgagaaaccctaatccttccgccccaagagagctgaaggagcagcaagacagcccaggcaacaaggacttcctccaaagcctcaagggcttcccccggggggacaagctgtttggccctgatttgaaactggtcccaccaatggaggaagattacccccaattcggatcccctaag

SEQ ID NO: 274405 - DNA, 1473 bp, Artificial Sequence
  derived and/or modified sequence
atggcgctcctgtggggacttcttgtcctgagctggtcatgcctgcaaggcccgtgttcggtgttctcccctgtgtccgctatggagccgctggggcgccagctcacgtcggggcctaaccaggagcaagtcagccccctgactctcctgaagctgggaaaccaagaaccggggggccagaccgccctcaagagcccgccgggggtttgctcgcgggacccaacgccagaacagacgcatcgccttgccagagcgatgatggctttcactgccgatcttttctccctggtcgcccagacctccacttgcccgaatctcatcttgtcaccgctttcagtggccctggctctctcccacttggccctgggagcacaaaaccacaccctccaaagactgcagcaggtgcttcatgctggttccggcccgtgtctgccacatctgctctcgaggctgtgccaggatctgggccctggcgccttccggctggccgccaggatgtacctgcaaaaggggttccctatcaaggaggatttcctcgaacagtcggagcagctgttcggcgctaagccagtctcactgactggaaaacaggaggacgatctcgcgaatattaaccaatgggtgaaagaagcgactgaaggaaaaatccaggagtttctcagcggactgcccgaggacaccgtgctgctgttgctgaacgccatccactttcagggattttggagaaataagttcgacccgtccctgactcaacgggactcgtttcacctggacgaacagttcaccgtgccggtggaaatgatgcaggcgcgcacctaccccctccggtggttccttctcgaacaaccggagatccaggtggcccacttcccattcaaaaacaacatgtctttcgtggtcttggtgccgacccatttcgaatggaacgtttcgcaggtgctggcaaatctgtcctgggatactctgcaccctccgctcgtgtgggaaagacccaccaaggtccgtttgcctaagctctacctgaagcatcagatggacctggtcgcgactctctctcagctgggattgcaagaactgttccaggcgccggatttgcggggaatctcagaacaatccctggtggtgtcgggagtgcagcaccaaagcactctcgagctgagcgaggtgggagtcgaagccgcagcagcaacctccatcgcaatgagccgcatgtcgctctcatcgttctcagtgaaccgcccctttctgttctttatttttgaggacaccaccggactcccactcttcgtcggatcggtgcggaacccaaatcccagtgctccacgagaattgaaggaacagcaggacagcccgggcaataaagacttcctgcaaagcctgaagggattcccacgcggtgataagctctttggtccggatcttaaactggtccctccaatggaggaggactaccctcaattcggttccccgaag

SEQ ID NO: 274406 - DNA, 1473 bp, Artificial Sequence
  derived and/or modified sequence
atggcgctactgtgggggcttttagtgctgagctggtcttgtcttcaaggaccctgctcagtgttcagcccagttagcgctatggagccactgggccgccaactgacctctggcccaaaccaagagcaggtttcaccactaaccttacttaaactgggcaaccaagagcctggcgggcaaaccgcattgaaaagtcccccgggcgtctgtagtagggacccaacccccgagcagacacaccgcctcgcaagagcaatgatggcctttactgcagacctgtttagcctggttgcgcagacatccacctgtccaaatcttatcctctctcccttgtctgtggctctggcactgagccacctcgcacttggcgcccagaaccacacactgcaaaggctccagcaggtgctgcacgcagggtccggaccatgcctgccacacctgttgagtaggctttgccaggatcttggtccaggagctttccgcttagcggcaagaatgtaccttcagaaaggctttccgattaaagaggacttcttggagcagtccgagcagttgttcggagcgaagccagtgagcttgacaggaaagcaagaagacgacctggctaacatcaaccaatgggtgaaagaagctactgaaggaaaaatccaggagttcctgtcagggctacctgaggacacggtcctccttcttcttaatgcgatccacttccagggattctggagaaataaattcgacccaagcctgactcagagagacagcttccatctggacgagcagttcaccgttcccgttgagatgatgcaggcacgaacataccccctgcggtggttcctcttggaacaacctgagattcaggtcgcccattttccctttaaaaacaatatgagcttcgttgttctggttccaacacactttgagtggaatgtctcccaagttctagccaacctgagctgggacaccctgcatccaccacttgtctgggagaggcccaccaaagttagacttccaaaattgtacctgaagcatcagatggatctggtggcaaccctgtcccaactgggactccaagagttgtttcaggctcctgatctgaggggtatcagcgagcaaagtttggtggtcagcggcgttcagcatcagtctacactcgagctctctgaggtgggcgtggaagccgctgccgctacaagcattgcaatgtctagaatgtctttgagcagctttagcgtaaatcgaccctttttgtttttcatcttcgaagatactaccggacttccactcttcgtaggatcagttagaaatccaaaccctagtgctccccgcgagttgaaagagcaacaggacagtccaggcaacaaagatttcctccagagcctgaaaggattccctcgcggcgataagctgtttggacccgatcttaaattagtgcctcctatggaggaggattaccctcagttcggaagcccaaag

SEQ ID NO: 274407 - DNA, 1473 bp, Artificial Sequence
  derived and/or modified sequence
atggctctgctttggggcctgctggtgctgtcctggtcatgcttgcagggcccatgcagtgtgttcagccctgtgtcagctatggagcccctgggtcgtcagttgacctctggccctaatcaggaacaggtctctccccttaccctcctgaagttgggtaaccaagaaccaggcggacagactgcccttaaaagccctcctggagtttgttctagagacccaacaccagagcagacacaccgcctggctagggcaatgatggctttcaccgctgacttgttcagtctcgtggcccagacaagcacttgtccaaatctgatactcagcccactgagtgtagctcttgccttgtcacacctcgcactgggagcccagaatcataccctgcagagattgcagcaggtattgcatgccggatccggtccttgcctgccccaccttctgtcacgcctgtgtcaggatcttggtcccggcgcttttagactcgccgcaaggatgtatcttcaaaagggcttccctataaaagaggacttcctggaacagtctgaacagttgttcggagcaaaacctgtctccctcacaggtaaacaggaggatgatctcgccaacatcaatcagtgggtgaaagaagctaccgagggcaaaatacaagaattcttgtccggtctgccagaggataccgttctgctcctgcttaacgcaatccatttccaaggattttggcgtaacaagtttgatcccagtctcacacaacgtgacagcttccaccttgatgaacagttcactgtccctgtcgagatgatgcaggccaggacttaccctctgcgttggttcttgctggaacagcctgagatccaagtcgcccattttccattcaagaataatatgagcttcgtagtgctcgttcccactcatttcgagtggaacgtctcccaagtgctggccaacctgtcatgggataccctccaccctcctctggtgtgggagcgtcccactaaggtccgcctccccaagctttacctgaaacatcagatggacttggttgctaccttgagtcagcttggcctccaggagttgttccaggcccccgacctgaggggaattagtgagcagagcctggtagtctcaggcgtgcagcaccagtccaccctcgagttgtccgaagtgggagttgaggcagccgcagccacctccatcgccatgtcaagaatgagcctgagcagcttctcagtgaacaggcctttcctgttcttcatctttgaagacactaccggtctgccattgttcgtaggaagtgtaaggaaccccaatccaagcgctccccgtgagctgaaggagcaacaagattctccaggtaacaaagatttcttgcagtctctgaagggctttcctcgtggcgacaaactgttcggtcccgaccttaagctggtcccacccatggaggaagattatccacagttcggtagtcccaag

SEQ ID NO: 274408 - DNA, 1473 bp, Artificial Sequence
  derived and/or modified sequence
atggcacttctgtggggactgcttgtgcttagctggtcctgcctgcaaggcccatgtagcgttttcagccctgtgagcgccatggagcctctgggccgacagctgacatctgggcccaaccaggagcaggtttccccactgactttgcttaagctgggcaaccaagagcctggaggacagactgctttaaagtctcctcccggggtgtgttccagagatccaaccccggagcagactcaccgattggctagagctatgatggcatttactgcggacctttttagcttggtggctcaaacctctacttgccccaaccttatcctcagccccctatccgtggctctcgctctgagccacctggctcttggcgcccagaaccacacgctgcagcgactgcaacaggttctgcacgcagggtcaggtccctgtcttccccatctgctgtcaaggttgtgtcaagatcttggccccggagctttccggctggccgcacgaatgtacttacaaaaaggctttccaatcaaggaagattttttggaacagagcgaacaactgtttggagctaaacctgttagcctgaccggtaagcaagaggacgatctcgccaacatcaaccagtgggtgaaggaagcgacagaggggaagatccaagaatttctcagcgggctccctgaggacactgtactccttcttctgaatgcaatccactttcaaggattctggagaaacaaatttgatccaagcctgacccagagagactcttttcacctggatgagcagtttacggttcctgttgagatgatgcaagctagaacctaccccctcagatggtttttgctggaacagccggaaatccaggttgctcactttcccttcaagaacaatatgtccttcgtcgtgcttgtgccaacacatttcgaatggaacgtaagtcaggtcctggcaaacctcagctgggatactctgcatcctcccctcgtctgggagcggcccactaaagtgagattgccaaaactctacctgaaacatcagatggatcttgtagcaacactcagtcaactgggcctccaagagctgttccaggcccctgatcttcgtggaatcagtgaacaatccctggttgtttccggggttcagcaccagagcactctggagctttcagaggtcggagtcgaggctgccgctgcaacatcaatcgctatgagtagaatgtccctctctagcttcagtgtcaacaggccatttctgttttttatctttgaagatactacgggactgccactcttcgtgggatctgttcgcaatcccaacccttcagcacccagagagctgaaagaacagcaggattcccctggcaataaggatttcctgcagagcctgaagggattcccaagaggcgacaaattattcggccctgacctgaaactcgtccctcccatggaagaagactacccacagttcggtagtcctaaa

SEQ ID NO: 274409 - DNA, 1473 bp, Artificial Sequence
  derived and/or modified sequence
atggccctgctctggggtctgctggtcttatcatggtcatgtttacaaggcccttgcagcgtcttcagccctgtttcagctatggaaccacttggtcgccagctgacgagtggtcctaatcaagaacaagttagccctttgactttgttgaagctggggaatcaggagcctggcggccaaactgcactgaagtcacccccgggggtttgttctagggaccccactcctgaacaaactcaccgcctggctcgggcgatgatggccttcacggcggacttgttttctcttgttgcacagacatctacatgcccaaacctaattctgagccccctgtcggtagccctcgctctgtctcacctagcccttggggctcagaaccacacattgcagagactgcaacaggtcctgcacgccggctctgggccttgcctcccgcacctgctttcgcgattatgccaggatctgggcccaggcgcctttagactagccgcccgaatgtacttgcagaaaggatttcctattaaggaagacttcctagaacagtcagagcagttgtttggcgctaagcccgtcagcctcacagggaagcaggaggatgatctggccaacattaaccaatgggtaaaagaggcaaccgaaggaaagatccaggagttcttaagcggcctgccagaggacacagttttattgctgctgaacgctattcacttccagggcttctggagaaacaaatttgatccttctttaactcagcgcgactccttccatctggacgaacagttcaccgtcccagtggaaatgatgcaagcacggacatacccactacggtggttcctgctcgagcaaccggaaatccaggtcgcccacttcccctttaagaataacatgagttttgtggtgctggtgcctacccattttgagtggaacgttagtcaggtcctggccaatctgagctgggatactctacacccccccttggtctgggagcgtcctaccaaggtgcggctaccaaagctttacctgaaacaccagatggatctcgttgctactctttcgcaattggggttgcaggaacttttccaggcccccgatttgcgggggatctccgaacagtcacttgtggtttctggagtgcagcatcagtctaccctggagctttcggaagtcggcgtcgaagccgcggccgctactagcatcgccatgtcacgcatgtctttatcctccttctccgtgaatcgaccttttctattttttatttttgaagatactacaggcctacctctattcgtcggctctgtccgcaaccccaatcctagtgcccctagggaactcaaagagcaacaggatagtcccgggaataaagacttcttgcagtccctaaaaggcttccctagaggagacaaattgttcgggccggacctaaaactggtaccaccaatggaggaggattaccctcaatttggatctcctaag

SEQ ID NO: 274410 - DNA, 1473 bp, Artificial Sequence
  derived and/or modified sequence
atggccttgttgtggggacttctggtgttgagctggagctgcctgcaaggaccctgctccgtgttctcccctgttagcgcaatggagccgcttggacggcagctgacttcgggaccgaaccaagagcaggtgtcgccgctcaccttgctgaagctgggtaaccaagaacctggtggccagactgccctcaagtcaccaccgggtgtctgctcgcgcgacccgaccccggaacagacccacagactggcccgggcgatgatggcttttaccgcggacctcttcagcctcgtggcccaaacttctacttgtccgaacctcatcttgtctcccctgagcgtggctcttgcgctgagccatctggcactgggagcccaaaatcatactcttcagcgcctgcaacaagtccttcacgcaggatcaggaccatgcctgccgcacctgctgagccggctctgtcaggacctgggacctggggccttcaggctcgcagcacggatgtacctccagaaggggttcccgatcaaagaagatttcctggagcagtcggagcagctgttcggagccaagccagtgagcctgaccgggaagcaggaggacgatctggccaatatcaaccaatgggtcaaagaagccactgaggggaagatccaagaattcctgtccggcctcccggaagataccgtgttgctcctgctcaacgcaatccactttcagggtttctggcgcaacaagttcgatccaagcctgacccagcgggactctttccacctcgacgaacaattcacggtgccggttgaaatgatgcaggctcgcacttacccgcttagatggtttctgcttgagcaacccgagattcaagtagcccatttccctttcaagaacaatatgtcgtttgtggtgctggtgccgacccatttcgagtggaatgtgtcgcaggtccttgcgaacctttcctgggatacgctgcacccaccgctcgtgtgggaaaggccaactaaggtacgcctccctaagctgtacctgaagcaccagatggatctggtggctaccctttcccagcttggactgcaggagctctttcaggcgccggacctgcggggcatctccgaacagtcgctggttgtctccggagtgcagcatcaatcaaccctggaactctccgaggtgggagtggaggctgccgcagccacctccattgcgatgtcacgaatgtcattgagctcattctcggtcaaccgtcctttcctcttcttcatcttcgaggacaccactggcctgccactgttcgtcgggagtgtgagaaatccgaatccatcggcgccacgtgaactgaaggaacagcaagattcgcctggcaacaaagactttcttcagtcactcaaaggcttcccgagaggtgacaagctgtttggtcccgacctcaaattggtcccaccgatggaagaagattatcctcagtttgggtcaccaaaa

SEQ ID NO: 274411 - DNA, 1473 bp, Artificial Sequence
  derived and/or modified sequence
atggcgcttttgtgggggttgctcgtgctgtcctggtcgtgcttgcaaggcccgtgctccgtgttctcgccggtttcggccatggaacccctcggccgccagttgaccagcggaccgaatcaggaacaagtcagcccgctgaccctcctgaaactgggaaatcaagaaccaggaggccagaccgcgctgaagagccccccgggcgtctgctcacgcgacccgaccccggaacaaacgcaccgcctcgcccgcgcaatgatggcatttactgcagatctgttctcgcttgtggcccagacttcgacctgtccaaacctgattctctcgccgctcagcgtcgccctcgcgctctcgcacctggcgctgggagcccagaaccacacccttcagcgactccagcaagtgcttcatgccggcagcggaccttgccttcctcatctcttgtcgcgcctctgtcaagacctcggcccgggggcgttccgcctggcagcacggatgtacctccagaagggattcccgatcaaagaggacttcctggagcaatccgaacaactctttggcgctaaacccgtgtccctcactggaaagcaggaggacgacctggccaacatcaatcagtgggtgaaggaggctaccgaaggaaagattcaggaatttctgagcggactgccggaagatactgtgcttctgctcctgaacgcaatccatttccaggggttctggcgtaataagttcgacccgtcactgacccaaagggattcttttcacctggatgaacaatttactgtgccagtggagatgatgcaggcacgcacctacccactgagatggttcctccttgaacagccagagatccaagtggcgcacttcccgttcaaaaacaacatgtcgttcgtggtgctggtgccaactcacttcgaatggaatgtctcccaagtgctggctaacctttcgtgggacacgctgcaccctccactggtctgggaaagacccaccaaggtgcgcctcccaaagctgtacctgaagcatcagatggacctcgtggcgactttgtcgcagctgggactccaagagctgtttcaggcgccggacctgagaggaatctcggagcagtccttggtggtgtctggagtgcagcaccaaagcacgctggagctctcggaagtgggagtggaggctgccgccgccacttcgatcgctatgtcccgcatgtctctctcttcgttcagcgtaaacaggccattcctgttcttcatctttgaggacactaccggcctcccgctcttcgtcggatccgtgcgaaatcctaacccgagcgcgccgcgggagctgaaggagcagcaggactcgccgggaaacaaggacttccttcaatctctcaaaggattcccccggggggataagctgtttgggccggacttgaagctggtgccgccgatggaagaggactacccgcagttcggatcaccgaaa

SEQ ID NO: 274412 - DNA, 1473 bp, Artificial Sequence
  derived and/or modified sequence
atggcccttctttggggactcctcgtcttatcctggtcctgcctgcaagggccgtgtagcgtgtttagccccgtctcagccatggaaccccttggacggcagcttacatccggtcctaatcaggagcaggtgagcccgttaacacttctcaaactcggcaatcaggaacctggaggacagaccgcactcaagtctcctccaggcgtttgtagccgcgatcctactcccgagcagacacaccggctcgcaagagcaatgatggccttcaccgcagacttgttttctctcgtggctcagacctctacctgccctaacctcatcttaagccccctgtccgtagcactggcactaagccatctcgctcttggagcacagaaccacacactgcaacggctgcagcaagtactgcacgctggctccggaccctgcctgccccacttgttgtctagactgtgccaagatctgggtccaggagcctttagactcgctgcccgaatgtatctgcagaagggtttccccatcaaagaggattttctcgagcagtccgagcaattgtttggtgcaaagccggtctcattaactgggaaacaggaagatgacctggccaatattaaccagtgggtgaaagaagccaccgaagggaagattcaggagtttctgtcaggcctccctgaagatactgtgctcttattgctgaatgccatccactttcagggattttggagaaataagttcgacccttcactgacccagagagattcttttcatctggacgagcagttcaccgttcctgttgagatgatgcaggcacgtacatatcctctgcgctggtttcttcttgaacagccggaaatccaggttgcccatttcccattcaaaaataacatgtcgttcgtggttctggtgccgacacatttcgaatggaacgtatcacaagtcttggccaacctgagctgggatacactgcacccccccttggtgtgggaaaggcccaccaaagtaagactaccaaaactgtacctcaaacaccaaatggatttggttgctacactttcccagctgggactgcaggaactgttccaggcacctgatctgcgggggatttctgagcagagccttgtggtgtctggagtgcagcatcagtcaactcttgagctttcagaggtgggggtggaggctgccgctgccacttccatagccatgagtcgtatgtcactctcttcgtttagtgtgaaccgtcccttcttgttttttatctttgaggacaccactggattacctttatttgtgggctcggtcaggaatccaaacccaagcgccccacgtgagctcaaggagcagcaggacagccccgggaataaggactttcttcagtcccttaaaggattcccccggggcgataagctgttcggtccggatctgaagcttgtgccccccatggaggaggattaccctcaattcgggagccctaaa

SEQ ID NO: 274413 - DNA, 1473 bp, Artificial Sequence
  derived and/or modified sequence
atggcgctgctgtggggactcctggtcctgtcgtggtcctgcctccaaggaccatgctccgtgttctcgcccgtttcggccatggaaccgttgggccgccaacttacctcgggaccgaaccaagagcaggtcagcccgctgaccctcctcaagctgggcaaccaagagccgggcgggcagaccgccctgaagtcaccacctggcgtttgctcacgggaccctactcctgagcaaactcaccgcttggctagggctatgatggcattcactgcggatctgttttcgctggtggctcaaacctccacgtgcccaaatctgatcctgtccccgctgtcggtcgccctggccctgtcacacctcgctctcggagcccagaatcataccttgcagagacttcagcaggtgttgcacgctggaagtggcccatgcctgccgcacctcctgtcgaggctctgccaggaccttggcccgggtgctttccgactggccgcacggatgtacctgcagaagggattcccgattaaagaggacttcctcgaacagtcggagcagctgtttggcgccaagccagtgtcgctcactggaaaacaggaagatgatctggctaacattaatcagtgggtgaaagaagccactgaaggtaagatccaagagtttctgtcaggactgccggaagatactgtgctcctgctcttgaacgcaatccacttccagggcttctggcgcaataagtttgacccgtccttgacccagcgcgactccttccacctggatgaacagtttaccgtgccggtggaaatgatgcaagctagaacttacccgctccggtggttcctgctggaacaaccagagatccaggtggcgcactttccctttaagaacaatatgtccttcgtcgtgttggttcccacccatttcgaatggaacgtcagccaggtgctcgcaaacctgtcatgggatactctgcatccgccgctggtgtgggaaagacctacgaaggtcagattgcctaagctgtacctgaaacaccagatggacctggtcgcaacgctgtcacaactgggactgcaagagctgttccaggccccggacttgcgcggcatctcggaacaatcgctcgtggtgtcgggagtccagcaccagtcaactctcgaactctcggaggtcggcgttgaagcagccgctgcaacttcgattgccatgtcccgtatgtcactgtcatccttcagcgtgaatagacctttcctgttcttcatcttcgaggacactaccggactgcctctgttcgtgggctcggtgcgaaatcccaatccgagcgcgccgcgcgaactgaaggagcagcaggatagccccgggaataaggacttcctgcaatctctgaagggcttcccacgcggtgataaactcttcggaccagatttgaaactggtgccgccgatggaagaggactacccgcaatttgggtcgcctaag

SEQ ID NO: 274414 - DNA, 1473 bp, Artificial Sequence
  derived and/or modified sequence
atggccctgctgtggggactgttggtgctgtcctggtcctgtctgcaagggccatgttcggtgttttcgccggtgtcggccatggaaccactcggacggcagctcacttcgggcccaaatcaggagcaggtttctccgctgaccctcctgaagctgggcaaccaagaaccaggtggtcagacggcccttaagtcgccacctggcgtctgcagcagggacccgaccccggagcaaacgcatagactggcaagagccatgatggcttttaccgcagacctgttctcactggtggcccagacttccacctgtccaaaccttatcctctcgccactctccgtggccctggcactttcgcatctcgctctcggcgctcagaaccataccctgcaaagactgcaacaagtgctccacgccggaagcggaccgtgcctgccgcatctgttgtcacgcctgtgccaggacttgggccctggcgcgtttcggctggcggcgaggatgtacctgcagaaagggttcccgattaaggaggatttccttgaacagtcagagcaactgttcggtgccaaaccagtatcgctgaccggaaagcaagaggacgacctggcgaatatcaatcagtgggtgaaagaagccaccgaaggaaagattcaggaatttctctccggcctgccagaggacactgttctgcttctgctgaacgccatccactttcagggattctggcgtaacaagttcgatccatcactcacccaacgggactcattccacctggatgagcagtttaccgtgcctgtcgagatgatgcaggcacgcacttacccgctgagatggtttctgctggagcaaccggaaattcaagtggcccacttcccgttcaagaataacatgtccttcgtcgtgctggtgccgacgcacttcgaatggaacgtgtcccaggtgctggccaacttgtcctgggatacccttcatcctccactggtgtgggaacgcccgactaaggtgcggctgcctaaactttacctgaagcaccagatggacctggtggccactctgtcacagctcggacttcaggaactgttccaagcgccagacctgagaggaatatcagagcagtccctcgtggtgtccggagtgcaacaccagtcaactctcgagctgtccgaagtcggggtggaagccgcggcggcgacttcgattgctatgtccagaatgtcgcttagcagcttctcggtgaatcggccgttcctcttcttcatcttcgaggacactactggactgcctctctttgttggaagcgtccgcaatccaaacccgtcagcgccgagggagctgaaagaacagcaagattcgccaggaaacaaggactttttgcagtctcttaaggggttcccacgaggagataagctgttcgggccagatctgaagctcgtcccgccgatggaagaagattaccctcagttcggatcgcctaag

SEQ ID NO: 274415 - DNA, 1473 bp, Artificial Sequence
  derived and/or modified sequence
atggcccttctgtggggactgcttgtcctttcgtggtcatgccttcagggcccgtgctccgtgttctcccctgtcagcgccatggaaccgcttggccggcagcttactagcggcccgaaccaggagcaggtgtcgcctctgacgctgctcaagttgggtaatcaagagccaggcggacagaccgcccttaagtcgccgcccggggtctgcagccgggatccgacccctgagcaaactcacaggctggctcgggctatgatggcctttactgccgacctgttctctctcgtcgcccaaacttcgacctgtccgaacctcatcctctcaccgctctccgtggcactggccctctcccatctggcgctgggagctcagaaccacacgctgcagaggctgcagcaggtgctgcacgcgggctcaggcccgtgtctgccccatctcctctcgagactgtgtcaagatctcgggccgggcgctttccgcctggcggcccggatgtacttgcaaaagggctttccaatcaaagaggacttccttgagcagtccgaacagctgtttggcgcaaagcctgtgtcgctcactgggaagcaggaagatgatctggcaaacatcaaccagtgggtgaaggaggccaccgaaggtaaaatccaagaatttctgtccggacttcctgaagataccgtgctgctcctgctcaatgccattcatttccagggtttctggcgcaataagttcgacccgtccctgactcaacgggactcctttcacctcgatgaacaattcactgttccagtggagatgatgcaggcaagaacttaccccttgagatggttcctgctggagcagccggagatacaagtggcgcactttccgttcaagaacaacatgtcatttgtggtgctcgtgccgacgcacttcgagtggaacgtctcgcaagtgctggcgaatctctcgtgggacaccctgcatcctccgcttgtgtgggagcgccccacgaaggttagattgcctaaactctacctcaagcatcagatggacctcgtcgcaaccctgtcacagctgggactgcaagagttgttccaggctcctgatctgcggggcatcagcgagcaatccctcgtggtatcgggcgtgcagcatcagtcaaccctggaactctccgaagtgggggtggaggcagctgcggcaactagcatcgcgatgtcgaggatgtcgcttagcagcttttccgtgaaccggccattcctgttcttcatttttgaggacaccactggcctgccgctcttcgtcggaagcgtgagaaaccctaatccgagcgcaccacgcgaactcaaggaacagcaggactcaccaggaaataaggactttctccagtccctcaaaggcttccctcgcggagataagctgttcggccccgacctcaaactggtgcctccgatggaggaggactacccgcagttcggcagcccgaag

SEQ ID NO: 274416 - DNA, 1473 bp, Artificial Sequence
  derived and/or modified sequence
atggccttgctgtggggactcctggtgctctcctggtcgtgtctgcaaggtccatgtagcgtgttttcgcccgtttcggcaatggaacctcttggtaggcaactgacgagcggacccaaccaggagcaagtcagccctttgaccctgcttaagctgggaaatcaagagccaggtggacagacggctctgaagtcgcctcccggtgtgtgctcgagagatccaacccccgaacaaacccaccggttggcccgtgcgatgatggcttttaccgcagatctgtttagccttgtggcgcagacctccacttgtcctaatcttatactctcgcccctgtccgtcgcacttgcactttcacacctggcactgggtgcacagaatcataccctgcaacgacttcagcaagtcctgcatgctggctcaggaccatgcttgccgcatctcctctcgagactctgtcaggacctcggccctggagcatttcgcttggcagcaaggatgtaccttcagaagggattcccaattaaggaagattttctggaacaaagcgaacaactgtttggggctaagcctgtttctctcaccggcaaacaggaagatgatctggcgaacattaatcagtgggtgaaggaggcaacggaaggcaagatccaggagttcttgtcgggacttccggaggatactgtgcttttgctcctcaacgccattcacttccaaggtttttggcggaacaagtttgatccttcactgactcagcgcgatagctttcacctcgacgagcagtttactgtgccggtggagatgatgcaggcccgcacctaccctttgcggtggttcttgttggaacaaccagaaatccaggtggcacactttccgttcaaaaacaacatgtccttcgtcgtgcttgtccccactcactttgaatggaacgtgtcccaggtgctggcaaacctgtcctgggatactctgcatcccccactggtgtgggaaagacctaccaaagtcagacttcctaagctgtacctcaaacatcaaatggatctggtggcaactctgtcccagttgggactgcaggagctgtttcaagctcctgatctgcggggaatctcggagcaaagcctcgttgtgtcgggagtccaacatcaatcgactcttgaactgtcggaggtgggtgtggaagcagcagcggccacctccattgccatgtcccgcatgagcctcagctccttctcggtcaaccgaccatttcttttcttcatatttgaagatactactgggctgccactgtttgtgggatcggtgagaaaccctaatccatccgccccaagagagctcaaggagcaacaagattcgccagggaataaggacttcctccagtcactgaagggcttccctcgaggggataaactctttggcccagatctgaagttggtcccacctatggaagaagattaccctcaatttggatcgccaaaa

SEQ ID NO: 274417 - DNA, 1473 bp, Artificial Sequence
  derived and/or modified sequence
atggcactcttgtgggggctgctcgtgctctcgtggagttgtctccaaggtccgtgttcagtgttttcgccagtcagcgccatggaacctctgggtaggcaattgacctccggcccaaatcaggagcaagtctctcctcttaccctgctgaaactgggtaatcaggagcccggaggtcagactgcacttaagtcgccacccggagtgtgtagcagagatcctacgcctgagcagactcatagacttgcgagagcaatgatggcatttaccgccgatcttttttccctcgtcgcgcagacctccacgtgcccgaacttgattttgtcacccctgagcgtcgcgctggccctttcccatctcgcgcttggtgcccaaaatcacacccttcagcggcttcagcaagtcctccacgcaggttcaggaccgtgcctgccacacttgctcagccgcctgtgccaggaccttggacccggtgccttcagattggcggcccgaatgtaccttcagaagggctttccaattaaggaagatttcctggagcaatcagaacaactttttggcgcaaagccagtgtcactgaccgggaagcaagaagatgacctcgccaacattaaccagtgggtgaaggaagcaacggaaggtaagatccaggaattcttgtccggactgccggaagatacggtgcttcttctgctcaacgcaatccactttcagggcttttggaggaacaagtttgacccatcccttactcaacgtgactccttccatcttgatgaacaatttactgtcccagtggagatgatgcaagcacgcacctacccactgcggtggtttcttcttgaacaacctgaaatacaagtggcacattttccgttcaagaataacatgtccttcgtggtcttggtcccaacccattttgaatggaatgtgagccaggtgttggcaaacctctcgtgggacaccctgcatcctcccctcgtgtgggaacgccctactaaggtcaggctgcctaaactctacctgaaacatcagatggatcttgtcgccactctgtcccaactcggactccaagaacttttccaagcaccggatctcagagggatcagcgagcagtcacttgtggtgagcggagtccagcatcaatcaacgcttgagctgtcagaggtcggggtggaagccgcggcggcaacctcaatcgccatgtccaggatgtcactttcatcattttcagtgaataggccttttctctttttcatatttgaagatactaccgggcttcccctgttcgttgggtccgtgcgcaaccctaacccgagcgcaccaagagagctcaaggaacaacaggattcgccaggaaacaaggacttcctgcaatcgctcaagggcttccccagaggtgacaaactctttggtcctgacttgaaactggtcccacctatggaggaggattaccctcagtttggctcgccgaag

SEQ ID NO: 274418 - DNA, 1473 bp, Artificial Sequence
  derived and/or modified sequence
atggcactgctgtggggacttctcgtgctttcttggagctgtctgcaaggaccatgtagcgtttttagccctgtgtctgccatggagccattggggagacagctcactagtggtcccaatcaagaacaggtgtcacctctcacactgttgaagttgggcaatcaggagcctggcggccaaactgctctgaaatcccctccaggtgtttgctcacgcgacccaacgccggagcaaacccacagactggcacgggctatgatggctttcaccgccgacctgttcagtctggtggctcagacatcaacatgtccaaacctgattctgagccccttgtccgtcgcgctggccttgagccatctcgcccttggggcgcagaaccacaccctgcagagactgcagcaggtgctgcacgcaggttctggtccctgtctcccccatctgctgagtcgcctgtgccaggatctgggtccaggggcgtttaggctcgcggcgcgaatgtatctccagaagggcttccccatcaaggaggattttctggaacagtccgagcagttgttcggcgccaagcccgtgagtctcaccggcaagcaggaagatgaccttgctaatattaaccagtgggtcaaagaagccaccgaggggaagatccaggagtttcttagcgggctgccagaggatactgtgttgctgcttctcaacgccatccactttcaggggttctggcgcaacaaattcgaccctagcctgactcagagggatagcttccatcttgacgaacagttcaccgtaccagtcgagatgatgcaggcaagaacttacccactccggtggtttctgttggaacagccagagattcaagtggcccattttcctttcaagaataatatgtccttcgttgttctggtcccaacccatttcgagtggaatgtgtcccaggtgctggccaacctctcatgggacacgctgcatccacctctcgtgtgggagcggccgaccaaggttcggctcccgaagctttatttgaaacaccagatggatttggtagctacactgtcccaactgggattgcaagagctgttccaggcgcccgaccttcgaggcatttccgaacagagcctggtagttagtggagtgcagcaccagtctacgctcgaactgtcagaagtgggtgtagaggctgccgccgctacttccatagccatgagcagaatgtctctcagcagtttctccgtgaaccgaccctttctgtttttcattttcgaagacaccacagggctccctctgtttgtggggtccgtcaggaatccgaacccctccgctccccgcgaacttaaagagcagcaagacagcccaggcaataaggacttcctgcagtccttgaaaggcttccccagaggagacaagttgtttggaccggatctgaagctggtgcctccaatggaggaagattacccccagtttggtagccctaaa

SEQ ID NO: 274419 - DNA, 1473 bp, Artificial Sequence
  derived and/or modified sequence
atggccctgctgtggggactgcttgttctgagttggagctgtcttcagggaccttgtagtgtcttttcgccagtgtctgcaatggagccactcggccgacagctgactagtggtcccaatcaggagcaggtcagcccattgacactgcttaaattgggcaatcaggagccgggcggccagactgccttgaagtctccccctggagtctgttctcgcgatcccactccagagcagacccatcgtttggctagggccatgatggccttcacagctgatctcttttcattggtcgctcaaacgagcacctgccctaatttgatactttcccctctgtccgttgcgctggctctctcccatttggctctaggagcccagaaccacaccctgcagcgtctccagcaggtattacatgccgggtcgggtccttgtctaccacatcttcttagtagactttgccaggacttggggccgggggcattccgacttgccgccaggatgtatctgcagaagggattccctatcaaagaggattttcttgaacagagcgagcagcttttcggcgccaagcctgtttcgttgactgggaagcaagaagatgatctcgcaaacataaaccagtgggtgaaagaggcaaccgagggaaagattcaggagttcttgagtggtctaccagaggatacggtgctgctgctcttgaatgcgatacacttccagggtttctggcggaataaatttgacccaagtcttacccagagggactctttccacctagatgagcagttcaccgttccagtcgagatgatgcaggcccgaacatacccgcttcggtggttcctgttagagcagcctgagattcaggtggctcacttccctttcaagaacaatatgtcattcgtggttttggtgccaacacacttcgagtggaatgtttcccaagtgctcgccaacctgagctgggatacccttcaccctcccctagtctgggagcgcccgacaaaggtgaggctgccaaagctatacctcaagcaccagatggacctcgtagctacattgtctcaactggggctgcaggagctgttccaggcacccgacctgcgcgggattagcgaacagtcccttgtggtgtctggagtgcagcatcagtccactctggagctctcagaggtcggggtggaagccgctgcagccaccagcatcgccatgagccggatgtcactcagctccttctctgtgaaccgaccattcttgttctttatttttgaggatacaaccggcctgcctctcttcgttggctctgtaagaaacccaaaccccagtgcgccgagggagctaaaggagcagcaggattcccctggtaataaagactttctccagagcctcaagggatttccacgcggggacaaactgttcgggcctgacctgaagctagtcccacctatggaggaggactaccctcagttcggatccccaaaa

SEQ ID NO: 274420 - DNA, 1473 bp, Artificial Sequence
  derived and/or modified sequence
atggccttgctgtggggcctgttggtcctttcttggtcctgcctacaaggaccctgttccgttttctccccggtgtcggccatggagccactgggccgtcagctcacctctggccccaaccaagagcaagtgagcccgctgaccctcctaaaacttggtaaccaggaacctggcggtcaaactgctctgaaatcaccccctggcgtctgttcgcgagatcccaccccagagcaaacacaccgcctcgctcgtgctatgatggctttcactgccgacttgttctcgttagtcgcccagaccagcacctgcccgaacctcatactgtcccctcttagcgttgccttggctctgtcgcacctcgcgctcggcgcgcaaaaccatacccttcagagactacagcaagtgctacacgccggtagcggtccctgcctgccccacctcttgtcccgtttgtgccaggatctgggccccggtgcctttcgcctcgctgcccgtatgtacttgcagaagggatttcctatcaaagaggacttcctggagcagtccgagcaactcttcggcgcgaagcctgtgtccttgaccggtaagcaggaagacgacctcgctaacatcaatcagtgggtcaaggaggccaccgagggcaagattcaggagtttctatcgggtctgccggaggacaccgtcctccttctcctgaatgcgatccacttccagggattctggcggaataagtttgatccgagcctgactcagagagacagcttccatttggacgagcagttcacggtcccagttgagatgatgcaagctaggacgtacccactgcggtggtttctccttgagcaacctgagattcaagttgctcacttcccgttcaagaacaacatgtctttcgttgtcctggtacctacccatttcgagtggaatgtaagccaggtcttggccaacctgtcgtgggacacgctgcacccacctcttgtctgggaaaggccgacaaaagtccgtctgcctaaactttacttgaagcaccagatggatctggttgccaccctatcgcagctgggtttacaggagctctttcaggctcccgatctgaggggtatctcggagcagtcgttggttgtttcaggtgtgcagcaccagtctactctcgagctgtcagaagtgggtgttgaggcagcggccgctacgagcattgccatgagtcgcatgtccctgtcgtccttctcagttaaccgacccttcctattcttcatctttgaggacacaacgggcctgcctctcttcgtgggctccgtccgtaatccgaatccttcagccccgcgtgaactcaaggaacagcaggactcccctgggaacaaagatttcctccaaagtttgaagggctttccccggggagataaactcttcggtcccgatctgaaattggtcccccctatggaggaggactacccccaatttgggtcccctaag

SEQ ID NO: 274421 - DNA, 1473 bp, Artificial Sequence
  derived and/or modified sequence
atggcactgctctggggccttcttgttctgtcctggtcctgcctccagggtccttgctcggtcttctcccccgtaagtgcaatggaaccactcggcaggcaactcacgagcggcccgaatcaagaacaggtatctccactgaccctactcaagctgggtaatcaagagccaggcggacagacagcgttgaagtcccctcccggggtgtgctctcgggatcctacccctgaacagacccatcggctggcgcgcgctatgatggccttcactgctgaccttttttccctggtggcccaaacgtcaacgtgccccaatctcatcctgagtcctctgagtgttgcgctggccctgagccaccttgccctgggagcccagaatcatacgctgcaacgactccagcaagtcctgcacgcggggtctgggccctgcctccctcaccttttgagccgcctatgtcaggatctggggcccggagcttttcgacttgccgcccggatgtacctccagaaaggctttcctatcaaggaggacttcctcgagcaatctgagcagctgtttggggcaaaaccggttagcctgaccggaaaacaagaggatgatcttgcaaacattaaccagtgggtgaaagaggctaccgagggtaagattcaagaattcctatctgggttgccagaggacactgtcctcctgttactcaatgctatacacttccagggcttttggcggaataagttcgatccttccctgacgcaacgcgacagttttcacctcgacgagcaattcaccgttcctgtggagatgatgcaagctaggacctatcccctgaggtggtttttactggaacagccagaaatacaagtggcccacttccctttcaaaaacaatatgtcctttgtagttctcgttccaactcacttcgagtggaacgtttcacaggttctggccaacctgtcatgggacactctccacccacccctggtctgggagcgtccgaccaaagtccggttaccaaagctatacctgaaacatcagatggacctggtggctacccttagccagctgggcttacaagaactgtttcaggcgcctgatcttcggggcatctcagagcagagtctcgttgtcagtggcgtccagcatcagagtaccctagagttgtcagaagttggtgttgaggccgcggccgcaacgtccatagctatgtcccgcatgtctcttagcagcttctcggtcaaccgccccttcctgtttttcatattcgaggacaccaccggcctgccgctgttcgtcggctctgtgagaaacccaaaccccagcgctccacgggagctgaaagaacagcaggattccccgggaaataaagacttccttcagtccctgaagggcttccctcgtggagataaactgttcggacctgacctcaaactggtgccccccatggaagaggattatccacagtttgggtctccgaaa

SEQ ID NO: 274422 - DNA, 1473 bp, Artificial Sequence
  derived and/or modified sequence
atggccctcctgtggggcttgctggtgttgtcatggagctgcttgcagggaccgtgttcagtgttcagcccggtgtcggcgatggaaccactcggtcggcagctgactagcggccctaaccaggagcaagtgtccccgctgacgctgctgaaattgggcaatcaggaaccgggaggacagaccgcgctgaagtctccgccgggagtttgctcacgcgaccccaccccagaacagactcaccgcctggcgcgtgccatgatggcctttaccgccgatctgttctccctggtcgctcaaacttcaacctgccctaacctcatcctcagcccactgagcgtcgccctggcactttcccacctggcgcttggagcacaaaaccatacgctgcagagactgcaacaggtgctccacgctgggtcaggtccgtgtctgcctcacttgctgtcacggctgtgccaagacctgggacccggagccttccggctcgccgcacgcatgtacctgcagaagggatttcctatcaaagaggacttcctcgagcagtccgaacaactgttcggtgccaagccagtgtccctgactgggaaacaggaggatgacctggccaatatcaatcaatgggtgaaggaggccaccgaggggaagatccaagagttcctttcgggcctcccagaggatactgtgctcctccttctcaatgctattcatttccagggattttggcgcaataagttcgatccgtctctcacccaacgggactcgttccatctggacgagcaattcaccgtgccggtggaaatgatgcaagcaaggacctaccctctcagatggttcttgctggaacaaccagaaatccaggtggcgcatttcccgttcaaaaacaacatgtcgttcgtcgtgctggtcccaactcattttgaatggaacgtctcccaagtgctggccaacctgtcctgggacactctccacccgccgttggtgtgggaacgccccacgaaggtgaggcttcctaagctgtacctcaagcaccagatggacctggtcgcaaccctctcgcagcttggactccaggagcttttccaggcgccggacctgcggggcatctcagaacagtcgcttgttgtcagcggagtgcagcaccagtcgaccttggaactgtcggaagtcggcgtcgaggcagcggccgcaactagtatcgctatgtccagaatgagcctgtcgtcgtttagcgtgaaccggccgttcctgttcttcatttttgaggacactaccggcctcccgctcttcgtgggatcggtgcgaaacccaaacccctcagctccccgcgagctgaaagaacaacaggatagcccaggaaataaagacttcctgcagtccctcaaggggtttcctagaggtgataagctgtttggacctgatctgaagctcgttccgccaatggaagaagattacccgcagttcgggtcccccaag

SEQ ID NO: 274423 - DNA, 1473 bp, Artificial Sequence
  derived and/or modified sequence
atggcacttctttggggactgctcgtgcttagctggagctgcctgcagggaccatgttccgtgttctcgcctgtgtcagcaatggaacctctgggcaggcaactcacctcgggcccaaaccaggaacaggtgagtcctctcactctgctgaaacttgggaaccaggagcctggcggacagactgcactgaagtctccccctggcgtgtgcagtcgggatcctactccagaacaaacacatcgccttgcgcgggccatgatggcttttactgcggacctgttttccctggttgcccagacatcaacatgccccaatctgattctcagccccctctccgtggcactggctctgagtcaccttgccctcggagctcaaaatcataccctccagcggctgcaacaggtgctgcacgccgggagcggtccatgtctgcctcaccttctcagtaggttgtgccaagatttgggacctggagcatttcgcctcgccgctagaatgtatttgcagaaaggattcccaatcaaggaggacttcctggaacagagtgaacaactgtttggagcaaagcctgtgagtctgacaggcaagcaggaggacgacttggctaacatcaaccaatgggttaaggaagctacagagggcaaaattcaggaatttctttctggattgccagaagataccgtgctgttgcttctcaatgcaatccatttccagggattttggagaaataaatttgatcccagcttgacacaacgcgatagcttccaccttgacgaacagttcaccgtgcccgttgaaatgatgcaagcccgtacttatcctctccgctggtttctgttggaacagcctgaaatacaggtggcccactttccatttaaaaacaacatgagtttcgtggtgctcgtaccaacacattttgagtggaacgtgagtcaggtactggccaacctttcatgggatactctccaccctcctctcgtttgggaaaggccaactaaggtgaggttgccaaaactgtacctcaaacaccagatggatttagtcgctaccctttcacagctcgggcttcaagaactatttcaggcaccggacttaaggggaattagcgaacagagtctggtagtaagcggtgtccaacaccagtccaccctcgagctctctgaggttggtgttgaagctgctgcggctactagcatcgccatgagccggatgagcctgtcttccttcagtgtcaacagaccatttttgttcttcattttcgaggataccacagggctacctttgtttgtcggatctgttagaaaccccaatccatcagcaccacgggagctgaaggagcagcaggattccccaggcaataaggacttcttgcaaagtctgaagggctttcctcgcggagataaactgtttggtcctgacctgaagctggtgccccctatggaagaggactacccgcagttcggatcccctaag

SEQ ID NO: 274424 - DNA, 1473 bp, Artificial Sequence
  derived and/or modified sequence
atggcactgctctggggcctcttggtccttagttggtcctgtctccagggtccgtgttctgtcttctcacctgtgtctgctatggagcccctcggcaggcagctgacatctggtcctaatcaagaacaagtgagtcccctcaccttgctcaagctcggcaatcaggagccaggtggacagactgcccttaagagcccacctggcgtctgctctagggatccaacgcccgagcagactcatagactggcaagggcaatgatggcgtttactgctgaccttttcagcctggttgctcagacctctacgtgccccaacctcatcctgagccctttgtctgtcgcccttgcactctcccaccttgctctgggtgctcaaaatcatactcttcagcgccttcagcaagtgctgcatgctggctcaggtccctgtctgccccacctgctgtcccgcctgtgtcaggacctgggcccgggagcattcagacttgcagcccgcatgtacctgcaaaagggatttccgatcaaagaagatttccttgagcagtctgaacaactgttcggtgcaaaacccgtgtctctgactggtaagcaagaggacgatctggcaaacatcaaccaatgggtgaaggaagctacggagggtaaaattcaggaattcctttccggactgcctgaagacacggtgttgttgttgcttaatgcgattcatttccaaggattctggagaaacaagtttgaccccagcctcactcaaagggattccttccacctggacgaacagtttacagtgccggtggagatgatgcaggccaggacttatccattgagatggtttttgctcgaacagcctgaaatccaggtggcgcactttccctttaagaacaacatgagcttcgtagtacttgttcccactcattttgaatggaacgtttctcaagtgctggctaacctgagctgggacactttgcatccaccattggtttgggagaggcctacaaaagttcgcttgcccaagctctacctcaaacatcagatggatcttgtggctactctgagccagcttggcctccaggagctgttccaagcccctgacttgcgcggcatctcagaacagtctttggtggtgtcaggcgtgcagcaccagtcaacactcgagctgagtgaggtcggtgtggaggcagctgccgctacttctatcgctatgtctagaatgtctctctcaagtttttcagtcaatcgcccgtttctcttcttcattttcgaagacactacgggacttcccctcttcgtcggttctgtaagaaatcccaacccctcagcacccagggagttgaaggaacagcaggattctccaggaaacaaagacttcctgcagagcctgaaaggctttccgaggggagataagctcttcggtcccgatctgaagcttgtaccgcctatggaagaagattacccacaatttggatctcctaag

SEQ ID NO: 274425 - DNA, 1473 bp, Artificial Sequence
  derived and/or modified sequence
atggccttgctgtggggcttactggttttgtcgtggtcatgcttacagggcccttgttcagttttcagtcccgtcagtgcgatggagcctctgggccgtcagctaacgagtggcccgaatcaggagcaggtgagccccctgaccctgctgaaattgggcaatcaggaaccaggaggacagactgccctgaagtcaccacctggagtctgtagccgggaccctaccccagagcagacccacaggctcgctagagcgatgatggccttcacagccgacctgttttcccttgtggcccagacaagcacctgtccaaacctaatcctgtcccctctctctgtggccctcgcattgtcacatttggcacttggagctcaaaatcataccctgcagagattgcaacaggtgttgcatgctggttcaggcccctgcctcccgcacctgcttagccggctctgtcaggacttgggtcctggtgcattccgcctagcagccagaatgtacctgcagaagggcttccccataaaggaggatttcctggagcagagtgaacagctgtttggcgcaaaaccagtttctttgactggcaagcaggaggatgatctggcgaacattaaccagtgggtcaaagaggcaaccgaaggcaagattcaagagtttctttcgggtttacctgaagacaccgtgctgctattacttaatgctattcattttcagggtttctggagaaataagtttgatcctagtctgacccagcgcgacagttttcacctcgacgagcagtttactgtgccagtggaaatgatgcaggccagaacttatcctctacggtggtttctcctggagcagcccgagattcaagtggcccacttccctttcaaaaacaacatgtcttttgtcgtgctggtgcctacgcactttgagtggaacgtgagccaagtgctcgccaatctgtcctgggacacccttcacccgccactggtctgggaaagacccactaaagtacgcctgcccaagttatacttaaaacatcaaatggaccttgtcgctaccctgtcccaactgggactgcaggaactctttcaggcccccgatctcaggggcatttccgagcagagtctggtggtgtctggggtgcagcaccagtccacactggagctctccgaggtcggggtcgaggctgcagctgcaacttcaatcgcaatgagccgaatgtctctttcctctttctccgtgaatagaccctttctattttttatcttcgaagacacgactggcctgcctctgttcgtcggctctgttcgcaaccctaaccccagcgcgccaagagagttaaaggaacagcaagactcacctgggaacaaagacttccttcaatctctcaagggtttcccaaggggcgataaactcttcggcccggatttgaagctcgtaccgcccatggaggaagattatccccagttcggctcaccaaag

SEQ ID NO: 274426 - DNA, 1473 bp, Artificial Sequence
  derived and/or modified sequence
atggctctcttgtggggcttactggttctttcttggtcctgcttgcaggggccgtgttccgtatttagcccggtaagtgcgatggagccactgggtaggcagcttacctctgggcctaatcaggagcaagtttcccctttaactctgttgaagctcggcaaccaagagcctgggggccagactgctcttaaatcgccgcccggcgtttgttctcgcgatccaactcctgagcagactcatcgactggcaagagccatgatggcttttacagcggatttattttccctcgtcgcgcaaacatcaacctgccctaacctgattctgagcccgcttagtgtcgcgctggctctgtcacatcttgcgctaggtgcacaaaatcatacgcttcaacgtcttcaacaagtacttcatgcaggaagcggaccttgccttccacatcttttgtcacgactctgccaggatcttggtcctggggctttccgacttgccgcgcgaatgtacctccagaaaggatttccgattaaagaagactttctggagcagagcgagcaactcttcggtgcgaaaccggtttcccttacaggaaagcaagaagacgatcttgctaacatcaaccagtgggtcaaggaggctactgaagggaagattcaagagttcttgagcggtctgccggaagatacagtgttattgctgttaaatgcaattcatttccaaggattttggcgcaataaatttgacccttctcttacccaaagagattccttccatttagacgaacagtttaccgtgccagtagaaatgatgcaagcaaggacgtacccgctgcgttggtttttattagagcagccagaaatacaggttgcacattttcctttcaaaaacaatatgagcttcgttgtcctcgttccgactcattttgaatggaatgtctctcaagtgctggccaatcttagctgggatacacttcatccaccgttagtttgggagcgcccaacgaaagtgcgactgccgaaactgtatttaaaacatcaaatggatcttgtcgccacgcttagtcagttgggtctccaggaactttttcaggcgcctgatttacggggcatatctgaacaatctttggtggtttctggagtacaacatcagtccacgttagagctcagcgaagttggagtcgaagctgcagctgcaacgtcaattgcgatgtcacgcatgtctttgtctagtttttctgtgaaccgcccttttcttttttttatttttgaggatacaacaggattgcctctctttgttggatcagtacgcaatccgaacccgtcagcaccgcgggagcttaaggaacagcaagactcgccgggaaataaggattttcttcaatcattgaaagggtttccgcggggcgataaactgtttggcccagatctgaaattagttccaccaatggaggaagattatccacagtttggctcgccgaaa

SEQ ID NO: 274427 - DNA, 1473 bp, Artificial Sequence
  derived and/or modified sequence
atggccctgctgtgggggctcctggtgctgtcttggtcctgcctgcagggaccttgttccgtctttagtcctgtgtcagccatggagccactcggacggcagctgaccagtggtcctaatcaggaacaggtgagtccgctgacccttttgaaactgggcaaccaggagcctggcggtcagacggcgcttaagagccccccaggcgtgtgttctcgagatccaacacccgaacagacacaccgcttggcgcgagcgatgatggcatttacggcagatctgtttagcctggtcgctcagacatcaacctgcccaaacctgatcctgagtccactttccgttgctcttgccttgagtcacctggccctcggagctcaaaatcacacccttcagcgattgcagcaggtcctccatgccggatcagggccctgcctgccacatctgcttagccgcctctgtcaggacctgggtccaggggcttttcgcttggccgctaggatgtatctgcagaagggatttcccattaaggaggacttcctggaacagtccgagcagctgtttggagctaagcccgtgtctctgactggcaagcaggaggacgatcttgccaacatcaaccagtgggtcaaggaggctaccgaaggaaagatccaggagttccttagcggtctccccgaagacacggtactcttgttgctgaatgctatccacttccagggtttctggaggaacaagttcgaccccagcctgacgcagcgggactcttttcacctggatgaacagttcactgtcccggtagagatgatgcaggccagaacatatcccctgagatggttcttgttggaacagcccgaaatacaggtagcacactttccttttaaaaacaacatgagtttcgtggtcctggtgcccacgcattttgagtggaacgtctctcaggtgctcgctaacctgagttgggacacactgcacccgcctctcgtgtgggagagaccgacaaaagtccgactgccaaaactctacctcaagcatcagatggatttggtggcaactctgtcacagttgggactgcaggagctgtttcaggctcctgatctgcgcggaatatccgaacagtccctggtggtgagtggagtgcagcatcagtctaccctggagttgtccgaagtgggagtggaggccgctgcagccacatctatagctatgagtaggatgtccctgtcaagcttctccgttaacagaccatttctgttctttatttttgaggatacaactggactgcctctttttgtgggatctgtaagaaatcccaatccttccgctccaagagagttgaaagaacagcaggactcccctggcaataaggactttctgcagagcttgaagggctttcccagaggggacaagctcttcggtccagacctcaagctcgttcccccaatggaggaggactatccacagtttgggtctccaaag

SEQ ID NO: 274428 - DNA, 1473 bp, Artificial Sequence
  derived and/or modified sequence
atggcactcctgtggggtctgctggtgctcagctggtcctgtctccagggcccctgttccgtattcagcccagttagcgcaatggagccactgggtcggcagctcacctcaggccctaatcaagaacaggtgtctccccttacgctgttgaaacttggcaatcaggagccgggcggtcagaccgcattgaagagccccccgggcgtctgtagcagggacccaacacctgagcagactcaccggctcgccagggccatgatggcctttactgctgatctcttctcactcgtcgctcagacgtccacttgccccaacctgatcctgagccccctttcagtcgcgctggctctgagccatcttgcccttggtgcacagaaccatacacttcagcggctccagcaggtcctccatgctggaagtgggccctgcctgccccatctgcttagcagattgtgccaggatctgggccctggtgcattcaggctcgccgcacgcatgtacctgcagaagggtttccctatcaaggaggatttcttggagcagtcagagcagctcttcggcgcaaagcctgtgagcttgacaggaaagcaggaagatgacctggcgaatatcaaccagtgggtcaaggaagccaccgagggaaagattcaggagtttctctctggattgcccgaagacaccgttctcctcctgcttaacgcaatacatttccaggggttctggcgcaacaagttcgatccttccctcactcaacgcgactctttccatctggacgagcagtttacagtgcctgtggaaatgatgcaggctcgaacataccccctcagatggttcttgcttgaacagcccgaaatccaggtggcccactttccattcaagaacaatatgtcttttgtggtgctggtacctacacacttcgagtggaacgtgtctcaggtgctggcaaatctttcttgggatactttgcacccacccctggtctgggagcgcccaactaaggtgaggcttcccaagctgtacctgaaacaccaaatggacctggttgctaccttgtctcagctggggctgcaggagctctttcaagctccagacctgaggggcatctccgagcagtctctggtcgtaagcggtgtgcagcaccagtcaacactcgagctgtccgaggtcggcgttgaagcagccgccgcaacaagtattgccatgtcccgcatgtctctgtctagcttcagcgtaaaccggccttttctcttctttatttttgaggacactaccggtctgcccctttttgtgggctctgtgagaaacccaaatccctctgcccctcgcgaactgaaagagcaacaggactcccctggcaataaggacttcctgcaaagcctcaagggttttcctagaggcgacaaacttttcggcccagatttgaagcttgtgccgcccatggaggaggattacccgcagttcggcagccctaag

SEQ ID NO: 274429 - DNA, 1473 bp, Artificial Sequence
  derived and/or modified sequence
atggccctgttatggggcctgctggtcttgtcttggtcttgcctgcagggtccgtgctccgttttctcccctgtatctgccatggagccactgggacgccagcttaccagcgggccaaatcaggaacaggtcagccccctgaccctgttgaagctgggcaaccaggaaccgggcggtcagacggccttgaagagtcctccgggggtgtgctctagggatcccaccccagagcaaacccatagactcgcgagagcgatgatggcctttaccgcagatctttttagcttggtcgcccagacgtcaacatgccccaacttaatcctgagtcctttgtccgtcgccctcgccctgtcacatctcgccctgggggcgcaaaaccacacactgcaaaggctgcagcaagtgctgcatgcgggctccggaccttgtctgccccatttgctatcaaggttgtgccaggatctggggccaggcgcttttcggctcgcggcaaggatgtatctgcagaagggctttcctatcaaggaagactttctggagcagagcgagcaactgttcggcgcgaagccagtgagcttaaccggcaagcaggaagatgatctggctaatatcaatcagtgggtgaaggaggctacagaggggaaaatccaggagtttctgtctggcctgcccgaagacacggtgcttcttttactcaatgccatccatttccagggcttttggcgtaataagtttgaccccagcctgacccagcgcgacagttttcacctagatgagcagtttacagtgcccgttgagatgatgcaagcccggacgtatccattgcgctggtttttgctcgagcaaccagagattcaggtcgcacattttccattcaagaacaacatgtcctttgtggtactcgtgcctacccatttcgagtggaatgtgtcccaggtgctcgccaatctgtcctgggacaccctccatccgccgctcgtgtgggagaggcccactaaggtccgccttccaaagttgtacctgaagcaccaaatggacctggtggccacactcagtcagctgggcctgcaggagctatttcaggccccagatctgcgtgggatctctgaacaaagtttggttgtgtctggagtgcagcatcagtcgacccttgagctgtcagaggtgggtgtggaagcggcagcggccaccagcatcgcaatgtcccggatgtctttgtccagcttctcagtgaaccggcccttccttttcttcatctttgaagataccacagggctgcctttatttgtaggcagtgtcaggaatcctaacccctccgctccaagggagctgaaagaacaacaggatagtcccgggaataaagattttttgcaaagcctcaagggcttcccgcggggagacaagctcttcggaccagaccttaaactggtgccacctatggaggaggactacccccaatttggctcaccaaag

SEQ ID NO: 274430 - DNA, 1473 bp, Artificial Sequence
  derived and/or modified sequence
atggcgctcctctggggcctgttggtgctgtcctggtcatgtctccagggcccttgcagcgtcttctcaccagtcagcgctatggagcctctggggagacaattaacctctggacccaaccaggaacaggtaagtcccctcacactgctcaaactcgggaatcaagaaccagggggccagaccgctttaaagtcaccccctggagtttgcagccgagatcccacccccgaacagacccaccgcttagcccgcgcgatgatggcttttactgccgacctatttagcttagtggctcagacgtcaacttgtcccaatctcattctcagtccacttagtgtcgctctagcactatcgcatctcgctctgggagcgcagaaccataccttgcagaggttgcaacaggtattacacgctgggtcagggccctgtctgcctcatttgttgtccaggttgtgccaggatttgggtcccggcgccttcagacttgctgcacgcatgtacttgcaaaaagggttcccaattaaagaggactttcttgagcagagcgagcagctgtttggagcaaagccagtttctctgacagggaagcaggaggacgacctggcaaacataaatcagtgggtcaaagaggccaccgaggggaaaatccaggaatttctatcagggctccctgaagatacagtgctgctgctccttaatgcaattcattttcagggtttctggcggaataagtttgaccccagccttacacaaagggattcctttcatctcgatgagcagttcaccgtcccagtcgagatgatgcaggccaggacctatccccttcgttggttccttctggaacaaccggagatccaagtagcgcactttccgttcaaaaataatatgtcctttgttgttctagtccctacacacttcgagtggaatgtgtcccaagttctagctaacctctcttgggatacacttcatccccctttggtgtgggaacgtcccacaaaggtcaggctccccaagctatatctcaaacatcaaatggacctcgtggccaccctttcgcagttgggacttcaggaattgttccaagcaccagatctccggggcatctccgagcaatccctggtggtctctggagttcagcaccagagtacccttgagcttagtgaggtgggcgtggaagcggcggctgccactagcatcgccatgagtaggatgagcctgagcagtttctcagtgaatcgcccttttctgttcttcatatttgaggatacaacaggccttcccttgtttgtgggctctgtgcgcaatccgaaccctagtgctcctagggagctcaaggagcagcaagactcacctggtaacaaagatttcctgcagtccctcaagggctttcctcgtggcgataagctgttcggccctgatcttaaacttgttcctccaatggaggaggactacccccagtttggctccccaaag

SEQ ID NO: 274431 - DNA, 1473 bp, Artificial Sequence
  derived and/or modified sequence
atggccctgctatgggggctgttagtcctgtcgtggtcttgcctacaggggccttgttcagtatttagccctgtatccgcaatggagcctcttgggaggcagctcacatctggacccaatcaggagcaggtaagccccctcaccctgcttaagctaggcaaccaggagcccggcgggcagaccgcactgaagagtccacccggcgtctgtagccgggaccctacccctgagcaaacacatcggctggctcgggccatgatggcgtttaccgccgacctgtttagccttgtggctcagacctccacttgtccaaacctgattctatccccgttaagcgtggccttggcccttagtcatctggccctcggcgcccagaaccatacactgcagcgcctgcaacaggtactgcatgccggttctgggccctgtcttccgcacctgctttctagactatgccaggacttaggacctggagcttttcgcttggcagccaggatgtatctgcagaaagggttccccataaaagaggactttctggaacagtccgaacaattgtttggagctaaacctgtttctttgacagggaaacaagaggacgatctcgcgaacatcaaccagtgggttaaggaggcaacggagggtaagatccaggagttcctctctgggttgcccgaggacactgtattgctgctgttgaacgcgatccatttccagggtttctggcgcaacaaattcgatccaagccttactcaaagagattctttccatctagatgaacaattcaccgtgcccgtggagatgatgcaggcaaggacttacccccttagatggtttttgctcgagcagcctgaaattcaggttgcccactttccattcaaaaataacatgtcttttgttgttctggtacccacacacttcgagtggaacgtgagccaagtactcgcaaacttgtcttgggataccctgcatcctccattagtgtgggagagacctaccaaggtgagattaccaaaactatacttgaagcaccagatggacctagtggctacgctttcccagctgggcctgcaagagttgttccaggccccggatttgcggggtatttccgaacagtccctggtagtgtcgggcgtacagcatcagagtacattggaattgagcgaagtaggcgtggaagctgctgcagccacaagtatcgccatgtccagaatgagcttgagctccttcagcgttaaccggcccttcctgttcttcatctttgaggatacaaccggactgccactgttcgtcggatcagtgcggaaccctaacccttctgctcctcgggagctgaaggagcagcaggacagccctggaaacaaggactttctacaatcgctgaagggatttcctagaggcgataaactgttcgggcctgatctgaagctcgtaccacctatggaagaagactacccacagtttggaagtccaaaa

SEQ ID NO: 274432 - DNA, 1473 bp, Artificial Sequence
  derived and/or modified sequence
atggcgctcttgtgggggctgcttgtcctgtcttggagctgtttgcaaggtccatgtagcgttttcagccctgtgagcgcaatggagccactgggtcgccaacttacttcgggtccaaaccaagaacaagtttcccctctgactttgttgaaacttggtaaccaggagccaggcggtcaaaccgctctgaaatcgccaccgggagtctgctctcgcgacccaacccctgagcagactcaccgcctggcacgcgccatgatggcatttaccgcagatctgttctcattggtggcgcaaaccagcacctgtcccaacctgatactgagcccccttagtgtggctctggcgctgtcccatctggccctgggtgcccagaaccacactctgcagcgccttcagcaagtcctgcacgcgggtagcggtccttgtttgcctcacttgctgagtcggctatgtcaagatctggggccgggtgcgttccgcctggcggcgcgcatgtacctgcagaaaggctttcccattaaagaagacttcctcgagcagtccgagcaactgtttggggctaagccagtgtccctgaccgggaagcaggaagacgaccttgctaatatcaatcagtgggtgaaggaagcaaccgagggtaagattcaagaattcctgtcgggtctgccggaggacaccgttctgttgttactgaatgcaatccactttcaaggattctggcgcaacaagtttgatcctagtttgactcagcgtgacagcttccatctggacgagcaattcaccgtgccggtggagatgatgcaggctcgtacgtatccactgcggtggtttcttttggagcagcctgaaatccaggtcgcacacttcccgttcaaaaataacatgtcttttgtcgttctggtcccgacacactttgaatggaatgtgtcccaggtcctggcaaatctgtcttgggatacgctgcatccgccgctggtctgggagcgcccaacgaaggtcagattgcctaagctctacttgaagcaccagatggatctagtggcaaccctgtcgcagcttggcttgcaagaattattccaagctccagatttgcgcggtatttctgagcagagcttggttgtgtccggcgttcagcatcagagcaccttggaactgtcagaagtaggcgtcgaagccgcagccgccacttccatcgcaatgagccgcatgtcgctgagcagcttttctgttaataggccctttctgttttttatatttgaggacactaccggtctgccgttgtttgttggaagcgtccgtaaccctaacccctccgcacctcgtgaactaaaggaacagcaggattcccctggaaataaggacttcctccaaagcctgaagggctttccacggggtgataaactatttggtccagatctgaaactggtgccaccaatggaggaagactatcctcaatttggttcgccgaaa

SEQ ID NO: 274433 - DNA, 1473 bp, Artificial Sequence
  derived and/or modified sequence
atggccttgctgtggggcctgttggtcctgtcttggtcctgccttcaaggaccttgttctgttttctcccctgtgtcagcaatggagcctttggggaggcagctcacgtcggggcctaatcaagaacaggtgtcccccttgacactgctgaagctcggtaatcaggagcccggtggacaaacggctttgaagtcaccaccaggagtatgcagccgagatcccaccccggaacagacgcatcgccttgcccgagctatgatggcttttaccgccgatttgttctcccttgttgcacaaacttccacctgtcccaatctgatactatcgcccttgtccgtcgccctggcactctcccatctcgccctcggggcccaaaaccacactctccaacggcttcaacaggtactgcatgctgggtccggcccttgcttgccgcacctgctctcccggctctgtcaggatctcggtcccggcgcgttcagactcgcagcccgaatgtaccttcagaaaggcttcccgatcaaggaggatttccttgagcaaagcgaacaactgtttggcgccaagcctgtttccctcaccggtaagcaggaagatgacttagccaacatcaatcagtgggtcaaagaagcaactgaaggaaagattcaggaattcctctccgggttgcctgaggataccgttcttctgctccttaacgcgatccattttcaaggcttctggcgcaacaaattcgatccgtcactaactcagcgagatagcttccacttagatgagcaattcaccgtgcctgttgaaatgatgcaagctcgcacgtaccccttacgctggtttcttctggagcagcccgagatccaggtcgcccactttcccttcaaaaacaacatgtccttcgtggttttagtcccgacccattttgaatggaacgtatcgcaagtcttggcaaatctaagttgggatacactgcatcccccacttgtctgggaaaggcccacgaaggtccggctgccaaagctctaccttaagcatcagatggacttggtagcaaccttgagccaactgggtctccaagagcttttccaagcgcccgacttgcgcggtatcagcgaacaaagtttggtggttagtggagtccaacaccagtccacccttgagctgagtgaagtgggcgtcgaagcggccgccgcaacatcgattgcaatgagccgcatgtcgctgagcagcttttctgttaatcgcccgtttctattcttcatctttgaggacaccaccggtctaccactctttgttggaagtgtgcgaaatcccaacccttctgcgcctcgcgaacttaaggagcaacaagattccccgggcaacaaggacttcctgcagtccctgaagggcttcccccgtggcgacaagctatttggccccgacctgaaacttgttccacctatggaagaggactatccccaatttggaagtcctaag

SEQ ID NO: 274434 - DNA, 1473 bp, Artificial Sequence
  derived and/or modified sequence
atggccctcctctggggcttacttgtgctctcctggtcatgcctccagggaccttgctccgtgtttagtccggtgagcgctatggagccactcggcagacaacttacttctggccccaatcaggaacaggtgtctcccctgactttactgaagcttgggaaccaagaaccgggcgggcaaacagccctgaagagcccccccggagtgtgttccagagatcctacaccagagcagacgcaccggctagctcgcgccatgatggcatttaccgcagacctctttagtctggtcgcgcaaacatccacatgtcctaatctaatcctgtctcccctttccgtcgcacttgctttaagccacctcgccctgggtgcccagaatcacacactccagcgcctacaacaggtcttacacgccgggtctggaccttgcttaccccatttactgtctaggttatgtcaagatcttggacctggggcctttaggctggcggctaggatgtaccttcagaaaggcttccccattaaggaggactttctggagcagagtgaacaactgtttggcgcaaaacctgtgtccctgaccgggaagcaggaggacgatctggctaacattaaccagtgggtgaaagaggcaacagaaggaaagattcaagagttcctgagcggcttgcccgaggataccgttctgctgcttcttaatgctattcattttcaaggattctggcggaataagttcgacccttcattgacccagcgagatagtttccatttagacgaacagtttactgtcccagtagagatgatgcaggctagaacctacccactgcggtggtttctgctcgagcagccagaaatccaggtagcccacttccccttcaagaacaatatgagtttcgttgtgctggtgccgacacatttcgagtggaacgtgtcccaggtgcttgctaacttgtcctgggacaccctgcatccaccactggtgtgggagaggcctactaaggtccggctacctaaactctatttgaaacaccagatggacctggtggctaccctaagccaactggggctccaggagttgtttcaggcgccagacctaaggggaatatccgagcagagcctagtcgtgagcggggtgcagcaccaatccactttggagctttccgaagtaggagtggaggcagcagccgccacttctattgctatgtctaggatgtctttgtctagtttcagcgtgaatagaccattcctgttttttatattcgaagacacaaccgggttacccctgttcgtaggatcagtgcgcaacccgaatccgagcgcaccaagggaacttaaagagcaacaggacagtccaggtaataaggactttcttcaaagtctgaagggcttccctcgtggcgataaactgttcggcccagacttaaagctggttccacctatggaggaggattatccccagtttggaagtccgaaa

SEQ ID NO: 274435 - DNA, 1473 bp, Artificial Sequence
  derived and/or modified sequence
atggcgctgttgtgggggcttcttgtcctttcttggtcctgtctacaaggaccctgctcagtattcagcccagtgagtgccatggagccccttgggaggcaactgactagtgggcccaaccaagagcaggtgtcccccttaacactcctgaaactaggcaatcaggagcccggcggacagaccgcgctgaaaagcccgccaggcgtgtgctctagggatcccactcccgagcagacgcacagactagctcgcgcaatgatggctttcacggcagacctgttctcactcgttgcacagactagcacttgtccaaacctaatcctgagcccgttgtctgtcgcactagccctctctcatcttgccctgggagcgcaaaaccatacactccaacggttgcaacaggttctgcacgccgggtccgggccatgcctgccacacttgctcagtcgcctgtgccaagacctcgggccgggtgcctttagactggctgcccggatgtacctccaaaagggattccctatcaaagaggactttctggagcagtcagagcagctgtttggtgccaagcccgtgtcattaactggtaaacaggaggacgacctcgccaatatcaatcagtgggtgaaggaggccaccgaaggtaaaatccaggaattcctgtccgggctgccagaagatactgtgctgctactattgaatgccattcatttccagggcttctggaggaataaatttgacccctcactgactcagcgggactcctttcaccttgatgagcagttcactgtcccagttgagatgatgcaggcaagaacatacccgctgaggtggttcctgttggaacagcccgagattcaggtcgctcactttccattcaagaataacatgagctttgttgtcctggtacccacccacttcgagtggaatgtgagccaggtcttagccaacctatcatgggacacactgcaccctcccctggtatgggaacgacctacgaaggtcagactcccaaagctctatctgaagcaccagatggacttggttgctacactgtctcagctcgggctgcaggaactcttccaggctcctgatctgcgtggcatcagtgaacagtctctcgtcgtgtcaggcgttcagcaccaatcaactttagagctatcagaggtgggagtggaggcagccgctgctacctcgatagccatgtcaagaatgtctctgtcctctttttcagtaaaccggcccttcttattctttatcttcgaagacacaaccggactgcccctctttgtgggatctgtgagaaatccaaacccaagcgctccccgagagttgaaggagcagcaggacagccctggcaataaggattttttacaaagcctcaaggggtttcccagaggagacaaacttttcgggcctgacttgaaactggtgcctccgatggaggaagattacccccaattcggaagtcctaaa

SEQ ID NO: 274436 - DNA, 1473 bp, Artificial Sequence
  derived and/or modified sequence
atggcactgctgtgggggctattggtgctttcctggtcgtgtctacagggcccttgttccgtgtttagccccgtgtctgccatggagcctctcggacggcagctcacttccggcccgaatcaggaacaggtgtcaccattgacactgctcaaactaggcaaccaggagcctggcggccagacagctctgaagagtcctccgggcgtgtgctcgagggatcctacacccgagcagactcataggctggcaagggccatgatggccttcacggctgacctattctcccttgtcgcccagacctccacctgccctaacttaattctatcgcccctaagtgtagctctcgctctgtctcacctcgctctgggcgcccagaaccacacccttcaaagactgcagcaagttttgcatgccggttccggcccttgcctcccccatctgttgagtaggctctgccaagacctggggccgggcgctttccggctagctgcgagaatgtatctgcagaaggggttcccgataaaagaagattttctcgagcaatcagagcagctctttggagcaaagcctgtgtcactgacaggcaagcaggaggacgacctcgctaacatcaaccagtgggtcaaggaagccactgaaggcaaaattcaggagttcctaagtggactacccgaagacactgtgcttttacttctgaacgctattcatttccagggcttctggagaaacaaattcgacccttcacttacacagcgcgactcgttccatctcgatgaacagtttacagtccctgtcgaaatgatgcaggcgcggacataccctcttaggtggttcttgctggaacagcctgagatccaggtggcccatttcccatttaaaaataatatgagttttgtcgtcctcgtgcccacacattttgagtggaatgtctcgcaggtgcttgcaaacctgtcttgggatacactccatccgcccctcgtgtgggaaaggcctactaaggtccggttgcccaaactttatctgaagcaccagatggacctcgtagctactctgagccaactggggctgcaagagctgtttcaggccccggacctccgcggaattagcgagcaaagcctggtggtcagcggagttcagcaccaatctacactagagttgtctgaggtcggtgttgaggctgcggcggccacttcgattgcaatgagcagaatgagcttgtctagcttctccgttaatcggccctttctcttcttcatcttcgaggatacaaccggcctacccctcttcgtgggatctgtgcggaaccccaatccctctgccccgcgggaactgaaggagcaacaggattcacccggaaataaggattttttgcagagtctcaaggggtttccacggggcgacaagttgttcgggcctgacctgaaactggttcctcccatggaggaggattacccacagttcggaagcccaaag

SEQ ID NO: 274437 - DNA, 1473 bp, Artificial Sequence
  derived and/or modified sequence
atggcattactctggggcttgcttgtgctatcttggtcatgtttgcaaggaccttgcagtgtattctctcccgtcagtgccatggagcccctcgggaggcaacttacctccggacccaatcaggagcaagtttcacctctcacactcttgaagctcggcaaccaggaacccggaggacaaactgctctcaaaagtccacctggcgtatgctcccgtgatcccaccccagaacaaacacatcgtctggcaagagctatgatggcattcaccgcagaccttttttcactggttgctcaaacttccacatgccccaatttgattttaagtccactgtcagttgccctcgcactaagccacctggctctaggcgctcagaatcacaccctgcagagattgcagcaagtgctgcacgcgggtagcgggccttgtctgccacatttattatccagactgtgtcaggacctggggccgggagcctttaggttggccgcccgaatgtaccttcagaagggatttcctattaaggaggactttctagaacagtccgagcagttgttcggagccaagcccgtctctctgactggtaaacaggaggatgacctagcaaatatcaatcagtgggtcaaagaagctaccgagggaaagatacaggagttcctgagcggacttcccgaagatacagttctgttattgctgaacgcaattcactttcaggggttttggaggaacaaattcgatccctcactgactcagcgggattccttccatctggacgagcagttcactgtgcctgttgaaatgatgcaggctcgcacgtaccctctgcggtggtttcttctggagcaaccggagatccaagttgcccattttccttttaaaaacaacatgtcttttgtggtactcgtgcccacacattttgagtggaacgtttcgcaagttttggctaacctgtcctgggatacgctgcaccctcccctggtgtgggagagacccacaaaagtccggttgccgaaactgtacctgaagcatcaaatggacctagtagcgactctctctcaacttggactacaggagctcttccaggccccagatctgcgggggatatctgaacagtctctagtggtaagtggcgtgcagcatcagtctaccctcgagctctctgaagtcggagtcgaggcagctgctgctacgagtatcgctatgtcgcggatgtctttatcgtcattctcggttaatcggccttttctcttctttattttcgaggataccacaggtttgccccttttcgtgggaagcgttcggaacccaaaccctagtgcccccagagagctgaaggagcagcaagactcacccgggaataaagactttttgcagagtctaaaaggcttccccagaggcgacaagctgttcggccctgatttgaagcttgtgcctccgatggaagaagactacccacagtttggcagccctaaa

SEQ ID NO: 274438 - DNA, 1473 bp, Artificial Sequence
  derived and/or modified sequence
atggccctgctttgggggctccttgtgttgagctggagctgcctgcagggtccttgttccgtgttttcgcctgtcagcgctatggaaccgctgggcagacagttaacatcaggacccaatcaggaacaggtgagccctttgacactccttaaactggggaaccaggagcctggaggtcagaccgcactgaagtcaccgccaggcgtttgctccagagatccaaccccagagcagactcaccgcctggcccgggccatgatggcattcacagcagacctgttctccctggtagcacagacatctacttgtccaaatctaatcctgtcgccactgagcgtcgctttggcactctctcatctcgcccttggagcccagaaccataccctgcagcgcctccagcaggtgctgcacgctggctcgggcccttgccttccccacctgctcagccggctctgtcaagatcttggacccggggccttccgtcttgcggcccggatgtacctgcaaaagggtttccccatcaaagaggattttctggagcagtctgaacagttgttcggggccaaacctgtcagtctgacaggtaaacaggaagatgatctggccaacattaaccagtgggtaaaggaggccacggaagggaagatccaagagtttctgagtggccttcccgaggatacagtactgctgctgctgaatgctatccacttccagggcttctggcgaaacaaatttgatccctcattgacccagagagactctttccatctagatgaacagtttactgttcctgtcgaaatgatgcaggcccggacgtacccattgcggtggttcctgctcgaacagccagagatccaggtggcgcatttcccttttaagaacaatatgagcttcgtagttttggttcccacacactttgagtggaacgtaagtcaggttctggccaatcttagttgggacaccctgcacccacctctggtatgggagaggccaacgaaggtgaggctgcctaaactgtacctgaaacaccagatggacctggtggctaccctgtcccaattaggcctgcaggagttatttcaggctcccgaccttaggggcatctccgagcagtctctagtcgtgagtggggtgcaacaccaaagtactctcgagcttagcgaagtaggcgtggaagctgccgcggccacttctattgcaatgtcgcggatgtctctgtcttcgttctcagtaaaccgccccttcctcttcttcatcttcgaagatacgactggactcccactcttcgtgggcagcgtgcggaatccgaatccatctgctccaagggaactaaaggagcagcaggactccccagggaataaggattttctccagtcactgaaagggttcccccgaggcgacaagctgttcggaccggatcttaagttagtcccccctatggaggaggattacccacagttcggctctccaaag

SEQ ID NO: 274439 - DNA, 1473 bp, Artificial Sequence
  derived and/or modified sequence
atggcactgctttgggggctgcttgtgttatcctggagctgcttgcaggggccatgctccgtgttttcgccagttagcgctatggagccgctgggtaggcaactgactagcggaccaaaccaggagcaagtgtctcctctgacgctgctgaagctgggcaaccaagaacccggcggccagaccgctttaaagagcccgcccggcgtttgctccagagatcctacccccgagcagacccaccgactggcacgggccatgatggcatttacggctgacctgttttccctggtcgcacagacgtcaacatgtccgaatctgatcctcagccctctgtctgtggcactggctttgtcgcacctggccctgggggcacagaaccacaccctccagagacttcagcaggtcttacacgcagggagtggtccgtgcctgccacatttgctctcccggctctgccaggacctgggtcctggcgccttccgtctggcagcacgaatgtatttgcagaaggggtttcctattaaggaagattttctggagcagtcggagcagctgttcggagcaaaacctgtaagccttaccgggaaacaggaggatgacctagctaatattaatcagtgggtcaaggaggccacagaaggcaagattcaagagttcttatccggactccctgaggacactgtcctcctccttttgaacgctatccactttcagggcttctggagaaacaagttcgatccttctctcactcagagagattcctttcacttggatgaacagttcacagttccagtggagatgatgcaggccagaacttatccattgagatggttcctactggaacagccagaaatccaggtggcccacttcccatttaagaataacatgtcctttgttgtcctggtccctacccattttgagtggaatgtcagtcaggtgctagctaacctatcttgggacacccttcaccctccgcttgtttgggagaggccaaccaaggtgaggcttccaaagctgtaccttaaacaccaaatggatttggtggcgactctgagccaacttggcctgcaagaactgtttcaagcaccagatcttcggggcatcagcgaacaaagcctggtggtgagcggcgtccaacaccagtcaacacttgaactctcagaagtgggtgttgaagcagccgctgctacgtcgatcgctatgagccgaatgagtctctcctcattcagcgtcaacaggcccttccttttttttatatttgaagacactactggcctccctctgttcgtgggaagcgtcagaaaccctaatccatccgccccacgagagttaaaggagcagcaggatagcccaggaaataaggattttctgcagtcattaaaaggatttcctaggggggataagctgttcggcccagaccttaagcttgtgccccctatggaagaggattaccctcagttcgggagtcctaaa

SEQ ID NO: 274440 - DNA, 1473 bp, Artificial Sequence
  derived and/or modified sequence
atggcacttctatggggacttctagtcctttcttggtcctgccttcaaggaccatgtagtgttttttctcctgtgtctgcgatggaacctctcggacggcagctcacatccgggccaaaccaggaacaggtcagtccactcactttactcaaactcgggaaccaagaacctgggggacagacagcactcaaaagtcctccaggagtttgttccagagatcccactcccgagcagacacatagactagctcgggccatgatggcctttacagccgatctgttttcgctggtcgctcagactagtacttgtccaaatctgatcctcagtccactttccgtagccctcgctctgtcccatctcgccctgggagcccagaaccacacattgcagcgcctccaacaagtgctccatgctggaagtgggccctgtttgccacatttgctatcacggctctgtcaggatctgggacccggggcgttcaggctggctgctagaatgtacctgcagaaagggttccccatcaaagaagatttcctcgaacaaagtgaacagttattcggagccaaacctgtttctctcacaggaaaacaggaggatgatctcgctaatataaaccagtgggtgaaagaagctactgagggaaaaatccaggaatttctctccggactccctgaagatacagttctccttttgttaaacgccatacattttcagggattttggcggaataaatttgacccttcattgactcagcgcgactccttccatctggacgaacagtttacagtgcctgtcgaaatgatgcaagcccgcacttatccactacggtggttccttctcgaacagcctgagatccaggtggctcattttccctttaaaaataatatgtccttcgtcgttctcgtgcccacacactttgaatggaacgtttcccaggtgttagccaatctcagttgggatactctgcatccccccctcgtgtgggaaagacctactaaggtaaggctcccaaaactgtatcttaaacatcaaatggatctagttgctacactctcacagcttggactccaggaactgttccaggctccagatcttagaggaatttctgaacagtctctcgtggtgagtggagtgcagcaccaatctacactagaactttctgaggtcggggtagaagccgctgcagctacatctattgctatgagtcggatgtctctttctagtttctctgttaatcggccttttctcttctttatctttgaagatactactggactgccactcttcgtggggtcagttcggaaccctaacccatctgcaccaagagaacttaaggagcagcaagattcacccggaaataaggatttcctacaaagtctaaagggattcccccgaggggataaactctttgggcctgatcttaaactcgtgccacccatggaagaagattatcctcagtttgggagtccaaag

SEQ ID NO: 274441 - DNA, 1473 bp, Artificial Sequence
  derived and/or modified sequence
atggccctgctgtgggggctgcttgttctgtcatggtcctgcttgcagggtccgtgtagtgtattctctcccgtatccgcaatggagccacttggccgccagctgacaagcgggccaaatcaggagcaggtctccccacttactctcctgaaactcggcaatcaggagcccggcggtcaaacagccttgaagtctccacccggagtgtgctctcgcgatcccactccagagcagacacatagactggctagagcaatgatggccttcaccgccgatctgttctccctggtggcacaaacctcgacgtgtcctaacctgattttgtctcctctgagcgtggcactggcgctgtcacacctggctctgggagcacaaaaccacactttgcagaggctgcagcaagtgttgcacgctggatccggtccatgtctgccgcatcttctgtccagattatgtcaggacctcggccccggtgccttccgattggccgctagaatgtacctgcaaaagggattccctatcaaggaagattttctggaacaatccgagcagcttttcggtgccaaaccagttagccttacagggaagcaggaggatgaccttgctaatattaaccaatgggtgaaagaggcaaccgagggaaagattcaggaatttttgtccggcctcccagaagacacagttttgttactgctgaacgcaattcactttcaaggtttttggagaaacaaattcgatcccagtttgacccagcgcgatagttttcacctggacgagcagttcacagtgcccgtggaaatgatgcaggcgcgcacttatcccctaagatggtttctgctagaacagccagagattcaggtcgcccattttccctttaagaacaacatgagcttcgtggtgttggtcccaacccacttcgagtggaacgtgagtcaggtgctggcgaatctttcatgggacaccctccaccctcccctcgtctgggaacgacccactaaagttaggctaccaaaactgtatcttaagcatcagatggacctggtcgctaccctcagccaacttgggctgcaggagctgtttcaggcccctgatctaagaggtatctcagagcagtctctcgtggtgagtggagtgcagcaccagtccactctggaattatctgaagtgggagtggaagctgccgccgccacatccatagctatgtctaggatgtctctttcaagcttctccgtgaaccgccccttcctgttctttatttttgaggatactaccggccttcccctgttcgtcggctccgttcgcaatcctaaccccagcgctcctcgggagttgaaggagcagcaggactcacccgggaacaaggactttttgcaatcattaaagggctttccacggggtgacaagctgtttggaccagacctgaaactggtccccccaatggaagaagattacccccagttcggttcgcccaag

SEQ ID NO: 274442 - DNA, 1473 bp, Artificial Sequence
  derived and/or modified sequence
atggccctgctttggggccttctggtcctctcttggtcttgtctccagggcccttgctcagtattcagtccggtttcagcaatggaacccttgggacggcagctaacttcaggtccaaaccaggaacaggtgagcccactgaccttgctcaagcttggcaaccaggaacccggtggacagaccgctctgaaatcacctccaggagtgtgtagcagagacccaacaccagaacagacacaccggctcgctcgcgcaatgatggcctttacagctgacctgttctctcttgtcgcgcagacgtccacttgtcccaatctgattttaagccctctgagcgttgccctcgccctaagccacctggctttgggggcccaaaatcacacgcttcagaggctccagcaggtgttgcacgctggctcaggcccatgtttgccccatctcctgagccgactatgccaggacctaggcccaggggcgttccggctagctgctagaatgtatctgcagaaaggatttcctatcaaggaggacttcctggagcagtccgagcagctgttcggtgcgaagccagtgtcactaaccggcaaacaggaggatgacctcgctaatattaaccaatgggtgaaggaggctacagaaggcaaaatccaggagtttctgagtgggctgcccgaggacaccgtcctgttgttgctaaatgcaatacatttccaggggttttggcggaacaagtttgacccctcattgacgcagcgagattcattccaccttgacgaacagttcactgtgcccgttgagatgatgcaagctaggacttaccccttacgttggttccttctggaacagccagagatacaggtcgcccacttccccttcaagaacaacatgtcctttgtcgttctggtgcccacccatttcgagtggaacgtcagccaagtcctggccaacctctcctgggacaccctgcatcctcccctggtgtgggaaagaccaactaaggttaggctgccaaaactctacctgaagcaccagatggatttggtggcgaccttatctcaattggggctccaggagctcttccaggcgcccgatctacgcgggatcagcgaacagtccttggtggtgagtggcgtccagcaccaatcaacactcgaactttccgaagtgggcgtcgaggcagcagccgccacttcaatcgccatgagtaggatgagtttatcttcattcagtgtgaacaggcccttcctgttcttcattttcgaggatacgactggactgccactgttcgtgggctccgtccgcaatcccaatccttcggctcctagggagcttaaagagcaacaggactctcctggaaataaagactttcttcagagcctgaaggggttcccgagaggtgataagctcttcggtcccgacctgaagctagtgcctcccatggaggaagactatccacaattcggatcaccaaaa

SEQ ID NO: 274443 - DNA, 1473 bp, Artificial Sequence
  derived and/or modified sequence
atggcattactgtggggtttgctcgtattgagctggtcatgcctccagggaccgtgctctgtgttcagcccagtgtccgcaatggagccgctgggccgccagctgacgagcggcccaaaccaggagcaggtctcgccccttaccctcctgaaactgggaaatcaggagcccggcggtcaaactgcactgaagtccccacccggcgtgtgttcccgagaccccaccccggagcagacccacaggttggcccgcgccatgatggcgtttactgcagacctgttttcgcttgtcgcgcaaacttccacctgccccaacctcattttgtcgcccttgtccgtggcactcgccctgtcgcacctggcgctgggtgcgcaaaaccacaccctgcagcgccttcagcaggtgttgcacgccggcagtggcccatgcttgccgcacctactgtcccgattgtgccaggacctgggccccggagcctttcggctggctgccagaatgtatctgcagaagggtttcccgattaaggaggatttcctcgagcagtccgaacaactgttcggtgccaagccggtaagcctgaccggaaaacaggaggatgatttggccaacatcaaccagtgggtgaaagaggccacggagggaaagattcaggaatttcttagcggcctgcccgaagacacagtgttgctgttgctgaacgccatccactttcagggcttctggagaaacaagtttgatccatcgcttacgcaacgggatagctttcacttagacgaacaattcacggtgcctgtcgagatgatgcaggctcgcacttatccgttgcgctggtttctcctggagcagccggagatacaggtcgcccattttccattcaagaataatatgagcttcgtggtcctggtcccgactcacttcgaatggaacgtgtcgcaggtgttggcgaacttgtcgtgggacactttacatcctccgctcgtttgggagagaccgaccaaggtccgcctacccaagttgtacctgaagcatcaaatggacctggttgcgaccttatcccagttgggcctacaggagctgtttcaggctcctgatttaaggggcatttcagagcaatcgctggtggtttctggtgtccaacaccagtccactctcgagctatcagaggtcggggtagaggccgccgccgccacgtctatagctatgagccggatgagtctcagctcctttagcgtgaatcgtccatttctattctttatctttgaggacacaacaggcctcccgctgttcgttggttccgtaaggaacccaaatccatcggcgccacgagagctgaaagagcaacaggatagcccaggtaataaagatttccttcagtcattgaagggcttcccccggggagataagctgtttggaccggacctgaaacttgtgccgccaatggaagaagattacccccagttcggcagcccgaag

SEQ ID NO: 274444 - DNA, 1473 bp, Artificial Sequence
  derived and/or modified sequence
atggcgttgctgtggggattgctggtgctgagctggtcgtgcctgcagggcccttgtagcgtattcagtcccgtctctgctatggagcctctgggcagacaacttacctccggccctaaccaggagcaggtgagccctttgacccttcttaagctgggtaaccaggagccaggcggccaaaccgccctgaagagccccccgggtgtgtgcagtcgggatcccacacctgaacaaacccatcgcctggctcgcgcaatgatggcctttactgcagacctgtttagcctcgtcgcgcagactagcacctgtcccaatctgatcttaagcccattgtcagttgctttagctctgtcccatcttgctctcggcgcccagaaccatacccttcagcggctgcaacaggtactccacgcaggttcaggtccttgtcttcctcatctcctcagcagactttgccaagacctcggtcccggagcttttcgtcttgctgcgaggatgtaccttcagaagggatttcctatcaaagaggatttcttggagcaaagcgaacagctctttggcgctaagccagtgagcctcacggggaaacaagaagacgatctcgctaacatcaatcaatgggtaaaggaagctacagaagggaagatccaggagttcctgagcggattgccggaggacacagtgttgctgcttcttaacgccatccactttcagggattctggcggaacaaatttgacccaagcttgacacagcgggactctttccacttggacgagcaatttaccgtgccagtggaaatgatgcaggcaaggacctatcctctgcgatggttcctcctggaacaaccggagatccaggtggcacacttcccattcaaaaacaatatgtctttcgtcgtgcttgtgccaactcactttgaatggaacgtgtcccaggttctcgccaacttgtcctgggataccttacaccccccactcgtctgggagcgcccgacaaaagtgcggctccctaaactttatctgaaacatcagatggacttggttgcaacattaagtcagctcggtttgcaggagctgttccaagcgcctgacttgagaggaattagcgagcaaagcctcgttgtttcaggtgtccagcaccagagcaccctggagttaagcgaagtgggcgttgaagccgcagcagctacaagcattgcaatgagccgcatgtccttgtcctcattttctgtcaacaggcccttcttgttcttcatttttgaggacacaaccggattgcccttgttcgtcggaagtgtgcgcaacccaaacccgtcagctcctcgcgagctcaaagaacagcaagatagtccgggaaacaaggacttcttacaatctttaaagggatttcccaggggcgataaactgtttggacctgatctcaaactggttcccccgatggaagaggattacccgcagttcggctctccgaag

SEQ ID NO: 274445 - DNA, 1473 bp, Artificial Sequence
  derived and/or modified sequence
atggctctgttatggggactgctggtgctctcgtggagctgcttgcagggaccttgcagcgtgttttctcccgtcagtgcaatggagccactgggccggcaactcacatcgggccctaatcaggaacaggttagcccgctcactttactgaagctcgggaaccaggagcctgggggacagactgcacttaagtctcccccaggggtttgttctcgggaccctactcctgagcagacccaccgtctggcgagggcaatgatggcattcaccgctgacttgttttcattggtcgcccagacatccacttgccctaaccttatcctgtcacccctgagtgtggctctggccctgagccacctggccctgggcgcacagaatcacacgctgcagaggctccaacaggttcttcacgcaggttcagggccttgtctcccccatctgctgagtcggttgtgtcaggacctgggacctggagcgttccgtctagcagctcggatgtatctgcaaaagggctttccgataaaggaagactttctggagcaatctgaacagctctttggtgccaagcccgtgtcattgacaggaaagcaggaggacgacctcgcaaacattaaccagtgggtgaaagaagccaccgaagggaagatccaggaatttctgtcaggactgcccgaggatacagttttgctgctgctcaacgccatacacttccagggattctggcggaataagtttgacccttcactgactcaacgcgactctttccacctggacgagcagtttacagttcccgtagagatgatgcaagccaggacctaccccttgcgctggtttctgttggaacaacctgagatacaggtagctcatttcccctttaaaaataacatgagcttcgtggtgctggttcctacccactttgaatggaacgtttctcaagtcttggcaaatctgtcctgggacacacttcatcctcccctcgtatgggaaaggccaactaaagttcgtcttcctaagctgtacctgaaacaccaaatggatcttgtagcgacactgtcacagcttggcctgcaggagctgtttcaggcacccgacctcaggggcatttccgaacaatcgctggtggtcagcggggtgcagcatcagagcaccctggagctatcagaagtaggcgtggaagcggccgctgccacttccatcgccatgtctagaatgtcactctcatccttcagcgtgaacaggccttttctgtttttcattttcgaggatacaaccggcctgccgctcttcgtgggcagcgtgcggaatcccaatccttcagccccacgggaattgaaggagcagcaggattcacctggcaataaagactttttgcagagtcttaaagggttcccacgcggtgataaactcttcgggccagatttaaaactcgtcccacccatggaggaggactatccccagtttggttctcctaaa

SEQ ID NO: 274446 - DNA, 1473 bp, Artificial Sequence
  derived and/or modified sequence
atggcccttttgtggggtctcctggtattgagctggagttgcctccagggaccctgtagcgtgttttctcccgtctcagcaatggagcccctgggtagacagttgacttccggtcccaaccaggagcaagtatccccgctcactctgttgaagctgggaaatcaggagcctggaggacagacagcgcttaaatcaccacccggcgtgtgctcccgggatcccacacctgagcagacacaccgtctggcgagggcgatgatggcctttaccgcggacctgttttccctagttgcccagacgtccacttgtcctaacctcatacttagtccactgagcgtggcgctggccctatcccacctggcactgggagcgcagaaccatacgttgcagagactgcagcaggtgttgcatgccggctctggcccctgcctgccccatctgctctcccgtttgtgccaagacctgggccctggcgccttcaggctagctgcacgtatgtacctccagaagggttttccaatcaaggaggacttcctggaacagagcgagcagctcttcggggcaaaaccagtatccctgaccggtaagcaagaggatgatctggctaatatcaatcagtgggtgaaggaagcgactgagggaaaaattcaggagtttctgtcaggcctgccagaggatacggttttgctcctgcttaatgctatccactttcagggcttctggcgtaacaaatttgacccttcacttacccaacgggatagcttccacttagatgaacaattcaccgtcccagtggagatgatgcaagcacggacatatcctctaagatggttcctgcttgagcagcccgaaatccaggtagctcacttcccctttaagaataatatgtcttttgtcgtgctagtccccacccactttgagtggaacgtatcacaagttcttgctaatctgtcatgggatactctacacccacccctggtgtgggagcgtcccaccaaggtgcgtctgcctaaactgtatctgaaacaccagatggatttagtcgccacactcagccaactggggttacaggagctgtttcaggcccccgatcttcggggaatcagcgagcagtcattggtcgtcagtggtgtgcagcatcagtcgacactggagcttagcgaagttggtgttgaggccgccgccgccactagcatcgccatgtcccgaatgagtctctcttctttcagcgtcaatagaccttttcttttttttattttcgaggatacgaccggtttgccactatttgtcggctctgtgaggaacccaaatccatctgccccacgggagctgaaggagcagcaagactcacccggcaacaaggatttcctgcagtctctgaaaggattccctagaggcgataagttgtttggacctgatttgaagctggtgccccccatggaggaggactatcctcagtttgggagcccaaag

SEQ ID NO: 274447 - DNA, 1473 bp, Artificial Sequence
  derived and/or modified sequence
atggcattattatgggggctgcttgtgctctcgtggtcatgtttacaggggccctgctctgttttcagtcccgttagtgccatggagccccttgggcggcagctgacatctggacccaaccaggagcaggtcagtccacttacactactgaaactgggaaaccaggaaccagggggacagacagcgttaaagtctccaccaggggtatgttcaagagatcctactcccgaacagacacataggctggcaagagccatgatggcctttactgcagatctgttcagtcttgtggcccagacttccacttgtcctaatctgatcttgagtcctctctcagtggcattggccctcagtcaccttgctcttggagcgcagaaccatacactccagagacttcaacaagtactacacgccgggtctgggccatgcctccctcacttgctgagtaggctgtgccaggatcttggacctggggctttcaggctcgcggctagaatgtatcttcagaaagggtttcccataaaagaagattttcttgaacagtctgaacagctctttggggcaaaaccagtgtcccttacaggaaaacaggaagatgatctagcgaatattaaccagtgggtaaaagaagctacagaagggaaaatccaggaatttctctccgggctccctgaagatactgtactgttgttgctgaacgcaatacatttccaggggttctggagaaacaaattcgatccctctttaacacagcgggactcattccatcttgatgaacagtttactgtgcctgtcgaaatgatgcaggcacgaacttatcctttacgctggttcctgcttgaacagccagaaatccaggtagcgcatttcccatttaagaacaatatgagtttcgttgtgctagttcccacacacttcgaatggaacgtgagtcaagtgttggctaacctgtcttgggatactctgcatccacctctggtctgggaacggcccacaaaagttcgactgcccaaactgtatctcaaacatcaaatggatttggtggctacactgtcccagctggggctccaggaactcttccaggctccagatctgcgaggaatctctgaacagtccctggttgtatccggggtccagcatcagagtactctagagctctcagaggtgggggtcgaagctgccgctgcaacatcgattgctatgagtcgcatgtctctgtcttcgttctctgtgaaccggccatttctcttttttatcttcgaagatacaacaggactaccattgttcgtaggatctgtgcggaaccctaatccctcagcccccagggaactcaaagaacagcaggactcccctgggaacaaagattttcttcagtctcttaaaggatttccacgcggggacaaactctttggaccagatctcaagctagtgcctcctatggaagaagattatcctcaatttgggtcaccaaag

SEQ ID NO: 274448 - DNA, 1473 bp, Artificial Sequence
  derived and/or modified sequence
atggctctgctgtggggcttgttagtgctaagctggtcctgcctgcagggcccgtgctcggtgttcagcccagtgagcgctatggagccactcggacggcaactaactagtggcccgaatcaggaacaagtctctccactcacattattaaaattgggcaaccaagagcctggcgggcagaccgccctgaagagcccccctggcgtttgtagcagggacccaactcctgaacaaacgcaccgtcttgcccgtgccatgatggctttcacagccgaccttttctcactagttgcccagacctcaacttgcccaaatttgattctcagccctctgtctgtggccctagctctgagtcatctggcactgggtgcacagaatcatacactgcagcggctccagcaggtcctacacgcaggaagcggtccctgcctcccccacctgctgagccggttgtgtcaagacttaggacccggagcttttcggctggccgcacgcatgtacctgcagaaggggtttccaatcaaagaagactttttggagcagtcagaacagctttttggggcaaaacccgtcagtcttacaggtaagcaggaagacgacctcgccaacatcaaccagtgggttaaggaagccacagaggggaagatccaggagttcctgtcgggtctaccggaggacacagtgctgctgctcttaaacgcgattcactttcaaggtttctggaggaacaagtttgatccaagcctcacccagagggacagctttcaccttgacgagcagttcacggtacccgtggagatgatgcaggcacgtacctaccctctgcgatggtttcttctagagcagccagagattcaggttgcccactttccatttaagaataacatgtccttcgttgtcctggttcctactcactttgaatggaatgtgtcccaggtcctggccaacctctcttgggatacgcttcacccccctctcgtatgggaacggccaacgaaggtacggctgccgaaactttacttgaagcatcagatggacttggtcgctaccctgagccagcttgggcttcaggaactgtttcaagcaccagatctgagaggcatctccgaacagagcctcgtggtaagcggggtccagcatcagtctaccctcgagttatcagaagtgggggtggaggccgctgcagctaccagtattgctatgtctaggatgagtttatcctccttttccgtgaatagaccgttcttattttttatattcgaagacacgacggggctccctctgttcgtcgggtcagtgcgaaatccgaacccatcagcaccccgggaactgaaagaacagcaggattcccctggaaataaagattttctgcaatccctcaaaggttttccccgaggcgataaactgttcggtccggatctgaagctcgtacctccaatggaagaggattacccccagttcggttcccccaaa

SEQ ID NO: 274449 - DNA, 1473 bp, Artificial Sequence
  derived and/or modified sequence
atggcgctgctatggggtttgctcgtcctgagttggagctgcttgcaaggaccttgttccgtgttcagtccggtatcagccatggagcccctcggccgtcagctgacctccggccctaaccaggagcaggttagtccactcaccctgctcaagctgggcaaccaggagcctggaggacaaaccgctttgaagtcgccacctggcgtgtgtagccgtgaccccactcccgaacaaacccatcgcctggctagagcaatgatggccttcacagcggatctgttctctcttgttgcccaaacttcaacatgcccgaacctcatcctgtccccccttagcgttgccctggcactctcccacctggctcttggggcccagaaccacaccctccagagactgcaacaggtgctgcacgctggcagcgggccatgtctccctcacctgctaagcagactctgccaggatctgggtcctggcgcattccgacttgctgcaagaatgtacttacagaaaggctttcctattaaggaagacttcttggaacagagcgagcaactgtttggcgcaaaacccgtgagcctgacaggcaagcaagaggacgatcttgctaacatcaatcaatgggtcaaagaagcaactgagggcaagatccaagagtttctctcaggcctaccagaggacactgtgctgctgctgttgaatgctattcattttcagggattttggaggaacaaattcgatccttcgttgacccagagagattcgtttcatctagacgaacagtttacagtccctgtcgaaatgatgcaagcgcggacgtatcctttgcggtggtttctgttagagcaaccggagattcaggttgcacatttccctttcaagaataatatgtcttttgtggtgcttgtgcctactcatttcgagtggaacgtgtcacaggtactggcgaacttgtcttgggataccttgcacccacctcttgtctgggagaggcctactaaggtgcggctacctaagctttacctaaagcaccagatggatctggtggccactttgagccaacttggccttcaagagctcttccaagcccccgatctgagggggatctccgagcagagcttggtggtctcgggagtacaacaccagagtaccctggaactcagtgaagtgggggtggaagcagcagccgcaacatcgattgcaatgagtcgaatgtccttgagttcattttcagtgaacaggccatttctgttttttatcttcgaagatactacaggactgccactgttcgtggggagtgtgcggaatcccaatccttctgcaccccgcgagctaaaggaacagcaggactcacccggcaacaaagattttctgcagtctctgaaaggctttccgcgaggcgacaaattatttgggccagatctgaagctcgtgcctcccatggaggaagattacccacagtttggaagcccaaaa

SEQ ID NO: 274450 - DNA, 1473 bp, Artificial Sequence
  derived and/or modified sequence
atggccttgttgtggggcctgctggtactgagctggtcctgcctgcagggcccttgttccgtattctctcccgtgagcgccatggagcctctcggaagacagctcaccagtggtcccaaccaggagcaggtctctccgctgaccttgttaaaactgggcaatcaagaacccggaggacagaccgcattgaagtcaccccctggagtttgctctagggaccccacaccagagcagacccatcgactcgccagagcaatgatggccttcacagccgacctgttctctttagttgcccaaacatccacctgccccaacctgattctgagccccctgtctgtggctcttgcactgtcccacctagccctcggtgcgcagaatcacaccttgcagcgacttcagcaggtgctgcatgctggatccgggccttgtctgccacaccttttgagtaggctctgccaggacctcggccctggcgcgttcaggctcgctgccaggatgtacctgcagaaaggattcccaattaaagaagattttctcgaacagagcgagcagctcttcggcgcaaagcccgtgtcactgaccgggaagcaggaggatgacctggctaacatcaaccagtgggtaaaggaggcgactgagggtaaaattcaggagttccttagcgggctgccagaggatactgttctcctgctcctcaacgccatccacttccaaggcttttggcgcaataaattcgaccccagtctgactcaacgcgattctttccatctggacgaacagtttaccgtacccgtggagatgatgcaggcccggacatatccgctgcgctggtttcttctagaacagcctgaaatccaggtcgcacactttcccttcaagaacaatatgtcgttcgtggtgctggtgcctacacatttcgagtggaatgtgagtcaggtccttgctaatctgtcttgggataccttacaccccccactcgtgtgggaacgtcccacaaaagtccgcctccctaagctgtatcttaaacatcagatggacctggtagccaccttgtcacagcttgggcttcaagaattatttcaggcacctgatctcagggggatctctgaacaatctctggtcgtctcaggagtccaacaccaaagtacactggaactgtccgaagtcggggtcgaggccgcagctgcgacttccatagccatgagcagaatgagcctctccagcttcagtgtaaatagaccttttttgttttttatctttgaagacaccaccggtttgcccctcttcgtgggatccgtgaggaacccaaatcctagtgccccacgcgagctgaaagagcagcaggacagtccagggaacaaagacttcctgcagtcactaaagggattcccaagaggtgataaactattcgggcccgacctgaaactggtccccccgatggaggaggactatccccagtttgggtctcccaag

SEQ ID NO: 274451 - DNA, 1473 bp, Artificial Sequence
  derived and/or modified sequence
atggctctcctctggggcctccttgtcctgtcctggtcttgtctccagggcccttgttctgtcttctcccccgtgtccgccatggagcccctcggcagacagctgaccagcggcccaaatcaggagcaggtcagcccactcaccctgctaaagctgggcaatcaggaaccagggggccagacagcactgaaaagcccacccggtgtgtgttctcgcgaccctactcccgagcagacacacagattggctcgcgctatgatggcttttaccgccgacctgtttagcctggtggctcagactagtacatgcccaaacctaattctaagccccctctctgttgccctggccctgtcccatctggccctaggcgcccagaatcataccctgcaacggctgcagcaagtgctgcacgctgggagtgggccttgtctgccacatctgctaagtcgactctgccaggacctgggacccggcgcctttaggctggcagccagaatgtacctacaaaagggctttcccatcaaggaagacttcctggaacagtctgaacaactgtttggagccaaacccgtgagtctgactgggaagcaagaggacgatctggctaacattaatcagtgggttaaagaggccaccgaggggaagatccaggagttcctttccgggttgcccgaggacactgtgctcttattactaaatgccattcattttcagggcttttggagaaacaagtttgatccttctctgacacagcgagactcttttcaccttgacgagcagtttaccgtgccagtggagatgatgcaggctcgcacctaccctcttcgttggtttttactagagcaaccagaaatccaagttgcccactttcccttcaaaaacaatatgtccttcgtggtgttggtgcccacccacttcgaatggaacgtgagtcaggtcttagcaaatctgtcctgggacactctgcaccccccgctggtgtgggagcgccctaccaaagttcgattgccaaaactgtacctgaagcaccaaatggacctggtcgccactctgtcccaattaggcctccaggagctctttcaggcacccgacctcagggggatctccgagcagtctcttgtagtgtcaggcgtccagcaccagtccaccctggagctgtccgaagttggcgtggaggctgctgctgctacatccattgctatgagccggatgagcctatcctctttttccgttaaccggccatttctgttttttatttttgaggacaccaccggcttacctctcttcgtgggttctgtccgaaacccaaacccatcagctccaagagaactgaaagagcaacaggactctcctggcaataaggatttcctgcagtctctcaaaggtttccctcgtggtgacaaactgttcggcccagaccttaagctagttccccccatggaagaagattatccccaattcggttcccctaag

SEQ ID NO: 274452 - DNA, 1473 bp, Artificial Sequence
  derived and/or modified sequence
atggcgctgctgtgggggttattggttctgtcctggtcttgcttgcagggcccatgtagtgtgttcagccctgtctctgccatggagcccctaggaaggcagctaacttctggacccaatcaggaacaggtgtctccactgaccctgctcaagctcggtaatcaagagcccggtggccaaacggccctaaagagccctcccggagtctgctcgagggatcccacacccgagcagacgcataggcttgccagggcgatgatggccttcacagcggatcttttctctttagtcgcacagactagcacctgccctaacctgattttatcccccttgtctgttgcattagcgttatctcatctcgccttgggagctcagaatcatacactgcagaggctgcagcaggtgctgcacgctgggtctgggccttgtctgccccatttgctgtctcgcctttgccaggacctgggtcccggagcatttcgtctggctgcccgcatgtacctccagaaaggttttcccatcaaagaggactttctggaacagtctgaacaactttttggcgccaagccagtgagtctgaccgggaagcaagaggatgatctggccaacattaatcaatgggtcaaggaagctaccgagggtaagattcaggagttcctcagtggactgcccgaggacaccgtcctgctgctcttaaacgctatccacttccaggggttttggagaaataagtttgatccttcactcacccagagggacagcttccacctggacgagcagtttaccgtgccagtggagatgatgcaggctaggacttatcctttgcgatggttcctcctagagcaaccagaaattcaggtcgcacactttcctttcaaaaacaacatgagttttgtcgttctcgtaccaacccacttcgagtggaatgtgtcgcaggtgctggccaatctgagctgggataccctgcaccctccactcgtctgggagaggcccaccaaagtccgtttgcctaaactgtacctgaagcatcaaatggacctggttgccacgctcagccagctggggctgcaagaactgtttcaggcacccgatctgcggggcattagcgagcaaagtctggtggtttccggtgtgcagcaccagagtaccctggaactgtccgaggtgggcgtcgaggcagcagcagctacaagtatcgctatgagtaggatgtcactcagctcttttagtgtgaaccgtccctttctcttctttattttcgaggacactacaggactacctctgttcgtagggagtgtgcggaacccaaatccatccgcccccagagaattaaaagagcaacaggacagtcctggcaataaagattttctgcagtccttgaaggggtttccacgtggggataagttatttggcccagacctgaaattggtccccccaatggaagaggactacccgcagtttgggagcccgaaa

SEQ ID NO: 274453 - DNA, 1473 bp, Artificial Sequence
  derived and/or modified sequence
atggccttgctgtggggcctcttagttctgtcatggagctgcctgcaggggccgtgcagcgttttctctcccgtctctgccatggaaccactggggagacagctgacctccggccccaatcaggagcaggttagccccctgaccctgctgaaactcggaaaccaggagcctgggggtcagactgcactcaaaagtccccctggcgtatgttcccgtgatcctacgcccgagcaaacccatagactcgctagggcgatgatggcattcacagcagatctcttttccctggtagcccagacgtcaacatgcccaaacctcattctctcgcccctgagtgtggcgttggctctgtcccacctggctctcggcgctcaaaatcatacactgcaacgcctccagcaggtgctgcacgcaggatcaggcccatgtctgccccacctgttatctaggctttgtcaggatctgggaccaggggcattccgtctggcggctcggatgtacctgcaaaagggcttccctattaaggaggattttttagagcagagtgaacagctgttcggcgcgaaacccgtgtccttgaccggcaagcaagaagatgatctagccaatattaatcagtgggtgaaggaggccacagaagggaagatacaggaatttctgtcgggcctcccagaggataccgttcttctactccttaacgccattcacttccagggattttggagaaacaaatttgatcccagcttaactcagcgggactcctttcacttggacgaacaattcacagtaccagtggaaatgatgcaggcgcggacttatcctctgcgctggtttcttttagagcaacccgaaatccaggtggcccacttcccttttaaaaacaatatgtctttcgtagtcttggtccctactcatttcgagtggaatgtctcccaagtgctggctaatctgtcatgggacacactgcaccctccactggtgtgggagaggcccaccaaggtccgccttccaaagttatatctgaagcaccagatggacctcgtggccacattatcacagctggggcttcaggagctcttccaggctcccgacctgcggggaatttccgaacagtctttggttgtatctggggttcaacatcagtcgaccctcgaactgtctgaggtgggcgtcgaggcagcggccgcaacctcaatcgctatgtctcgcatgagccttagtagttttagtgtgaataggcccttcctctttttcatcttcgaagacaccacaggcctgcccctatttgtgggaagcgtgcgcaatcccaatccctccgcaccacgggaattgaaagaacagcaagatagtcccggcaacaaagattttttgcaaagcttgaagggcttccctcgtggcgacaagctttttggacccgacctaaagcttgtgccccccatggaggaagattaccctcaatttggatccccaaag

SEQ ID NO: 274454 - DNA, 1473 bp, Artificial Sequence
  derived and/or modified sequence
atggcgctgctgtggggattgttagtgctgagttggtcctgcctacagggaccttgttcagtttttagcccagtgagtgctatggaacccctgggcagacagctcacatcaggtcccaaccaggagcaggtgtctcctctgaccttgctcaaactcgggaaccaggaaccgggcggccaaaccgctctcaaatcacctccaggcgtttgtagccgtgacccgactccagagcagacacacagactggcccgggcgatgatggcattcactgctgatctgttctccctcgtggctcagaccagcacctgtcccaaccttatccttagccctttgtctgtggcactagccctgtctcatcttgcactgggggcccagaaccatacgctgcagaggctccaacaggttctgcacgctggatctggtccgtgcttgccccacctgctcagtaggctttgtcaggatctgggcccaggggcttttaggctcgcagcccgtatgtatctacagaaggggttccctattaaggaagattttttggagcagagtgaacagctattcggcgccaagcccgtgagcctgacaggtaagcaggaagacgaccttgccaacatcaatcagtgggtcaaggaagccaccgaaggaaagatacaggagttcctgtctggcctccctgaggacacagttcttctgctcctgaatgcaatccacttccagggcttttggcggaataaatttgacccctcactcacgcaaagggattcatttcacctcgacgagcagttcactgtgcctgtggaaatgatgcaggccagaacctatcctctgcgatggtttttgctggaacagcccgagattcaggtggcacacttcccattcaaaaacaacatgtccttcgtggtcttagtcccaacgcacttcgagtggaatgtgagccaggtgctcgctaatttgtcttgggatacgctccatccccccctcgtgtgggaacggccaacaaaggtgcggctcccgaaattgtacctgaagcaccagatggatctcgtcgccacgctgagccaactgggcctacaagaacttttccaggccccggacctcagaggaatcagcgaacagtcactcgtcgtcagcggtgtgcagcaccagtcaaccctggagctaagcgaggtcggtgtggaagcagcagccgctacctcgatcgccatgtcccgcatgtccctgagcagcttctccgttaacaggccctttctcttcttcatttttgaggacaccaccggccttcccctgtttgtcgggtcagtcaggaatccaaatccttccgcgccgcgagagttgaaagaacagcaggatagccctggaaataaggactttttgcagtcactgaagggattcccacgcggggacaaactgtttgggccagacctcaaactggttcctccgatggaagaggactacccgcagtttggtagcccaaag

SEQ ID NO: 274455 - DNA, 1473 bp, Artificial Sequence
  derived and/or modified sequence
atggctctgctatgggggttgctggtgctgagctggtcttgcctgcaaggtccctgctccgtattctcaccagtgagtgccatggaacctttgggtaggcaattgacctctggacccaaccaggagcaggtgagtccgctgacactgctgaaactgggtaaccaggagcccggagggcagactgcccttaagagccccccgggtgtgtgttctcgggacccaacccctgagcagactcacaggttagccagggccatgatggccttcaccgccgatctgttcagtctggttgcccagacaagcacttgcccaaatctgatattgtcaccactcagtgtcgctctcgcgctgagccatctggcgttgggagcgcagaatcacacgcttcagcgcctgcagcaggttctgcacgccgggtctgggccttgcttgccacaccttctttcgagactgtgccaggatctggggcccggggcctttaggctggctgccaggatgtacctccagaagggcttccctatcaaggaagacttcctggagcagagtgaacagctgtttggggccaagcctgtctcccttacagggaagcaggaagacgatttagccaatattaaccagtgggtcaaggaagcgacggaaggcaagatccaagaattcctgtcagggctccctgaggacacggtgctcctgctcctcaacgctattcacttccaaggtttttggaggaacaagtttgacccttccctgacacagagggacagcttccacctggatgaacagttcacggtccccgtcgaaatgatgcaggcccggacctaccctctccgttggtttttactggaacagcctgaaatccaagtggcacactttcctttcaaaaacaatatgagcttcgtagtcctggtgccaacccacttcgagtggaatgtgtcccaggtcctcgcaaacctctcttgggatacactgcacccccccctcgtatgggagaggcctacgaaagtgaggctgcccaaactctatttaaagcaccagatggacttggtagctactctgtctcaactcggcctccaggagctgttccaggccccagacctgagaggcatatcggaacaaagtttggtggtgagcggagtccaacaccagagcactctggaattgtctgaggtgggcgttgaggcagctgcagctacatccatcgccatgtctagaatgtctctgagttccttctctgtcaatagaccttttctgttcttcatcttcgaagacaccactgggttaccccttttcgtgggcagcgttcgcaacccaaacccttctgccccacgagagctcaaggaacagcaggattcaccagggaataaagacttcctacagagtctgaagggatttccacgaggggataagctgtttgggccagacttaaagctggtgcctccaatggaagaggattaccctcaatttggctccccaaaa

SEQ ID NO: 274456 - DNA, 1473 bp, Artificial Sequence
  derived and/or modified sequence
atggctctgttgtgggggctccttgtgctctcttggagctgtctgcagggtccttgttctgtgtttagtcccgtctcagctatggaaccgctgggaaggcaactgacatccggtccaaaccaggagcaggtgagccctttaaccctgctcaaattggggaatcaggaaccaggcggccaaacagcgttaaaatccccgccgggggtctgttcgcgagatcccacccccgagcagactcatagactcgcaagggccatgatggctttcacagccgatctattcagtttggtcgcacagactagtacctgcccgaacctgattctgagccctctgtcagtcgcgctcgccctgagccacttagccctcggagcccagaatcatactctgcagcgtctccagcaggtcctgcatgcggggtcagggccatgtcttccacacctgctttcaagactatgccaggatctgggtcctggggcatttcgtctggccgcgcgcatgtatctccagaagggatttcccataaaggaagattttctcgaacagtctgaacaactgttcggagcaaagccagtgtcactgactggcaagcaggaggacgacctagctaacataaatcagtgggtgaaggaggcaaccgaaggaaaaatccaggagttcctgtccggactaccggaagacaccgttctcctgctgctgaatgcaattcactttcaggggttctggcgcaataagttcgaccctagcctgacacagcgagatagcttccatctcgacgaacagttcacagtaccagtcgaaatgatgcaggccagaacctaccctctgagatggtttctactggagcagccagagatccaggtcgcccattttccctttaaaaacaacatgtctttcgtcgtgctggtacctacccacttcgagtggaacgtgagtcaggtactggccaatctgtcttgggacactctccatcccccgctggtctgggagcggcctacaaaggttcgcctccccaagctctacctgaagcaccagatggatctagtagctactctgtctcagctgggactgcaagaactgttccaggcacccgatttacggggtattagtgaacagtccctcgtagttagtggagtgcagcaccagtcgacgctggagctctccgaggtgggcgtcgaagcagctgcagctacatccatcgcaatgtctagaatgtcgctgtccagcttcagtgtcaacaggccgttcctgttttttatttttgaagatactactggccttcctcttttcgtcgggtccgttaggaaccctaatcctagcgccccacgcgaactaaaagagcagcaggattcccccgggaataaggattttctgcagagtctgaagggcttcccacgaggtgacaaactgttcggaccagacctcaagttggtgcccccaatggaggaggactacccccagttcggctcacccaaa

SEQ ID NO: 274457 - DNA, 1473 bp, Artificial Sequence
  derived and/or modified sequence
atggccctcttgtggggcctgctggttttgtcctggtcctgcctccagggcccttgcagcgttttcagccccgtttccgcgatggaacccttaggacggcaattgacatctgggcccaaccaagagcaggtgagtcctttgaccctgttaaagctggggaaccaggagccagggggccaaaccgccttaaagagcccccctggggtgtgtagcagagaccccacgcctgaacagacacaccgattagcgcgggcaatgatggctttcactgctgaccttttctcattggttgcacagacttccacatgccccaatctgatcctttcacccctttccgtagcgctcgctctttcccaccttgctctgggggctcagaatcatacattgcagaggctgcagcaggtgcttcacgcgggcagcggaccctgtttgccccatttgctgagccgactctgccaggatctagggcccggggccttccgtcttgcagcccgtatgtatctgcaaaagggttttcccatcaaagaggatttcttggagcagagtgaacaactcttcggagcaaaacccgttagcttgaccggcaaacaggaggacgatctggcgaatatcaaccagtgggtaaaggaggcaactgaagggaagatccaggagtttttatcagggttgccggaggatactgttctgctacttctgaatgccattcacttccagggtttctggcgtaacaagtttgatccttccctgactcagcgcgactccttccatcttgacgagcagttcacggtgccagtcgagatgatgcaggcccggacttacccactgagatggttcctattggaacagccagaaatacaggtggcccattttccgttcaagaacaatatgtcctttgttgtgctagtacctacgcacttcgaatggaatgtgagccaagttttggccaacctcagttgggatactctgcatcccccgctagtgtgggagcggcccaccaaagtgaggttacccaagctttatttaaagcatcagatggaccttgtggctacactgtcacagcttggcctccaggagctatttcaggctccagacctgagggggatatcagagcagtcccttgttgtgtcaggggtccagcaccaaagcacactagaattatcagaggtcggagtggaggccgctgcagcgacctccattgcaatgtctaggatgtcactctctagctttagcgtgaacagaccgtttttgtttttcatcttcgaagataccaccggcttgcccctgttcgtcggctcagtcagaaacccaaacccctctgccccacgcgaactcaaagagcaacaggactcaccgggcaataaagacttcctgcagtcgctgaaggggtttcccagaggcgacaaattgtttggtcctgatctgaaattggtgccacctatggaggaggattacccgcagtttggttcccctaag

SEQ ID NO: 274458 - DNA, 1473 bp, Artificial Sequence
  derived and/or modified sequence
atggctctgctttggggattgctggtgctgtcttggtcttgtctccagggtccctgttcagtcttcagtccagtctccgccatggaaccactgggacgccagcttacttccggtccaaaccaggagcaagtgtctcctttgactcttttgaaactcggtaaccaggagccaggcggccagaccgctctgaagtctcccccaggcgtttgttctagagatccaactcctgaacaaactcaccgtctcgcaagggcaatgatggcttttactgccgatcttttctccctcgtcgctcaaaccagcacatgccccaacctgatcctctcacccctgtccgtggctctcgcactctctcacctcgccctcggtgcacaaaaccacactctccaaaggctgcagcaggtcctgcatgctggctccggcccttgcttgccccatctgttgagtcgcttgtgccaggatttgggacctggcgccttccgtctcgctgcccgtatgtacttgcagaagggattcccaatcaaggaagacttcctggaacaatcagagcaactgttcggcgctaaacctgtcagcctgaccggcaaacaggaggatgatctcgctaatataaatcagtgggtgaaagaagccaccgaaggaaagattcaggagtttctgagtggtttgcccgaagataccgtacttctgttgctgaatgccattcacttccagggattttggaggaacaaattcgatccttcactcacacaaagagactctttccacctggatgaacaatttaccgtgccagtggagatgatgcaagccaggacttaccccctcaggtggtttctgctggaacagcctgaaatccaggtggcccacttcccattcaagaacaacatgtcattcgttgtgcttgtcccaactcacttcgagtggaatgtgtctcaggtgcttgctaacttgtcatgggacaccctgcaccctcccctggtgtgggagaggccaactaaggttaggctcccaaaactctacttgaaacaccagatggacctggtcgcaacactctcccagttgggattgcaggagctcttccaggcccccgacctgaggggtatttctgaacaaagtttggtcgtttctggtgtgcagcaccagtccaccctggaactttccgaagttggtgtcgaggcagctgccgccacctccatcgccatgtccaggatgagcctgagctctttttcagtgaatcgcccctttcttttctttatcttcgaggatactaccggccttccattgtttgtgggatccgtgagaaatccaaacccttcagctccacgtgaactcaaggagcaacaggattcaccaggaaacaaggattttctgcaaagccttaagggtttccctaggggagacaagttgttcggccctgatttgaaactggttcctccaatggaagaggattaccctcagttcggttcccccaag

SEQ ID NO: 274459 - DNA, 1473 bp, Artificial Sequence
  derived and/or modified sequence
atggcgttattatggggtttactagtattatcgtggtcgtgtctacaaggtccgtgttcggtattttcgccggtttcggcgatggaaccgctaggtcgtcaattaacgtcgggtccgaatcaagaacaagtatcgccgctaacgctactaaaactaggtaatcaagaaccgggtggtcaaacggcgctaaaatcgccgccgggtgtttgttcgcgagatccgacgccggaacaaacgcatcgactagcgcgagcgatgatggcgtttacggcggatttattttcgctagtagcgcaaacgtcgacgtgtccgaatctaatactatcgccgctatcggtagcgttagcgctatcgcatctagcgctaggtgcgcaaaatcatacgttacaacgtctacaacaagttttacatgcgggttcgggtccgtgtttaccgcatttactatcgcgtctatgtcaagatctaggtccgggtgcgtttcgtttagcggcgcgaatgtatctacaaaaaggttttccgataaaagaagattttctagaacaatcggaacaactatttggtgcgaaaccggtttcgctaacgggtaaacaagaagatgatctagcgaatataaatcaatgggtaaaagaagcgacggaaggtaaaatacaagaatttttatcgggtttaccggaagatacggttctactattactaaatgcgatacattttcaaggtttttggcgtaataaatttgatccgtcgctaacgcaacgagattcgtttcatttagatgaacaatttacggtaccggttgaaatgatgcaagcgcgtacgtatccgctacgatggtttttactagaacaaccggaaatacaagttgcgcattttccgtttaaaaataatatgtcgtttgttgttttagttccgacgcattttgaatggaatgtatcgcaagtactagcgaatttatcgtgggatacgttacatccgccgttagtttgggaacgtccgacgaaagttcgactaccgaaactatatttaaaacatcaaatggatttagttgcgacgctatcgcaattaggtctacaagaactatttcaagcgccggatctacgaggtatatcggaacaatcgttagttgtatcgggtgtacaacatcaatcgacgctagaattatcggaagttggtgttgaagcggcggcggcgacgtcgatagcgatgtcgcgaatgtcgctatcgtcgttttcggtaaatcgtccgtttttattttttatatttgaagatacgacgggtttaccgttatttgttggttcggtacgaaatccgaatccgtcggcgccgcgtgaactaaaagaacaacaagattcgccgggtaataaagattttttacaatcgttaaaaggttttccgcgtggtgataaactatttggtccggatctaaaactagttccgccgatggaagaagattatccgcaatttggttcgccgaaa

SEQ ID NO: 274460 - DNA, 1473 bp, Artificial Sequence
  derived and/or modified sequence
atggcgctcctttggggattgttggtgcttagttggtcatgtttgcagggaccttgttccgttttctctcctgtatcagcaatggaaccgctcggacgacaacttacttcaggaccaaaccaagaacaagtgagtcctcttacattgctcaaacttgggaatcaagagccaggaggccaaacagcccttaaatcccctccgggagtgtgctcgcgagatccgactccagaacagactcacagactggcgagagccatgatggcctttactgcagatcttttctcccttgtagcacaaacttctacttgtccgaacttgattctttctccgctctcagtagctctggcactgtcacatctggcattgggagctcaaaatcatactctgcaacgacttcaacaagttctacacgctggatctggaccatgtttgccacatctcctctcacggttgtgtcaagatcttgggccaggagcgttccgtcttgccgctcggatgtatttacagaaaggattcccaattaaagaagatttcttagaacagtcggaacaactgttcggagcaaaaccagtgtcactgacaggaaagcaagaggacgatctcgctaatattaaccagtgggtgaaagaagcaactgaaggtaagatacaagaatttctttctggattgccagaagataccgttttgctcttattgaatgcaatccacttccaaggtttttggagaaacaaattcgacccgtccctcacgcagcgtgatagtttccatttggacgagcaattcactgttcctgtggaaatgatgcaagcacgtacatatccattgcgttggttccttcttgagcaacctgaaattcaagtagcacatttcccgtttaaaaataatatgtctttcgtcgttctcgtcccgactcactttgaatggaatgtttcacaagttcttgccaatttgtcatgggatacccttcacccaccgcttgtatgggagaggccaacgaaggtgagattaccaaaactatacctgaaacaccagatggacctggtggccacattaagtcaactcggactacaagaattgtttcaggcgccagatttgagaggaatttccgaacaaagtctcgttgtgtctggtgtccagcaccaatccacacttgagttgtccgaagtaggagtggaagcagcagcagcgactagtatagctatgtcgcgtatgtctctctcgtcatttagcgtgaataggcctttcttattcttcatcttcgaggataccacgggcttaccattattcgtgggaagtgtgcgcaatccgaatccatcagcacctcgggagcttaaagagcaacaagactctccaggaaacaaggacttcttgcagagtcttaaagggttcccaagaggtgataaactgttcggaccagaccttaagcttgtcccaccaatggaggaagattatccacagttcggctctccaaaa

SEQ ID NO: 274461 - DNA, 1473 bp, Artificial Sequence
  derived and/or modified sequence
atggctttattatggggactacttgtattaagttggtcatgtcttcaaggaccttgttctgttttttcaccagtctcagctatggaacctttagggaggcaattaacatcaggaccaaatcaagaacaagtttctccattaactttattaaagttaggaaaccaagaacctggagggcaaaccgcactcaaatcaccaccaggagtttgttctagggatccaactcctgaacaaactcatagacttgcaagagctatgatggcttttaccgcagatttattttcattagtagctcagacttcaacttgtcctaatcttattttatctcctcttagtgttgcacttgctttatctcatttagctttaggagcacaaaaccatacattgcaaagattacaacaggtattacatgcaggatcaggtccatgtttacctcaccttctttctagattatgtcaagatctaggaccaggagccttcagacttgcagctagaatgtatttacaaaaaggattcccaattaaagaagattttttggaacaatctgaacaactttttggtgcaaagcctgtttctttaacaggaaaacaagaagatgaccttgctaatattaatcaatgggtaaaggaagctactgagggaaaaattcaagaatttcttagtggattaccagaagatacagttttattattattgaatgcaattcattttcaaggattttggcgaaataaatttgatccatcattaactcaaagagattcatttcatttagatgaacaatttacagtaccagtcgaaatgatgcaagctagaacatatccacttagatggtttttgttagaacaaccagaaattcaagtcgctcatttcccttttaaaaataatatgagttttgttgttttagttccaacacattttgaatggaatgttagtcaagttcttgcaaatttaagttgggatactttacatcctccattagtttgggaaagaccaacaaaagttagattacctaaactttatcttaaacaccaaatggatttagttgcaacattatctcaattaggattacaagaactttttcaagcaccagatcttcgtggaatttctgaacaatcacttgttgtatctggagtacaacatcaaagtacacttgaacttagtgaagtaggtgttgaagcagcagctgctacatcaattgctatgtcaagaatgagtttatcatcttttagtgtcaatagaccatttttattttttatttttgaagatactacaggattgccactttttgttggaagtgttagaaatccaaacccatcagctcctagggaacttaaagaacaacaagattctccaggtaataaagactttttacaaagtttaaaaggatttccacgaggtgataaattattcggacctgatttaaaattagtaccacctatggaggaagattatccacaatttggatcacctaaa

SEQ ID NO: 274462 - DNA, 1473 bp, Artificial Sequence
  derived and/or modified sequence
atggctctgttgtgggggctgctggtgttgtcgtggtcttgtctgcagggaccatgcagcgtcttctcgcctgtgtccgccatggagccgcttggacgccagcttacatctggtccaaaccaagagcaggtctcgccattaactctcctaaaattggggaatcaagagccgggtggccagacagccctcaaatcgcctcccggagtgtgctcccgcgatccaacgcctgaacagacccacaggttagcaagagctatgatggccttcactgccgatctcttctcattggtcgcacaaacaagcacgtgccctaatttaatcctgtcccccttatcggtggcattggccctgtcccatctggcgcttggtgcccagaatcacactctgcagcgacttcagcaagtgctccacgcaggaagtggaccctgtcttccacatctactgagtaggctctgtcaagacttgggccccggcgccttccgactggctgccagaatgtacctccagaaagggtttcctatcaaagaggatttccttgaacagagtgagcagttgtttggggccaagcccgtttccctcaccgggaagcaagaggacgacctggctaatataaaccagtgggtgaaggaggctacagagggtaaaattcaggagttcctgtctggcctgccagaagacacggtcctgctactgctgaacgcaatccatttccagggcttctggcgcaataagttcgacccttcactgacacagagagatagttttcaccttgatgaacagttcaccgttcccgtcgagatgatgcaagctcggacctaccctcttcgatggttcctcctggaacagccagaaatccaggttgcacacttcccctttaaaaataacatgagcttcgttgtgctcgtgccgacccactttgagtggaatgtgtctcaggtgctggctaatctgtcatgggataccctgcaccctcccttggtgtgggagcgccccacaaaggtgcggttgcccaaactgtatctgaagcaccagatggacctggtggctacattgtcgcagcttggtctccaggagctatttcaggcccccgatctgcgtggcatttccgagcaatctcttgtggtgagtggtgttcaacaccagtcaaccctggaactttccgaagtgggagtagaagccgccgccgccacctctatcgcgatgtcacggatgagtctgtctagcttcagtgtcaataggccatttctgtttttcattttcgaggacacgacaggactccctctgttcgttggaagcgttaggaacccgaacccctccgcaccgagagaactcaaggagcaacaggattccccagggaataaggatttcctgcagtccctgaaggggtttccacgaggggataagctatttggacccgatctgaaactagtcccgccaatggaagaggactaccctcagtttggctcacctaaa

SEQ ID NO: 274463 - DNA, 1473 bp, Artificial Sequence
  derived and/or modified sequence
atggctctattgtggggcctattagtgctctcctggtcttgcctgcaaggtccatgctctgtctttagccctgttagtgcaatggaaccgttgggacgccagctcacatctggacccaaccaggagcaagtgtcacccctgactctgctgaagctagggaaccaggagcctgggggccagaccgctctgaagagtccccctggcgtttgttcacgcgatccgacgccagagcaaacgcacaggctggctagagcgatgatggcatttacggccgatctgttctctttggtggcccagacatcaacgtgcccaaatctgatcctgtctcctctgtcagtggccttggcactgtctcatttagccctgggtgctcagaaccacaccttgcaacgtctccagcaggtgctccatgctggctccgggccctgtttaccccatcttttatctcgactctgtcaggacctcggcccaggggccttccgccttgccgccagaatgtatctgcagaagggctttccgataaaggaggatttcttagaacagagcgagcaactgttcggggctaaaccagtgtccttaactggcaaacaggaagacgatctcgctaacattaaccagtgggttaaggaggcaactgaaggaaaaatacaagagttcctgagtggactccctgaggataccgttctccttcttcttaacgctatccactttcaaggattttggcgcaacaaatttgaccctagtctgacacagagagattcatttcacctcgacgagcagttcaccgtgcctgtggaaatgatgcaagcaaggacgtatcctttgcgatggttcctattagagcagccagagatccaagtagctcatttccccttcaagaacaatatgtccttcgtggtacttgtgcccacacattttgagtggaacgtctctcaagtgctggccaatctgagttgggatacactgcacccccctctcgtctgggagaggcctacgaaggttcggctgcccaaactatatctcaaacatcaaatggacctagtggccacacttagccagctgggcctgcaggagctgttccaagcacctgacctgcgtgggattagcgaacagtcactggttgtgtccggagtgcagcatcagtccacactggagctttccgaggttggagtagaagcggccgctgcaacttctattgcgatgagcagaatgagtctgtcgtccttcagcgtgaataggccctttttgttttttatcttcgaggataccaccgggctgccactttttgtgggatcagtgaggaatcctaacccttctgccccccgggaactgaaggaacagcaggatagcccaggtaataaagatttcctacaaagccttaaaggatttcccaggggggacaaactgtttggtcccgatctgaagctggttcctccgatggaggaagattacccacagttcgggtcccccaag

SEQ ID NO: 274464 - DNA, 1473 bp, Artificial Sequence
  derived and/or modified sequence
atggctctgttgtggggcctgttggtgctaagttggagctgcctgcaaggaccatgctccgtattctcgcccgtcagcgccatggagcccttggggaggcagttgacgtcagggccaaaccaggagcaggtgtctccactgaccctcctgaagctcggcaatcaggagccaggaggccagaccgcattgaagagtcctccaggtgtatgcagccgggaccccacgcctgaacaaacccatagactggcaagggccatgatggcctttaccgcagatttattctctctcgtggctcaaacttccacctgccccaatctcatcctgagtcccttgtccgtcgccctggctctgtctcatctagcgctgggagcacagaaccacacgctccagcggctccagcaggtgttacacgctgggtctggtccctgtctgccgcaccttttatccagactgtgccaagatctcggacctggtgcctttcgactcgccgcacgcatgtaccttcagaaggggttccccattaaggaagatttccttgagcagagcgaacagctgttcggggcgaagcccgtaagcctcactggcaaacaggaggacgatctcgcgaacatcaatcaatgggtgaaagaggctactgaagggaagatccaggagttcctttctggactccctgaagacacggttctgctgctgctgaatgctatccatttccagggcttttggcgtaataaattcgacccctctttaacacagcgtgacagttttcatctggatgagcaatttactgtgcctgtggaaatgatgcaggctcgtacgtaccccctgagatggtttcttctggagcagcctgagatccaagtagctcattttccattcaaaaataatatgtcattcgtggttctggtgcccactcacttcgaatggaatgtcagccaagtgctcgcaaacctctcttgggataccttacatccaccccttgtgtgggagcggcccaccaaagtgcgcctgccaaagctgtatttgaaacatcagatggatttggtcgctacgttgtctcagctcggactgcaggaactgttccaggcacccgatctcagaggaatctccgagcagtcattagtggtgtctggggtgcaacatcaaagtactctcgaattaagtgaagtaggagtagaggcggcagctgccacatccatcgctatgtccagaatgagcttgagttctttctcggtgaaccgacccttcctgttttttatcttcgaagacactacaggcctcccattgtttgtcggctccgtccgaaatcctaacccatctgcaccgcgggagctcaaggagcagcaggactctccgggtaacaaagatttcttacagtcgcttaaagggtttccaagaggcgacaaattatttggaccagacttgaagttggttccaccaatggaggaagactaccctcaattcggaagtcctaag

SEQ ID NO: 274465 - DNA, 1473 bp, Artificial Sequence
  derived and/or modified sequence
atggccctgctgtggggtcttctcgtgttatcttggtcctgcctccagggtccatgttctgtcttttctcccgtttcagccatggaaccattgggcaggcagttgaccagtggacccaatcaagagcaagtgagcccactgacgctcttaaaattaggaaaccaggagccaggaggtcagactgcgctgaagagcccgccaggcgtctgtagccgagacccaacaccagaacagacccataggcttgcgcgtgcaatgatggcttttaccgccgacctcttttccctggtggctcagaccagcacttgccctaacctgattctgtctccactgtctgtcgcgctcgcactctcccacctggcgctcggcgctcagaaccacaccctgcagcggttgcaacaggtgctccatgctggctccgggccctgtcttccccatttgctgtcgcgattgtgtcaggacctaggcccaggagcgttcagactggccgcaagaatgtacctgcagaagggattccctatcaaagaggatttccttgaacagtctgagcagcttttcggcgcaaaaccagtgtcactgacaggcaaacaggaagatgatctcgctaatataaatcagtgggtgaaagaggctactgaaggaaaaatacaagagttcctaagcgggttgccagaggatacggtgctcctcctgctgaatgcaatccacttccagggcttttggcggaataagttcgatcctagcttgacacagcgtgattcttttcatctcgatgagcagttcacagtacccgttgaaatgatgcaggcccgcacatacccactcaggtggtttcttctggagcagccagaaattcaggtggcccacttccccttcaaaaataacatgtcctttgtcgtgctggtgcccacccactttgaatggaatgttagtcaggttctggccaacctgagctgggacaccctccacccccccctggtttgggagcggcccacaaaggtgagactcccaaagttgtatctgaagcaccagatggatctcgtggccacactgagtcagcttggtttacaggaactattccaggctcccgatctgcggggaatatcagagcagagccttgtggtgtcaggagtacaacaccagagcacactcgagctcagcgaggtgggggtggaggcagcagctgcgacctccattgcgatgtctagaatgtcattgagcagcttctccgtgaacagaccatttctctttttcatctttgaggatacaacagggttgccactgtttgttggctctgttaggaaccccaatccatccgccccccgcgagctgaaggagcagcaggacagccctggcaacaaggactttctacaatctctcaaaggctttcctcggggagataagttgtttgggcctgatctcaagctcgtcccacccatggaagaagattacccccagttcggcagtcctaag

SEQ ID NO: 274466 - DNA, 1473 bp, Artificial Sequence
  derived and/or modified sequence
atggcgctgctgtggggcttactcgtgttatcgtggtcatgtttgcagggaccatgttctgtctttagccccgtgtctgcaatggagccattgggaaggcagttgaccagtggtcctaatcaggagcaagtcagtcccctgacattgctcaagcttggcaatcaagaacccgggggacaaaccgccttgaaatccccgcccggggtgtgctcccgtgaccctacaccggagcagacgcaccggttggcacgggctatgatggcattcaccgctgatttgttctctctggttgcacaaacttctacatgtccaaacctgatcctgagccccctgtccgtcgcattagccctttctcacctggccctcggtgcccagaaccataccctgcagcgattgcagcaggtgctgcacgcaggatcagggccttgcttaccccacctcctgagtcgcctgtgccaggacctggggcccggggcttttcgcctggccgctcggatgtatctgcagaaaggctttcccatcaaggaggactttctggaacagagcgaacaactgtttggagcgaagcctgtgtctctgactgggaaacaagaggatgacctggcaaacattaaccagtgggtcaaggaggcgactgagggtaagatccaggagttcctgagtggcctgccggaggataccgtgcttctgctcttgaacgccattcactttcaggggttttggagaaataagttcgatcccagcctaactcagagggattcatttcaccttgacgagcagtttaccgtgccagttgagatgatgcaggctcgcacttacccattgaggtggttcctcttggaacagcctgagatccaggttgcgcattttccatttaagaacaatatgtcattcgtcgtgctggttccaacccattttgagtggaacgttagccaagtgctggcaaacctcagctgggacacactccatccaccattagtttgggaacgacctaccaaggtacgtctccccaaattgtacctgaagcaccaaatggacttggtagcgactctgtcacagttagggctccaggaattgtttcaggctccagatctgaggggcatctccgagcagtcgctggttgtaagtggggttcaacaccagtcaaccctcgagttgtctgaagttggagtggaagcagccgccgctacaagtattgccatgtcccggatgtccctcagtagtttctccgtgaatcggccatttctgttctttatctttgaggatacgactggtctgcctctcttcgtgggaagtgtaagaaatccaaatccctcagcacccagagagctgaaagagcaacaggacagccccggcaacaaagattttctgcagtctctcaaggggttccctagaggagacaagttatttggcccggacctcaagctagtgcctcctatggaggaggattatccccagttcggttcccccaaa

SEQ ID NO: 274467 - DNA, 1473 bp, Artificial Sequence
  derived and/or modified sequence
atggcacttttgtggggacttttggtgttgagttggtcttgtttacaaggaccttgcagcgtgttttcacccgttagtgcaatggagcctttggggagacaactcacctcaggtccaaatcaggagcaagttagcccattgacgttgcttaagctgggtaatcaagagcctggggggcaaacagcattgaagagcccacctggcgtgtgctctcgcgatccaactccagagcagacgcacaggttagcgagagctatgatggctttcacagctgatttgttctctctggtggctcagacatctacctgcccaaatttgatcttgtctcctttatccgtcgctttggctctgtctcacctcgccttaggggcccaaaatcatacactccagcgtttgcaacaagtcttgcatgccgggagtggaccttgtttgcctcaccttctctctcgattatgccaagatttgggaccgggtgccttcagattggctgcacgaatgtatctgcagaagggcttccctattaaagaagattttcttgaacaatcggagcagctgtttggggccaaacctgtgtctctaacaggaaagcaagaggacgatctagctaacatcaatcagtgggtaaaagaagccacagaaggtaaaatccaggagtttttgtcgggtttgcccgaggatacagttctactactgcttaatgctattcattttcagggtttctggagaaataagtttgatccatctctcacccaacgtgatagttttcatttggatgagcaatttactgttcctgtcgagatgatgcaagctagaacatatccgctacgttggttccttcttgaacaaccagaaatccaggtagctcatttcccatttaaaaataatatgtcatttgttgttttagttcccacccacttcgagtggaatgtgtcacaagtgctcgccaatctctcttgggatactctccatccaccacttgtatgggagaggccaacaaaggttcgattgcctaaactctacctaaaacaccaaatggatctggtcgcaacattgagtcagctaggtcttcaagagctcttccaagcacccgatttgcgtggtatcagcgagcagtcacttgtcgtttcaggcgttcaacaccaatcgacccttgaattatctgaagttggtgttgaggctgcggcggcgacctcgatagcaatgtctcgcatgtccctgtcatctttcagcgtaaatcgtcctttcttgtttttcatctttgaagatacaaccggcttgccattgtttgtcggctctgttagaaatcctaaccctagcgcgccgcgggaactcaaagagcaacaagattctcccggaaacaaggattttcttcagagtctaaagggattcccgaggggcgataagttgttcggcccagacctgaaactcgtgccaccaatggaggaagattaccctcaatttggttcccctaag

SEQ ID NO: 274468 - DNA, 1473 bp, Artificial Sequence
  derived and/or modified sequence
atggctcttctctggggcctattagtgttgtcttggtcgtgcctgcagggaccatgttcggttttttctcctgtctctgcaatggagccactgggacgacaactgactagtgggccaaatcaggaacaagtctccccactcacgctcctaaagctgggtaatcaggagccagggggacaaacggcgctcaagtcaccgccaggcgtgtgtagtcgcgatcctacaccggaacagactcaccgcctggcccgtgccatgatggcattcaccgccgacctcttttcattagtcgcccaaacctcaacgtgccctaatcttatcttatccccactatcagtggcactagcgctctctcatttggccctgggtgctcaaaatcacacgctgcagaggctgcagcaagtgctgcatgctggaagtggtccatgcctgccacatttgttgagcaggctatgccaggatctgggtccaggcgcatttaggcttgccgcacgcatgtatctgcagaaaggtttcccaatcaaggaagatttcctcgagcagagcgagcagctctttggcgctaaaccagtgtctctcaccggaaaacaggaggatgatctggctaatataaaccagtgggtgaaggaggcgactgaaggcaagattcaggaattcctgtccggcttaccagaggatacggtgttgctcctgcttaacgctatccactttcagggcttctggcgaaataagttcgacccttcattaacacaaagagactcctttcacctggatgaacagtttactgttcccgtcgaaatgatgcaagccaggacctatccactccggtggtttctgctggagcagccagagatacaggtggcgcattttccatttaagaacaacatgtcctttgtggtgctggtgccaacacatttcgagtggaatgtgtctcaggtgctggccaacctctcctgggacacgctccacccacccttggtttgggagagacccacaaaggtccgtctgccaaagctttatctgaaacatcagatggacctcgtggcaactcttagccagttggggctacaggagctttttcaggcgcctgacctgagaggaatctcagagcagtctctcgtggtctcaggggttcagcatcagtccaccctcgagctgtccgaggtaggcgtggaagctgcggccgctacttcaatcgctatgagccggatgtccttgtcatccttcagcgtgaaccgaccgttcctattctttattttcgaggatacaacgggcttgccactcttcgtgggcagcgttagaaatcccaatccttccgccccacgcgagttaaaagaacagcaggatagtccgggaaataaggactttctgcagtccttgaaaggtttcccacgcggagacaaactgtttggtcctgatctcaagctggtgcctccaatggaggaggactatccacagttcggcagtccaaag

SEQ ID NO: 274469 - DNA, 1476 bp, Artificial Sequence
  derived and/or modified sequence
atggccctgctgtggggcctgctggtgctgagctggagctgcctgcagggcccctgcagcgtgttcagccccgtgagcgccatggagcccctgggcagacagctgaccagcggccccaaccaggagcaggtgagccccctgaccctgctgaagctgggcaaccaggagcccggcggccagaccgccctgaagagcccccccggcgtgtgcagcagagaccccacccccgagcagacccacagactggccagagccatgatggccttcaccgccgacctgttcagcctggtggcccagaccagcacctgccccaacctgatcctgagccccctgagcgtggccctggccctgagccacctggccctgggcgcccagaaccacaccctgcagagactgcagcaggtgctgcacgccggcagcggcccctgcctgccccacctgctgagcagactgtgccaggacctgggccccggcgccttcagactggccgccagaatgtacctgcagaagggcttccccatcaaggaggacttcctggagcagagcgagcagctgttcggcgccaagcccgtgagcctgaccggcaagcaggaggacgacctggccaacatcaaccagtgggtgaaggaggccaccgagggcaagatccaggagttcctgagcggcctgcccgaggacaccgtgctgctgctgctgaacgccatccacttccagggcttctggagaaacaagttcgaccccagcctgacccagagagacagcttccacctggacgagcagttcaccgtgcccgtggagatgatgcaggccagaacctaccccctgagatggttcctgctggagcagcccgagatccaggtggcccacttccccttcaagaacaacatgagcttcgtggtgctggtgcccacccacttcgagtggaacgtgagccaggtgctggccaacctgagctgggacaccctgcacccccccctggtgtgggagagacccaccaaggtgagactgcccaagctgtacctgaagcaccagatggacctggtggccaccctgagccagctgggcctgcaggagctgttccaggcccccgacctgagaggcatcagcgagcagagcctggtggtgagcggcgtgcagcaccagagcaccctggagctgagcgaggtgggcgtggaggccgccgccgccaccagcatcgccatgagcagaatgagcctgagcagcttcagcgtgaacagacccttcctgttcttcatcttcgaggacaccaccggcctgcccctgttcgtgggcagcgtgagaaaccccaaccccagcgcccccagagagctgaaggagcagcaggacagccccggcaacaaggacttcctgcagagcctgaagggcttccccagaggcgacaagctgttcggccccgacctgaagctggtgccccccatggaggaggactacccccagttcggcagccccaagtag

SEQ ID NO: 274470 - DNA, 1476 bp, Artificial Sequence
  derived and/or modified sequence
atggccctcctgtggggattgctcgtgctctcttggtcttgcctgcaggggccctgttctgtgttctctcccgtgagtgctatggagcctctggggaggcagctaacctcaggccccaaccaagagcaggtttctcccctgaccctactgaaactcggaaatcaggagcccggcggacagacagctctgaagtcccctcccggagtttgctcacgggaccccacacccgagcagacccataggctggcccgggcaatgatggcgttcacagccgacttattctcattggttgcccaaacgagcacttgcccgaacctcattctctctccgttgtctgtagcactggctctatctcaccttgcactcggcgcccaaaaccacacccttcagcgacttcagcaggtgctgcatgcggggtctggtccatgcctgccccacctgttgtctcgcctgtgtcaggacctgggtccaggggcgtttagactggcagctagaatgtacctccagaagggcttcccgatcaaagaagattttctggagcagagcgagcagctgttcggtgctaaacctgtgagtttgaccggcaaacaggaagatgaccttgctaatataaaccagtgggtgaaagaggctacagaaggaaagatccaggagttcctgagcggtctgcccgaggacactgtcctgctcctcctcaacgctattcatttccagggattttggcgtaacaaattcgacccgtcacttactcagagagactcattccacctggacgaacagtttacagtacctgttgaaatgatgcaggcacgaacctatccactgcgatggttccttctggagcagcccgagatccaggtagcccatttcccattcaagaataacatgtcctttgtcgtattagtgcccacccattttgagtggaatgtatctcaagtcctggcgaatttgagctgggacacccttcatccgccgctcgtctgggaacgtcctaccaaggtgcgactgcccaagctctatcttaaacatcaaatggatctggtggccaccttgtcacaactggggcttcaagaactttttcaggctcctgaccttcgaggaatcagcgaacagtccttggttgtgtcgggagtgcagcaccagagcaccctggagctttcagaagtcggagtcgaggccgccgcagcaacctccatcgcgatgagccgaatgtccctgtcctctttcagcgtgaatcgcccatttctgttcttcatctttgaagacacgactggcctccccctctttgtaggatctgtgaggaatcctaatcctagtgctcctagagagctgaaggagcagcaggactcccccgggaataaggatttcctgcagtccctgaaggggttcccccggggcgataagctgtttggccctgacctgaagctggtgccacctatggaagaagattatcctcagttcgggagcccaaagtag

SEQ ID NO: 274471 - DNA, 1476 bp, Artificial Sequence
  derived and/or modified sequence
atggctttactctggggcctccttgtgctaagctggtcctgcctacaggggccctgctctgtgttttccccagtgagtgccatggagccactgggaagacagctgactagcggcccgaatcaggagcaggtgtccccgcttaccctgttaaaactagggaaccaggagccaggcgggcaaaccgcgctgaagagtccaccaggagtatgttcgcgggatccaacccccgaacaaactcaccgcctggctagagcaatgatggcattcaccgcagatctattctcactggttgcacagacaagtacatgccccaatctgattttaagtcctctgagcgtcgcccttgccttgtcacatctcgccctgggagcacaaaatcatactctgcagagattacagcaagtcctgcatgcgggttcagggccatgtctgccacatctgctgagccgcttgtgccaagacttggggcccggagcatttaggttggccgccaggatgtatctgcaaaagggcttcccaatcaaggaggattttcttgaacagtcagaacagctgttcggggcaaaaccagtgtcgttgactggaaaacaggaagatgacttagctaacattaatcagtgggtcaaggaagccacggaggggaagatacaggagtttctctccggtcttcctgaggataccgtgcttctcttattgaacgcaattcacttccaggggttctggcgaaacaagtttgatccttccttaacacagagagatagttttcaccttgatgagcagtttaccgtgccagtagagatgatgcaggccaggacctaccccctgaggtggttcttgctcgagcaacctgagatccaggttgcccacttccctttcaagaataatatgtccttcgtggtgctggttcctactcatttcgagtggaatgttagccaggtgttagccaacttatcatgggacaccctgcacccccccctggtttgggaacgtcctaccaaggtccggctgcccaaattgtacttgaagcatcaaatggatctggtggccacacttagtcagctaggactgcaggaactctttcaggctccagacctgagaggcattagcgaacagagcctggtagtcagcggagtccagcaccagtcgacattagagctctctgaagtcggggtggaggccgccgctgccaccagcatcgcaatgtctcggatgagtctttcttcatttagcgttaataggccattcttgttcttcatcttcgaggacacaaccggactccccttgtttgtgggatccgttcggaatcctaatccgtctgcgccacgcgaactcaaagagcagcaggacagcccaggaaataaggattttctgcaatcccttaaaggtttccctagaggggataagctcttcgggccggacttgaaactcgtccctccaatggaggaggattatccccagtttggctctcctaaatag

SEQ ID NO: 274472 - DNA, 1476 bp, Artificial Sequence
  derived and/or modified sequence
atggccctgctgtggggcctgctggtgctgtcctggagctgcctgcagggcccctgcagcgtcttcagccctgtgtctgccatggagcccctgggccggcagctgaccagcggccccaaccaggagcaggtgagccccctgaccctgctgaagctgggcaaccaggagcccggcggccagacagccctgaagagccccccaggagtgtgcagccgggaccccaccccagagcagacccaccggctggcccgggccatgatggccttcaccgctgacctcttcagcctggtggcccagaccagcacctgccccaacctgatcctgagccccctgtctgtggccctggccctgagccacctggccctgggcgcccagaaccacaccctgcagaggctgcagcaggtgctgcacgccggcagcggcccctgcctgccccacctgctgagccggctgtgccaggacctgggccctggggccttccggctggccgccaggatgtacctgcagaagggcttccccatcaaggaggacttcctggagcagagcgagcagctgtttggagccaagcctgtgtccctgaccgggaagcaggaggatgacctggccaacatcaaccagtgggtgaaggaggccacagagggcaagatccaggagttcctgagcggcctgcctgaagatactgtgctgctgctgctgaatgccatccacttccagggcttctggaggaacaagtttgaccccagcctgacccagagggacagcttccacctggatgagcagttcaccgtgcctgtggagatgatgcaggcccggacctaccccctgcgctggttcctgctggagcagcctgagatccaggtggcccacttccccttcaagaacaacatgagctttgtggtgctggtgcccacccactttgagtggaatgtgtcccaggtgctggccaacctgtcctgggacaccctgcacccccccctggtgtgggagcggcccaccaaggtgcggctgcccaagctgtacctgaagcaccagatggacctggtggccaccctgagccagctgggcctgcaggagctgttccaggccccagacctgcggggcatcagcgagcagagcctggtggtgtctggagtgcagcaccagagcaccctggagctgtctgaggtgggcgtggaggccgctgctgccaccagcatcgccatgagcaggatgagcctgagcagcttctctgtgaaccggcccttcctgttcttcatctttgaggacaccaccggcctgcccctgtttgtgggctctgtgaggaaccccaaccccagcgccccccgggagctgaaggagcagcaggacagccctggcaacaaggacttcctgcagagcctgaagggcttccccaggggggacaagctgtttggaccagacctgaagctggtgccccccatggaggaggactacccccagtttggcagccccaagtag

SEQ ID NO: 274473 - DNA, 1476 bp, Artificial Sequence
  derived and/or modified sequence
atggccctgctgtggggcctgctggtgctgagctggagctgcctgcagggtccgtgttcagtttttagccctgtgagcgccatggaacccctgggccggcagctgacatcaggccccaatcaagaacaggtcagtccgctcaccctattgaagctcgggaatcaggagcccgggggacaaaccgccttaaagtctccgccaggagtgtgcagtcgtgatcctactccagaacagacccatcgcctggcacgcgcaatgatggcattcacagcagacttattttctctggtcgcacagacatccacctgccccaatctgatcctctccccactatcagttgcacttgccctgagccacctggcactgggtgcacagaaccacactctccagcggttgcagcaagtgttacatgctgggtctggaccttgtctcccacaccttctgtctagactctgccaagatttaggtcccggagcattcagactagccgctcgcatgtatctccaaaagggtttcccgatcaaggaggacttccttgagcaatccgaacaattatttggggcaaagccagtgagcctgactggcaagcaggaagacgacctggccaacatcaaccagtgggtcaaagaggctactgagggcaaaatccaggagtttctgagtggcttgccagaggacacagttctgctgctgctgaatgctattcactttcagggattctggagaaacaagttcgacccgagtctgacacaacgggatagctttcatttggatgagcagttcactgtgcccgtcgaaatgatgcaggcacggacttacccgctgcgttggttcctgctcgagcaacctgaaatccaggtggcccattttcctttcaaaaacaatatgagcttcgtggtgttggttccgacacattttgaatggaacgtctcccaagtgttggctaatttgagttgggacactctgcatccacctctagtgtgggagagacctaccaaggttagacttccgaagctctatctgaaacatcagatggacttggtggccacgctgagccagctcgggctgcaggaactcttccaggccccagacctgcgcgggatcagcgaacagtctcttgttgtcagtggggtgcagcaccagagcaccctcgaactctctgaagttggggtagaggctgctgcagccacctcaatcgcaatgtccagaatgtcactctctagtttcagcgtgaatcggccattcctgttctttatcttcgaggacactacgggactaccactgttcgtcggctcagttaggaatcccaaccctagtgcaccaagagagctaaaggaacagcaggactccccgggtaataaggatttcctgcagtcactcaaaggttttcccaggggtgacaaactcttcgggcctgatttgaaactggttcctcccatggaagaagattacccacagttcggtagtcctaagtag

SEQ ID NO: 274474 - DNA, 1476 bp, Artificial Sequence
  derived and/or modified sequence
atggccctgctgtggggcctgctggtgctgagctggagctgcctgcagggtccttgctccgtcttctcccccgtcagtgctatggaaccgttagggcgccagcttacctccggtcctaatcaggaacaggtgtcaccattgactcttctgaaattgggcaatcaagaacctggcggacagaccgccttgaaatctccccccggggtttgcagtagagatccaacccccgagcagacccaccgactagctagagcaatgatggcttttactgcagatctgttttcccttgtggcccaaacttccacatgtcctaacctcattctgtcccccctgagcgtagccctcgcgctgagccaccttgcccttggagcgcagaatcacacactgcagaggctgcaacaggtcctccatgcgggcagtggtccttgcctgcctcatctgctgagccggctatgtcaggatctgggacctggggcattccgtctggccgctcggatgtacctgcagaagggctttccaattaaagaggacttcctcgaacagtcggagcagctgttcggcgcaaagccagtctctttgactggtaagcaggaggatgacttggcgaatatcaatcagtgggttaaagaggccaccgaaggaaagattcaggagttcctctccggtctgccggaagatacagtgctcttgttgttgaatgccatccatttccaaggattttggaggaataagtttgacccaagcctgacccagcgcgactcctttcacctggacgaacagttcacagttccggttgaaatgatgcaggcaaggacatatcccctccgttggttcttactggagcaacccgaaattcaggtcgcccacttcccattcaagaataatatgagcttcgtcgtcctggtgcccacccattttgagtggaacgtgagccaggtgctggctaatctgtcatgggataccctccatcctcctctagtgtgggagagaccaactaaggtgaggctgcccaagctgtacctgaagcaccagatggatctcgtggcgaccctctctcagctgggcctacaggaactgttccaggccccggatttgagggggatcagcgagcagtctcttgtggtgagcggtgtgcaacatcagagcacactcgaactgtctgaggtgggcgtagaagccgctgcagcaacaagcatagccatgagccgtatgagtttgagctcgttcagcgtcaacagaccgtttctcttcttcattttcgaggacacaaccggcttgccactgtttgtcgggagtgttcgcaatccaaacccaagcgctccgagggagctgaaagagcagcaggattccccaggaaacaaagacttcctccaatccctgaagggcttccctaggggtgacaagctgtttggacctgatcttaaactggtccctcccatggaagaggattacccccagtttggaagcccgaaatag

SEQ ID NO: 274475 - DNA, 1476 bp, Artificial Sequence
  derived and/or modified sequence
atggcccttctgtggggcctgcttgtgttgagctggagctgtctgcaaggaccctgttctgtgttcagtcccgttagcgcgatggagccactaggtcgtcagttaacctccggtcccaatcaagaacaggtatcaccccttacacttctcaagcttgggaaccaggagcctggcggtcaaaccgccctgaagagtcccccaggagtatgttcgcgggatcccaccccagagcagacccacaggttagccagagccatgatggcttttacggcagatctgttttctctggtcgctcaaacaagtacctgtcccaatctgatactgtcaccgctgtctgtagctcttgccctatcccacctggcccttggggcacagaatcatacgctccagcgtttgcagcaggttctacatgccggttctggtccgtgtctgccacacctattatcaaggctgtgccaggatttgggccctggcgcattcagattagctgcccgaatgtatctacagaaagggtttccaatcaaggaagatttcctggagcaatctgaacagctgttcggtgcaaagccagtgagcctgactggaaaacaggaagatgatctggctaatataaatcagtgggtgaaggaggccacagagggaaagattcaggagttcctgtccggtctgccggaggacaccgtcctgcttctgctgaatgctatacactttcagggcttctggcgaaacaagtttgacccgtctctgacccagcgagattctttccatctggacgaacagttcacagtccccgtagagatgatgcaggctcggacttaccccctcagatggtttctactggaacagccagagatccaagtggcccacttcccctttaagaataacatgtcctttgtcgtcctggtccctacccacttcgagtggaacgtgtcccaggtgctagcaaatctgtcctgggataccctgcatccacccctggtttgggagcgcccaaccaaggtcaggctgcccaagttgtatttgaagcatcaaatggaccttgttgctacgttaagccagctgggcctgcaggagctgttccaagcacctgatcttaggggcatcagtgaacagagcttggtggtgagtggcgttcaacatcagtcgaccctcgaactttcagaagtaggcgtcgaagctgcagcggctaccagcattgctatgagcagaatgtctctgagctctttcagcgtcaaccgcccatttcttttcttcatctttgaagatacgaccggactacccctattcgtagggagcgtcaggaaccctaatccgagtgctccaagggaactgaaagagcagcaggacagtccagggaacaaagatttcctgcaaagccttaaaggattccctcgaggggacaaactttttggacctgacctcaagcttgtgccccctatggaggaagactatccccagttcggatctccaaagtag

SEQ ID NO: 274476 - DNA, 1476 bp, Artificial Sequence
  derived and/or modified sequence
atggcactcctgtggggcctgctggtgctctcttggagctgcctgcaaggaccgtgcagcgtgtttagccccgtgtcagctatggaaccactaggcagacagttgaccagcggacccaatcaggagcaggtttcgcctctgaccctgcttaagctgggcaatcaggaacctggaggccagaccgcccttaagtcccctcctggggtttgctccagagaccccacccctgaacaaactcatcgcctggcgagagcaatgatggccttcaccgcagacctcttttcgctcgtcgcgcagacctctacctgtccaaacctaattctatccccattgagtgtcgctttagccctcagtcacttagctctcggtgcccagaaccacacattgcagaggctgcaacaggtcttgcacgcaggctcgggtccctgcctgccccacctcctcagccgcctttgccaggacctgggacccggagcatttcgtctggcggctcgcatgtatctgcagaaagggttccctatcaaggaggatttcctggaacaaagcgagcagctgtttggcgctaaaccagtaagcctgacgggaaaacaagaagatgacctggccaacatcaaccagtgggtgaaggaggctacggagggtaagatacaggaattcctgagcggattgcccgaggacacagtgttactgctgttgaacgcaatccacttccagggattttggcggaacaagtttgatccaagcctgacacaaagggatagtttccatctggatgagcaatttaccgttcctgtggagatgatgcaggccaggacttatccgctgcgttggttcctgctcgaacagcctgagatacaagtcgcgcacttccctttcaaaaacaacatgtctttcgtcgtcctggtgcctacacatttcgagtggaacgtgagccaggtgctcgcaaacctatcctgggacactctccaccctcctctggtctgggagcggcctacaaaggtgcgtctacctaaactctatctgaaacatcagatggatttggtggccacactgtctcagttgggcctccaggagctcttccaggccccagatcttcgcggaataagtgagcaatcactggttgtgtctggcgtgcaacaccaatcaacattggaactatcagaagtgggggtcgaggctgccgcagcaacttcaatcgcaatgagtcggatgtcactgagcagtttcagcgttaatagaccattcttgttctttatattcgaagatactactgggcttcccttgttcgtgggctccgtgagaaatcctaaccctagcgctcctcgagagctgaaggagcagcaagactctcctgggaacaaagattttttgcagtcgctcaaaggatttccaagaggagacaagctgttcggtcctgacctaaaacttgtgcctccgatggaagaggactaccctcagttcgggtctcccaagtag

SEQ ID NO: 274477 - DNA, 2284 bp, Artificial Sequence
  derived and/or modified sequence
cctgggcagagagtgaggagcacccaagtggggccagaggaacgttgtgtgtggcagcaaggagcccgcagaggaacatggcgctgctctgggggctcctggtgctcagctggtcctgcctgcaaggcccctgctccgtgttctcccctgtgagcgccatggagcccttgggccggcagctaactagcgggccgaaccaggagcaggtgtccccacttaccctcctcaagttgggcaaccaggagcctggtggccagactgccctgaagagtcccccaggagtctgcagcagagaccccaccccagagcagacccacaggctggcccgggccatgatggccttcactgccgacctgttctccctggtggctcaaacgtccacctgccccaacctcatcctgtcacccctgagtgtggccctggcgctgtctcacctggcactaggtgctcagaaccacacgttgcagaggctgcaacaggtgctgcacgcaggctcagggccctgcctcccccatctgctgagccgcctctgccaggacctgggccccggcgcgttccgactggctgccaggatgtacctgcagaaaggatttcccatcaaagaagatttcctggaacaatccgaacagctatttggggcaaagcccgtgagcctgacgggaaagcaggaagatgacctggcaaacatcaaccaatgggtgaaggaggccacggaggggaagattcaggaattcctctctgggctgccggaagacaccgtgttgcttctcctcaacgccatccacttccagggtttctggaggaacaagtttgacccgagccttacccagagagactccttccacctggacgagcagttcacggtgcccgtggaaatgatgcaggcccgcacgtacccgctgcgctggttcttgctggagcagcctgagatccaggtggctcatttcccctttaagaacaacatgagctttgtggtccttgtacccacccactttgaatggaacgtgtcccaggtactggccaacctgagttgggacaccctgcacccacctctggtgtgggagaggcccaccaaggtccggctgcctaagctgtatctgaaacaccaaatggacctggtggccaccctcagccagctgggcctgcaggagttgttccaggccccagacctgcgtgggatctccgagcagagcctggtggtgtccggcgtgcagcatcagtccaccctggagctcagcgaggtcggcgtggaggcggcggcggccaccagcattgccatgtcccgcatgtccctgtcctccttcagcgtgaaccgccccttcctcttcttcatcttcgaggacaccacaggccttcccctcttcgtgggcagcgtgaggaaccccaaccccagtgcaccgcgggagctcaaggaacagcaggattccccgggcaacaaggacttcctccagagcctgaaaggcttcccccgcggagacaagcttttcggccctgacttaaaacttgtgccccccatggaggaggattacccccagtttggcagccccaagtgaggggccgtggctgtggcatccagagtccctgcctggaccagcctctccactcatgtgactctttccaaccggctttgtggcactggggcaggggccgggggcagtctgagagaggccattctttcccaacacctcttggggagtttagggtggggggggggcgcggctgggaggagggcaggcatcggggagccgggagcctgaccctcatctttcttccaaacaggctcagagggtgtcctgcaccggggcctgggcaggagggaggtgcttctagttctgccaggagacaggttagctgctccccacgtcagctgggacaccccgacttttgtttaccagagaaaaagggagggggagagggctgcctttggacttgtcccgggacacctaggctagggtggggagagacgggccctggtggtggctcgggaggcgaagcgttgtcctcagccccgcgtggaactcgtgtctggcacagcctggctgtggcctaacctgccgagagtccatcagcctccatcctaccccctgtgccttgtcacgccagacttcccacggctcctcgagatcccaacactgccagcatttcccttccttcctctcctgtctccctcctctgcccgggagctcaggaaccgaggcagggaaggatcccatgagctccttaaggctcttttgtaaggtttttgtagtgatttttatgccacctgaataaagaatgaatgggc

SEQ ID NO: 274478 - DNA, 1619 bp, Artificial Sequence
  derived and/or modified sequence
gggaaataagagagaaaagaagagtaagaagaaatataagagccaccatggcgctcctctggggactgctcgtgctgtcctggtcgtgcctccaaggaccctgttcggtattttcgcccgtgtcagcgatggagcccctcggacgccagcttacgtcggggcctaatcaggaacaagtaagccccttgacactgctgaaactggggaaccaggaacccggagggcagacggcgcttaagtcaccgccaggagtgtgctcgagggacccaactccggaacagacgcataggcttgcacgagccatgatggcctttaccgccgatctgttctccctcgtggcccagacatcgacgtgtcctaacctcatcctctccccgctctcagtagctctcgccctcagccacttggcgcttggcgcccagaaccacactttgcagaggttgcagcaagtccttcatgcggggtcaggaccatgtttgcctcacttgctgtcgcgcctctgccaggatctgggacctggtgcattccggcttgcggccagaatgtatctccaaaaaggtttccccatcaaggaagattttcttgagcagtccgagcagcttttcggcgcaaaaccggtgtcgctgaccgggaaacaagaggacgacctggcgaatatcaatcagtgggtgaaggaagctacagagggtaaaatccaagagtttctttcgggactgccggaagatacagtccttcttctgttgaacgcgattcacttccaagggttttggcgcaacaaatttgacccatccctcacgcagagagacagctttcacctcgacgagcagtttacggtcccggtggaaatgatgcaggcgcggacttatcccttgcgctggttccttctcgagcagcccgaaattcaagtggcacatttccccttcaagaacaatatgtcgtttgtcgtactggtgccaacacacttcgagtggaatgtgagccaagtgctcgccaatctgagctgggatacgttgcatccgccgctcgtatgggaacggcccaccaaagtgcggctgcctaagctctaccttaaacatcagatggaccttgtcgcgactctcagccagttggggcttcaagagttgtttcaggcaccggacttgcggggtattagcgaacagagcctcgtggtgtccggggtccagcaccagtcaaccttggagctctcagaggtcggtgtcgaagcggctgccgcgacctcaattgcgatgtccagaatgtcgctttcgtcgttttcagtcaataggcccttcctgttctttatctttgaagatacgacagggcttccgctctttgtaggctcagtaagaaaccccaacccatcggcaccgcgcgagctcaaggagcaacaggactcgcccggtaacaaggatttcttgcagtccctcaagggattccctcgaggagacaagttgttcggacctgacttgaagttggtcccacccatggaggaggattacccgcagttcgggagcccgaagtgataagctgccttctgcggggcttgccttctggccatgcccttcttctctcccttgcacctgtacctcttggtctttgaataaagcctgagtaggaag

SEQ ID NO: 274479 - RNA, 1619 nt, Artificial Sequence
  derived and/or modified sequence
gggaaauaagagagaaaagaagaguaagaagaaauauaagagccaccauggcgcuccucuggggacugcucgugcuguccuggucgugccuccaaggacccuguucgguauuuucgcccgugucagcgauggagccccucggacgccagcuuacgucggggccuaaucaggaacaaguaagccccuugacacugcugaaacuggggaaccaggaacccggagggcagacggcgcuuaagucaccgccaggagugugcucgagggacccaacuccggaacagacgcauaggcuugcacgagccaugauggccuuuaccgccgaucuguucucccucguggcccagacaucgacguguccuaaccucauccucuccccgcucucaguagcucucgcccucagccacuuggcgcuuggcgcccagaaccacacuuugcagagguugcagcaaguccuucaugcggggucaggaccauguuugccucacuugcugucgcgccucugccaggaucugggaccuggugcauuccggcuugcggccagaauguaucuccaaaaagguuuccccaucaaggaagauuuucuugagcaguccgagcagcuuuucggcgcaaaaccggugucgcugaccgggaaacaagaggacgaccuggcgaauaucaaucagugggugaaggaagcuacagaggguaaaauccaagaguuucuuucgggacugccggaagauacaguccuucuucuguugaacgcgauucacuuccaaggguuuuggcgcaacaaauuugacccaucccucacgcagagagacagcuuucaccucgacgagcaguuuacggucccgguggaaaugaugcaggcgcggacuuaucccuugcgcugguuccuucucgagcagcccgaaauucaaguggcacauuuccccuucaagaacaauaugucguuugucguacuggugccaacacacuucgaguggaaugugagccaagugcucgccaaucugagcugggauacguugcauccgccgcucguaugggaacggcccaccaaagugcggcugccuaagcucuaccuuaaacaucagauggaccuugucgcgacucucagccaguuggggcuucaagaguuguuucaggcaccggacuugcgggguauuagcgaacagagccucgugguguccgggguccagcaccagucaaccuuggagcucucagaggucggugucgaagcggcugccgcgaccucaauugcgauguccagaaugucgcuuucgucguuuucagucaauaggcccuuccuguucuuuaucuuugaagauacgacagggcuuccgcucuuuguaggcucaguaagaaaccccaacccaucggcaccgcgcgagcucaaggagcaacaggacucgcccgguaacaaggauuucuugcagucccucaagggauucccucgaggagacaaguuguucggaccugacuugaaguuggucccacccauggaggaggauuacccgcaguucgggagcccgaagugauaagcugccuucugcggggcuugccuucuggccaugcccuucuucucucccuugcaccuguaccucuuggucuuugaauaaagccugaguaggaag

SEQ ID NO: 274480 - protein, 199 aa, Artificial Sequence
  derived and/or modified sequence
MSLHYGCCCPECTSVAIKEMMWVIRPRVACVVKDAGSAGERISAPEREIYCHYCNQMIPENKYFHHMGKCCPDSEFKKHFPVGNPEILPSSLPSQAAENQTSTMEKDVRPKTRSINRFPLHSESSSKKAPRSKNKTLDPLLMSEPKPRTSSPRGDKAAYDILRRCSQCGILLPLPILNQHQEKCRWLASSKGKQVRNFS

SEQ ID NO: 274481 - DNA, 600 bp, Artificial Sequence
  derived and/or modified sequence
atgagcctgcactacggctgctgctgccccgagtgcaccagcgtggccatcaaggagatgatgtgggtgatcagacccagagtggcctgcgtggtgaaggacgccggcagcgccggcgagagaatcagcgcccccgagagagagatctactgccactactgcaaccagatgatccccgagaacaagtacttccaccacatgggcaagtgctgccccgacagcgagttcaagaagcacttccccgtgggcaaccccgagatcctgcccagcagcctgcccagccaggccgccgagaaccagaccagcaccatggagaaggacgtgagacccaagaccagaagcatcaacagattccccctgcacagcgagagcagcagcaagaaggcccccagaagcaagaacaagaccctggaccccctgctgatgagcgagcccaagcccagaaccagcagccccagaggcgacaaggccgcctacgacatcctgagaagatgcagccagtgcggcatcctgctgcccctgcccatcctgaaccagcaccaggagaagtgcagatggctggccagcagcaagggcaagcaggtgagaaacttcagctag

SEQ ID NO: 274482 - DNA, 600 bp, Artificial Sequence
  derived and/or modified sequence
atgtccttgcattacggttgctgctgtcccgaatgcacctccgtggcgatcaaagagatgatgtgggtgattaggcctcgggtggcctgtgttgtgaaagatgccggcagtgcaggcgaacggatttcagccccagaaagagagatatactgtcattattgtaatcaaatgatccctgagaataagtactttcaccatatggggaagtgctgtcctgattctgagtttaaaaagcacttccctgttgggaatcctgagattcttcccagcagtctaccctcacaggccgccgagaatcaaacttccactatggaaaaggacgtacggccaaagaccaggtctattaaccgatttccacttcactctgagagctctagcaaaaaggccccccgcagtaaaaataagaccctggaccctctgctgatgagcgagcccaaacctaggacatcttcaccgagaggcgataaagccgcttatgatatcctcagacggtgtagccagtgtgggattttgcttcctctgcccattctgaaccagcatcaggaaaagtgccggtggcttgcctccagcaaaggcaagcaagtgcggaatttctcttag

SEQ ID NO: 274483 - DNA, 600 bp, Artificial Sequence
  derived and/or modified sequence
atgagcctgcactacggctgctgctgcccagaatgtacctctgtggccatcaaggagatgatgtgggtgatccggccccgggtggcctgtgtggtgaaggatgctggcagcgctggggagcgcatcagcgcccctgagcgggagatctactgccactactgcaaccagatgatccctgagaacaagtacttccaccacatgggcaagtgctgcccagacagcgagttcaagaagcacttccctgtgggcaaccctgagatcctgcccagcagcctgcccagccaggccgctgagaaccagaccagcaccatggagaaggatgtgcggcccaagaccaggagcatcaaccgcttccccctgcacagcgagagcagcagcaagaaggcccccaggagcaagaacaagaccctggaccccctgctgatgtctgagcccaagcccaggaccagcagccccaggggggacaaggccgcctatgacatcctgcggcgctgcagccagtgtggcatcctgctgcccctgcccatcctgaaccagcaccaggagaagtgccgctggctggccagcagcaagggcaagcaggtgaggaacttctcctag

SEQ ID NO: 274484 - DNA, 600 bp, Artificial Sequence
  derived and/or modified sequence
atgagcctgcactacggctgctgctgccccgagtgcaccagcgtggctataaaggagatgatgtgggtgatccgcccacgggtggcctgcgtagtgaaagacgccggcagtgcaggggagagaatcagcgctcccgagcgcgagatttattgtcattactgcaatcagatgattccggaaaacaaatactttcatcatatgggaaaatgctgcccagacagcgagttcaaaaagcacttcccagttgggaatccggagatactgccttcaagccttcctagtcaggctgctgagaaccaaacatccacaatggagaaggacgttcgccctaaaacccgcagcatcaacaggttcccattgcactcagaatcatcctccaaaaaagcaccgcggtctaaaaataagaccctggaccctctgctcatgtctgagccaaagcccagaactagttctcctcggggtgacaaggcagcatacgacatattacgcaggtgctcacagtgcggtatcctgctgcccctccctatcctcaatcagcaccaggaaaagtgccggtggctggccagctcgaaaggcaagcaagttcgtaatttctcatag

SEQ ID NO: 274485 - DNA, 600 bp, Artificial Sequence
  derived and/or modified sequence
atgagtctacactacggctgttgttgtcccgaatgtacaagcgtcgctattaaagaaatgatgtgggtgatccgaccgagggtggcctgcgtggtgaaggatgctggaagtgccggagaacggatcagcgcccctgaaagagaaatatattgccattactgtaaccagatgatccccgagaataagtacttccaccatatgggtaagtgctgtccggattccgaattcaagaagcactttcctgttggaaatccggagattctgccctcatcgctacctagtcaggctgcagaaaatcagacttctacaatggaaaaggatgtccggcctaagacccggtcgataaatcggttcccactgcattcagaatccagctcgaagaaagctcctagatctaagaacaagacactcgaccccctgctcatgtctgagcctaaacctcggacttcatcacctaggggcgataaagccgcatacgacattctgcgcaggtgttcccagtgtggcatacttctacctctacctatactgaaccagcaccaggagaaatgtaggtggttggcctcctccaaaggtaaacaggtccgcaatttttcgtag

SEQ ID NO: 274486 - DNA, 3074 bp, Artificial Sequence
  derived and/or modified sequence
atgtctctccattacggttgctgctgccctgagtgcacatctgtggccataaaggaaatgatgtgggtgattcggccaagagttgcctgtgtggtcaaggatgccggcagcgcaggggaaagaatttcagctcctgaaagggaaatctactgtcattattgcaaccaaatgattccagaaaataagtatttccaccatatgggtaaatgttgtccagactcagagtttaagaaacactttcctgttggaaatccagaaattcttccttcatctcttccaagtcaagctgctgaaaatcaaacttccacgatggagaaagatgttcgtccaaagacaagaagtataaacagatttcctcttcattctgaaagttcatcaaagaaagcaccaagaagcaaaaacaaaaccttggatccacttttgatgtcagagcccaagcccaggaccagctcccctagaggagataaagcagcctatgacattctgaggagatgttctcagtgtggcatcctgcttcccctgccgatcctaaatcaacatcaggagaaatgccggtggttagcttcatcaaaaggaaaacaagtgagaaatttcagctagatttggaaaaggaaaggtactacaaattcaaaagatttcacttttaacactggcattcctgcctacttgctgtggtggtcttgtgaaaggtgatgggttttattcgttgggctttaaaagaaaaggtttggcagaactaaaaacaaaactcacgtatcatctcaatagatacagaaaaggcttttgataaaattcaacttgacttcatgttaaaaaccctcaacaaaccaggcgtcgaaggaacatacctcaaaataataagagccatctatgacaaaaccacagccaacatcatactgaatgagcaaaagctggagcattactcttgagaagtagaacaaggcacttcagtcctattcaacatagtactggaagtcctcgccacagcaatcaggcaagagaaagaaataaaaggcaaccaaaaagaaaggaagtcgaagtatctctgtttgcagacgatatgattctatatctagaaaaccccatgatcttggcccaaaagctcctagatctgataaacaacttcagctaactttcaggagacaaaatcaatatacaaaatatggtagcatttttatacaccaacgacatccaagctgagagccaaatcaagaatgcaatcctattcacaattgccacaaaaagaataaaatacctaggaatacagctaaccagggagatgaaagatctctacaacaaaaattacaaaacactgctgaaagaaatcagagatgacacaaatggaaaaacattccatacttatggataggaagaatcaatattgttaaaatggccatactacccaaagcaatttatagattcaatgctattcctatcaaactaccaataacattcttcacagaatcagaaaaaaaaagcattaaaatttatttgaaaccaaaaaagagcccaaaaagccaaagcaatcctaagcaaaaagaacaaagctggaggcatcgcattacccaacttcaaactatactacagggctacagtaaccaaaactgcatgatactggtacaaaagcatggtgctggtacaaaagcagacacatagatcaatggaacagaatagagggcccagaaataaagctacacacctacaaccatctaatctttgacaaagttgacaaaaatacgcaatggggaaagaattccccattcagtaagtggtactgggataactagctagccatatgcagaggattgaaactgaaccacttccttacaccatatgcaaaaatcaactcaagatggattaaagacttaaatgtaaaaccccaaactataaaaactctggaagataacctaggcaataccattctggacataggaacggaaaaagatttcatgacaaagatcccaaaaataattgtaacgaaagcaaaaattgacaaatgggacatgattaaacagaattaccatttgactcagcaatcccattattggttatatacccaaaggaatctaaatcattctgtcataaagacatatatacacaaatgttcacggcagcactatacacaatcgcaaagtcagggaatcaaactaaatgtccatcagtggtagaaaggataaagaaaatgtggtggcagggagtggtggctcatgtctgtaatcccagcactttgggaggctgaggcgggtggttcacctgaggtcaggagtttgagaccagcctggccaacatggagaaactccgtctccgctaaaaatacgaaaattagccaggcgtggtggcgagcacctgtcatcccagctacttgggaggcctaggcgtgagaatcgcttgaacctggaaggtggtggttgcagtgagccgagatcctgccactgcactccagcctgggcaaccaagcgagactctgccttaaaaaaaaaaaaaagaaaatgtggcacatatacaccatggaatactatgcagccataaaaaagaatgggatcatgtcctgtgcagcaacgtggatggagctggaagccattatcctaaatgaactcactcagaaacagaaaaccaaataccacatgttctcacttataagtagaagctaaacattgagtacacatggatacaaagaagggaaccgcagacactggggcctacctgaggtcggagcatggaaggagggtgaggatcaaaaaactacctatctggtactatgctttttatctggatgatgaaataatctgtacaacaaaccctggtgacatgcaatttacctatatagcaagcctacacatgtgcccctgaacctaaaaaaaaagttaaaagaaaaacgtttggattattttccctctttcgaacaaagacattggtttgcccaaggactacaaataaaccaacgggaaaaaagaaaggttccagttttgtctgaaaattctgattaagcctctgggccctacagcctggagaacctggagaatcctacacccacagaacccggctttgtccccaaagaataaaaacacctctct

SEQ ID NO: 274487 - protein, 369 aa, Artificial Sequence
  derived and/or modified sequence
MFCVTPPELETKMNITKGGLVLFSANSNSSCMELSKKIAERLGVEMGKVQVYQEPNRETRVQIQESVRGKDVFIIQTVSKDVNTTIMELLIMVYACKTSCAKSIIGVIPYFPYSKQCKMRKRGSIVSKLLASMMCKAGLTHLITMDLHQKEIQGFFNIPVDNLRASPFLLQYIQEEIPDYRNAVIVAKSPASAKRAQSFAERLRLGIAVIHGEAQDAESDLVDGRHSPPMVRSVAAIHPSLEIPMLIPKEKPPITVVGDVGGRIAIIVDDIIDDVDSFLAAAETLKERGAYKIFVMATHGLLSSDAPRRIEESAIDEVVVTNTIPHEVQKLQCPKIKTVDISMILSEAIRRIHNGESMSYLFRNIGLDD

SEQ ID NO: 274488 - protein, 268 aa, Artificial Sequence
  derived and/or modified sequence
MFCVTPPELETKMNITKGGLVLFSANSNSSCMELSKKIAERLGVEMGKVQVYQEPNRETRVQIQESVRGKDVFIIQTVSKDVNTTIMELLIMVYACKTSCAKSIIGVIPYFPYSKQCKMRKRGSIVSKLLASMMCKAGLTHLITMDLHQKEIQGFFNIPVDNLRASPFLLQYIQEEIPDYRNAVIVAKSPASAKRAQSFAERLRLGIAVIHGEAQDAESDLVDGRHSPPMVRSVAAIHPSLEIPMLIPKEKPPITVVGDVGGRIAIIV

SEQ ID NO: 274489 - protein, 194 aa, Artificial Sequence
  derived and/or modified sequence
MFCVTPPELETKMNITKGGLVLFSANSNSSCMELSKKIAERLGVEMGKVQVYQEPNRETRVQIQESVRGKDVFIIQTVSKDVNTTIMELLIMVYACKTSCAKSIIGVIPYFPYSKQCKMRKRGSIVSKLLASMMCKAGLTHLITMDLHQKEIQGFFNIPVDNLRASPFLLQYIQEEIPDYRNAVIVAKSPASAK

SEQ ID NO: 274490 - protein, 176 aa, Artificial Sequence
  derived and/or modified sequence
MFCVTPPELETKMNITKGGLVLFSANSNSSCMELSKKIAERLGVEMGKVQVYQEPNRETRVQIQESVRGKDVFIIQTVSKDVNTTIMELLIMVYACKTSCAKSIIGVIPYFPYSKQCKMRKRGSIVSKLLASMMCKAGLTHLITMDLHQKEIQGFFNIPVDNLRASPFLLQYIQEE

SEQ ID NO: 274491 - protein, 244 aa, Artificial Sequence
  derived and/or modified sequence
MFCVTPPELETKMNITKGGLVLFSANSNSSCMELSKKIAERLGVEMGKVQVYQEPNRETRVQIQESVRGKDVFIIQTVSKDVNTTIMELLIMVYACKTSCAKSIIGVIPYFPYSKQCKMRKRGSIVSKLLASMMCKAGLTHLITMDLHQKEIQGFFNIPVDNLRASPFLLQYIQEEIPDYRNAVIVAKSPASAKRAQSFAERLRLGIAVIHGEAQDAESDLVDGRHSPPMVRSVAAIHPSLEIP

SEQ ID NO: 274492 - protein, 140 aa, Artificial Sequence
  derived and/or modified sequence
MFCVTPPELETKMNITKGGLVLFSANSNSSCMELSKKIAERLGVEMGKVQVYQEPNRETRVQIQESVRGKDVFIIQTVSKDVNTTIMELLIMVYACKTSCAKSIIGVIPYFPYSKQCKMRKRGSIVSKLLASMMCKAGLT

SEQ ID NO: 274493 - protein, 283 aa, Artificial Sequence
  derived and/or modified sequence
MELLIMVYACKTSCAKSIIGVIPYFPYSKQCKMRKRGSIVSKLLASMMCKAGLTHLITMDLHQKEIQGFFNIPVDNLRASPFLLQYIQEEIPDYRNAVIVAKSPASAKRAQSFAERLRLGIAVIHGEAQDAESDLVDGRHSPPMVRSVAAIHPSLEIPMLIPKEKPPITVVGDVGGRIAIIVDDIIDDVDSFLAAAETLKERGAYKIFVMATHGLLSSDAPRRIEESAIDEVVVTNTIPHEVQKLQCPKIKTVDISMILSEAIRRIHNGESMSYLFRNIGLDD

SEQ ID NO: 274494 - DNA, 1110 bp, Artificial Sequence
  derived and/or modified sequence
atgttttgcgtcaccccaccagagctcgagaccaagatgaacatcacaaaaggaggcctggtcctgttttcagcgaacagcaacagtagttgcatggagctttcgaagaagatagctgaaaggctgggtgtggagatgggaaaagtgcaagtataccaggagcccaatcgggagacccgcgtgcagatacaggaatcagtgagaggaaaagatgtgtttattatacagaccgttagcaaagatgtgaataccaccatcatggaactgttgatcatggtgtatgcctgcaaaacatcttgcgccaagagcattatcggggtcatcccctactttccttacagcaaacagtgcaaaatgaggaaacggggttccatagtttctaagctgttagcttccatgatgtgcaaagcaggcttaacacacctgattacaatggacctgcaccaaaaagagattcaggggtttttcaacatccccgtcgataatctgagggcaagccccttcctgctgcagtacatccaagaagagattcctgactaccggaacgccgttatcgtcgctaagtccccagcatcagccaagcgagctcagtcttttgccgagcggttaaggctggggattgccgttattcacggagaagcccaagacgcagagagcgatctggtcgatgggagacactcccctccaatggtcaggtctgtggcagcaattcaccctagcctcgagatcccaatgctgataccaaaagaaaaacccccaattacagttgttggtgacgtgggcggaaggatcgctattatagttgatgatataatcgacgacgtggacagctttctcgccgccgcagaaactctgaaggaaagaggcgcatacaaaatctttgtgatggccactcacggccttctatcttcagacgcgccgcgacgaattgaggagagcgctatcgatgaagtggtagtgaccaacacaatcccgcacgaagtgcagaagcttcaatgcccaaagattaaaacggtagatatttctatgattctgtccgaggccattcggcgcattcacaatggtgagtcaatgtcctatctcttccggaatatagggctggacgactag

SEQ ID NO: 274495 - DNA, 1110 bp, Artificial Sequence
  derived and/or modified sequence
atgttttgtgtgactccgcctgagctcgagaccaagatgaacatcaccaaaggcggactggtgcttttcagcgccaattccaactcttcttgcatggagcttagcaagaagatcgctgagagactgggcgttgagatgggcaaggttcaggtgtatcaagaacctaatcgggaaacgcgggtgcagatacaggagtctgtgcgcggaaaggatgtgttcattattcagactgtatccaaggatgtaaacacaacaatcatggaactgctgatcatggtctatgcctgtaaaacgtcgtgtgccaaaagcattatcggagtgattccttacttcccctattctaagcagtgcaaaatgcgcaagcgtggatccatagtcagcaagctgctcgcttccatgatgtgcaaggccgggttgacccatctgattactatggaccttcatcagaaagaaatccagggtttctttaatattcccgttgacaacctaagggcttctccttttctgctgcagtacatacaggaggagattcctgattatcggaatgctgtgattgtggctaagagccccgcctccgctaagcgagcacagtcattcgctgaacgcctgaggttgggtattgctgttatccacggcgaggcccaggatgccgagtccgatctggtggacggtcgccacagtccccctatggtgcggagcgtcgctgcgattcatccttcactggaaattcccatgctgatccccaaggagaaaccgcctataactgtcgtgggggacgtaggcggtaggattgccattatcgttgatgatattatcgacgatgtcgacagcttcctagcagccgcagagacattaaaagagagaggggcctacaaaatttttgttatggcaactcacggcctcctaagtagtgacgcaccacggcgaatagaagagagcgcgatagacgaggttgtcgtcacaaataccatcccccacgaggttcagaaactccagtgccccaagatcaaaaccgtggatatttcaatgattctctcagaggccattagacgaatccacaacggcgagagcatgagctacttgttccgaaacatcggccttgacgactag

SEQ ID NO: 274496 - DNA, 1110 bp, Artificial Sequence
  derived and/or modified sequence
atgttctgtgtgaccccacctgagctggagaccaagatgaacatcaccaagggcggcctggtgctcttcagcgccaacagcaacagcagctgcatggagctgagcaagaagattgctgagcggctgggcgtggagatgggcaaggtgcaggtgtaccaggagcccaaccgggagaccagggtgcagatccaggagagcgtgcggggcaaggatgtgttcatcatccagacagtgtccaaggatgtgaacaccaccatcatggagctgctgatcatggtgtatgcctgcaagaccagctgtgccaagagcatcattggagtcatcccctacttcccctacagcaagcagtgcaagatgaggaagaggggcagcatcgtgtccaagctgctggcctccatgatgtgcaaggccggcctgacccacctgatcaccatggacctgcaccagaaggagatccagggcttcttcaacatccctgtggacaacctgcgggccagccccttcctgctgcagtacatccaggaggagatcccagactacagaaatgctgtgattgtggccaagagccctgccagcgccaagagggcccagagctttgctgagcggctgcggctgggcattgctgtgattcatggagaggcccaggatgctgagagtgacctggtggatggccgccacagcccccccatggtgcgctctgtggccgccatccaccccagcctggagatccccatgctgatccccaaggagaagccacccatcaccgtggtgggagatgtgggcggccgcatcgccatcatcgtggatgacatcattgatgatgtggacagcttcctggccgctgctgagaccctgaaggagcggggggcctacaagatctttgtgatggccacccacggcctgctgagcagtgatgccccccggcgcatcgaggagagcgccattgatgaggtggtggtgaccaacaccatcccccatgaggtgcagaagctgcagtgccccaagatcaagacagtggacatctccatgatcctgtctgaggccatccgccgcatccacaacggggagagcatgagctacctgttcagaaatattggcctggatgactag

SEQ ID NO: 274497 - DNA, 1110 bp, Artificial Sequence
  derived and/or modified sequence
atgttctgcgtgaccccccccgagctggagaccaagatgaacatcaccaaaggcggattggtgctgttcagtgctaatagtaattcatcctgtatggaactgtccaaaaaaattgcggagcgtttaggggtcgagatggggaaagtgcaggtctaccaagagccaaaccgagaaacgcgtgtgcagatccaggaaagcgtgcggggtaaagatgtattcataatccaaaccgtctccaaagacgtaaatacgaccattatggaacttctgatcatggtctacgcatgcaaaactagctgcgctaaaagtattattggagtgatcccctacttcccctacagtaagcagtgcaaaatgcgcaaacgcggttccatcgttagcaagttgttagcgagcatgatgtgcaaggctggtttaacccaccttattacgatggacctgcatcaaaaggagattcagggcttttttaatatcccagttgacaatctcagggccagccccttcttgcttcagtatatccaggaagagattccggactatcgtaatgcggtaatcgtggccaagtctcctgcaagtgcgaagcgcgctcagtcctttgcagagcggctgagactggggatcgccgtgatccacggagaggctcaagacgccgaatcagatctggtcgacgggcggcactcccccccaatggtccgtagtgtagctgccattcacccttctttagagataccaatgctgattcccaaggagaaaccacctatcacggtggtgggagacgtcggaggtcgtattgcaatcatagtcgacgatatcattgatgacgtcgactcgttcttagcagcagccgaaacactcaaggagagaggtgcttacaagatcttcgtcatggcgactcatggtctgctgagctccgacgctcctagaagaatcgaggaaagcgccatcgatgaagtagtggtgaccaatacaattcctcacgaggtccaaaagctgcagtgccccaagatcaagactgtggatatctctatgattttgagcgaggcaatcagacgcatccataacggggagagtatgagttacctcttcagaaacatcggactggacgattag

SEQ ID NO: 274498 - DNA, 1110 bp, Artificial Sequence
  derived and/or modified sequence
atgttctgcgtgaccccccccgagctggagaccaagatgaacatcacaaaaggtggcttggtactcttcagtgccaacagcaattcatcatgcatggagctctccaagaagatcgccgaacgccttggagtcgagatgggaaaggtgcaggtctatcaggagcccaatcgggagacgcgcgtgcaaatccaagagagcgtaaggggaaaggatgtctttatcatacaaaccgtgagcaaagatgtgaacacaaccatcatggagctgctgattatggtgtatgcatgcaagacctcatgtgccaaatcaatcatcggggttattccctatttcccatacagtaagcagtgcaagatgaggaagcgtggctcgatcgtgtctaagctcctggcctcgatgatgtgtaaggcaggattgacgcacttgataaccatggacctacatcaaaaagagattcaaggatttttcaatattccggtggataacctcagggcttccccattcttgctccagtatatccaagaagaaatccctgattatcggaatgctgtgatcgttgctaagtctcctgcttcggctaagcgcgcccagtcctttgccgagagactccgtctcggaatcgcagtcattcacggagaggctcaggacgccgagtccgacctagtagacggccgccattccccaccgatggtcagatcagttgccgctatccatcccagtctcgagatccccatgctgatccccaaagagaaaccccccattaccgttgtcggtgacgtcggtgggaggattgccattatagtagatgacatcattgatgatgttgattcattccttgcagccgcagaaactctgaaggagaggggggcctataaaatcttcgtcatggctacccacgggctactttcatcagacgccccccgccggatcgaggaaagtgcaattgacgaagtggtggtgaccaataccatcccacacgaggtgcaaaagctacaatgcccaaagatcaaaactgtggacatttcgatgatcctaagtgaagctatccgcagaattcataatggagagagtatgagttacctgtttagaaatatcggacttgacgattag

SEQ ID NO: 274499 - DNA, 1890 bp, Artificial Sequence
  derived and/or modified sequence
ctagagaggccgccaggagacccggcgctttcttccttctgcagctgaggctgcggcggggccggggctggggtcggggccaggaggaattttgttgtcagagaataaaaggaggttgtccataattgactttaagcagcaatcagtaaaacattgagctcttcagctccgcctttcttgctctgaaaattggaaaaccaagaaggttttgatgttttgtgtgacgccacctgaattagaaaccaagatgaacataaccaaaggtggtctggtgttgttttcagcaaactcgaattcatcatgtatggagctatcaaagaaaattgcagagcggctaggggtggagatgggcaaagtgcaggtttaccaggaacctaacagagaaacaagagtacaaattcaagagtctgtgaggggaaaagatgttttcatcatccaaactgtttcgaaggacgtgaacaccaccatcatggagctcctgatcatggtgtatgcatgtaagacctcttgtgccaagagcatcattggcgtgataccctactttccttacagcaagcagtgcaagatgagaaaaagaggctccattgtctctaaattgctggcttccatgatgtgcaaagctggtctaactcatcttattactatggatttacaccagaaggaaattcagggcttcttcaatattcctgttgacaatttaagagcatctcccttcttattacagtatattcaagaagagatcccagattacaggaatgcagtaatcgtggccaagtctccagcctcggcgaagagggcacagtcttttgctgagcgcctgcgcctgggaattgcagtgattcatggagaggcgcaggatgccgagtcggacttggtggatggacggcattccccacccatggtcagaagtgtggctgccatccaccccagcctggagatccccatgctgattcctaaagaaaagcccccaatcacggttgtgggtgatgttggaggaaggattgccatcatcgtggatgacatcattgatgatgttgacagctttcttgctgcagcagagaccctgaaggaaagaggtgcatataagatctttgtgatggcaactcatggcttgttgtcttctgacgccccccggcggattgaagagtctgccattgatgaggtggtggtcaccaatacaattccacatgaagtccagaagctccagtgccccaagattaaaactgtggatatcagcatgatcctttcagaggcgatccgtcggatccacaatggggagtccatgtcctaccttttcagaaacataggcttagatgactgagttttcctttaggaaaactcccgagggccaaactggaaacataagagtgactgctcggtgggatggatttcacaggaaccgtcatgcttgttcctccctctcccctgtaacctcacttcttattgattcctaagaagatagaccaactttttatgtcggtttgggtgtttgtgagtttggggagcaatttttataaaagaaaaactttattctcctcttttgaaaaggtaagacctcgttttagttgtaactgtttaaaaaataacacttggaataagatttgtaagctcacaaagccttcttccaaagttgcttgagccaagtgcttaaaaagttaataaaataaaatgatctgtatgatacctgcaattgaaaagccgaaaagattatactgtcaagtccagtaaatgacatttttagagatgcttttgtagacaagcatatggaatatgtgattgtatttattttctgcaactaaaaaaggaataaaaacttgtgtttgtgtgtttttctaaaactttgtgttttggcaatcgttttataactaaaataaaatgaaagctaaatct

SEQ ID NO: 274500 - DNA, 2092 bp, Artificial Sequence
  derived and/or modified sequence
gccagccacagcagagaggtgggggttgtgaccggagttagatgccagcgcagaagggacgtgagcccagccgaggtaccgctgaagaggaatcaattttggtatgcagataatcactgggctcatgggtcttgctctttacaaagagaattcagcggggtgccaagtcgttttctgtgtgggttgagagacaggctgtgcagcccactgttgcataggactaactactacaaatcatgctgagaccgagctatttttgctgcttagaggctttgcagccttgagaggaattttgttgtcagagaataaaaggaggttgtccataattgactttaagcagcaatcagtaaaacattgagctcttcagctccgcctttcttgctctgaaaattggaaaaccaagaaggttttgatgttttgtgtgacgccacctgaattagaaaccaagatgaacataaccaaaggtggtctggtgttgttttcagcaaactcgaattcatcatgtatggagctatcaaagaaaattgcagagcggctaggggtggagatgggcaaagtgcaggtttaccaggaacctaacagagaaacaagagtacaaattcaagagtctgtgaggggaaaagatgttttcatcatccaaactgtttcgaaggacgtgaacaccaccatcatggagctcctgatcatggtgtatgcatgtaagacctcttgtgccaagagcatcattggcgtgataccctactttccttacagcaagcagtgcaagatgagaaaaagaggctccattgtctctaaattgctggcttccatgatgtgcaaagctggtctaactcatcttattactatggatttacaccagaaggaaattcagggcttcttcaatattcctgttgacaatttaagagcatctcccttcttattacagtatattcaagaagagatcccagattacaggaatgcagtaatcgtggccaagtctccagcctcggcgaagagggcacagtcttttgctgagcgcctgcgcctgggaattgcagtgattcatggagaggcgcaggatgccgagtcggacttggtggatggacggcattccccacccatggtcagaagtgtggctgccatccaccccagcctggagatccccatgctgattcctaaagaaaagcccccaatcacggttgtgggtgatgttggaggaaggattgccatcatcgtggatgacatcattgatgatgttgacagctttcttgctgcagcagagaccctgaaggaaagaggtgcatataagatctttgtgatggcaactcatggcttgttgtcttctgacgccccccggcggattgaagagtctgccattgatgaggtggtggtcaccaatacaattccacatgaagtccagaagctccagtgccccaagattaaaactgtggatatcagcatgatcctttcagaggcgatccgtcggatccacaatggggagtccatgtcctaccttttcagaaacataggcttagatgactgagttttcctttaggaaaactcccgagggccaaactggaaacataagagtgactgctcggtgggatggatttcacaggaaccgtcatgcttgttcctccctctcccctgtaacctcacttcttattgattcctaagaagatagaccaactttttatgtcggtttgggtgtttgtgagtttggggagcaatttttataaaagaaaaactttattctcctcttttgaaaaggtaagacctcgttttagttgtaactgtttaaaaaataacacttggaataagatttgtaagctcacaaagccttcttccaaagttgcttgagccaagtgcttaaaaagttaataaaataaaatgatctgtatgatacctgcaattgaaaagccgaaaagattatactgtcaagtccagtaaatgacatttttagagatgcttttgtagacaagcatatggaatatgtgattgtatttattttctgcaactaaaaaaggaataaaaacttgtgtttgtgtgtttttctaaaactttgtgttttggcaatcgttttataactaaaataaaatgaaagctaaatcta

SEQ ID NO: 274501 - DNA, 1494 bp, Artificial Sequence
  derived and/or modified sequence
agaggccgccaggagacccggcgctttcttccttctgcagctgaggctgcggcggggccggggctggggtcggggccaggctctgaaaattggaaaaccaagaaggttttgatgttttgtgtgacgccacctgaattagaaaccaagatgaacataaccaaaggtggtctggtgttgttttcagcaaactcgaattcatcatgtatggagctatcaaagaaaattgcagaaaacaagagtacaaattcaagagtctgtgaggggaaaagatgttttcatcatccaaactgtttcgaaggacgtgaacaccaccatcatggagctcctgatcatggtgtatgcatgtaagacctcttgtgccaagagcatcattggcgtgataccctactttccttacagcaagcagtgcaagatgagaaaaagaggctccattgtctctaaattgctggcttccatgatgtgcaaagctggtctaactcatcttattactatggatttacaccagaaggaaattcagggcttcttcaatattcctgttgacaatttaagagcatctcccttcttattacagtatattcaagaagagatcccagattacaggaatgcagtaatcgtggccaagtctccagcctcggcgaagagggcacagtcttttgctgagcgcctgcgcctgggaattgcagtgattcatggagaggcgcaggatgccgagtcggacttggtggatggacggcattccccacccatggtcagaagtgtggctgccatccaccccagcctggagatccccatgctgattcctaaagaaaagcccccaatcacggttgtgggtgatgttggaggaaggattgccatcatcgtggatgacatcattgatgatgttgacagctttcttgctgcagcagagaccctgaaggaaagaggtgcatataagatctttgtgatggcaactcatggcttgttgtcttctgacgccccccggcggattgaagagtctgccattgatgaggtggtggtcaccaatacaattccacatgaagtccagaagctccagtgccccaagattaaaactgtggatatcagcatgatcctttcagaggcgatccgtcggatccacaatggggagtccatgtcctaccttttcagaaacataggcttagatgactgagttttcctttaggaaaactcccgagggccaaactggaaacataagagtgactgctcggtgggatggatttcacaggaaccgtcatgcttgttcctccctctcccctgtaacctcacttcttattgattcctaagaagatagaccaactttttatgtcggtttgggtgtttgtgagtttggggagcaatttttataaaagaaaaactttattctcctcttttgaaaaggtaagacctcgttttagttgtaactgtttaaaaaataacacttggaataagatttgtaagctcacaaagccttcttccaaagttgcttgagccaagtgc

SEQ ID NO: 274502 - DNA, 1835 bp, Artificial Sequence
  derived and/or modified sequence
ggggttgtgaccggagttagatgccagcgcagaagggacgtgagcccagccgaggtaccgctgaagaggaatcaattttggaggaattttgttgtcagagaataaaaggaggttgtccataattgactttaagcagcaatcagtaaaacattgagctcttcagctccgcctttcttgctctgaaaattggaaaaccaagaaggttttgatgttttgtgtgacgccacctgaattagaaaccaagatgaacataaccaaaggtggtctggtgttgttttcagcaaactcgaattcatcatgtatggagctatcaaagaaaattgcagaaaacaagagtacaaattcaagagtctgtgaggggaaaagatgttttcatcatccaaactgtttcgaaggacgtgaacaccaccatcatggagctcctgatcatggtgtatgcatgtaagacctcttgtgccaagagcatcattggcgtgataccctactttccttacagcaagcagtgcaagatgagaaaaagaggctccattgtctctaaattgctggcttccatgatgtgcaaagctggtctaactcatcttattactatggatttacaccagaaggaaattcagggcttcttcaatattcctgttgacaatttaagagcatctcccttcttattacagtatattcaagaagagatcccagattacaggaatgcagtaatcgtggccaagtctccagcctcggcgaagagggcacagtcttttgctgagcgcctgcgcctgggaattgcagtgattcatggagaggcgcaggatgccgagtcggacttggtggatggacggcattccccacccatggtcagaagtgtggctgccatccaccccagcctggagatccccatgctgattcctaaagaaaagcccccaatcacggttgtgggtgatgttggaggaaggattgccatcatcgtggatgacatcattgatgatgttgacagctttcttgctgcagcagagaccctgaaggaaagaggtgcatataagatctttgtgatggcaactcatggcttgttgtcttctgacgccccccggcggattgaagagtctgccattgatgaggtggtggtcaccaatacaattccacatgaagtccagaagctccagtgccccaagattaaaactgtggatatcagcatgatcctttcagaggcgatccgtcggatccacaatggggagtccatgtcctaccttttcagaaacataggcttagatgactgagttttcctttaggaaaactcccgagggccaaactggaaacataagagtgactgctcggtgggatggatttcacaggaaccgtcatgcttgttcctccctctcccctgtaacctcacttcttattgattcctaagaagatagaccaactttttatgtcggtttgggtgtttgtgagtttggggagcaatttttataaaagaaaaactttattctcctcttttgaaaaggtaagacctcgttttagttgtaactgtttaaaaaataacacttggaataagatttgtaagctcacaaagccttcttccaaagttgcttgagccaagtgcttaaaaagttaataaaataaaatgatctgtatgatacctgcaattgaaaagccgaaaagattatactgtcaagtccagtaaatgacatttttagagatgcttttgtagacaagcatatggaatatgtgattgtatttattttctgcaactaaaaaaggaataaaaacttgtgtttgtgtgtttttctaaaactttgtgttttggcaatcgttttataactaaaataaaatgaaagctaaatcta

SEQ ID NO: 274503 - DNA, 1110 bp, Artificial Sequence
  derived and/or modified sequence
atgttctgtgtgacaccaccagaacttgaaaccaagatgaacataactaagggcggactcgtgctgttctccgcaaacagtaattcatcatgtatggagctctccaaaaaaattgcggagcgcttgggcgttgagatggggaaagtgcaggtatatcaggagccgaacagagagacgagagtgcaaatacaagaaagtgtgcgaggtaaagatgtatttataatccaaacggtcagtaaagacgttaataccacgatcatggaattgcttattatggtgtacgcatgcaagacgtcctgtgctaaatctattattggcgtgatcccttatttcccctactctaagcagtgcaagatgcgcaaaagaggatctatcgtgtcaaagctactcgcgtctatgatgtgtaaggcaggtcttactcacctcatcacaatggatttacaccaaaaggagatccaaggtttcttcaacattcccgtagataacctgagggcctcgcccttcttgctgcaatacattcaggaggaaattcccgactacaggaacgccgtgatagtggctaagtctcctgcaagtgctaaacgcgcacagagtttcgctgagcgtttaaggctaggaatcgccgttattcacggagaggctcaggacgccgagagcgatctggtggatgggaggcacagcccccctatggtgagatctgttgctgctatccatcccagtctggagatccccatgctgatccccaaggaaaaaccaccaataaccgtcgttggggatgtggggggaagaatcgccattatcgtagatgacatcatcgacgatgtcgattccttccttgccgcagcagaaaccctgaaggaacgcggtgcctataagattttcgtgatggccactcacggtctgcttagtagtgatgctccaagaagaatcgaggagagtgctatagacgaagtagtcgtgactaacactatccctcacgaagtccagaagcttcagtgccctaagatcaagaccgtcgacattagcatgatactgagcgaggcgatcaggaggatccataacggtgagtccatgtcctacttgtttcgcaacatcggcctcgacgattag

SEQ ID NO: 274504 - DNA, 1110 bp, Artificial Sequence
  derived and/or modified sequence
atgttctgtgtgacccctccagaactggagacaaaaatgaacattacaaaagggggtttggtgctgttctccgcaaacagcaatagcagctgcatggagcttagcaagaagatcgcggaacgcttaggcgtcgagatgggcaaagtccaggtttaccaggaacccaaccgggagacacgggtacagatccaagagtctgttcgtggcaaagatgtcttcatcatacagaccgtttcaaaagacgtaaacaccaccatcatggagctcttgattatggtatatgcctgcaaaacttcctgtgccaaatctatcatcggagtaattccatactttccctattcgaagcagtgcaagatgcgaaaacgcggaagtatcgtcagcaagttgctagccagtatgatgtgtaaagccggactcacccatctaatcactatggatctgcatcagaaagaaatacaaggattcttcaacatacctgttgacaacttgagagcttccccatttttgttacagtacatccaggaggagataccagactatagaaatgcagtaatcgtggccaaaagtccagcatcagctaagcgcgctcaatcttttgctgagcgattaaggctgggcatcgctgtgatccacggtgaagcacaggacgcggagtccgatctggttgatgggagacactccccaccaatggttcgtagtgtagctgcaattcatccaagcttggagattcctatgttgattcctaaggagaagccacccattaccgtggtcggcgacgtgggtggcagaatcgctattattgtcgacgacattatcgacgacgttgacagttttctggccgcagcagagacactgaaggaacggggagcatacaagatcttcgtcatggccacacacggccttctgagcagtgacgcacctaggcggatagaagagtctgcgatcgacgaggttgtggttaccaatacgatccctcatgaggttcagaaattgcagtgcccaaaaataaaaactgtggacatctccatgattctttcggaggcgatcagacgaatccataacggtgaaagtatgagctatctgttcagaaacatcggtttagacgactag

SEQ ID NO: 274505 - DNA, 1110 bp, Artificial Sequence
  derived and/or modified sequence
atgttctgcgtgaccccccccgagctggagaccaagatgaacatcaccaagggcggcctggtgctgttcagcgccaacagcaacagcagctgcatggagctgagcaagaagatcgccgagagactgggcgtggagatgggcaaggtgcaggtgtaccaggagcccaacagagagaccagagtgcagatccaggagagcgtgagaggcaaggacgtgttcatcatccagaccgtgagcaaggacgtgaacaccaccatcatggagctgctgatcatggtgtacgcctgcaagaccagctgcgccaagagcatcatcggcgtgatcccctacttcccctacagcaagcagtgcaagatgagaaagagaggcagcatcgtgagcaagctgctggccagcatgatgtgcaaggccggcctgacccacctgatcaccatggacctgcaccagaaggagatccagggcttcttcaacatccccgtggacaacctgagagccagccccttcctgctgcagtacatccaggaggagatccccgactacagaaacgccgtgatcgtggccaagagccccgccagcgccaagagagcccagagcttcgccgagagactgagactgggcatcgccgtgatccacggcgaggcccaggacgccgagagcgacctggtggacggcagacacagcccccccatggtgagaagcgtggccgccatccaccccagcctggagatccccatgctgatccccaaggagaagccccccatcaccgtggtgggcgacgtgggcggcagaatcgccatcatcgtggacgacatcatcgacgacgtggacagcttcctggccgccgccgagaccctgaaggagagaggcgcctacaagatcttcgtgatggccacccacggcctgctgagcagcgacgcccccagaagaatcgaggagagcgccatcgacgaggtggtggtgaccaacaccatcccccacgaggtgcagaagctgcagtgccccaagatcaagaccgtggacatcagcatgatcctgagcgaggccatcagaagaatccacaacggcgagagcatgagctacctgttcagaaacatcggcctggacgactag

SEQ ID NO: 274506 - DNA, 852 bp, Artificial Sequence
  derived and/or modified sequence
atggagctgcttatcatggtttatgcttgcaagacctcctgcgcgaagtctatcatcggggttatcccttattttccgtatagtaaacagtgtaagatgcgaaagaggggcagcatcgtatctaagttactggccagcatgatgtgtaaggctggtttgacccacctaataacaatggatctgcatcaaaaggagatccaaggcttctttaatattccggtggacaatctgcgggcaagcccatttctgctccagtacattcaggaggagatccctgattaccgcaatgcagtaatagtggccaaaagccctgcaagcgccaaacgcgcacaaagctttgcagaaagactgcggcttgggattgccgttatccacggagaagcacaggacgccgagtcggacttagtcgacggacgacactccccgccaatggtccgttcagttgctgcgatccacccttctctggagatacccatgctgataccaaaagaaaaaccaccgattactgtcgtgggagatgtgggcggccgtatcgcaattattgtggatgatattattgacgatgtggatagttttttggctgctgctgagacactaaaggagcggggggcatataagatattcgtgatggctacacacggactactctcctctgatgcccccagacggattgaagagagcgcaattgacgaggttgtcgttactaacacaatcccccacgaagtacagaagctccagtgccctaaaatcaaaacagtcgatattagtatgatcttgagtgaggctatcaggcggatacacaacggcgagagtatgtcatatctcttcagaaatattggcctcgacgactag

SEQ ID NO: 274507 - DNA, 852 bp, Artificial Sequence
  derived and/or modified sequence
atggagctgctgatcatggtgtatgcctgcaagaccagctgtgccaagagcatcattggagtcatcccctacttcccctacagcaagcagtgcaagatgaggaagaggggcagcatcgtgtccaagctgctggcctccatgatgtgcaaggccggcctgacccacctgatcaccatggacctgcaccagaaggagatccagggcttcttcaacatccctgtggacaacctgcgggccagccccttcctgctgcagtacatccaggaggagatcccagactacagaaatgctgtgattgtggccaagagccctgccagcgccaagagggcccagagctttgctgagcggctgcggctgggcattgctgtgattcatggagaggcccaggatgctgagagtgacctggtggatggccgccacagcccccccatggtgcgctctgtggccgccatccaccccagcctggagatccccatgctgatccccaaggagaagccacccatcaccgtggtgggagatgtgggcggccgcatcgccatcatcgtggatgacatcattgatgatgtggacagcttcctggccgctgctgagaccctgaaggagcggggggcctacaagatctttgtgatggccacccacggcctgctgagcagtgatgccccccggcgcatcgaggagagcgccattgatgaggtggtggtgaccaacaccatcccccatgaggtgcagaagctgcagtgccccaagatcaagacagtggacatctccatgatcctgtctgaggccatccgccgcatccacaacggggagagcatgagctacctgttcagaaatattggcctggatgactag

SEQ ID NO: 274508 - DNA, 852 bp, Artificial Sequence
  derived and/or modified sequence
atggagctgctgatcatggtgtacgcctgcaagaccagctgcgccaagagtattatcggtgtgatcccttacttcccttacagtaaacagtgcaaaatgcgaaaacgggggagtatcgtgtcaaaacttttggcctccatgatgtgcaaggcaggcttaacacatctgatcacgatggacctgcaccagaaggagatccaaggcttttttaacatacccgtagacaatctgagggcttctccgttcttactgcagtacattcaggaagaaatccccgactatcgtaatgctgttatcgtggcaaagtctcctgccagtgctaagagagcacagtcatttgctgagaggctgagacttgggatagctgtgatacatggagaggcgcaggacgccgaatcagacctggtcgatgggcggcacagcccccctatggtgaggagcgtggcggctattcatccatctttagaaataccaatgttgatccccaaggagaaaccaccgatcacagtagtaggagatgtgggaggccgcatcgctataatcgtggatgatattatcgatgacgtagactcattcctggccgccgctgaaacgttgaaagaacgaggcgcatacaaaattttcgtgatggccacccatggactactcagctcagatgccccacgccgtatcgaggagtctgccatagacgaggtagtcgtaacaaatacgatcccccatgaggttcagaagctgcaatgtcctaagattaagacagtggacatctcgatgattctctcagaagctatccgtagaatccataatggtgaatcaatgtcatatctgttccgtaacatcggacttgacgattag

SEQ ID NO: 274509 - DNA, 852 bp, Artificial Sequence
  derived and/or modified sequence
atggaactgctcatcatggtttatgcttgtaaaacttcttgcgctaagagtattattggcgtcatcccctacttcccttatagtaaacagtgcaaaatgcgcaagcgcggtagcatagtatcaaaattgctggcgtccatgatgtgcaaggccggattgacccatctcatcaccatggacctgcaccagaaagaaattcaaggttttttcaatattcctgtggataacttaagagcctcaccttttctgctgcaatacatccaagaagagattccagactatagaaatgctgtcatcgtggctaagtccccagcatcagccaagagggctcagagcttcgcagagagactgagactagggatagcggtgatccatggcgaagcacaagacgccgagtctgatcttgtggatggacggcattcccctcctatggttcggtccgtggcggcaattcaccccagcctggaaatacccatgctgatcccaaaggaaaaaccgcctattactgtggtgggagacgtcggaggcaggatcgccatcattgtggacgacatcatcgacgatgtggacagttttctggcggcagccgagaccctgaaagaacgaggcgcttacaagatcttcgtgatggctacccatggtctgctgtcctctgacgcaccaagacggatcgaggaatctgccattgacgaagttgtcgtgacgaacacaatccctcacgaggttcagaaactgcagtgccctaagatcaagaccgtcgatatatccatgatcctgtctgaagctatccgcaggattcacaacggggagtccatgtcttacctttttcgtaatataggcctcgatgactag

SEQ ID NO: 274510 - DNA, 852 bp, Artificial Sequence
  derived and/or modified sequence
atggagctgctgatcatggtgtacgcctgcaagaccagctgcgccaagagcatcatcggcgtgatcccctacttcccctacagcaagcagtgcaagatgagaaagagaggcagcatcgtgagcaagctgctggccagcatgatgtgcaaggccggcctgacccacctgatcaccatggacctgcaccagaaggagatccagggcttcttcaacatccccgtggacaacctgagagccagccccttcctgctgcagtacatccaggaggagatccccgactacagaaacgccgtgatcgtggccaagagccccgccagcgccaagagagcccagagcttcgccgagagactgagactgggcatcgccgtgatccacggcgaggcccaggacgccgagagcgacctggtggacggcagacacagcccccccatggtgagaagcgtggccgccatccaccccagcctggagatccccatgctgatccccaaggagaagccccccatcaccgtggtgggcgacgtgggcggcagaatcgccatcatcgtggacgacatcatcgacgacgtggacagcttcctggccgccgccgagaccctgaaggagagaggcgcctacaagatcttcgtgatggccacccacggcctgctgagcagcgacgcccccagaagaatcgaggagagcgccatcgacgaggtggtggtgaccaacaccatcccccacgaggtgcagaagctgcagtgccccaagatcaagaccgtggacatcagcatgatcctgagcgaggccatcagaagaatccacaacggcgagagcatgagctacctgttcagaaacatcggcctggacgactag

SEQ ID NO: 274511 - protein, 239 aa, Artificial Sequence
  derived and/or modified sequence
MIRLGGWCARRLCSAAVPAGRRGAAGGLGLAGGRALRVLVDMDGVLADFEGGFLRKFRARFPDQPFIALEDRRGFWVSEQYGRLRPGLSEKAISIWESKNFFFELEPLPGAVEAVKEMASLQNTDVFICTSPIKMFKYCPYEKYAWVEKYFGPDFLEQIVLTRDKTVVSADLLIDDRPDITGNQPPAGSMSSSPPATTSTCSCSPPAAGCTRGRTTGRPFWTASGPAELDCASGSSVGL

SEQ ID NO: 274512 - DNA, 720 bp, Artificial Sequence
  derived and/or modified sequence
atgataagactcggcggatggtgtgcaagacggctgtgctctgcggcagttcccgccgggcgtaggggcgcagctggcggcctcgggttagccggcggtagagcccttagggtgttggtagatatggatggagtgctggccgacttcgagggcggttttctgcgtaagttcagggcccgatttcctgatcaaccatttattgccctcgaggataggcggggcttctgggtaagcgaacaatacgggaggctaaggccagggctgtcagagaaagcaattagtatttgggaatccaaaaatttttttttcgagctcgaaccccttcctggagccgtggaagcagtgaaggaaatggcctccctgcagaatactgatgtttttatctgcacctccccgattaaaatgttcaagtactgcccttacgagaagtacgcctgggttgagaagtactttgggccagatttccttgagcagattgtgttgacacgtgacaaaaccgtggtaagcgctgacctcctgattgatgaccgacctgatatcacgggcaaccagcccccggccggtagcatgtcgagttctccccctgctactacctccacatgtagctgttcacctcctgccgcagggtgtaccagagggaggaccacgggaaggcctttctggaccgcaagcggacccgcagagctggattgtgcctctgggagttccgtgggcttgtag

SEQ ID NO: 274513 - DNA, 720 bp, Artificial Sequence
  derived and/or modified sequence
atgatccggctgggcggctggtgtgcccggcggctgtgcagcgctgctgtgcctgctggaagaagaggagctgctgggggcctgggcctggccggcggccgggccctgcgggtgctggtggacatggatggagtgctggccgactttgaaggaggcttcctgaggaagttccgggcccgcttcccagaccagcccttcatcgccctggaggaccggcggggcttctgggtgtctgagcagtatggccgcctgcggcccggcctgtctgagaaggccatcagcatctgggagagcaagaacttcttctttgagctggagcccctgcctggagctgtggaggccgtgaaggagatggccagcctgcagaacacagatgtgttcatctgcaccagccccatcaagatgttcaagtactgcccctatgagaagtatgcctgggtggagaagtactttggaccagacttcctggagcagatcgtgctgacccgggacaagacagtggtgtctgctgacctgctgattgatgacagaccagacatcactggaaaccagcccccagctggctccatgagcagcagccccccagccaccaccagcacctgcagctgcagccccccagctgctggctgcacccggggccgcaccaccggccggcccttctggacagccagcggccctgctgagctggactgtgccagcggcagctctgtgggcctgtag

SEQ ID NO: 274514 - DNA, 720 bp, Artificial Sequence
  derived and/or modified sequence
atgatccggctgggcggctggtgcgcccggcggctgtgcagcgccgcagtcccagccggccgacgcggagccgcaggcgggttaggcctcgcaggggggagggctctgcgcgttctggtggatatggacggagtactagccgattttgagggtggatttttgcggaagttccgagcccggttccctgaccagccgtttattgcgctggaggatcgaaggggtttttgggtgtctgaacagtacgggcgtctcaggcccggcctgtcagaaaaggccatcagtatctgggaatccaagaatttttttttcgaattagagcccctgccaggggccgtggaggccgttaaagagatggcctccttgcagaacaccgacgtgttcatctgcacgagccccattaagatgttcaaatattgcccctatgagaaatacgcatgggtagagaaatattttggaccagattttttagagcagatagtccttacacgcgacaagacggttgtgagcgctgatctccttatcgacgaccgaccggatattaccggcaatcagccacctgctggcagtatgtcatccagcccacctgcaacaactagtacttgttcttgttcaccaccagccgctggatgcacaagaggacgcactactggacggccattctggaccgcttcagggccggccgaactggactgcgcttctggaagctctgtggggctgtag

SEQ ID NO: 274515 - DNA, 720 bp, Artificial Sequence
  derived and/or modified sequence
atgattcgcctcgggggttggtgtgcccgacgtttgtgcagtgctgccgtccctgcaggacgccgaggagccgctggaggattaggattggcagggggtagggccctgcgggtactcgtggatatggatggggtgctggctgactttgagggcggtttcttgagaaagtttcgtgccaggtttccagaccaaccattcattgcactggaggacaggaggggcttttgggtgagcgaacaatacggtagactacgtcctgggctgagtgaaaaggccatcagcatttgggaatccaagaattttttcttcgagcttgagccactgcctggagccgtagaagctgtaaaagaaatggcgagcctgcagaacaccgacgtgttcatttgcaccagccctattaagatgtttaagtactgcccttatgaaaagtatgcttgggtcgagaagtattttgggccagattttctagaacagatagtgctgacacgggataagaccgttgtgtctgctgatttgctgatcgatgatagacctgatataaccggtaaccaaccccctgctggctccatgagtagctctcctccagctaccaccagtacttgtagttgcagcccgccagccgctggctgcaccaggggccgtaccactggtaggccgttttggactgccagcggcccagccgagctggattgtgcaagcggctctagcgtcggtctgtag

SEQ ID NO: 274516 - DNA, 720 bp, Artificial Sequence
  derived and/or modified sequence
atgatcagactgggcggctggtgcgccagaagactgtgcagcgccgccgtgcccgccggcagaagaggcgccgccggcggcctgggcctggccggcggcagagccctgagagtgctggtggacatggacggcgtgctggccgacttcgagggcggcttcctgagaaagttcagagccagattccccgaccagcccttcatcgccctggaggacagaagaggcttctgggtgagcgagcagtacggcagactgagacccggcctgagcgagaaggccatcagcatctgggagagcaagaacttcttcttcgagctggagcccctgcccggcgccgtggaggccgtgaaggagatggccagcctgcagaacaccgacgtgttcatctgcaccagccccatcaagatgttcaagtactgcccctacgagaagtacgcctgggtggagaagtacttcggccccgacttcctggagcagatcgtgctgaccagagacaagaccgtggtgagcgccgacctgctgatcgacgacagacccgacatcaccggcaaccagccccccgccggcagcatgagcagcagcccccccgccaccaccagcacctgcagctgcagcccccccgccgccggctgcaccagaggcagaaccaccggcagacccttctggaccgccagcggccccgccgagctggactgcgccagcggcagcagcgtgggcctgtag

SEQ ID NO: 274517 - DNA, 816 bp, Artificial Sequence
  derived and/or modified sequence
atctgcgagagaatcagaagcaccgtggacgagaaggagcagaagcagctgctgatggacctggacgtggtgatgagaagcagcgactgcccctacatcgtgcagttctacggcgccctgttcagagagggcgactgctggatctgcatggagctgatgagcaccagcttcgacaagttctacaagtacgtgtacagcgtgctggacgacgtgatccccgaggagatcctgggcaagatcaccctggccaccgtgaaggccctgaaccacctgaaggagaacctgaagatcatccacagagacatcaagcccagcaacatcctgctggacagaagcggcaacatcaagctgtgcgacttcggcatcagcggccagctggtggacagcatcgccaagaccagagacgccggctgcagaccctacatggcccccgagagaatcgaccccagcgccagcagacagggctacgacgtgagaagcgacgtgtggagcctgggcatcaccctgtacgagctggccaccggcagattcccctaccccaagtggaacagcgtgttcgaccagctgacccaggtggtgaagggcgaccccccccagctgagcaacagcgaggagagagagttcagccccagcttcatcaacttcgtgaacctgtgcctgaccaaggacgagagcaagagacccaagtacaaggagctgctgaagcaccccttcatcctgatgtacgaggagagagccgtggaggtggcctgctacgtgtgcaagatcctggaccagatgcccgccacccccagcagccccatgtacgtggactag

SEQ ID NO: 274518 - DNA, 816 bp, Artificial Sequence
  derived and/or modified sequence
atctgtgagcgcattcgaagcacggtggacgagaaagagcaaaagcagctgctgatggatttagatgtagtgatgcgatcctctgattgcccgtatatcgtccagttttacggggctctgttcagagagggggactgttggatctgcatggagctgatgtccaccagcttcgacaagttctataagtacgtgtacagtgttctcgacgatgttatccctgaggagatcttaggaaaaatcacactggccaccgtaaaggcactaaaccatcttaaggaaaatctcaagatcatccaccgcgatattaaacctagcaatatcttgctggaccggtctgggaacatcaagttgtgcgactttgggatctctgggcagctggtggactcaatcgcaaaaacccgtgacgcaggctgcaggccttacatggcccctgaacgcatcgacccctcagcatccaggcaaggatatgatgtgagatcagacgtgtggagcctcggaataaccttatatgagctcgctaccggtaggtttccgtatcccaaatggaattctgtattcgatcagctgactcaggtagtgaaaggagatcccccccaattaagtaactccgaggaacgggaattttccccatcctttatcaacttcgtgaatttgtgtttaacaaaggatgagtcaaagcgccccaaatacaaggagctattaaaacacccctttattctgatgtatgaagaaagggccgtagaggtggcttgttatgtctgtaagatcctagatcagatgccagcaactcccagtagcccgatgtatgtcgactag

SEQ ID NO: 274519 - DNA, 816 bp, Artificial Sequence
  derived and/or modified sequence
atctgtgagcgcatccgcagcacagtggatgagaaggagcagaagcagctgctgatggacctggatgtggtgatgaggagcagtgactgcccctacatcgtgcagttctatggagccctcttccgggagggggactgctggatctgcatggagctgatgagcaccagctttgacaagttctacaagtatgtgtacagcgtgctggatgatgtgattcctgaggagatcctgggcaagatcaccctggccaccgtgaaggccctgaaccacctgaaggagaacctgaagatcatccaccgggacatcaagcccagcaacatcctgctggacaggagcggcaacatcaagctgtgtgactttggcatcagcggccagctggtggacagcatcgccaagaccagagatgctggctgccggccctacatggcccctgagagaattgaccccagcgccagccggcagggctatgatgtgcggagtgatgtgtggagcctgggcatcaccctgtatgagctggccaccggccgcttcccctaccccaagtggaacagcgtgtttgaccagctgacccaggtggtgaagggggaccccccccagctgagcaacagcgaggagcgggagttcagccccagcttcatcaactttgtgaacctgtgcctgaccaaggatgagagcaagaggcccaagtacaaggagctgctgaagcaccccttcatcctgatgtatgaggagagagctgtggaggtggcctgctacgtgtgcaagatcctggaccagatgcctgccacccccagcagccccatgtatgtggactag

SEQ ID NO: 274520 - DNA, 816 bp, Artificial Sequence
  derived and/or modified sequence
atctgcgagcggatccggagcaccgtggacgagaaggagcagaagcaactcctgatggacctggatgtcgtcatgaggagctccgactgcccttatatagtccagttctacggtgctctattccgggaaggggactgttggatctgtatggagcttatgagcacctcctttgacaaattttacaaatacgtttacagtgtcttagatgacgttattcccgaagaaattctcggaaaaatcactctggccacagtgaaggcacttaatcacctcaaagagaaccttaagatcatccaccgggacattaagccctccaatattctgctggataggtctggaaatattaagttgtgcgattttggcatctcagggcaactggtcgatagtatcgccaaaacacgggatgccggctgtcgaccttatatggcccctgaaagaatcgacccctcagcaagccgtcagggatacgatgtgagaagtgacgtctggagcttaggcattaccttgtatgagctcgccaccggccgatttccctaccctaaatggaatagcgtgtttgaccaactaacccaggtcgttaagggggaccccccccagctaagtaattcagaggaacgcgagtttagcccctctttcataaatttcgtgaacctgtgcctcaccaaggacgagagcaaacggccaaaatacaaagaactgcttaaacatcctttcatactgatgtatgaggagcgggccgtggaggtcgcttgttacgtctgcaaaattctggaccagatgccagcaactccgtctagtccaatgtatgttgactag

SEQ ID NO: 274521 - DNA, 816 bp, Artificial Sequence
  derived and/or modified sequence
atctgtgagcgcatcaggtccactgttgacgagaaagaacagaaacagctgctgatggatttggatgtggtgatgcgctcttccgactgcccctatatcgtccaattttatggcgctttatttcgtgaaggcgattgctggatttgcatggagctgatgagcacttcatttgataaattttacaaatacgtgtatagcgtgttggatgacgtaatccctgaagaaatacttggcaagatcactcttgctacagtgaaagctcttaaccatctcaaggaaaacctcaaaatcattcatcgcgatatcaagcctagcaacattttgctggacagatccggcaacatcaagttatgcgatttcggcatttcaggacaattggtcgacagcattgccaagactcgggatgccggatgtcgcccatacatggccccagagagaatcgacccttccgccagcaggcaaggctacgacgtgcgcagcgacgtgtggagtctcggaatcaccctgtacgagctggccacaggccgtttcccttacccaaagtggaacagtgttttcgaccagctgacgcaagtggtgaagggcgacccgcctcagctctccaattctgaagagagagagttttcccccagcttcattaactttgtgaatctgtgcctaaccaaggatgaaagtaaaaggccgaaatacaaggagttgcttaagcacccatttatactgatgtacgaggagagagcggtcgaggtggcatgttacgtatgtaagatactggaccaaatgcccgcaaccccatcatccccaatgtatgtggactag

SEQ ID NO: 274522 - DNA, 3286 bp, Artificial Sequence
  derived and/or modified sequence
atttgtgaaagaattcggtcaacagtggatgaaaaagaacaaaaacaacttcttatggatttggatgtagtaatgcggagtagtgattgcccatacattgttcagttttatggtgcactcttcagagagggtgactgttggatctgtatggaactcatgtctacctcgtttgataagttttacaaatatgtatatagtgtattagatgatgttattccagaagaaattttaggcaaaatcactttagcaactgtgaaagcactaaaccacttaaaagaaaacttgaaaattattcacagagatatcaaaccttccaatattcttctggacagaagtggaaatattaagctctgtgacttcggcatcagtggacagcttgtggactctattgccaagacaagagatgctggctgtaggccatacatggcacctgaaagaatagacccaagcgcatcacgacaaggatatgatgtccgctctgatgtctggagtttggggatcacattgtatgagttggccacaggccgatttccttatccaaagtggaatagtgtatttgatcaactaacacaagtcgtgaaaggagatcctccgcagctgagtaattctgaggaaagggaattctccccgagtttcatcaactttgtcaacttgtgccttacgaaggatgaatccaaaaggccaaagtataaagagcttctgaaacatccctttattttgatgtatgaagaacgtgccgttgaggtcgcatgctatgtttgtaaaatcctggatcaaatgccagctactcccagctctcccatgtatgtcgattgatatcgctgctacatcagactctagaaaaaagggctgagaggaagcaagacgtaaagaattttcatcccgtatcacagtgtttttattgctcgcccagacaccatgtgcaataagattggtgttcgtttccatcatgtctgtatactcctgtcacctagaacgtgcatccttgtaatacctgattgatcacacagtgttagtgctggtcagagagacctcatcctgctcttttgtgatgaacatattcatgaaatgtggaagtcagtacgatcaagttgttgactgtgattagatcacatcttaaattcatttctagactcaaaacctggagatgcagctactggaatggtgttttgtcagacttccaaatcctggaaggacacagtgatgaatgtactatgtctgaacatagaaactcgggcttgagtgagaagagcttgcacagccaacgagacacattgccttctggagctgggagacaaaggaggaatttactttcttcaccaagtgcaatagattactgatgtgatattctgttgctttacagttacagttgatgtttggggatcgatgtgctcagccaaatttcctgtttgaaatatcatgttaaattagaatgaatttatctttaccaaaaaccatgttgcgttcaaagaggtgaacattaaaatatagagacaggacagaatgtgttcttttctcctttaccagtcctatttttcaatgggaagactcaggagtctgccacttgtcaaagaaggtgctgatcctaagaatttttcattctcagaattcggtgtgctgccaacttgatgttccacctgccacaaaccaccaggactgaaagaagaaaacagtacagaaggcaaagtttacagatgtttttaattctagtattttatctggaacaacttgtagcagctatatatttccccttggtcccaagcctgatactttagccatcataactcactaacagggagaagtagctagtagcaatgtgccttgattgattagataaagatttctagtaggcagcaaaagaccaaatctcagttgtttgcttcttgccatcactggtccaggtcttcagtttccgaatctctttcccttcccctgtggtctattgtcgctatgtgacttgcgcttaatccaatattttgccttttttctatatcaaaaaacctttacagttagcagggatgttccttaccaaggatttttagccccaaatctctcatattcgctagtgtttaaaaggctaagaatagtggggcccagccgatgtggtaggtgataaagaggcatcttttctagagacacattggaccagatgaggatccgaaacggcagcctttacgttcatcacctgctagaacctctcgtagtccatcaccatttcttggcattggaattctactggaaaaaaatacaaaaagcaaaacaaaaccctcagcactgttacaagaggccatttaagtatcttgtgcttcttcacttacccattagccaggttctcattaggttttgcttgggcctccctggcactgaaccttaggctttgtatgacagtgaagcagcactgtgagtggttcaagcacactggaatataaaacagtcatggcctgagatgcaggtgatgccattacagaaccaaatcgtggcacgtattgctgtgtctcctctcagagtgacagtcataaatactgtcaaacaataaagggagaatggtgctgtttaaagtcacatccctgtaaattgcagaattcaaaagtgattatctctttgatctacttgcctcatttccctatcttctcccccacggtatcctaaactttagacttcccactgttctgaaaggagacattgctctatgtctgccttcgaccacagcaagccatcatcctccattgctcccggggactcaagaggaatctgtttctctgctgtcaacttcccatctggctcagcatagggtcactttgccattatgcaaatggagataaaagcaattctgactgtccaggagctaatctgaccgttctattgtgtggatgaccacataagaaggcaattttagtgtattaatcatagattattataaactataaacttaagggcaaggagtttattacaatgtatctttattaaaacaaaagggtgtatagtgttcacaaactgtgaaaatagtgtaagaactgtacattgtgagctctggttatttttctcttgtaccatagaaaaatgtataaaaattatcaaaaagctaatgtgcagggatattgccttatttgtctgtaaaaaatggagctcagtaacataactgcttcttggagctttggaatattttatcctgtattcttgtttgaattcctcctctatttaagatatatacatggaatcgaagtgtttatgtaatagttctatccttttgcctgcaggtcagttgtaataaatctaggatgtgatg

SEQ ID NO: 274523 - protein, 126 aa, Artificial Sequence
  derived and/or modified sequence
MPWLAVPYTDEARRSRLNRLYGIQDSEDDGESEAAKQLIQPIAEKIIAKYKAKEEEAPLLFFVAGEDDMTDSLRDYTNLPEAAPLLTILDMSARAKYVMDVEEITPAIVEAFVNDFLAEKLKPEPI

SEQ ID NO: 274524 - DNA, 381 bp, Artificial Sequence
  derived and/or modified sequence
atgccttggctcgccgtgccatataccgacgaagcccgacgtagcagactcaaccgactgtacggcatccaagacagcgaggatgacggcgagtctgaggctgcgaaacagctgatccagcccatcgcggagaagatcatcgcgaaatacaaggccaaagaagaggaagcccccctcctgtttttcgtcgccggggaagacgatatgactgacagcttaagagactacacgaacctgccagaggctgccccattactaacgatcttggacatgtccgctagagccaaatacgtgatggacgtggaagagatcacgcccgcgatagtcgaagcctttgtgaacgatttcctagctgagaaactcaaacccgaaccaatctag

SEQ ID NO: 274525 - DNA, 381 bp, Artificial Sequence
  derived and/or modified sequence
atgccctggctggccgtgccctacacagatgaggcccggcgcagccggctgaaccggctgtatggcatccaggacagtgaagatgatggagagagcgaggccgccaagcagctgatccagcccatcgccgagaagatcatcgccaagtacaaggccaaggaggaggaggcccccctgctcttctttgtggccggggaggatgacatgacagacagcctgcgggactacaccaacctgcctgaggccgcccccctgctgaccatcctggacatgtctgcccgggccaagtatgtgatggatgtggaggagatcaccccagccatcgtggaggcctttgtgaatgacttcctggccgagaagctgaagccagagcccatctag

SEQ ID NO: 274526 - DNA, 381 bp, Artificial Sequence
  derived and/or modified sequence
atgccctggctggccgtgccctacaccgacgaggcccggcggagccgcctcaaccggttatacggcatccaagatagtgaggacgatggtgaatccgaagcagcaaaacagctcatacagccaatcgccgaaaagattattgccaaatacaaggctaaggaagaagaggcccccctcctgttttttgtggccggcgaagatgatatgacagattctctgcgcgattacaccaatctccccgaagcagcaccactcctcacaatccttgatatgtccgctcgagccaagtacgtgatggatgttgaagagataacacccgccatagtggaggcctttgtcaatgacttcctcgctgagaaactgaagcccgaaccgatctag

SEQ ID NO: 274527 - DNA, 985 bp, Artificial Sequence
  derived and/or modified sequence
gtgtccgccctgccgaagcctcacccgggtcctggtggaatcctaccggaagatcaaggaggcaggccagaacttcgagatcatcttcgttagtgcagacaggtcggaggagtccttcaaacagtacttcagtgagatgccctggctcgccgtcccctacacggatgaggcccggcggtcgcgcctcaaccggctgtacggaatccaagattctgaggatgacggagagtccgaggcggccaagcagctgattcagccgatagctgagaaaatcattgccaagtacaaagccaaagaggaggaggcaccccttctgttcttcgtagccggggaggatgacatgactgactccctgcgagattacaccaacctgcctgaggctgcccctttgctcaccatcctggacatgtcagcccgggccaagtacgtgatggacgtggaggagatcacccccgccatcgtggaggcctttgtgaatgacttcctagcagagaagctcaaaccggagcccatctagcgtggctccggcctcctgagacgttatttaaaactcagccttctcctcctccccctccttccttccgcccttggacttacccagcgtgccccgaatcccaccacccaagtgtccagcctctctgtggtgccttgtttctgcagtaaactcctcagccagcaccctggggtgtggaatcagcagcggcagagtccaccgtgtttggagactctgtttgggagcacgggatggccgggggcccggccagagcggggctgcatggctttcgcaaagtcactagcttttggtgaaggatctgccagggtgtcctgggcagagtgagcgtggagggccggtgggtcccgctcgggctctgactctgacgtcggcacacacggccccggacggccagaggggaaccgccgggtgacacctgcgtggaggctgagctgagaaagggcctccgcttagagctgcgggtgaggacgt

SEQ ID NO: 274528 - DNA, 381 bp, Artificial Sequence
  derived and/or modified sequence
atgccctggctagcggttccgtacacggacgaagcgaggcgatccagattaaatcgtctgtatggaattcaggacagtgaagatgacggtgaaagtgaagccgcaaagcagctgatccagcctatcgccgagaaaattattgccaaatacaaagcaaaggaggaagaagccccactgctgttctttgtggccggtgaagacgacatgacagacagtttgcgagattatactaacctcccagaggctgcccctctgcttaccattttagacatgtccgctcgggctaagtacgttatggacgtcgaggagatcactcccgctatagtggaagcgttcgtcaatgacttccttgcggagaagctcaaacccgagccaatttag

SEQ ID NO: 274529 - DNA, 381 bp, Artificial Sequence
  derived and/or modified sequence
atgccctggctggccgtgccctacaccgacgaggccagaagaagcagactgaacagactgtacggcatccaggacagcgaggacgacggcgagagcgaggccgccaagcagctgatccagcccatcgccgagaagatcatcgccaagtacaaggccaaggaggaggaggcccccctgctgttcttcgtggccggcgaggacgacatgaccgacagcctgagagactacaccaacctgcccgaggccgcccccctgctgaccatcctggacatgagcgccagagccaagtacgtgatggacgtggaggagatcacccccgccatcgtggaggccttcgtgaacgacttcctggccgagaagctgaagcccgagcccatctag

SEQ ID NO: 274530 - protein, 483 aa, Artificial Sequence
  derived and/or modified sequence
MTMPVNGAHKDADLWSSHDKMLAQPLKDSDVEVYNIIKKESNRQRVGLELIASENFASRAVLEALGSCLNNKYSEGYPGQRYYGGTEFIDELETLCQKRALQAYKLDPQCWGVNVQPYSGSPANFAVYTALVEPHGRIMGLDLPDGGHLTHGFMTDKKKISATSIFFESMPYKVNPDTGYINYDQLEENARLFHPKLIIAGTSCYSRNLEYARLRKIADENGAYLMADMAHISGLVAAGVVPSPFEHCHVVTTTTHKTLRGCRAGMIFYRKGVKSVDPKTGKEILYNLESLINSAVFPGLQGGPHNHAIAGVAVALKQAMTLEFKVYQHQVVANCRALSEALTELGYKIVTGGSDNHLILVDLRSKGTDGGRAEKVLEACSIACNKNTCPGDRSALRPSGLRLGTPALTSRGLLEKDFQKVAHFIHRGIELTLQIQSDTGVRATLKEFKERLAGDKYQAAVQALREEVESFASLFPLPGLPDF

SEQ ID NO: 274531 - protein, 125 aa, Artificial Sequence [sequence omitted]

SEQ ID NO: 274532 - protein, 94 aa, Artificial Sequence [sequence omitted]

SEQ ID NO: 274533 - protein, 258 aa, Artificial Sequence [sequence omitted]

SEQ ID NO: 274534 - protein, 446 aa, Artificial Sequence
  derived and/or modified sequence
MTMPVNGAHKDADLWSSHDKMLAQPLKDSDVEVYNIIKKESNRQRVGLELIASENFASRAVLEALGSCLNNKYSEGYPGQRYYGGTEFIDELETLCQKRALQAYKLDPQCWGVNVQPYSGSPANFAVYTALVEPHGRIMGLDLPDGGHLTHGFMTDKKKISATSIFFESMPYKVNPDTGYINYDQLEENARLFHPKLIIAGTSCYSRNLEYARLRKIADENGAYLMADMAHISGLVAAGVVPSPFEHCHVVTTTTHKTLRGCRAGMIFYRKGVKSVDPKTGKEILYNLESLINSAVFPGLQGGPHNHAIAGVAVALKQAMTLEFKVYQHQVVANCRALSEALTELGYKIVTGGSDNHLILVDLRSKGTDGGRAEKVLEACSIACNKNTCPGIELTLQIQSDTGVRATLKEFKERLAGDKYQAAVQALREEVESFASLFPLPGLPDF

SEQ ID NO: 274535 - protein, 345 aa, Artificial Sequence
  derived and/or modified sequence
MGLDLPDGGHLTHGFMTDKKKISATSIFFESMPYKVNPDTGYINYDQLEENARLFHPKLIIAGTSCYSRNLEYARLRKIADENGAYLMADMAHISGLVAAGVVPSPFEHCHVVTTTTHKTLRGCRAGMIFYRKGVKSVDPKTGKEILYNLESLINSAVFPGLQGGPHNHAIAGVAVALKQAMTLEFKVYQHQVVANCRALSEALTELGYKIVTGGSDNHLILVDLRSKGTDGGRAEKVLEACSIACNKNTCPGDRSALRPSGLRLGTPALTSRGLLEKDFQKVAHFIHRGIELTLQIQSDTGVRATLKEFKERLAGDKYQAAVQALREEVESFASLFPLPGLPDF

SEQ ID NO: 274536 - DNA, 1452 bp, Artificial Sequence
  derived and/or modified sequence
atgacgatgccagtcaacggcgcccataaggacgcagatctttggagcagccacgacaagatgcttgcccaaccactgaaagacagcgacgtggaggtttataacatcattaaaaaggagagcaacaggcaaagagttggtctggaattgatcgcttccgaaaatttcgctagccgcgcagtgctcgaggcactaggcagttgtctcaataataagtactctgaagggtatcccggtcagcgatactacggtggaaccgaattcattgacgaactagaaacgctgtgtcagaagcgcgctctgcaggcctataagctggaccctcagtgttggggcgtaaatgttcagccttatagtgggtcccccgcaaactttgcagtttacaccgccttggtcgaaccacacgggcgaataatgggtctggacctccctgacggtggacatttaacacacggcttcatgacggataaaaagaaaatctccgccacctcaatcttctttgaatctatgccgtataaggtgaaccccgacaccggctacattaattatgaccaactggaagaaaacgcaagactgttccacccaaagctgatcatcgctggcacctcgtgttactcccgaaatctggagtatgcccgcttgcggaaaattgctgatgaaaacggcgcctacctgatggcggacatggcccatatttcagggctcgttgcggcaggggtcgtcccatccccttttgaacactgccatgtggtgaccacaacaacacataagaccctgaggggatgcagggcaggaatgatcttttatagaaagggcgtaaagtctgttgaccccaaaacgggcaaggagattctgtataacttggagagtttaatcaacagcgccgtgtttcccggtctccaggggggaccccataatcatgctatagctggcgtggctgtagcactgaaacaggcaatgactctggagtttaaagtgtaccagcaccaggtggtggccaattgccgcgccttgtccgaagcactgactgaactggggtataagatagtgaccggtgggtcagacaatcatctgatcctggtggatctgcggtcaaagggcacagacggcggtcgggctgagaaagttcttgaagcttgttctatcgcctgcaataagaacacttgccccggcgataggtcagccctgcgcccttctggtctgcgcttgggcacccccgccctgacttcacgcgggctgctcgaaaaagattttcaaaaggtggcccactttatccatcggggtattgagctaactctgcagattcagtctgatactggcgtgcgcgctactctaaaggagttcaaggagcgtctggccggtgataagtatcaggccgcagtgcaggctcttagggaagaggtggaaagcttcgcctctctgttcccactgccaggcctgcccgacttttag

SEQ ID NO: 274537 - DNA, 1341 bp, Artificial Sequence
  derived and/or modified sequence
atgacgatgcccgtgaacggggcccataaggatgcagacctctggagttcccatgacaagatgctggcacaaccactcaaggattcggacgttgaagtgtataatatcattaaaaaggaaagcaacaggcagagggtgggactggagctaatcgccagcgaaaacttcgcatcacgcgcagtgctagaagctcttggttcatgccttaataacaagtatagcgaaggatatcctgggcagcgatactatggtggcacggagtttatcgacgagctcgagaccttgtgtcaaaaacgcgccctacaggcttacaaactggacccacagtgttggggcgtgaatgtgcagccatattcgggaagcccggccaattttgccgtgtatacagccctggtggaaccacacggacgtattatgggactggacctccccgacgggggccatctaactcatggctttatgaccgataaaaaaaagattagcgccacctccatattcttcgagtcaatgccctacaaggtaaacccagacacaggctacattaactatgaccagcttgaggaaaacgctaggctcttccatccaaagctcattattgctggaactagctgctattcaaggaacctggagtacgcccgcctcaggaagatagcggatgaaaacggcgcctacctgatggctgacatggctcatatttctggcttggtggcagctggagtggtacccagccccttcgaacactgccacgtggtcactactaccacacataagacattacggggttgcagggcgggcatgattttctaccgtaaaggagtgaaaagcgtggacccaaaaactggtaaggagatcctttataatctggaatcactcattaactccgctgtgtttcccggtctgcagggcgggccccataatcacgcgatcgctggtgtcgcagtcgcgcttaagcaggctatgacactggaatttaaggtctaccagcaccaagtggtggccaactgcagagcactgtctgaggccctcaccgagctcgggtataagattgtaactggtggctccgacaatcacctcatccttgtggacttacgatccaagggaacagatggaggtcgggcggaaaaagtgcttgaggcctgtagtattgcatgcaataagaacacttgcccagggatagagctgacattgcagatacaatccgacacaggagtgcgggctaccttgaaggaatttaaggagcgcctggcaggagataaataccaagcagctgtgcaggcactgagggaggaggtggaaagttttgcgtccctcttccctctgcccggattgcccgatttctag

SEQ ID NO: 274538 - DNA, 1452 bp, Artificial Sequence
  derived and/or modified sequence
atgaccatgcctgtgaatggagcccacaaggatgctgacctgtggagcagccatgacaagatgctggcccagcccctgaaggacagtgatgtggaggtgtacaacatcatcaagaaggagagcaaccggcagagggtgggcctggagctgattgccagcgagaactttgccagcagagctgtgctggaggccctgggcagctgcctgaacaacaagtacagcgagggctacccaggccagcgctactatggaggaacagagttcattgatgagctggagaccctgtgccagaagagggccctgcaggcctacaagctggacccccagtgctggggcgtgaatgtgcagccctacagcggcagccctgccaactttgctgtgtacacagccctggtggagccccacggccgcatcatgggcctggacctgcctgatggcggccacctgacccacggcttcatgacagacaagaagaagatcagcgccaccagcatcttctttgagagcatgccctacaaggtgaacccagacaccggctacatcaactatgaccagctggaggagaatgcccggctcttccaccccaagctgatcatcgccggcaccagctgctacagcaggaacctggagtatgcccggctgaggaagattgctgatgaaaatggagcctacctgatggctgacatggcccacatcagcggcctggtggccgccggcgtggtgcccagcccctttgagcactgccacgtggtgaccaccaccacccacaagaccctgcggggctgccgggccggcatgatcttctacagaaaaggagtgaagtctgtggaccccaagacaggcaaggagatcctgtacaacctggagagcctcatcaacagcgctgtgtttcctggcctgcagggcggcccccacaaccacgccatcgccggcgtggccgtggccctgaagcaggccatgaccctggagttcaaggtgtaccagcaccaggtggtggccaactgccgggccctgtctgaggccctgacagagctgggctacaagatcgtgactggaggcagtgacaaccacctgatcctggtggacctgcggagcaagggcacagatggcggccgggcagagaaggtgctggaggcctgcagcatcgcctgcaacaagaacacctgccctggggacagaagtgccctgcggcccagcggcctgcggctgggcaccccagccctgaccagccggggcctgctggagaaggacttccagaaggtggcccacttcatccaccggggcatcgagctgaccctgcagatccagagcgacacaggagtgcgggccaccctgaaggagttcaaggagcggctggccggggacaagtaccaggccgctgtgcaggccctgcgggaggaggtggagagctttgccagcctcttccccctgcccggcctgcctgacttctag

SEQ ID NO: 274539 - DNA, 1341 bp, Artificial Sequence
  derived and/or modified sequence
atgaccatgcctgtgaatggagcccacaaggatgctgacctgtggagcagccatgacaagatgctggcccagcccctgaaggacagtgatgtggaggtgtacaacatcatcaagaaggagagcaaccggcagagggtgggcctggagctgattgccagcgagaactttgccagcagagctgtgctggaggccctgggcagctgcctgaacaacaagtacagcgagggctacccaggccagcgctactatggaggaacagagttcattgatgagctggagaccctgtgccagaagagggccctgcaggcctacaagctggacccccagtgctggggcgtgaatgtgcagccctacagcggcagccctgccaactttgctgtgtacacagccctggtggagccccacggccgcatcatgggcctggacctgcctgatggcggccacctgacccacggcttcatgacagacaagaagaagatcagcgccaccagcatcttctttgagagcatgccctacaaggtgaacccagacaccggctacatcaactatgaccagctggaggagaatgcccggctcttccaccccaagctgatcatcgccggcaccagctgctacagcaggaacctggagtatgcccggctgaggaagattgctgatgaaaatggagcctacctgatggctgacatggcccacatcagcggcctggtggccgccggcgtggtgcccagcccctttgagcactgccacgtggtgaccaccaccacccacaagaccctgcggggctgccgggccggcatgatcttctacagaaaaggagtgaagtctgtggaccccaagacaggcaaggagatcctgtacaacctggagagcctcatcaacagcgctgtgtttcctggcctgcagggcggcccccacaaccacgccatcgccggcgtggccgtggccctgaagcaggccatgaccctggagttcaaggtgtaccagcaccaggtggtggccaactgccgggccctgtctgaggccctgacagagctgggctacaagatcgtgactggaggcagtgacaaccacctgatcctggtggacctgcggagcaagggcacagatggcggccgggcagagaaggtgctggaggcctgcagcatcgcctgcaacaagaacacctgccccggcatcgagctgaccctgcagatccagagcgacaccggggtgcgggccaccctgaaggagttcaaggagcggctggccggggacaagtaccaggccgctgtgcaggccctgcgggaggaggtggagagctttgccagcctcttccccctgcccggcctgcctgacttctag

SEQ ID NO: 274540 - DNA, 1452 bp, Artificial Sequence
  derived and/or modified sequence
atgaccatgcccgtgaacggcgcccacaaggacgccgacctgtggtccagccacgacaagatgcttgctcaacccctgaaggactctgacgttgaagtttataacataataaaaaaggagtctaaccggcagcgggtgggattagaactcatagcttcggagaactttgcctcccgggctgtgctcgaagcccttggcagctgcctgaataataaatattctgagggctatcccggacagagatactatggaggcacagaattcatagacgagctggagaccctttgccagaagcgggcacttcaggcctacaaattagacccccagtgctggggagtgaatgtccagccatattccggcagcccagccaatttcgccgtctacactgcccttgtggagccccatggccgaatcatgggcctggatctacctgatggaggacacttgacccacggtttcatgacggacaaaaagaagataagtgcaaccagcatattcttcgagagcatgccctataaagtgaaccctgacactgggtatattaattatgaccagctcgaagagaacgcacggctgttccacccaaagttaataatcgctgggaccagctgttactcacgcaaccttgaatacgcgcggctgcggaagattgccgacgaaaacggcgcctatcttatggcagacatggctcacatttccgggctcgtggccgccggggtcgtgccgagccctttcgagcattgtcatgtggttacaaccacgactcacaaaaccctccgcggctgcagagctggaatgatcttttatagaaaaggggtgaaaagtgtagacccgaagactgggaaagaaattctttacaatctagaaagcctcattaacagtgcagtgtttcctggcctgcagggtggacctcataatcacgccatagccggagtggctgtggctctaaagcaggctatgaccctggagtttaaggtataccagcatcaggttgtggcaaattgccgggcattgagcgaggccctaacagaactcggatataagatcgtgaccggggggagcgataatcacttgatcttggttgacctcagaagtaagggcacggatggcgggcgcgccgaaaaagtgctggaagcgtgttcaattgcctgtaacaaaaacacttgcccaggagatagatccgctcttcgacctagcgggttacgccttggcacgcccgccctgacgagccgagggctgttagagaaggattttcagaaagttgcccattttatccaccggggtatagagttgactcttcaaatccagtctgacacaggagttagggccaccctcaaagaatttaaggagaggctggccggagacaagtaccaagcagccgttcaggcacttagagaagaagtggagtcgttcgcttccctcttcccactccccggtctgcccgacttttag

SEQ ID NO: 274541 - DNA, 1341 bp, Artificial Sequence
  derived and/or modified sequence
atgaccatgcccgtgaacggcgcccacaaggacgccgacctgtggtcatctcacgacaagatgctggcccagccactaaaggattcagacgtagaggtttataacatcatcaagaaggaaagcaataggcagagagtaggcttggaactgattgcctctgaaaatttcgcttctcgtgctgtgctggaagcgcttggatcatgtctgaataataagtattccgaagggtaccccggacagcgctactacgggggcactgagttcattgacgaactggagactctctgtcagaagagagcactccaggcatacaaactggaccctcaatgttggggcgtcaatgtgcaaccctattccggctcccctgcaaattttgccgtatataccgccctcgtggagcctcatgggcgcataatgggactggatctccctgacggcggccacctgactcacggatttatgacagataaaaaaaaaattagcgccactagtattttcttcgagtctatgccttacaaggttaacccagataccgggtacatcaattatgaccagttagaggaaaatgcccggctgtttcaccctaaactgattatcgcaggcaccagttgttattccagaaatctcgagtacgcccgtctgaggaaaattgctgacgagaacggggcttacctgatggccgatatggcccatatatccggtttggttgctgctggggttgttccatctccttttgagcattgtcatgtagtcaccacaactactcacaagacactgaggggatgccgtgcaggcatgattttctaccgaaagggcgtcaagagtgtggaccctaagaccggcaaggaaatcctctataacctggagagtcttattaacagcgctgtttttccgggtttgcagggaggtcctcacaaccatgccatcgccggggtagctgtggccctgaaacaggctatgaccctggaattcaaggtgtatcagcaccaagttgtagctaactgtcgggccttgagtgaggctcttacagaactgggatacaagattgtgaccggaggttccgataaccatctaattctcgtggatctccggagtaaaggcaccgacggtggacgggccgagaaggtactggaagcatgttccattgcctgcaacaagaacacttgtcctgggatagagctgacactccagattcagtccgacacaggtgtcagagcaactcttaaggaattcaaagaaagactggccggggataaatatcaggcagccgtgcaggcacttagagaagaagtcgagtctttcgctagcttgttcccgctgcctggactacctgatttctag

SEQ ID NO: 274542 - DNA, 1452 bp, Artificial Sequence
  derived and/or modified sequence
atgaccatgcctgtcaatggcgctcacaaagacgctgatctctggtccagtcatgataaaatgctcgctcaacccctcaaggacagcgacgttgaagtatacaacataatcaaaaaggaatccaacagacaacgcgtcggcttggagcttatcgcttccgaaaatttcgcctctagggccgtgttggaggctctgggaagctgtctcaacaataagtatagtgaggggtatcctggccagaggtattatggaggcactgaatttatcgatgaattagagacattatgccagaaaagggccctgcaggcctataagctcgatcctcagtgctggggagtcaatgtgcaaccctactccgggagtccggctaattttgctgtctatactgccctggttgagccgcacggaagaatcatgggactcgacctgcctgatggcggtcacctaacgcacggctttatgaccgataagaagaaaattagcgctacctccatttttttcgagtccatgccttacaaagtgaatcccgatacagggtatatcaattacgaccaactcgaggagaatgctagactcttccacccaaagctgatcattgccggtacctcctgctactcacgaaatctagaatacgccagactgagaaagattgcagatgaaaacggagcataccttatggccgatatggcccacatttcaggactggtcgccgcaggagtggtcccctcccctttcgagcattgtcacgtggtgacaaccacaacccataaaacattaagaggctgccgggcagggatgattttctacaggaaaggcgtgaaaagcgtcgaccctaagacaggaaaggaaattttgtacaatcttgagagtttaataaactccgccgtatttcccggtttgcaggggggaccccacaaccacgccatcgccggagtggccgtggcactgaaacaggccatgactcttgaattcaaagtataccaacaccaggtggtagccaattgtcgtgcactatccgaggccctcacggaactgggatacaagatcgtcacaggtgggtccgacaatcaccttattctggtagatttgagatctaagggaaccgatggcggaagagccgagaaggtcctcgaagcatgttcaatcgcctgcaacaagaatacatgccctggtgaccgctctgccttgcggccttcaggactgcgattaggaactcccgctctcacttctcgcggattgttagaaaaagatttccagaaagtcgctcactttattcaccgaggtatcgagctaaccctgcagatccagtctgacaccggagtgcgagccaccctcaaggagtttaaggagcggctcgcaggagacaagtaccaggcggctgtccaggcactcagggaagaagtcgagagcttcgcctcactctttcccttgcctggcctacccgatttctag

SEQ ID NO: 274543 - DNA, 1341 bp, Artificial Sequence
  derived and/or modified sequence
atgaccatgccggtgaacggagcccacaaggatgccgatctgtggagctcccacgataagatgttggcacaacccctgaaggattctgacgtcgaggtgtataatatcatcaagaaagaaagtaaccggcaacgggtcggcttggagcttatagcatctgagaactttgcctctagggccgttctggaagcattgggatcctgcctcaacaataagtattcggaaggctatcccggtcagcgttattacgggggaacagaatttatcgatgaactggagacactgtgtcagaagcgggctttacaggcctataaactcgaccctcagtgctggggagtaaatgtccagccctattcgggaagtcccgcaaatttcgctgtttatactgcgttggtggaaccccatggaagaatcatgggcttggacctgccagacgggggacatctaacgcatggatttatgaccgataagaagaagatttccgcaacatccattttcttcgaatccatgccctataaagtaaatcctgacactggatatattaattatgatcagctggaagagaacgcaaggctcttccatccaaaacttataatagccggaacttcatgctacagccgaaacttggagtatgccaggctgcgaaaaatcgcggacgagaacggcgcttatctaatggccgacatggctcatatctctggcttggtggccgctggagtggtcccctctccattcgagcattgccacgtggtaaccaccacaacgcacaaaaccctgcgcggttgtagagccggaatgattttttaccgcaaaggtgttaaatcggtggaccccaagactggtaaggaaattctttacaaccttgaaagtttaatcaatagtgccgttttccctggcttgcaggggggaccccataaccatgccatcgctggtgttgccgtagccctgaagcaagctatgacactggagtttaaggtctaccagcatcaggtcgtggccaactgccgggcacttagtgaagcactgaccgagctggggtacaaaatcgtgaccggtggcagtgacaaccacctcatacttgttgatcttcgcagcaaggggactgacggtggccgtgccgagaaagtgctagaggcctgcagcatcgcttgtaacaagaatacttgtcccggaatagagctgaccttgcagattcagagcgataccggggtccgagctacactcaaagagttcaaggagcgcttggccggagataagtatcaggctgctgtccaggcattgcgtgaggaggtcgagtcgtttgcttctctgttcccgctgcccggtctgccagacttctag

SEQ ID NO: 274544 - DNA, 2464 bp, Artificial Sequence
  derived and/or modified sequence
ggtttggggttggagcggctggtcacgtggctggcccgcggcggtgcgcggggcgttgggtcagcgggtctgggactggtggcaccggcggcggcgtaggacggaggcgtcgctaggcagcttcgaaccagtgcaatgacgatgccagtcaacggggcccacaaggatgctgacctgtggtcctcacatgacaagatgctggcacaacccctcaaagacagtgatgttgaggtttacaacatcattaagaaggagagtaaccggcagagggttggattggagctgattgcctcggagaatttcgccagccgagcagttttggaggccctaggctcttgcttaaataacaaatactctgaggggtacccgggccagagatactatggcgggactgagtttattgatgaactggagaccctctgtcagaagcgagccctgcaggcctataagctggacccacagtgctggggggtcaacgtccagccctactcaggctcccctgcaaactttgctgtgtacactgccctggtggaaccccatgggcgcatcatgggcctggaccttccggatgggggccacctgacccatgggttcatgacagacaagaagaaaatctctgccacgtccatcttctttgaatctatgccctacaaggtgaacccagatactggctacatcaactatgaccagctggaggagaacgcacgcctcttccacccgaagctgatcatcgcaggaaccagctgctactcccgaaacctggaatatgcccggctacggaagattgcagatgagaacggggcgtatctcatggcggacatggctcacatcagcgggctggtggcggctggcgtggtgccctccccatttgaacactgccatgtggtgaccaccaccactcacaagaccctgcgaggctgccgagctggcatgatcttctacaggaaaggagtgaaaagtgtggatcccaagactggcaaagagattctgtacaacctggagtctcttatcaattctgctgtgttccctggcctgcagggaggtccccacaaccacgccattgctggggttgctgtggcactgaagcaagctatgactctggaatttaaagtttatcaacaccaggtggtggccaactgcagggctctgtctgaggccctgacggagctgggctacaaaatagtcacaggtggttctgacaaccatttgatccttgtggatctccgttccaaaggcacagatggtggaagggctgagaaggtgctagaagcctgttctattgcctgcaacaagaacacctgtccaggtgacagaagcgctctgcggcccagtggactgcggctggggaccccagcactgacgtcccgtggacttttggaaaaagacttccaaaaagtagcccactttattcacagagggatagagctgaccctgcagatccagagcgacactggtgtcagagccaccctgaaagagttcaaggagagactggcaggggataagtaccaggcggccgtgcaggctctccgggaggaggttgagagcttcgcctctctcttccctctgcctggcctgcctgacttctaaaggagcgggcccactctggacccacctggcgccacagaggaagctgcctgccggaggacccccacctgagagatggatgagctgctccaaaggggaactgttgacactcgggccctttgagggggtttcttttggacttttttcatgttttcttcacaaatcaaaatttgtttaagtctcattgttagtaattctgggacaggttattaaaggatttaaatttgaacctggctttctcacagctggacataattctaggaaaataaaatactatgtcgccacttggtcataatcatttagatggtggtgtagggcaaagctgttagaaagattgtagcgttttactctccctgggctttcctccgccttgctgcaacagagaggaaatgcccatgtccacagcttgtacacactgccccctcactatcttgttatccagtggcatgccaaaggagaactgaattagcttctgaggcttctgctgtaaatcagaagtgtatgttagtcaagagtaaacaagatgcacccagtatggtgggagggttttgctgtcagtagctcaaagtatggtgtagaaatggcctcctccctccatcctgggaagtcccagtcccatcctggtgtgagaatcaaccaggctttcctgctccacctgagataaccaactccctcccgtaatcaggaagccaaatgtcaccttcccaaagaaattttattttcacgtagctgaagtgcaaaacatagatgaccatttttaataagcacaatcaaatttttaaccacagaatgtctacaagaattatagctttaaaaaatacaaccaatttttatatttcaaaaatatttgaactcaaataaattaatttcttaaaaagta

SEQ ID NO: 274545 - DNA, 1700 bp, Artificial Sequence
  derived and/or modified sequence
ctgagctcgagcggtccagcgccaagttcggggtttggggttggagcggctggtcacgtggctggcccgcggcggtgcgcggggcgttgggtcagcgggtctgggactggtggcaccggcggcggcgtaggacggaggcgtcgctaggcagcttcgaaccagtgcaatgacgatgccagtcaacggggcccacaaggatgctgacctgtggtcctcacatgacaagatgctggcacaacccctcaaagacagtgatgttgaggtttacaacatcattaagaaggagagtaaccggcagagggttggattggagctgattgcctcggagaatttcgccagccgagcagttttggaggccctaggctcttgcttaaataacaaatactctgaggggtacccgggccagagatactatggcgggactgagtttattgatgaactggagaccctctgtcagaagcgagccctgcaggcctataagctggacccacagtgctggggggtcaacgtccagccctactcaggctcccctgcaaactttgctgtgtacactgccctggtggaaccccatgggcgcatcatgggcctggaccttccggatgggggccacctgacccatgggttcatgacagacaagaagaaaatctctgccacgtccatcttctttgaatctatgccctacaaggtgaacccagatactggctacatcaactatgaccagctggaggagaacgcacgcctcttccacccgaagctgatcatcgcaggaaccagctgctactcccgaaacctggaatatgcccggctacggaagattgcagatgagaacggggcgtatctcatggcggacatggctcacatcagcgggctggtggcggctggcgtggtgccctccccatttgaacactgccatgtggtgaccaccaccactcacaagaccctgcgaggctgccgagctggcatgatcttctacaggaaaggagtgaaaagtgtggatcccaagactggcaaagagattctgtacaacctggagtctcttatcaattctgctgtgttccctggcctgcagggaggtccccacaaccacgccattgctggggttgctgtggcactgaagcaagctatgactctggaatttaaagtttatcaacaccaggtggtggccaactgcagggctctgtctgaggccctgacggagctgggctacaaaatagtcacaggtggttctgacaaccatttgatccttgtggatctccgttccaaaggcacagatggtggaagggctgagaaggtgctagaagcctgttctattgcctgcaacaagaacacctgtccagggatagagctgaccctgcagatccagagcgacactggtgtcagagccaccctgaaagagttcaaggagagactggcaggggataagtaccaggcggccgtgcaggctctccgggaggaggttgagagcttcgcctctctcttccctctgcctggcctgcctgacttctaaaggagcgggcccactctggacccacctggcgccacagaggaagctgcctgccggaggacccccacctgagagatggatgagctgctccaaaggggaactgttgacactcgggccctttgagggggtttcttttggacttttttcatgttttcttcacaaatcaaaatttgtttaagtctcattgttagtaatt

SEQ ID NO: 274546 - DNA, 1759 bp, Artificial Sequence
  derived and/or modified sequence
aagttcggggtttggggttggagcggctggtcacgtggctggcccgcggcggtgcgcggggcgttgggtcagcgggtctgggactggtggcaccggcggcggcgtaggacggaggcgtcgctaggcagcttcgaaccagtgcaatgacgatgccagtcaacggggcccacaaggatgctgacctgtggtcctcacatgacaagatgctggcacaacccctcaaagacagtgatgttgaggtttacaacatcattaagaaggagagtaaccggcagagggttggattggagctgattgcctcggagaatttcgccagccgagcagttttggaggccctaggctcttgcttaaataacaaatactctgaggggtacccgggccagaggctcccctgcaaactttgctgtgtacactgccctggtggaaccccatgggcgcatcatgggcctggaccttccggatgggggccacctgacccatgggttcatgacagacaagaagaaaatctctgccacgtccatcttctttgaatctatgccctacaaggtgaacccagatactggctacatcaactatgaccagctggaggagaacgcacgcctcttccacccgaagctgatcatcgcaggaaccagctgctactcccgaaacctggaatatgcccggctacggaagattgcagatgagaacggggcgtatctcatggcggacatggctcacatcagcgggctggtggcggctggcgtggtgccctccccatttgaacactgccatgtggtgaccaccaccactcacaagaccctgcgaggctgccgagctggcatgatcttctacaggaaaggagtgaaaagtgtggatcccaagactggcaaagagattctgtacaacctggagtctcttatcaattctgctgtgttccctggcctgcagggaggtccccacaaccacgccattgctggggttgctgtggcactgaagcaagctatgactctggaatttaaagtttatcaacaccaggtggtggccaactgcagggctctgtctgaggccctgacggagctgggctacaaaatagtcacaggtggttctgacaaccatttgatccttgtggatctccgttccaaaggcacagatggtggaagggctgagaaggtgctagaagcctgttctattgcctgcaacaagaacacctgtccaggtgacagaagcgctctgcggcccagtggactgcggctggggaccccagcactgacgtcccgtggacttttggaaaaagacttccaaaaagtagcccactttattcacagagggatagagctgaccctgcagatccagagcgacactggtgtcagagccaccctgaaagagttcaaggagagactggcaggggataagtaccaggcggccgtgcaggctctccgggaggaggttgagagcttcgcctctctcttccctctgcctggcctgcctgacttctaaaggagcgggcccactctggacccacctggcgccacagaggaagctgcctgccggaggacccccacctgagagatggatgagctgctccaaaggggaactgttgacactcgggccctttgagggggtttcttttggacttttttcatgttttcttcacaaatcaaaatttgtttaagtctcattgttagtaattctgggacaggttattaaaggatttaaatttgaacctggctttctcacagctggacataattctaggaaaataaaatactatgtcgcc

SEQ ID NO: 274547 - DNA, 1452 bp, Artificial Sequence
  derived and/or modified sequence
atgaccatgcccgtgaacggcgcccacaaggacgccgacctgtggagcagccacgacaagatgctggcccagcccctgaaggacagcgacgtggaggtgtacaacatcatcaagaaggagagcaacagacagagagtgggcctggagctgatcgccagcgagaacttcgccagcagagccgtgctggaggccctgggcagctgcctgaacaacaagtacagcgagggctaccccggccagagatactacggcggcaccgagttcatcgacgagctggagaccctgtgccagaagagagccctgcaggcctacaagctggacccccagtgctggggcgtgaacgtgcagccctacagcggcagccccgccaacttcgccgtgtacaccgccctggtggagccccacggcagaatcatgggcctggacctgcccgacggcggccacctgacccacggcttcatgaccgacaagaagaagatcagcgccaccagcatcttcttcgagagcatgccctacaaggtgaaccccgacaccggctacatcaactacgaccagctggaggagaacgccagactgttccaccccaagctgatcatcgccggcaccagctgctacagcagaaacctggagtacgccagactgagaaagatcgccgacgagaacggcgcctacctgatggccgacatggcccacatcagcggcctggtggccgccggcgtggtgcccagccccttcgagcactgccacgtggtgaccaccaccacccacaagaccctgagaggctgcagagccggcatgatcttctacagaaagggcgtgaagagcgtggaccccaagaccggcaaggagatcctgtacaacctggagagcctgatcaacagcgccgtgttccccggcctgcagggcggcccccacaaccacgccatcgccggcgtggccgtggccctgaagcaggccatgaccctggagttcaaggtgtaccagcaccaggtggtggccaactgcagagccctgagcgaggccctgaccgagctgggctacaagatcgtgaccggcggcagcgacaaccacctgatcctggtggacctgagaagcaagggcaccgacggcggcagagccgagaaggtgctggaggcctgcagcatcgcctgcaacaagaacacctgccccggcgacagaagcgccctgagacccagcggcctgagactgggcacccccgccctgaccagcagaggcctgctggagaaggacttccagaaggtggcccacttcatccacagaggcatcgagctgaccctgcagatccagagcgacaccggcgtgagagccaccctgaaggagttcaaggagagactggccggcgacaagtaccaggccgccgtgcaggccctgagagaggaggtggagagcttcgccagcctgttccccctgcccggcctgcccgacttctag

SEQ ID NO: 274548 - DNA, 1341 bp, Artificial Sequence
  derived and/or modified sequence
atgaccatgcccgtgaacggcgcccacaaggacgccgacctgtggagcagccacgacaagatgctggcccagcccctgaaggacagcgacgtggaggtgtacaacatcatcaagaaggagagcaacagacagagagtgggcctggagctgatcgccagcgagaacttcgccagcagagccgtgctggaggccctgggcagctgcctgaacaacaagtacagcgagggctaccccggccagagatactacggcggcaccgagttcatcgacgagctggagaccctgtgccagaagagagccctgcaggcctacaagctggacccccagtgctggggcgtgaacgtgcagccctacagcggcagccccgccaacttcgccgtgtacaccgccctggtggagccccacggcagaatcatgggcctggacctgcccgacggcggccacctgacccacggcttcatgaccgacaagaagaagatcagcgccaccagcatcttcttcgagagcatgccctacaaggtgaaccccgacaccggctacatcaactacgaccagctggaggagaacgccagactgttccaccccaagctgatcatcgccggcaccagctgctacagcagaaacctggagtacgccagactgagaaagatcgccgacgagaacggcgcctacctgatggccgacatggcccacatcagcggcctggtggccgccggcgtggtgcccagccccttcgagcactgccacgtggtgaccaccaccacccacaagaccctgagaggctgcagagccggcatgatcttctacagaaagggcgtgaagagcgtggaccccaagaccggcaaggagatcctgtacaacctggagagcctgatcaacagcgccgtgttccccggcctgcagggcggcccccacaaccacgccatcgccggcgtggccgtggccctgaagcaggccatgaccctggagttcaaggtgtaccagcaccaggtggtggccaactgcagagccctgagcgaggccctgaccgagctgggctacaagatcgtgaccggcggcagcgacaaccacctgatcctggtggacctgagaagcaagggcaccgacggcggcagagccgagaaggtgctggaggcctgcagcatcgcctgcaacaagaacacctgccccggcatcgagctgaccctgcagatccagagcgacaccggcgtgagagccaccctgaaggagttcaaggagagactggccggcgacaagtaccaggccgccgtgcaggccctgagagaggaggtggagagcttcgccagcctgttccccctgcccggcctgcccgacttctag

SEQ ID NO: 274549 - protein, 984 aa, Artificial Sequence
  derived and/or modified sequence
MDCTFEDMLQLINNQDSDFPGLFDPPYAGSGAGGTDPASPDTSSPGSLSPPPATLSSSLEAFLSGPQAAPSPLSPPQPAPTPLKMYPSMPAFSPGPGIKEESVPLSILQTPTPQPLPVPTLVSGGTILATVPLVVDAEKLPINRLAAGSKAPASAQSRGEKRTAHNAIEKRYRSSINDKIIELKDLVVGTEAKLNKSAVLRKAIDYIRFLQHSNQKLKQENLSLRTAVHKSKSLKDLVSACGSGGNTDVLMEGVKTEVEDTLTPPPSDAGSPFQSSPLSLGSRGSGSGGSGSDSEPDSPVFEDSKAKPEQRPSLHSRGMLDRSRLALCTLVFLCLSCNPLASLLGARGLPSPSDTTSVYHSPGRNVLGTESRDGPGWAQWLLPPVVWLLNGLLVLVSLVLLFVYGEPVTRPHSGPAVYFWRHRKQADLDLARGDFAQAAQQLWLALRALGRPLPTSHLDLACSLLWNLIRHLLQRLWVGRWLAGRAGGLQQDCALRVDASASARDAALVYHKLHQLHTMGKHTGGHLTATNLALSALNLAECAGDAVSVATLAEIYVAAALRVKTSLPRALHFLTRFFLSSARQACLAQSGSVPPAMQWLCHPVGHRFFVDGDWSVLSTPWESLYSLAGNPVDPLAQVTQLFREHLLERALNCVTQPNPSPGSADGDKEFSDALGYLQLLNSCSDAAGAPAYSFSISSSMATTTGVDPVAKWWASLTAVVIHWLRRDEEAAERLCPLVEHLPRVLQESERPLPRAALHSFKAARALLGCAKAESGPASLTICEKASGYLQDSLATTPASSSIDKAVQLFLCDLLLVVRTSLWRQQQPPAPAPAAQGTSSRPQASALELRGFQRDLSSLRRLAQSFRPAMRRVFLHEATARLMAGASPTRTHQLLDRSLRRRAGPGGKGGAVAELEPRPTRREHAEALLLASCYLPPGFLSAPGQRVGMLAEAARTLEKLGDRRLLHDCQQMLMRLGGGTTVTSS

SEQ ID NO: 274550 - protein, 906 aa, Artificial Sequence
  derived and/or modified sequence
MNLIIICMARQSCNPLVLFEAEIEKYCPENFVDIKKTLERETRQCQALVIWTDCDREGENIGFEIIHVCKAVKPNLQVLRARFSEITPHAVRTACENLTEPDQRVSDAVDVRQELDLRIGAAFTRFQTLRLQRIFPEVLAEQLISYGSCQFPTLGFVVERFKAIQAFVPEIFHRIKVTHDHKDGIVEFNWKRHRLFNHTACLVLYQLCVEDPMATVVEVRSKPKSKWRPQALDTVELEKLASRKLRINAKETMRIAEKLYTQGYISYPRTETNIFPRDLNLTVLVEQQTPDPRWGAFAQSILERGGPTPRNGNKSDQAHPPIHPTKYTNNLQGDEQRLYEFIVRHFLACCSQDAQGQETTVEIDIAQERFVAHGLMILARNYLDVYPYDHWSDKILPVYEQGSHFQPSTVEMVDGETSPPKLLTEADLIALMEKHGIGTDATHAEHIETIKARMYVGLTPDKRFLPGHLGMGLVEGYDSMGYEMSKPDLRAELEADLKLICDGKKDKFVVLRQQVQKYKQVFIEAVAKAKKLDEALAQYFGNGTELAQQEDIYPAMPEPIRKCPQCNKDMVLKTKKNGGFYLSCMGFPECRSAVWLPDSVLEASRDSSVCPVCQPHPVYRLKLKFKRGSLPPTMPLEFVCCIGGCDDTLREILDLRFSGGPPRASQPSGRLQANQSLNRMDNSQHPQPADSRQTGSSKALAQTLPPPTAAGESNSVTCNCGQEAVLLTVRKEGPNRGRQFFKCNGGSCNFFLWADSPNPGAGGPPALAYRPLGASLGCPPGPGIHLGGFGNPGDGSGSGTSCLCSQPSVTRTVQKDGPNKGRQFHTCAKPREQQCGFFQWVDENTAPGTSGAPSWTGDRGRTLESEARSKRPRASSSDMGSTAKKPRKCSLCHQPGHTRPFCPQNR

SEQ ID NO: 274551 - DNA, 2721 bp, Artificial Sequence
  derived and/or modified sequence
atgaacctgatcatcatctgcatggccagacagagctgcaaccccctggtgctgttcgaggccgagatcgagaagtactgccccgagaacttcgtggacatcaagaagaccctggagagagagaccagacagtgccaggccctggtgatctggaccgactgcgacagagagggcgagaacatcggcttcgagatcatccacgtgtgcaaggccgtgaagcccaacctgcaggtgctgagagccagattcagcgagatcaccccccacgccgtgagaaccgcctgcgagaacctgaccgagcccgaccagagagtgagcgacgccgtggacgtgagacaggagctggacctgagaatcggcgccgccttcaccagattccagaccctgagactgcagagaatcttccccgaggtgctggccgagcagctgatcagctacggcagctgccagttccccaccctgggcttcgtggtggagagattcaaggccatccaggccttcgtgcccgagatcttccacagaatcaaggtgacccacgaccacaaggacggcatcgtggagttcaactggaagagacacagactgttcaaccacaccgcctgcctggtgctgtaccagctgtgcgtggaggaccccatggccaccgtggtggaggtgagaagcaagcccaagagcaagtggagaccccaggccctggacaccgtggagctggagaagctggccagcagaaagctgagaatcaacgccaaggagaccatgagaatcgccgagaagctgtacacccagggctacatcagctaccccagaaccgagaccaacatcttccccagagacctgaacctgaccgtgctggtggagcagcagacccccgaccccagatggggcgccttcgcccagagcatcctggagagaggcggccccacccccagaaacggcaacaagagcgaccaggcccacccccccatccaccccaccaagtacaccaacaacctgcagggcgacgagcagagactgtacgagttcatcgtgagacacttcctggcctgctgcagccaggacgcccagggccaggagaccaccgtggagatcgacatcgcccaggagagattcgtggcccacggcctgatgatcctggccagaaactacctggacgtgtacccctacgaccactggagcgacaagatcctgcccgtgtacgagcagggcagccacttccagcccagcaccgtggagatggtggacggcgagaccagcccccccaagctgctgaccgaggccgacctgatcgccctgatggagaagcacggcatcggcaccgacgccacccacgccgagcacatcgagaccatcaaggccagaatgtacgtgggcctgacccccgacaagagattcctgcccggccacctgggcatgggcctggtggagggctacgacagcatgggctacgagatgagcaagcccgacctgagagccgagctggaggccgacctgaagctgatctgcgacggcaagaaggacaagttcgtggtgctgagacagcaggtgcagaagtacaagcaggtgttcatcgaggccgtggccaaggccaagaagctggacgaggccctggcccagtacttcggcaacggcaccgagctggcccagcaggaggacatctaccccgccatgcccgagcccatcagaaagtgcccccagtgcaacaaggacatggtgctgaagaccaagaagaacggcggcttctacctgagctgcatgggcttccccgagtgcagaagcgccgtgtggctgcccgacagcgtgctggaggccagcagagacagcagcgtgtgccccgtgtgccagccccaccccgtgtacagactgaagctgaagttcaagagaggcagcctgccccccaccatgcccctggagttcgtgtgctgcatcggcggctgcgacgacaccctgagagagatcctggacctgagattcagcggcggcccccccagagccagccagcccagcggcagactgcaggccaaccagagcctgaacagaatggacaacagccagcacccccagcccgccgacagcagacagaccggcagcagcaaggccctggcccagaccctgcccccccccaccgccgccggcgagagcaacagcgtgacctgcaactgcggccaggaggccgtgctgctgaccgtgagaaaggagggccccaacagaggcagacagttcttcaagtgcaacggcggcagctgcaacttcttcctgtgggccgacagccccaaccccggcgccggcggcccccccgccctggcctacagacccctgggcgccagcctgggctgcccccccggccccggcatccacctgggcggcttcggcaaccccggcgacggcagcggcagcggcaccagctgcctgtgcagccagcccagcgtgaccagaaccgtgcagaaggacggccccaacaagggcagacagttccacacctgcgccaagcccagagagcagcagtgcggcttcttccagtgggtggacgagaacaccgcccccggcaccagcggcgcccccagctggaccggcgacagaggcagaaccctggagagcgaggccagaagcaagagacccagagccagcagcagcgacatgggcagcaccgccaagaagcccagaaagtgcagcctgtgccaccagcccggccacaccagacccttctgcccccagaacagatag

SEQ ID NO: 274552 - DNA, 2721 bp, Artificial Sequence
  derived and/or modified sequence
atgaatctaattataatctgcatggcccggcagtcctgtaacccccttgtgctgtttgaagcggagattgagaagtactgtccggagaatttcgtggatatcaagaagaccctggaacgtgaaacaagacaatgccaggctttggtcatttggactgattgcgacagagaaggcgagaatatcggtttcgagatcattcatgtgtgtaaggcagtcaagcccaacttacaagtactccgggctcgtttctctgagattacacctcacgctgtcagaacagcctgcgaaaacctcaccgagccagaccagcgtgttagcgatgcagtagacgttaggcaggagttagaccttcgtattggcgcagcgttcactaggtttcagacactccggctgcagaggatctttccagaagtgcttgctgaacagctgatctcctacggtagttgccaattccccacactcggatttgtggtcgaacggtttaaagcaatccaggctttcgttccagagatattccataggataaaggtcacccatgatcataaggatggtatagtggagtttaactggaagcgtcaccggctcttcaatcacaccgcttgcctggtactgtatcagctgtgcgtcgaggacccaatggccacagttgtggaggtaaggagtaagccgaaatccaagtggcgtccacaggcactggatactgtggaactcgagaagctggcctctcgcaaactcaggataaacgctaaggagaccatgcggatcgctgaaaaactatacacacagggatatattagttacccaagaacagagaccaatatattccctagggatctgaacctgactgttttggtcgaacagcaaaccccagacccccgctggggggcttttgcacagtctattttggaaagaggcgggccaactccgcgtaatggcaataagtccgaccaggcacacccacctattcatcccacgaaatatactaataacctgcaaggagacgagcagcgactgtatgagttcatcgttcgtcactttctggcttgttgttcccaggacgctcaggggcaggagacaaccgtcgagatagatatagcacaggaaagattcgtagcacacggtctgatgatcctcgcgagaaactacctagacgtgtacccctacgaccattggtcagacaagatcctccctgtatatgaacagggcagtcattttcagccttcaacagtggagatggtcgacggcgaaacgtctccacccaaattactgacagaggccgacttgattgcactaatggagaagcatggcatcggcaccgacgccacacatgctgagcatatagagacaattaaggcccggatgtacgtcggcctgacacccgataagcgtttcctgcccggccacctggggatgggtcttgtggaaggctatgactcgatgggttacgagatgagcaagccggatctccgagccgagcttgaggctgatctgaagctcatttgtgacggcaagaaggacaaatttgtcgtgttgcggcagcaggtacagaaatataagcaggtgttcatcgaagccgtggcaaaggcaaaaaagctcgatgaagccctggcccagtatttcggtaatgggactgagctggcacagcaggaggacatctaccccgcaatgccggagcccattaggaaatgtcctcagtgtaataaggatatggttctcaagaccaagaagaacggcggcttttacctgagttgtatgggcttcccagagtgcagaagcgccgtgtggttacccgatagtgtgctggaagcgtcacgagattccagcgtttgcccagtgtgccaaccacaccctgtgtacagactgaagctgaaatttaagcgtggatcactgccacctactatgccgctggaatttgtgtgttgcatcggaggctgtgacgatacattacgggaaattcttgatctgcggttctctggcgggccacctagagcatcccagcctagtggcagactccaagccaatcaatcccttaatcgtatggataatagccagcacccccagcccgctgacagtcgacagactggcagttccaaagccctggcacagactttgcccccccccacggccgccggcgaaagcaactccgtgacttgtaattgtgggcaagaagccgttttgctcacagtaaggaaggaaggtcctaaccgtggtagacagttcttcaaatgtaatggaggctcctgcaactttttcttgtgggcggacagcccaaaccctggtgcaggcggcccacctgccctggcttatcgacctctgggtgcctcattaggatgtccaccaggacccgggatccatctgggcggctttggtaatccaggcgacggctcggggtcagggacaagctgcctgtgtagccaaccaagcgttaccagaacagtgcagaaggacggaccaaacaaaggccgtcagtttcatacttgtgcgaagcctagagagcagcaatgtggattttttcaatgggtcgacgagaacaccgcgccaggtaccagcggcgccccctcttggacaggagaccggggcaggacacttgagtcggaagcgcgctccaaaagaccgagggcctcttcctctgacatgggcagtaccgccaagaaaccacggaaatgctctctatgccaccagccgggtcacacccgccctttctgtcctcagaatagatag

SEQ ID NO: 274553 - DNA, 2721 bp, Artificial Sequence
  derived and/or modified sequence
atgaacctgatcatcatctgcatggcccggcagagctgcaaccccctggtgctgtttgaagctgagattgagaagtactgcccagaaaattttgtggacatcaagaagaccctggagcgggagacccggcagtgccaggccctggtgatctggacagactgtgaccgggagggagaaaatattggatttgagatcatccacgtgtgcaaggctgtgaagcccaacctgcaggtgctgcgggcccgcttcagcgagatcacccctcatgctgtgaggacagcctgtgagaacctgacagagccagaccagagggtgtctgatgctgtggatgtgcggcaggagctggacctgagaattggagctgccttcacccgcttccagaccctgcggctgcagaggatcttccctgaggtgctggccgagcagctgatctcctatggcagctgccagttccccaccctgggctttgtggtggagcgcttcaaggccatccaggcctttgtgcctgagatcttccaccgcatcaaggtgacccatgaccacaaggatggcatcgtggagttcaactggaagaggcacaggctcttcaaccacacagcctgcctggtgctgtaccagctgtgtgtggaggaccccatggccaccgtggtggaggtgcgcagcaagcccaagagcaagtggaggccccaggccctggacacagtggagctggagaagctggccagcaggaagctgcgcatcaatgccaaggagaccatgagaattgctgagaagctgtacacccagggctacatctcctaccccaggacagagaccaacatcttcccccgggacctgaacctgactgtgctggtggagcagcagaccccagacccccgctggggcgcctttgcccagagcatcctggagcggggcggccccaccccaagaaatggaaacaagagtgaccaggcccacccccccatccaccccaccaagtacaccaacaacctgcagggagatgagcagaggctgtatgagttcatcgtgcgccacttcctggcctgctgcagccaggatgcccagggccaggagaccaccgtggagattgatattgcccaggagagatttgtggcccacggcctgatgatcctggccaggaactacctggatgtgtacccctatgaccactggagcgacaagatcctgcctgtgtatgagcagggcagccacttccagcccagcacagtggagatggtggatggagagaccagcccccccaagctgctgacagaggccgacctgattgccctgatggagaagcatggaattggaacagatgccacccacgccgagcacatcgagaccatcaaggccaggatgtatgtgggcctgaccccagacaagcgcttcctgcccggccacctgggcatgggcctggtggagggctatgacagcatgggctatgagatgagcaagccagacctgcgggcagagctggaggccgacctgaagctgatctgtgatggcaagaaggacaagtttgtggtgctgcggcagcaggtgcagaagtacaagcaggtgttcattgaagctgtggccaaggccaagaagctggatgaggccctggcccagtactttggaaatggaacagagctggcccagcaggaggacatctacccagccatgcctgagcccatcaggaagtgcccccagtgcaacaaggacatggtgctgaagaccaagaagaatggaggcttctacctgagctgcatgggcttcccagaatgtagatctgctgtgtggctgcctgattctgtgctggaggccagccgggacagctctgtgtgccctgtgtgccagccccaccctgtgtaccgcctgaagctgaagttcaagaggggcagcctgccccccaccatgcccctggagtttgtgtgctgcatcggcggctgtgatgacaccctgcgggagatcctggacctgcgcttcagcggcggccccccccgggccagccagcccagcggccgcctgcaggccaaccagagcctgaacaggatggacaacagccagcacccccagcctgctgacagccggcagacaggcagcagcaaggccctggcccagaccctgcccccacccacagctgctggggagagcaacagcgtgacctgcaactgtggccaggaggccgtgctgctgactgtgaggaaggagggccccaacagaggccggcagttcttcaagtgcaatggaggcagctgcaacttcttcctgtgggccgacagccccaaccctggagctgggggccccccagccctggcctaccggcccctgggcgccagcctgggctgccccccaggccctggcatccacctgggcggctttggaaatcctggagatggcagcggcagcggcaccagctgcctgtgcagccagcccagcgtgaccaggacagtgcagaaggatggccccaacaagggccggcagttccacacctgtgccaagccccgggagcagcagtgtggcttcttccagtgggtggatgaaaatacagcccctggcaccagcggggcccccagctggacaggagaccggggccgcaccctggagagcgaggcccggagcaagaggccccgggccagcagcagtgacatgggcagcacagccaagaagcccaggaagtgcagcctgtgccaccagcccggccacacccggcccttctgcccccagaacagatag

SEQ ID NO: 274554 - DNA, 2721 bp, Artificial Sequence
  derived and/or modified sequence
atgaacctgatcatcatctgcatggcccggcagagctgcaaccccctcgtactgttcgaggccgagattgagaagtactgcccggagaattttgtagacattaagaagactttggagcgtgaaactcgtcaatgccaggcattagtgatctggacggattgcgatcgagaaggtgagaatatcggtttcgagattatacacgtttgtaaggccgtcaagcccaaccttcaggtccttcgcgccaggttctccgaaatcaccccacacgccgtgcgcaccgcctgtgagaatcttacggagccagatcagagagtgtccgatgctgtcgacgtgcgacaggagttagacctgcgcatcggagcggcttttacgaggtttcagactctgcgcttacaacgtatctttccggaggttctggcagagcagttaatctcttatgggagctgtcagttcccaaccctaggatttgtagtggaaaggtttaaagccatccaagcgtttgtgccggagatctttcatcggattaaagtcacgcacgatcataaagacgggatagtggagttcaactggaagcggcaccgcctgttcaaccacactgcatgcctcgtcctgtaccaactgtgtgtggaagaccctatggctactgtagtcgaagtaagatcaaagcccaaatcaaaatggagaccacaggctctggacacagtcgagcttgaaaaattggcttctaggaaactgaggatcaacgcaaaagagactatgagaattgccgaaaagctgtacactcagggctatatcagctaccctcggaccgagacaaatatctttccacgggatctgaatctgactgttctggttgaacaacagacgccggacccccggtggggtgcgtttgcccagtccatcctggagagaggtggtcccactccaaggaacggcaacaagtccgatcaggcccacccccccattcatcctactaagtataccaacaacctccagggcgacgagcagagactgtatgaatttatagtgcggcactttttagcatgttgtagccaggacgcccaagggcaggaaacgactgtcgagatcgacattgctcaagaaagatttgtggcccatggtctcatgatactggctaggaattacctggacgtgtacccatacgatcactggagtgacaagatcctgccagtttatgagcagggcagtcatttccagccatcaactgtagaaatggttgacggggaaaccagccctcctaaactgctgactgaagcagacctgattgcgctgatggagaagcatggaattggcacagacgccacccacgcagagcacatagagaccatcaaggcgcgaatgtatgttgggctgactccagataaacgtttcctgccagggcatcttgggatggggcttgttgagggttatgacagcatggggtacgagatgtccaagccagatctgcgcgccgagctggaggccgacttaaagctgatctgtgatggaaaaaaggacaagttcgttgttctgcggcaacaagtacaaaagtacaagcaggtattcattgaggcagtggccaaagcaaaaaagctggatgaggctctggcacagtatttcggaaacggaaccgagctcgcccagcaggaagatatctatcccgctatgcctgagcccattaggaagtgtccgcagtgtaataaagatatggtcttgaagaccaagaaaaatggaggcttttacctgtcatgcatgggcttccccgaatgcagaagcgctgtgtggctgcccgacagcgtgctggaagccagccgtgatagttcggtttgtccagtgtgccagcctcacccagtataccggctaaagctcaaattcaagcgcggctcgttaccccctaccatgcctttagaatttgtgtgctgcataggcggctgcgacgacacccttagggagattctggacttgagattctccggcggccccccaagggcgtctcagccttccggcagactgcaggccaaccagtcgctcaaccgtatggacaactcacagcacccgcagccagcggattcccgccagaccggatccagtaaggccctggcccagacactgccaccacctacggcggccggggaatcaaactcagtgacgtgcaattgcgggcaggaggccgtgctcctcacagtgcgtaaagaaggacctaacagaggccgccagttctttaagtgcaacggcggaagctgcaacttcttcctgtgggccgatagccccaatcccggagcaggagggccgcccgctttggcgtatcggcccctcggcgcctcactgggctgccctcccggcccaggaatccaccttggtggctttggaaatcccggtgatggctcgggaagtgggacctcatgtttgtgcagtcagccgagcgttacccgaaccgtccagaaggacggccctaataaaggaagacaatttcatacctgcgcgaagcccagggaacagcaatgtggtttctttcagtgggtagatgagaataccgctcccgggacgtccggagcacccagttggactggcgaccgcggtaggaccctagaaagtgaggctagatctaaaagaccccgagctagttctagcgacatgggatcaaccgccaagaaacccaggaagtgctccttatgccaccaacccggtcacactagaccgttttgcccacagaaccgctag

SEQ ID NO: 274555 - DNA, 2721 bp, Artificial Sequence
  derived and/or modified sequence
atgaatctcatcattatctgtatggctagacagtcctgcaacccacttgtcttgttcgaggctgaaatcgagaagtactgtccagagaacttcgtggatattaagaagaccctggagcgggaaaccaggcagtgccaagcattggtgatttggactgactgtgatcgagagggtgaaaatatcggctttgagattattcatgtctgtaaagccgtcaaaccaaatctacaggtcctccgcgctcgcttctccgagatcacaccccacgctgttcgcacagcatgtgagaacctgaccgagcctgatcaacgggtgagcgatgcggtggatgtgaggcaggaactcgatctaaggatcggggcagcgtttacaaggttccagaccctgagacttcagcgtatttttcctgaggttctcgctgaacaattaattagttatggtagctgtcagtttccaacactcggctttgttgtcgaacgcttcaaggctatccaagctttcgtaccagagatctttcaccggattaaagtcacccatgatcataaagatggcatcgtggaatttaactggaagcggcaccgcctattcaatcacaccgcttgcctggtgctgtatcagctgtgcgtggaggaccctatggcgaccgtagtcgaggtgcggagcaaaccaaaatccaaatggcggcctcaggcattggacactgtcgagctcgagaaattggcctccaggaagctgcgaatcaatgctaaagagacaatgcgtatcgccgaaaagctatacacccagggttacatctcctaccctagaacagagaccaatattttccccagggacctgaatctgactgttctggtggagcagcagacacctgaccccagatggggagcctttgctcagagtatccttgagcgcggagggccaacacccaggaacggtaacaaatcagatcaggcccatcctcctattcatccgacaaaatatacaaacaacctccaaggagatgagcagcgactgtacgaatttattgtcagacattttttagcgtgctgttcccaggacgcacaagggcaggaaactacagtggaaatcgacatagcgcaggaaagatttgtcgcccatggcctgatgattttagcccgaaattaccttgatgtctacccttacgaccactggtcagataagatcctgcctgtgtatgaacaagggtcacacttccaaccttctactgtggaaatggttgacggagaaaccagccctcctaaactgctcaccgaggcagatctgatcgcactgatggaaaagcacgggattgggaccgatgcaacacatgccgagcatatcgagaccatcaaggctcgtatgtatgtgggccttactccagataagcgattcctgcccggtcatctggggatggggctggtcgaggggtacgactccatgggatacgaaatgagcaagcctgacttgcgtgctgagctagaggctgatctgaaattgatatgtgacggaaaaaaggacaagtttgtggtgctcagacagcaagttcagaagtataaacaggtgttcattgaggccgtggctaaagccaagaagctggatgaggcattggcacaatacttcggaaatggaaccgaactcgcgcaacaggaggatatctaccctgccatgcccgagccaattcggaagtgcccacagtgcaataaagacatggtcctgaagaccaagaagaacggcggtttttatctctcctgcatgggatttccagaatgtcgtagcgcggtgtggctaccagacagtgtgctcgaggcgagcagggattctagtgtttgtcccgtctgccaacctcacccggtctaccgactgaaactgaagtttaagcgaggtagcctgcccccaacaatgcccctcgagttcgtctgttgtatcggcggatgtgatgatacgcttcgcgaaatattagacctccggtttagcggtggtcccccacgagcttcccagccgtcaggtcgactgcaggccaatcagtccctgaacaggatggataactcccaacacccccagcccgcagactctaggcaaactggctccagcaaggccctggcccagaccttgccaccacctacagcggcaggcgaatccaattccgtcacctgcaactgcgggcaggaggctgtgctgctgacggtgcgcaaggaggggccaaaccgtggccgacagtttttcaaatgtaacggaggctcatgcaattttttcctgtgggccgacagccctaaccctggcgcaggtggccctcccgcactggcatacagacctcttggagcaagcctgggatgtcctccagggccaggaatccacctagggggtttcggcaatcccggagacggtagcgggtcaggcacaagctgcctgtgctcacagccatccgttacacgcacagtgcagaaggatggtccgaataaaggccgacaattccatacgtgcgccaaacccagagaacagcagtgtggattcttccaatgggtcgatgaaaatacggccccaggaacaagtggtgcaccctcctggaccggggacagggggagaacactggaaagcgaagctaggtcaaagcgccctcgggcttcctctagcgacatgggcagcacagcaaaaaagcccagaaagtgctctctctgccaccagcccggtcatacacgccctttctgccctcaaaacaggtag

SEQ ID NO: 274556 - DNA, 1951 bp, Artificial Sequence
  derived and/or modified sequence
cagatctaagcccaagagcaagtggcggcctcaagccttggacactgtggagcttgagaagctggcttctcgaaagttgagaataaatgctaaagaaaccatgaggattgctgagaagctctacactcaaggggagatgaacagcgactgtacgagtttattgttcgccatttcctggcttgctgctcccaggatgctcaggggcaggagaccacagtggagatcgacatcgctcaggaacgctttgtggcccatggcctcatgattctggcccgaaactatctggatgtgtatccatatgatcactggagtgacaagatcctccctgtctatgagcaaggatcccactttcagcccagcaccgtggagatggtggacggggagaccagcccacccaagctgctcaccgaggccgacctcattgccctcatggagaagcatggcattggtacggatgccactcatgcggagcacatcgagaccatcaaagcccggatgtacgtgggcctcaccccagacaagcggttcctccctgggcacctgggcatgggacttgtggaaggttatgattccatgggctatgaaatgtctaagcctgacctccgggctgaactggaagctgatctgaagctgatctgtgatggcaaaaaggacaaatttgtggttctaaggcagcaagtgcagaaatacaagcaggttttcattgaagcggtggctaaagcaaagaaattggacgaggccttggcccagtactttgggaatgggacagagttggcccagcaagaagatatctacccagccatgccagagcccatcaggaagtgcccacagtgcaacaaggacatggtccttaagaccaagaagaatggcgggttctacctcagctgcatgggtttcccagagtgtcgctcagctgtgtggcttcctgactcggtgctggaggccagcagggacagcagtgtgtgtccagtttgtcagccacaccctgtgtacaggttaaagttaaagtttaagcgcggtagccttcccccgaccatgcctctggagtttgtttgctgcatcggcggatgcgacgacaccctgagggagatcctggacctgagattttcagggggcccccccagggctagccagccctctggccgcctgcaggctaaccagtccctgaacaggatggacaacagccagcacccccagcctgctgacagcagacagactgggtcctcaaaggctctggcccagaccctcccaccacccacggctgctggtgaaagcaattctgtgacctgcaactgtggccaggaggctgtgctgctcactgtccgtaaggagggccccaaccggggccggcagttctttaagtgcaacggaggtagctgcaacttcttcctgtgggcagacagccccaatccgggagcaggagggcctcctgccttggcatatagacccctgggcgcctccctgggatgcccaccaggcccagggatccacctaggtgggtttggcaaccctggtgatggcagtggtagtggcacatcctgcctttgcagccagccctccgtcacacggactgtgcagaaggatggacccaacaaggggcgccagttccacacatgtgccaagccgagagagcagcagtgtggctttttccagtgggtcgatgagaacaccgctccagggacttctggagccccgtcctggacaggagacagaggaagaaccctggagtcggaagccagaagcaaaaggccccgggccagttcctcagacatggggtccacagcaaagaaaccccggaaatgcagcctttgccaccagcctggacacacccgtcccttttgtcctcagaacagatgagctcagggtagggtagagaacgccactttctcagacctgtcccctttgtgtttagaaatgagttaaccaggaccaagtggccatttagtgtcct

SEQ ID NO: 274557 - DNA, 3156 bp, Artificial Sequence
  derived and/or modified sequence
tgaagctccaaaggccagcaggctggtggggacgtgaccgaagcgaggctctggttccctttcggtgggcgccatttgagcctcatctctggcttccccaggatgcgccggcagccggggagcggctccgggcgcgaggtctgaggatgatctttcctgtcgcccgctacgcgctccggtggctgcgacggcccgaagaccgtgccttttcccgcgccgccatggagatggccctccgaggcgtgcggaaagtcctctgtgtggccgaaaaaaacgacgcggccaaggggatcgccgacctgctgtcaaacggtcgcatgaggcggagagaaggactttcaaaattcaacaagatctatgaatttgattatcatctgtatggccaggcagagctgcaaccctcttgtcctctttgaagcagaaattgaaaagtactgcccagagaattttgtagacatcaagaaaactttggaacgagagactcgccagtgccaggctctggtgatctggactgactgtgatagagaaggcgaaaacatcgggtttgagattatccacgtgtgtaaggctgtaaagcccaatctgcaggtgttgcgagcccgattctctgagatcacaccccatgccgtcaggacagcttgtgaaaacctgaccgagcctgatcagagggtgagcgatgctgtggatgtgaggcaggagctggacctgaggattggagctgcctttactaggttccagaccctgcggcttcagaggatttttcctgaggtgctggcagagcagctcatcagttacggcagctgccagttccccacactgggctttgtggtggagcggttcaaagccattcaggcttttgtaccagaaatcttccacagaattaaagtaactcatgaccacaaagatggtatcgtagaattcaactggaaaaggcatcgactctttaaccacacggcttgcctagttctctatcagttgtgtgtggaggatcccatggcaactgtggtagaggtcagatctaagcccaagagcaagtggcggcctcaagccttggacactgtggagcttgagaagctggcttctcgaaagttgagaataaatgctaaagaaaccatgaggattgctgagaagctctacactcaagggtacatcagctatccccgaacagaaacaaacatttttcccagagacttaaacctgacggtgttggtggaacagcagacccccgatccacgctggggggcctttgcccagagcattctagagcggggtggtcccaccccacgcaatgggaacaagtctgaccaagctcaccctcccattcaccccaccaaatacaccaacaacttacagggagatgaacagcgactgtacgagtttattgttcgccatttcctggcttgctgctcccaggatgctcaggggcaggagaccacagtggagatcgacatcgctcaggaacgctttgtggcccatggcctcatgattctggcccgaaactatctggatgtgtatccatatgatcactggagtgacaagatcctccctgtctatgagcaaggatcccactttcagcccagcaccgtggagatggtggacggggagaccagcccacccaagctgctcaccgaggccgacctcattgccctcatggagaagcatggcattggtacggatgccactcatgcggagcacatcgagaccatcaaagcccggatgtacgtgggcctcaccccagacaagcggttcctccctgggcacctgggcatgggacttgtggaaggttatgattccatgggctatgaaatgtctaagcctgacctccgggctgaactggaagctgatctgaagctgatctgtgatggcaaaaaggacaaatttgtggttctaaggcagcaagtgcagaaatacaagcaggttttcattgaagcggtggctaaagcaaagaaattggacgaggccttggcccagtactttgggaatgggacagagttggcccagcaagaagatatctacccagccatgccagagcccatcaggaagtgcccacagtgcaacaaggacatggtccttaagaccaagaagaatggcgggttctacctcagctgcatgggtttcccagagtgtcgctcagctgtgtggcttcctgactcggtgctggaggccagcagggacagcagtgtgtgtccagtttgtcagccacaccctgtgtacaggttaaagttaaagtttaagcgcggtagccttcccccgaccatgcctctggagtttgtttgctgcatcggcggatgcgacgacaccctgagggagatcctggacctgagattttcagggggcccccccagggctagccagccctctggccgcctgcaggctaaccagtccctgaacaggatggacaacagccagcacccccagcctgctgacagcagacagactgggtcctcaaaggctctggcccagaccctcccaccacccacggctgctggtgaaagcaattctgtgacctgcaactgtggccaggaggctgtgctgctcactgtccgtaaggagggccccaaccggggccggcagttctttaagtgcaacggaggtagctgcaacttcttcctgtgggcagacagccccaatccgggagcaggagggcctcctgccttggcatatagacccctgggcgcctccctgggatgcccaccaggcccagggatccacctaggtgggtttggcaaccctggtgatggcagtggtagtggcacatcctgcctttgcagccagccctccgtcacacggactgtgcagaaggatggacccaacaaggggcgccagttccacacatgtgccaagccgagagagcagcagtgtggctttttccagtgggtcgatgagaacaccgctccagggacttctggagccccgtcctggacaggagacagaggaagaaccctggagtcggaagccagaagcaaaaggccccgggccagttcctcagacatggggtccacagcaaagaaaccccggaaatgcagcctttgccaccagcctggacacacccgtcccttttgtcctcagaacagatgagctcagggtagggtagagaacgccactttctcagacctgtcccctttgtgtttagaaatgagttaaccaggaccaagt

SEQ ID NO: 274558 - protein, 347 aa, Artificial Sequence
  derived and/or modified sequence
MKRSLNENSARSTAGCLPVPLFNQKKRNRQPLTSNPLKDDSDWAWEAVNPELAPVMKTVDTGQIPHSVSRPLRSQDSVFNSIQSNTGRSQGGWSYRDGNKNTSLKTWNKNDFKPQCKRTNLVANDGKNSCPVSSGAQQQKQLRIPEPPNLSRNKETELLRQTHSSKISGCTMRGLDKNSALQTLKPNFQQNQYKKQMLDDIPEDNTLKETSLYQLQFKEKASSLRIISAVIESMKYWREHAQKTVLLFEVLAVLDSAVTPGPYYSKTFLMRDGKNTLPCVFYEIDRELPRLIRGRVHRCVGNYDQKKNIFQCVSVRPASVSEQKTFQAFVKIADVEMQYYINVMNET

SEQ ID NO: 274559 - DNA, 1044 bp, Artificial Sequence
  derived and/or modified sequence
atgaagagaagcctgaacgagaacagcgccagaagcaccgccggctgcctgcccgtgcccctgttcaaccagaagaagagaaacagacagcccctgaccagcaaccccctgaaggacgacagcgactgggcctgggaggccgtgaaccccgagctggcccccgtgatgaagaccgtggacaccggccagatcccccacagcgtgagcagacccctgagaagccaggacagcgtgttcaacagcatccagagcaacaccggcagaagccagggcggctggagctacagagacggcaacaagaacaccagcctgaagacctggaacaagaacgacttcaagccccagtgcaagagaaccaacctggtggccaacgacggcaagaacagctgccccgtgagcagcggcgcccagcagcagaagcagctgagaatccccgagccccccaacctgagcagaaacaaggagaccgagctgctgagacagacccacagcagcaagatcagcggctgcaccatgagaggcctggacaagaacagcgccctgcagaccctgaagcccaacttccagcagaaccagtacaagaagcagatgctggacgacatccccgaggacaacaccctgaaggagaccagcctgtaccagctgcagttcaaggagaaggccagcagcctgagaatcatcagcgccgtgatcgagagcatgaagtactggagagagcacgcccagaagaccgtgctgctgttcgaggtgctggccgtgctggacagcgccgtgacccccggcccctactacagcaagaccttcctgatgagagacggcaagaacaccctgccctgcgtgttctacgagatcgacagagagctgcccagactgatcagaggcagagtgcacagatgcgtgggcaactacgaccagaagaagaacatcttccagtgcgtgagcgtgagacccgccagcgtgagcgagcagaagaccttccaggccttcgtgaagatcgccgacgtggagatgcagtactacatcaacgtgatgaacgagacctag

SEQ ID NO: 274560 - DNA, 1044 bp, Artificial Sequence
  derived and/or modified sequence
atgaaaaggagcctgaatgaaaattccgcccggtccaccgccggctgtctgcctgtgcccctgttcaatcagaagaagcggaaccggcagccactgacatctaaccctctgaaggacgactcggattgggcttgggaggcagtcaaccccgaacttgcccctgttatgaaaaccgtggataccgggcagatcccccactccgtgtcaagaccactgcggagccaggactctgtgttcaattcaatacaaagcaacactgggaggagccaaggaggatggagctacagagatgggaacaaaaatacttcactgaagacctggaacaaaaacgacttcaagccccagtgtaagaggactaacctggtcgccaatgacggtaagaattcatgtcccgtctcatccggagctcaacagcaaaaacagctgcggattccagagcctcctaatctctcccggaacaaagagaccgagctccttaggcaaactcacagttccaaaataagtggttgcacgatgagaggcctggacaaaaattccgctctccagacactgaagccaaatttccagcagaaccagtataaaaagcagatgctcgatgacatcccggaggataacactcttaaagaaacctctctataccagctgcagttcaaagagaaggccagttcgctcagaataatctctgcggtaatcgagagcatgaagtattggcgggagcacgcacagaaaaccgtgctgctgttcgaagttctggcggtcctagatagtgccgtcacacccggcccttattattcaaaaacctttctcatgcgggatgggaagaatacactgccctgcgtcttttatgaaatcgatagagagctgccccggcttatccggggccgggttcaccgctgtgtaggtaactacgatcaaaagaagaatattttccaatgcgtgtctgttcgccccgcctctgtgtcagagcagaaaaccttccaagcctttgtgaagatagccgatgtagaaatgcagtattacatcaacgttatgaatgagacgtag

SEQ ID NO: 274561 - DNA, 1044 bp, Artificial Sequence
  derived and/or modified sequence
atgaagaggagcctgaatgaaaattctgcccggagcacagctggctgcctgcctgtgcccctcttcaaccagaagaagaggaaccggcagcccctgaccagcaaccccctgaaggatgacagcgactgggcctgggaggccgtgaaccctgagctggcccctgtgatgaagacagtggacaccggccagatcccccacagcgtgtcccggcccctgcggagccaggacagcgtcttcaacagcatccagagcaacacaggccgcagccagggcggctggagctacagagatggcaacaagaacaccagcctgaagacctggaacaagaatgacttcaagccccagtgcaagaggaccaacctggtggccaatgatggcaagaacagctgccctgtgagcagcggggcccagcagcagaagcagctgcgcatccctgagccccccaacctgagcaggaacaaggagacagagctgctgcggcagacccacagcagcaagatcagcggctgcaccatgaggggcctggacaagaacagcgccctgcagaccctgaagcccaacttccagcagaaccagtacaagaagcagatgctggatgacatccctgaggacaacaccctgaaggagaccagcctgtaccagctgcagttcaaggagaaggccagcagcctgcgcatcatctctgctgtgattgaatccatgaagtactggagggagcacgcccagaagacagtgctgctgtttgaggtgctggccgtgctggacagcgctgtgaccccaggcccctactacagcaagaccttcctgatgagagatggcaagaacaccctgccctgtgtgttctatgaaattgaccgggagctgcccaggctcatccggggccgggtgcaccgctgtgtgggcaactatgaccagaagaagaacatcttccagtgtgtgtctgtgcggcctgcctctgtgtctgagcagaagaccttccaggcctttgtgaagattgctgatgtggagatgcagtactacatcaacgtgatgaatgagacctag

SEQ ID NO: 274562 - DNA, 1044 bp, Artificial Sequence
  derived and/or modified sequence
atgaagcggagcctgaacgagaacagcgcccggagcaccgccggctgtctgcctgttcccctcttcaaccagaagaaacgcaatcgtcagccactgacgagcaaccccctgaaggacgactcggactgggcttgggaggcggtgaaccctgaattggcgcccgtaatgaaaacagttgacaccggccagatccctcactctgtgtcccgccctcttaggagccaagatagcgtatttaattctatccagagcaataccggacgatctcagggcggatggagttaccgagacggtaataagaatacatctctcaagacctggaacaagaatgatttcaagccacaatgtaagcggactaacctcgtagccaatgatgggaaaaacagttgccccgtgtcttcaggagcccagcaacaaaagcagctgaggatacctgagcccccaaacctgagccggaataaggaaacggaactgttaagacagacacactcttccaaaatctctggatgcacaatgcgcggcctcgacaaaaatagtgccctccagacccttaagcctaactttcagcagaaccagtataagaagcagatgcttgacgacatccctgaagacaacactcttaaagaaaccagcctgtatcagctgcaattcaaagaaaaagcctcatccctgcgaatcataagtgccgtcatcgagtccatgaagtactggcgcgaacatgcccagaaaactgtgcttctgttcgaagtcctagcagtgttggattcagctgtcactccaggtccctactactccaagaccttcctgatgcgcgacggtaaaaataccctgccttgcgttttctacgagatcgatcgcgaactgccaaggcttatccgtgggagagttcatcggtgtgtgggaaattatgatcaaaaaaaaaatatctttcagtgtgtgagtgttagacccgcctccgtgagcgagcagaaaacattccaggcttttgtgaagatcgccgatgtggagatgcagtactacatcaatgtgatgaacgaaacctag

SEQ ID NO: 274563 - DNA, 1044 bp, Artificial Sequence
  derived and/or modified sequence
atgaagcgcagccttaacgagaacagcgcccgatccactgccggatgtcttcccgttcctttgttcaaccagaagaagcgaaacaggcaacctctgaccagcaaccccctaaaagacgattccgattgggcttgggaagccgtcaatcctgagctggctccagtaatgaaaacagtggacacgggccagattccacacagcgtgagccggccactgcgcagccaagactccgtattcaactccatccagagcaataccgggcgttcccagggcggatggtcttaccgggacggtaacaagaacacaagtctcaagacatggaacaaaaacgatttcaaaccgcagtgcaagagaacaaacctggtggccaatgatggaaaaaactcatgtccggtatcctccggagcccagcagcaaaaacaactgaggatccctgaacccccaaatctcagccggaacaaggagactgaactgctgcgacagacccactcctccaagatatccgggtgcactatgagggggctagacaaaaacagtgcgctgcagacgctgaagccaaactttcaacagaatcaatacaagaagcagatgcttgacgatatccctgaagacaatacactcaaggaaacaagtctataccagttgcagtttaaggaaaaggcaagttccctacgcatcattagcgctgtcatcgaatcgatgaagtattggcgcgagcacgcccagaagacagtgctgctgtttgaggtgctggctgtgctggactccgctgtgacaccgggtccttactattccaaaaccttcctgatgcgggacggaaagaacaccctcccatgcgtattctatgagatagatcgcgagctacctcggctgatccgcggacgagtgcaccgttgtgtgggaaactacgaccagaagaagaatatctttcagtgcgtgtcggtgagacccgcaagcgtctccgaacagaagaccttccaggctttcgtgaaaattgcagatgtggaaatgcagtactatatcaatgttatgaacgagacctag

SEQ ID NO: 274564 - DNA, 1683 bp, Artificial Sequence
  derived and/or modified sequence
gtgcagagaggctttgagggatggtggagtccggctctgctggcctagaagcagagtgcaccctcgtgctcagtgctcagtgggtgtctgaactgaggggcagttgtcaatttgtctgagtgggaaacatcctggattttgttacttggcaaacagctggtgtaaacctacagccagcagcagtctggagcctgggagcctcctgaagtcccgggtgaagcctctggttttaccaattgcaggtcggcttggctgggagagatggatggcgggaaaggggcagcagtcttgaggagcagggagaggagtctttcctcctgccagcttcccccgtcagccccaaccccagcccacacattgtaccatctcttctgctgtgactgggttgcctgaatttgtgggagacccgtgatcccatcccagagtgtgcgggggacggaggtctagtgggacaatgtcatattataaatttggaatgctgaatagaaaattatagattttgatattgaaggaaatgaagcgaagcctaaatgaaaattcagctcgaagtacagcaggctgtttgcctgttccgttgttcaatcagaaaaagaggaacagacagccattaacttctaatccacttaaagatgattcagattgggcctgggaagctgtgaatccagagttggctcctgtaatgaaaacagtggacaccgggcaaataccacattcagtttctcgtcctctgagaagtcaagattctgtctttaactctattcaatcaaatactggaagaagccagggtggttggagctacagagatggtaacaaaaataccagcttgaaaacttggaataaaaatgattttaagcctcaatgtaaacgaacaaacttagtggcaaatgatggaaaaaattcttgtccagtgagttcgggagctcaacaacaaaaacaattaagaatacctgaacctcctaacttatctcgcaacaaagaaaccgagctactcagacaaacacattcatcaaaaatatctggctgcacaatgagagggctagacaaaaacagtgcactacagacacttaagcccaattttcaacaaaatcaatataagaaacaaatgttggatgatattccagaagacaacaccctgaaggaaacctcattgtatcagttacagtttaaggaaaaagctagttctttaagaattatttctgcagttattgaaagcatgaagtattggcgtgaacatgcacagaaaactgtacttctttttgaagtattagctgttcttgattcagctgttacacctggcccatattattcgaagacttttcttatgagggatgggaaaaatactctgccttgtgtcttttatgaaatcgatcgtgaacttccgagactgattagaggccgagttcatagatgtgttggcaactatgaccagaaaaagaacattttccaatgtgtttctgtcagaccggcgtctgtttctgaacaaaaaactttccaggcatttgtcaaaattgcagatgttgagatgcagtattatattaatgtgatgaatgaaacttaagtagtgataaaaggaagtttagcataaattatagcagttttctgttattgcttaatttaccatctccatagttttatagctactattgtatttcacttgttgaattaaagtatttgaattctttt

SEQ ID NO: 274565 - DNA, 627 bp, Artificial Sequence
  derived and/or modified sequence
atgtggagatcctgcctgaggcttagagacggcggacgccgcctgcttaatcgacctgctggtggccccagtgcctcgatgtctcccggccccaccatcccttctcctgcccgcgcttacgccccaccgaccgagaggaaacgcttctatcagaatgttagcataactcagggggagggggggtttgaaatcaatctagatcaccggaagctcaaaaccccgcaggctaagttgtttactgttcccagcgaagctctcgccatagcagttgctacagagtgggacagtcaacaggatactatcaaatactataccatgcacctgacaacgttgtgcaataccagcctggacaaccccacccagaggaataaggaccaacttatcagagccgccgtaaaattcctggatactgacaccatctgctatagagtagaggagccagagacgctggttgagctgcaacggaatgagtgggaccctatcatagagtgggcggaaaagcgctatggggttgagatatccagctccaccagtatcatgggcccgagtattcccgccaagacacgggaggtgctggttagccacttggcctcctacaacacatgggccctgcaaggaatggattag

SEQ ID NO: 274566 - DNA, 618 bp, Artificial Sequence
  derived and/or modified sequence
atgtggcggtcctgcctgcgcctccgagatggcgggcgtcgcttgctcaaccgaccagccggaggtccaagcgccagcatgagccccggccccacaattccttctcctgccagggcttacgcccctcctaccgagaggaagcggttctatcagaacgtgtccatcacacagggagagggtggttttgaaatcaacctagaccataggaaactcaaaactccgcaggcaaagttgttcacagttccttcggaagccctagccattgccgtcgccactgagtgggacagccagcaggatactataaaatactacacaatgcacctgaccacgctttgtaacactagtctagataatcccacacaaagaaacaaagatcagcttattagggctgccgtgaagttcctcgacaccgacacaatatgctatcgcgtggaggagccagaaacactcgttgaattgcaacgcaatgaatgggaccctattatcgaatgggcagaaaagaggtacggggtcgagatcagttcgtctaccagcatcatgggcccatctattcccgccaaaaccagggaggtcctcgtttctcacctcgcgtcctataatacttgggccctgcagtag

SEQ ID NO: 274567 - DNA, 627 bp, Artificial Sequence
  derived and/or modified sequence
atgtggaggagctgcctgcggctgagagatggcggccgccgcctgctgaacagacctgctgggggccccagcgcctccatgagccctggccccaccatccccagccctgcccgggcctatgccccacccacagagaggaagcgcttctaccagaatgtgtccatcacccagggcgagggcggctttgagatcaacctggaccacaggaagctgaagaccccccaggccaagctgttcaccgtgcccagcgaggccctggccatcgctgtggccacagagtgggacagccagcaggacaccatcaagtactacaccatgcacctgaccaccctgtgcaacaccagcctggacaaccccacccagaggaacaaggaccagctgatccgggctgctgtgaagttcctggacacagacaccatctgctacagagtggaggagcctgagaccctggtggagctgcagagaaatgagtgggaccccatcatcgagtgggccgagaagagatatggagtggagatcagcagcagcaccagcatcatgggccccagcatcccagccaagacccgggaggtgctggtgagccacctggccagctacaacacctgggccctgcagggcatggactag

SEQ ID NO: 274568 - DNA, 618 bp, Artificial Sequence
  derived and/or modified sequence
atgtggaggagctgcctgcggctgagagatggcggccgccgcctgctgaacagacctgctgggggccccagcgcctccatgagccctggccccaccatccccagccctgcccgggcctatgccccacccacagagaggaagcgcttctaccagaatgtgtccatcacccagggcgagggcggctttgagatcaacctggaccacaggaagctgaagaccccccaggccaagctgttcaccgtgcccagcgaggccctggccatcgctgtggccacagagtgggacagccagcaggacaccatcaagtactacaccatgcacctgaccaccctgtgcaacaccagcctggacaaccccacccagaggaacaaggaccagctgatccgggctgctgtgaagttcctggacacagacaccatctgctacagagtggaggagcctgagaccctggtggagctgcagagaaatgagtgggaccccatcatcgagtgggccgagaagagatatggagtggagatcagcagcagcaccagcatcatgggccccagcatcccagccaagacccgggaggtgctggtgagccacctggccagctacaacacctgggccctgcagtag

SEQ ID NO: 274569 - DNA, 627 bp, Artificial Sequence
  derived and/or modified sequence
atgtggcggagctgcctgcggctgcgggacggcggccggcggctgctgaatcgtcccgctggcggcccctctgcaagtatgagtcccggcccgacgattccttctccagcccgtgcctacgctccacccaccgaacgcaaacgtttttatcagaatgtgagtattactcagggggagggtgggtttgaaataaatctggaccatcgaaagctgaagacccctcaagctaaactgtttaccgtcccaagcgaggccctggctatcgccgtcgcgaccgaatgggattcccagcaggacacaatcaaatactacaccatgcacttgacaactctgtgtaatacaagtcttgacaaccctacccagagaaacaaggatcagctgattcgcgcggccgtgaagttcctagacactgacacaatctgctatcgagtggaagaaccggagactctcgtcgagttacagagaaacgagtgggatcccattatagagtgggcagagaagcggtatggggtggaaataagttcttccacctcaattatggggccatccatccctgccaaaaccagggaagtgttggtctctcatctcgccagttataatacgtgggccttgcagggcatggattag

SEQ ID NO: 274570 - DNA, 618 bp, Artificial Sequence
  derived and/or modified sequence
atgtggcggagctgcctgcggctgcgggacggcggccggcggctgttaaaccggcccgccggcggaccctcagcaagtatgtcccccggacccacgatcccatcccctgcacgcgcttacgccccacctacagaaaggaagaggttttaccagaacgtgagtatcacacagggcgaaggaggcttcgaaattaacctcgatcaccggaaactgaagaccccccaggcaaagctgtttaccgtgccttctgaggcactcgcgatagccgtggctaccgagtgggacagtcagcaggacactataaaatactataccatgcacctgacaactctgtgcaataccagcctcgacaaccctactcagcgcaacaaagaccagctgatccgcgcagctgtgaaattcctggatactgacaccatctgttatcgcgtagaagaacctgagacccttgttgagcttcagcggaacgaatgggaccctattatcgaatgggctgaaaaacgctatggggtggaaattagtagctctacgagtattatgggaccgagcatcccggccaaaactagggaggtgttggtgtcacatttggcatcttataatacatgggctcttcagtag

SEQ ID NO: 274571 - DNA, 627 bp, Artificial Sequence
  derived and/or modified sequence
atgtggagatcctgcctacgcctgcgcgacgggggacggaggctcctgaataggccagctggaggccctagcgctagcatgtcccccggtcctacaatcccaagtcctgctcgcgcatacgctccgccaaccgagcggaaacggttttaccagaacgtctctataacccagggagagggcggattcgaaataaatctggaccaccgcaagctgaagacaccgcaggccaagttgtttacggtgccaagtgaagcattggctatcgcagtagctactgaatgggattcacagcaggacacgattaagtactatactatgcacttgaccacactgtgcaatacatctctggacaatccgacccagcggaataaagatcaactcatcagggccgcagtcaaattcttagacactgataccatctgttatcgagtggaagaacccgaaactttagtcgagctgcagcggaatgagtgggacccaatcatcgagtgggcagagaaaaggtacggggtcgaaatcagcagctcaacttctattatggggccatcaatcccagcaaaaactcgggaggtcctggtttcccacctggctagctataacacatgggcactccagggaatggattag

SEQ ID NO: 274572 - DNA, 618 bp, Artificial Sequence
  derived and/or modified sequence
atgtggcgatcttgcctgagactgcgggacgggggtagaaggctgctaaataggcccgctgggggaccaagtgctagcatgtcccctggccctacaattcctagtcccgctcgtgcttatgcccctcctaccgaaaggaagcgtttttaccagaatgtcagcatcacgcaaggtgagggcggatttgaaatcaatctggatcaccgcaaacttaaaactccccaagcaaagctctttaccgtgccttcagaagccttggccatagccgtcgcgaccgagtgggactcccaacaggacacaatcaaatactataccatgcacctgacaacactgtgcaacactagtctggacaacccgacccaaaggaacaaggatcagttaattagggcggcagtgaagttcctggacacagataccatttgctatagggtagaagaaccagagacacttgtggagcttcagagaaacgaatgggacccaataattgagtgggctgaaaagcggtatggagtggagatctcctcctccacctccatcatggggccatctatacccgcaaagacaagagaggtgctggtgtctcacctagcatcatataacacatgggccttgcaatag

SEQ ID NO: 274573 - DNA, 1490 bp, Artificial Sequence
  derived and/or modified sequence
gggaggttgagggctctgaggaggcgttgagaggtttccgtacagcccgaccgtgcggctttggggatcccatcgctctgtgtttcctgctccaggtttcgcgtctcgcatcttcccagaccctcgggcgcgatgtggaggagctgcctccggctgcgggacgggggacgccgtctcctgaatcggccggcgggtggccccagcgcttctatgagtccggggccaaccatcccgtctccagcccgggcttacgccccgccgacagaaaggaagaggttttatcagaatgtcagcatcacacagggtgaaggtggctttgagataaacctggaccacaggaagctgaaaactccccaagccaagctctttaccgtccccagcgaggccctggccattgcagtggctactgagtgggattcccagcaggataccatcaagtactacaccatgcacctgaccacattgtgcaacacatcattggacaacccaacccagagaaacaaggatcagctgatccgggcagccgtgaagtttctggacaccgacaccatctgctacagggtggaggagcccgagacattagtggaacttcaaaggaatgagtgggatccaatcatcgaatgggctgagaaaagatacggcgtggagatcagctcctccaccagcataatgggacccagcatccctgccaaaactcgggaggtgctcgtcagccacctggcatcttacaacacatgggctttacaaggcatggattgagtttgtagctgcccagctcaagtccatggtgctaaccttgggcctgattgacctgcgcctgacagtggagcaggccgtgctgctgtcacgcctggaggaggagtaccagatccagaagtggggcaacattgagtgggcccatgactatgagctgcaggagctgcgggcccgcaccgccgccggcaccctcttcatccatctctgctccgagagcaccacagtcaagcacaagctcctgaaggagtgaggcctgggcagagcacactcagcaggatagaggcagtgcagccacagctcccccggccttcagggctccccagcctgtggggctggcttccttggcttttggggactcggcctcagcgtcaccctgagattccccccgagacacagtgcgctagtacggctgtccggaggtcagcctgatttcaacccaggtgcccctggcctggccagcagtgaatgtaggagatgaattgtgcaagtgactttctctcgactctgattttattaaatatttctccaccctggaaatgtgctgagccctgttttcacgtatgcctctgcacttctccattcttcctgttttgtctaggttccagagggttaaacagcttatctcccatggcgtgtttggatatctgctgcctgtggtcaggaaccttgcactggggaaacaatcatgtaatccacagacaactctatttgtgttcttcagcctcagcctgaag

SEQ ID NO: 274574 - DNA, 685 bp, Artificial Sequence
  derived and/or modified sequence
gcgcaggaggcgcgcggcggcgacggcgcgccgtttcgcgtctcgcatcttcccagaccctcgggcgcgatgtggaggagctgcctccggctgcgggacgggggacgccgtctcctgaatcggccggcgggtggccccagcgcttctatgagtccggggccaaccatcccgtctccagcccgggcttacgccccgccgacagaaaggaagaggttttatcagaatgtcagcatcacacagggtgaaggtggctttgagataaacctggaccacaggaagctgaaaactccccaagccaagctctttaccgtccccagcgaggccctggccattgcagtggctactgagtgggattcccagcaggataccatcaagtactacaccatgcacctgaccacattgtgcaacacatcattggacaacccaacccagagaaacaaggatcagctgatccgggcagccgtgaagtttctggacaccgacaccatctgctacagggtggaggagcccgagacattagtggaacttcaaaggaatgagtgggatccaatcatcgaatgggctgagaaaagatacggcgtggagatcagctcctccaccagcataatgggacccagcatccctgccaaaactcgggaggtgctcgtcagccacctggcatcttacaacacatgggctttacaag

SEQ ID NO: 274575 - DNA, 627 bp, Artificial Sequence
  derived and/or modified sequence
atgtggagaagctgcctgagactgagagacggcggcagaagactgctgaacagacccgccggcggccccagcgccagcatgagccccggccccaccatccccagccccgccagagcctacgccccccccaccgagagaaagagattctaccagaacgtgagcatcacccagggcgagggcggcttcgagatcaacctggaccacagaaagctgaagaccccccaggccaagctgttcaccgtgcccagcgaggccctggccatcgccgtggccaccgagtgggacagccagcaggacaccatcaagtactacaccatgcacctgaccaccctgtgcaacaccagcctggacaaccccacccagagaaacaaggaccagctgatcagagccgccgtgaagttcctggacaccgacaccatctgctacagagtggaggagcccgagaccctggtggagctgcagagaaacgagtgggaccccatcatcgagtgggccgagaagagatacggcgtggagatcagcagcagcaccagcatcatgggccccagcatccccgccaagaccagagaggtgctggtgagccacctggccagctacaacacctgggccctgcagggcatggactag

SEQ ID NO: 274576 - DNA, 618 bp, Artificial Sequence
  derived and/or modified sequence
atgtggagaagctgcctgagactgagagacggcggcagaagactgctgaacagacccgccggcggccccagcgccagcatgagccccggccccaccatccccagccccgccagagcctacgccccccccaccgagagaaagagattctaccagaacgtgagcatcacccagggcgagggcggcttcgagatcaacctggaccacagaaagctgaagaccccccaggccaagctgttcaccgtgcccagcgaggccctggccatcgccgtggccaccgagtgggacagccagcaggacaccatcaagtactacaccatgcacctgaccaccctgtgcaacaccagcctggacaaccccacccagagaaacaaggaccagctgatcagagccgccgtgaagttcctggacaccgacaccatctgctacagagtggaggagcccgagaccctggtggagctgcagagaaacgagtgggaccccatcatcgagtgggccgagaagagatacggcgtggagatcagcagcagcaccagcatcatgggccccagcatccccgccaagaccagagaggtgctggtgagccacctggccagctacaacacctgggccctgcagtag

SEQ ID NO: 274577 - DNA, 1227 bp, Artificial Sequence
  derived and/or modified sequence
atgaaggagaccatcttcgagctggaggaccaggtggagcagcacagagccgtgaagctgcacaacaaccagctgatcagcgagctggagagcagcgtgatcaagctggaggagcagaagagcgacctggagagacagctgaagaccctgaccaagcagatgaaggaggagaccgaggagtggagaagattccaggccgacctgcagaccgccgtggtggtggccaacgacatcaagtgcgaggcccagcaggagctgagaaccgtgaagagaaagctgctggaggaggaggagaagaacgccagactgcagaaggagctgggcgacgtgcagggccacggcagagtggtgaccagcagagccgcccccccccccgtggacgaggagcccgagagcagcgaggtggacgccgccggcagatggcccggcgtgtgcgtgagcagaaccagccccaccccccccgagagcgccaccaccgtgaagagcctgatcaagagcttcgacctgggcagacccggcggcgccggccagaacatcagcgtgcacaagacccccagaagccccctgagcggcatccccgtgagaaccgcccccgccgccgccgtgagccccatgcagagacacagcacctacagcagcgtgagacccgccagcagaggcgtgacccagagactggacctgcccgacctgcccctgagcgacatcctgaagggcagaaccgagaccctgaagcccgacccccacctgagaaagagccccagcctggagagcctgagcagaccccccagcctgggcttcggcgacaccagactgctgagcgccagcaccagagcctggaagccccagagcaagctgagcgtggagagaaaggaccccctggccgccctggccagagagtacggcggcagcaagagaaacgccctgctgaagtggtgccagaagaagacccagggctacgccaacatcgacatcaccaacttcagcagcagctggagcgacggcctggccttctgcgccctgctgcacacctacctgcccgcccacatcccctaccaggagctgaacagccaggagaagaagagaaacctgctgctggccttcgaggccgccgagagcgtgggcatcaagcccagcctggagctgagcgagatgctgtacaccgacagacccgactggcagagcgtgatgcagtacgtggcccagatctacaagtacttcgagacctag

SEQ ID NO: 274578 - DNA, 1227 bp, Artificial Sequence
  derived and/or modified sequence
atgaaggaaaccatctttgaattggaggatcaggtggagcagcacagagccgtgaagttacataataaccagctcatcagcgagcttgagtcatctgtaatcaagctggaggagcagaaatccgacctagagcgacagctgaagactctcacgaagcagatgaaagaggagacagaagagtggaggcggttccaggctgatttgcagacagccgtggtggtcgccaacgacatcaagtgtgaggcccagcaggagcttaggaccgttaaaagaaagctactggaagaagaagaaaagaatgcgagactgcagaaggaactcggtgatgtgcaaggccacgggagggtcgtgaccagcagagcagccccacctccagtcgacgaggaacccgagagttctgaagtagatgctgctggcaggtggccaggagtctgcgttagccgcacatcacccacaccgcctgaatctgccactacagtgaaatctctgatcaaatcgttcgatctgggaagaccaggcggcgcaggtcagaacatctccgttcataagacaccccgctcacccctcagcggcattcctgtgaggaccgctcccgccgctgcagtatctccgatgcagcggcactctacctactccagtgtgagacctgcttctcgaggcgtcactcagaggctcgatttgcctgacctgcctctgtccgacatacttaaggggcgcactgagacactgaagccagatccgcatttaaggaaatcgccttcgctagaatcactgtcccgccctccttcattgggattcggtgacaccaggcttttgagcgcctctactagggcatggaaaccacagtctaaactatcggtcgagcgcaaggatcccctagcggccttggccagagagtatgggggatcaaagaggaacgcattgctgaagtggtgccagaagaagacacagggatacgctaatatcgatatcaccaacttttctagtagctggagtgatggcctcgccttttgtgctctgctgcacacgtatctgccagcgcacatcccctatcaggagctgaacagccaggaaaagaaaaggaatctgcttctcgcatttgaagcggcggagtctgtcggcattaagccctcgctcgaactgtcagagatgttgtatacagatcggcctgactggcaatctgtcatgcaatacgtggcccagatatataagtactttgaaacctag

SEQ ID NO: 274579 - DNA, 1227 bp, Artificial Sequence
  derived and/or modified sequence
atgaaggagaccatctttgagctggaggaccaggtggagcagcacagagctgtgaagctgcacaacaaccagctgatcagcgagctggagagcagcgtcatcaagctggaggagcagaagagtgacctggagcggcagctgaagaccctgaccaagcagatgaaggaggagacagaggagtggaggcgcttccaggccgacctgcagacagctgtggtggtggccaatgacatcaagtgtgaggcccagcaggagctgaggacagtgaagaggaagctgctggaggaggaggagaagaatgcccggctgcagaaggagctgggagatgtgcagggccacggccgggtggtgaccagcagagctgcccctcctcctgtggatgaggagcctgagagcagcgaggtggatgctgctggccgctggccaggagtgtgtgtgtccaggaccagccccaccccacctgagagcgccaccaccgtgaagagcctcatcaagagctttgacctgggccggcctgggggcgccggccagaacatctctgtgcacaagacccccaggagccccctgagcggcatccctgtgaggacagccccagctgctgctgtgagccccatgcagaggcacagcacctacagctctgtgcggcctgccagccggggcgtgacccagaggctggacctgcctgacctgcccctgagtgacatcctgaagggccgcacagagaccctgaagccagacccccacctgaggaagagccccagcctggagagcctgagcaggcctcccagcctgggctttggagacacccggctgctgagcgccagcacccgggcctggaagccccagagcaagctgtctgtggagaggaaggaccccctggccgccctggcccgggagtatggaggcagcaagagaaatgccctgctgaagtggtgccagaagaagacccagggctacgccaacatcgacatcaccaacttcagcagctcctggagcgatggcctggccttctgtgccctgctgcacacctacctgcctgcccacatcccctaccaggagctgaacagccaggagaagaagaggaacctgctgctggcctttgaagctgctgagagcgtgggcatcaagcccagcctggagctgtctgagatgctgtacacagacagaccagactggcagagcgtgatgcagtatgtggcccagatctacaagtactttgagacctag

SEQ ID NO: 274580 - DNA, 1227 bp, Artificial Sequence
  derived and/or modified sequence
atgaaggagaccatcttcgagctggaggaccaggtggagcagcaccgtgccgtgaagctacacaataaccagttaatctcagaactagagagctctgtgataaagctcgaggaacaaaaatctgatctggaaaggcagttgaaaactttgactaagcagatgaaagaagaaacggaggagtggaggagattccaggcagatctgcagactgcggttgtggttgcaaacgacatcaaatgtgaagctcagcaagagctccgcaccgtgaagcgcaaacttttggaagaggaagagaagaacgcaaggctgcaaaaggagttaggcgatgttcagggccacgggagggtagttacttcaagagctgccccacccccagtggacgaagagcctgaaagcagtgaagtggatgcagcaggacgttggccaggtgtttgtgtctcacggaccagcccaacaccacccgaaagcgcaaccaccgtgaaatcccttatcaagagtttcgatctgggcaggcccggaggagccggccagaatatatctgtccataaaactccaagatcgccactgtccggaatcccggtgcgaaccgcccctgctgccgcagtgagtcctatgcagagacatagcacatactcctcagtgcgcccagcctcaaggggtgtgacacagcggctggatctgccagaccttccgttaagcgatatcctgaaagggaggaccgagaccttaaagccagatccacacctcagaaagagccccagcctagagagtctgtccaggccaccatccttggggtttggtgacacccggctcctgtccgccagtactagagcatggaagccccaatccaagctgtcagtggagcgaaaggaccctctggccgcgctagcacgagagtacggtgggtctaaaaggaacgccctcttaaagtggtgccaaaagaaaactcagggatatgctaacatcgacatcaccaatttctcttcaagctggtccgacggcttggccttctgtgctctgttacacacctatttacctgctcatatcccttatcaggaactaaactcccaagaaaaaaagcggaatttgctcttggcttttgaggcagcggagtcagtgggaattaagccgagcctggagctgtcagaaatgttgtatacagacagacctgactggcagagcgtcatgcagtatgttgctcagatttataaatactttgaaacttag

SEQ ID NO: 274581 - DNA, 1227 bp, Artificial Sequence
  derived and/or modified sequence
atgaaggagacgatcttcgaactggaggaccaggttgagcaacacagagctgtcaagctgcataataaccagctcatcagcgagctggagagttccgttataaagctcgaggaacagaaatccgatctggaacgccagctgaagaccttaacaaaacagatgaaagaagagaccgaggaatggagacggtttcaagccgacctgcagacggccgtcgtagtcgcaaatgacattaagtgcgaggcacagcaggagctgcggacagttaagagaaagctgctggaggaggaggagaaaaacgccaggctacaaaaggagcttggagatgtgcagggacatgggagggtagtgaccagccgcgctgctcctcctcccgtagacgaagagcccgaaagctccgaagtggatgcggctggtcggtggcctggagtttgtgtgtcccgcactagtcccaccccacccgagagtgctaccaccgtgaagtctctgatcaaaagcttcgatctgggccgacccggaggtgccggtcagaacatttccgtgcacaagactccacgcagtcccctgtcaggcattccggtgcggaccgctccagcagccgctgtctcccccatgcagaggcacagcacatacagctccgtccggcctgcttctcgaggagtgactcagcggcttgatctcccagacctccccttgtccgacattctgaagggacgcacagaaacgctgaaacccgacccccatttgcggaagagcccgtctttggagagtttatccaggccccctagtctggggttcggcgatacaagactgctatctgcctctacccgagcatggaaacctcagtcgaagctttccgtggaacggaaggaccccctagccgctctggctagagagtatggaggatccaagcgcaatgccttattaaaatggtgccaaaagaagacccaggggtacgccaatattgatatcactaacttctcgagttcttggtctgatgggctggccttttgtgctcttctgcatacctatctgcccgcacacatcccctatcaggagctgaattcccaggaaaagaagcggaacctccttcttgcttttgaggccgctgagtcagtagggattaagccatcattagaactctctgagatgctttatacagaccggcctgactggcagagtgtcatgcagtacgtggcacaaatttataaatactttgagacctag

SEQ ID NO: 274582 - protein, 662 aa, Artificial Sequence
  derived and/or modified sequence
MDSAYARLLQQQQLFLQLQILSQQQQQQQHRFSYLGMHQAQLKEPNEQMVRNPNSSSTPLSNTPLSPVKNSFSGQTGVSSFKPGPLPPNLDDLKVSELRQQLRIRGLPVSGTKTALMDRLRPFQDCSGNPVPNFGDITTVTFPVTPNTLPNYQSSSSTSALSNGFYHFGSTSSSPPISPASSDLSVAGSLPDTFNDASPSFGLHPSPVHVCTEESLMSSLNGGSVPSELDGLDSEKDKMLVEKQKVINELTWKLQQEQRQVEELRMQLQKQKRNNCSEKKPLPFLAASIKQEEAVSSCPFASQVPVKRQSSSSECHPPACEAAQLQPLGNAHCVESSDQTNVLSSTFLSPQCSPQHSPLGAVKSPQHISLPPSPNNPHFLPSSSGAQGEGHRVSSPISSQVCTAQNSGAHDGHPPSFSPHSSSLHPPFSGAQADSSHGAGGNPCPKSPCVQQKQMTRSQQMDELLDVLIESGEMPADAREDHSCLQKVPKIPRSSRSPTAVLTKPSASFEQASSGSQIPFDPYATDSDEHLEVLLNSQSPLGKMSDVTLLKIGSEEPHFDGIMDGFSGKAAEDLFNAHEILPGPLSPMQTQFSPSSVDSNGLQLSFTESPWETMEWLDLTPPNSTPGFSALTTSSPSIFNIDFLDVTDLNLNSSMDLHLQQW

SEQ ID NO: 274583 - protein, 648 aa, Artificial Sequence
  derived and/or modified sequence
FLQLQILSQQQQQQQHRFSYLGMHQAQLKEPNEQMVRNPNSSSTPLSNTPLSPVKNSFSGQTGVSSFKPGPLPPNLDDLKVSELRQQLRIRGLPVSGTKTALMDRLRPFQDCSGNPVPNFGDITTVTFPVTPNTLPNYQSSSSTSALSNGFYHFGSTSSSPPISPASSDLSVAGSLPDTFNDASPSFGLHPSPVHVCTEESLMSSLNGGSVPSELDGLDSEKDKMLVEKQKVINELTWKLQQEQRQVEELRMQLQKQKRNNCSEKKPLPFLAASIKQEEAVSSCPFASQVPVKRQSSSSECHPPACEAAQLQPLGNAHCVESSDQTNVLSSTFLSPQCSPQHSPLGAVKSPQHISLPPSPNNPHFLPSSSGAQGEGHRVSSPISSQVCTAQNSGAHDGHPPSFSPHSSSLHPPFSGAQADSSHGAGGNPCPKSPCVQQKQMTRSQQMDELLDVLIESGEMPADAREDHSCLQKVPKIPRSSRSPTAVLTKPSASFEQASSGSQIPFDPYATDSDEHLEVLLNSQSPLGKMSDVTLLKIGSEEPHFDGIMDGFSGKAAEDLFNAHEILPGPLSPMQTQFSPSSVDSNGLQLSFTESPWETMEWLDLTPPNSTPGFSALTTSSPSIFNIDFLDVTDLNLNSSMDLHLQQW

SEQ ID NO: 274584 - DNA, 1989 bp, Artificial Sequence
  derived and/or modified sequence
atggatagtgcgtacgcccgcctgctacagcagcagcagctgttccttcagctgcaaattctctcacagcaacagcagcagcagcagcaccgcttttcctacttggggatgcaccaggcccagctgaaagaacctaatgagcaaatggtgaggaaccctaactcctcttcgacacccctgagtaatacgccccttagccctgtaaaaaattctttttccggacaaacaggagtgagcagcttcaaaccgggtcccctgccccccaatctggacgatttgaaagtgtctgagttgaggcagcagctgcgcatcagaggattacctgtgagtggtacaaagacggcccttatggaccgcttgagaccattccaggattgctcaggaaatccagtcccaaattttggcgatattacaactgtcacctttcctgtcaccccgaatacactacctaattatcagtctagtagttcgacgtcagccctgagtaacggcttctaccatttcggcagcacaagctcctctcctcctatatccccagcttcttctgatctgtccgtcgcagggagtcttccagatacctttaacgacgcaagcccgtctttcggcctgcaccccagccccgtacacgtttgtacagaagagtctctgatgagcagtctgaacggcggatctgtacctagtgaacttgacggactcgattcagaaaaggacaagatgctggtcgagaagcagaaggtcatcaacgagctgacttggaagttgcagcaagagcagaggcaggtggaggagttacgcatgcagctgcagaagcagaaaagaaacaactgtagtgaaaagaagccattgccatttttagctgccagcatcaaacaggaggaggccgtctcctcctgtccctttgcttcccaggtccccgtgaagagacagtcttccagcagcgaatgccatccccccgcctgtgaggcagctcagttacaaccccttggcaacgcacattgcgtggaaagctctgaccagaccaatgtcttaagctccacattcctgtcccctcagtgttctccacagcactcccctctgggtgccgtcaagtctccgcagcacatctctctgccgccttctcctaataacccccactttctcccctcttcctcaggtgcccaaggtgaggggcatagggtgtcatcccccatttcctcacaggtatgcacagcgcagaatagtggtgctcacgacgggcaccccccatcatttagtcctcactcctcttctctccatccacctttctccggcgctcaagctgatagtagccatggtgctggaggcaatccctgtcctaaaagcccctgcgtgcagcagaaacagatgaccaggagccagcagatggacgagcttctggacgtgttgatcgagtcaggagaaatgcctgctgacgctcgagaagaccattcttgcctgcagaaggtacccaaaatacctagatcgtccagatcccccaccgccgtcctcacaaagccttctgcctcattcgagcaggcctcctcaggatctcagatcccctttgatccctatgccacagacagtgacgagcacctagaagtgctgcttaacagccaaagccctctgggcaagatgagtgatgtaacactgttgaaaatagggtcagaggaaccccattttgacggcatcatggacgggttcagcggcaaggctgcagaggatctgttcaacgcacacgagatcctccctggacctctgtctccaatgcagactcaattctccccgtcctcagtggactccaacggactacagttgtctttcacagagtcaccctgggaaaccatggaatggctggatctcacaccgccgaacagtacaccaggcttttctgccctgacaaccagttcccccagcatcttcaatattgacttcctcgacgtgacagatctgaatctcaatagtagcatggatttacacctccagcaatggtag

SEQ ID NO: 274585 - DNA, 1947 bp, Artificial Sequence
  derived and/or modified sequence
ttcctgcagttgcagatcctgagccagcagcagcagcagcagcagcatcggttctcttatctgggaatgcaccaagcccagctgaaggaacctaacgagcagatggtccggaatccaaattcgagttccacaccccttagcaataccccgctctcccctgtgaaaaacagtttctctggccagacgggcgtttcttccttcaaacccggtcctcttcccccgaaccttgacgatctaaaggtgtcagaactacgtcagcaactgaggatccgggggctgcccgtgtcagggaccaagaccgccttgatggatagactgaggccattccaggactgtagtggcaaccctgtccctaatttcggggatataaccactgtgacatttccggttacaccaaacacactgcctaattaccagagtagctccagcacctctgcactgtctaacggcttctatcatttcgggtcaacttctagctcaccgcctatatcccctgctagcagcgatctatcggtggccggaagcctccccgacacattcaacgatgctagccccagtttcgggcttcacccctccccggtgcatgtgtgcacagaggagtcactgatgtctagcctgaacgggggctctgtgccgtccgagcttgatggcttagacagcgaaaaagacaagatgctggtcgaaaagcagaaggttataaacgagcttacttggaaactgcaacaggagcagaggcaggttgaagagcttcggatgcagctgcagaaacaaaagagaaacaactgctcagagaaaaaacctttaccttttctggccgcctcgattaagcaagaggaagctgtgagctcatgcccgtttgcctcccaagtgccagtgaagaggcagtcttcaagctctgaatgtcaccctcccgcttgtgaggctgcacagctacaaccgctgggcaatgctcattgtgtcgagagtagtgatcagaccaatgtgctcagcagtacgtttctttccccgcaatgctccccccaacattccccgctgggcgcagtaaaaagtccccagcatatttcccttcctccttcacccaataacccccactttctgcccagtagcagcggcgctcaaggggagggacaccgggtgtcatcacctatctcatctcaagtgtgcacagcccagaattccggtgctcatgacggacacccaccgagcttcagcccacactcctcttcgctgcatcctcctttcagtggagctcaggccgatagctctcacggggctggtggaaatccgtgtccaaagagtccatgcgtgcagcagaagcagatgacccgtagccaacagatggatgaactgcttgacgttctgatcgagtctggagagatgccagccgacgcacgtgaggaccattcttgtcttcaaaaggtccccaaaatcccacgcagctcacgctctcctacagcagtgctcacaaagccaagcgccagctttgaacaggccagttccggttcacaaatcccattcgatccctatgctactgattccgatgagcatctagaggtactacttaactctcagagcccacttggcaaaatgagcgatgtgacattgcttaaaatcggcagcgaggagccacacttcgacggtataatggacgggttttcgggcaaggctgcagaagacctttttaatgcccatgaaatactccccggccctctttcacctatgcagacccagtttagtccatcaagcgttgactccaacgggttgcagctgagttttaccgagtccccctgggaaactatggagtggctcgacttgacccctcctaactcaacacctgggtttagtgctttgaccacttcttctccaagcatcttcaacattgatttcttggatgtgaccgatttgaatcttaattcaagcatggatctgcacctccaacagtggtag

SEQ ID NO: 274586 - DNA, 1989 bp, Artificial Sequence
  derived and/or modified sequence
atggattctgcctatgcccggctgctgcagcagcagcagctgttcctgcagctgcagatcctgagccagcagcagcagcagcagcagcaccgcttctcctacctgggcatgcaccaggcccagctgaaggagcccaatgagcagatggtgaggaaccccaacagcagcagcacccccctgagcaacacccccctgagccctgtgaagaacagcttcagcggccagacaggagtgagcagcttcaagccaggccccctgccccccaacctggatgacctgaaggtgtctgagctgcggcagcagctgcgcatccggggcctgcctgtgtctggcaccaagacagccctgatggaccggctgcggcccttccaggactgcagcggcaaccctgtgcccaactttggagacatcaccaccgtgaccttccctgtgacccccaacaccctgcccaactaccagagcagcagcagcaccagcgccctgagcaatggcttctaccacttcggcagcaccagcagcagcccccccatcagccctgccagcagtgacctgtctgtggccggcagcctgcctgacaccttcaatgatgccagccccagctttggcctgcaccccagccctgtgcacgtgtgcacagaggagagcctgatgagcagcctgaatggaggctctgtgcccagcgagctggatggcctggacagcgagaaggacaagatgctggtggagaagcagaaggtgatcaatgagctgacctggaagctgcagcaggagcagaggcaggtggaggagctgaggatgcagctgcagaagcagaagaggaacaactgcagcgagaagaagcccctgcccttcctggccgccagcatcaagcaggaggaggccgtgagcagctgcccctttgccagccaggtgcctgtgaagaggcagagcagcagcagcgagtgccaccccccagcctgtgaggccgcccagctgcagcccctgggcaatgcccactgtgtggagagcagtgaccagaccaacgtgctgagcagcaccttcctgagcccccagtgcagcccccagcacagccccctgggcgctgtgaagagcccccagcacatcagcctgccccccagccccaacaacccccacttcctgcccagcagcagcggggcccagggcgagggccaccgggtgagcagccccatcagcagccaggtgtgcacagcccagaacagcggggcccatgatggccacccccccagcttcagcccccacagcagcagcctgcacccccccttcagcggggcccaggccgacagcagccatggagctgggggcaacccctgccccaagagcccctgtgtgcagcagaagcagatgaccaggagccagcagatggatgagctgctggatgtgctgattgaaagtggagagatgccagcagatgcccgggaggaccacagctgcctgcagaaggtgcccaagatccccaggagcagccgcagccccacagctgtgctgaccaagcccagcgccagctttgagcaggccagcagcggcagccagatcccctttgacccctatgccacagacagtgatgagcacctggaggtgctgctgaacagccagagccccctgggcaagatgtctgatgtgaccctgctgaagattggcagcgaggagccccactttgatggcatcatggatggcttcagcggcaaggctgctgaggacctcttcaatgcccacgagatcctgcccggccccctgagccccatgcagacccagttcagccccagctctgtggacagcaatggcctgcagctgtccttcacagagagcccctgggagaccatggagtggctggacctgaccccacccaacagcaccccaggcttcagcgccctgaccaccagcagccccagcatcttcaacatcgacttcctggatgtgacagacctgaacctgaacagctccatggacctgcacctgcagcagtggtag

SEQ ID NO: 274587 - DNA, 1947 bp, Artificial Sequence
  derived and/or modified sequence
ttcctgcagctgcagatcctgagccagcagcagcagcagcagcagcaccgcttctcctacctgggcatgcaccaggcccagctgaaggagcccaatgagcagatggtgaggaaccccaacagcagcagcacccccctgagcaacacccccctgagccctgtgaagaacagcttcagcggccagacaggagtgagcagcttcaagccaggccccctgccccccaacctggatgacctgaaggtgtctgagctgcggcagcagctgcgcatccggggcctgcctgtgtctggcaccaagacagccctgatggaccggctgcggcccttccaggactgcagcggcaaccctgtgcccaactttggagacatcaccaccgtgaccttccctgtgacccccaacaccctgcccaactaccagagcagcagcagcaccagcgccctgagcaatggcttctaccacttcggcagcaccagcagcagcccccccatcagccctgccagcagtgacctgtctgtggccggcagcctgcctgacaccttcaatgatgccagccccagctttggcctgcaccccagccctgtgcacgtgtgcacagaggagagcctgatgagcagcctgaatggaggctctgtgcccagcgagctggatggcctggacagcgagaaggacaagatgctggtggagaagcagaaggtgatcaatgagctgacctggaagctgcagcaggagcagaggcaggtggaggagctgaggatgcagctgcagaagcagaagaggaacaactgcagcgagaagaagcccctgcccttcctggccgccagcatcaagcaggaggaggccgtgagcagctgcccctttgccagccaggtgcctgtgaagaggcagagcagcagcagcgagtgccaccccccagcctgtgaggccgcccagctgcagcccctgggcaatgcccactgtgtggagagcagtgaccagaccaacgtgctgagcagcaccttcctgagcccccagtgcagcccccagcacagccccctgggcgctgtgaagagcccccagcacatcagcctgccccccagccccaacaacccccacttcctgcccagcagcagcggggcccagggcgagggccaccgggtgagcagccccatcagcagccaggtgtgcacagcccagaacagcggggcccatgatggccacccccccagcttcagcccccacagcagcagcctgcacccccccttcagcggggcccaggccgacagcagccatggagctgggggcaacccctgccccaagagcccctgtgtgcagcagaagcagatgaccaggagccagcagatggatgagctgctggatgtgctgattgaaagtggagagatgccagcagatgcccgggaggaccacagctgcctgcagaaggtgcccaagatccccaggagcagccgcagccccacagctgtgctgaccaagcccagcgccagctttgagcaggccagcagcggcagccagatcccctttgacccctatgccacagacagtgatgagcacctggaggtgctgctgaacagccagagccccctgggcaagatgtctgatgtgaccctgctgaagattggcagcgaggagccccactttgatggcatcatggatggcttcagcggcaaggctgctgaggacctcttcaatgcccacgagatcctgcccggccccctgagccccatgcagacccagttcagccccagctctgtggacagcaatggcctgcagctgtccttcacagagagcccctgggagaccatggagtggctggacctgaccccacccaacagcaccccaggcttcagcgccctgaccaccagcagccccagcatcttcaacatcgacttcctggatgtgacagacctgaacctgaacagctccatggacctgcacctgcagcagtggtag

SEQ ID NO: 274588 - DNA, 6821 bp, Artificial Sequence
  derived and/or modified sequence
aatcgccggcagcctatgacatcagacaggaacgcctgggatgccgcgctgctcctggccaacctccgaggaggaggagggtcccgccggctaagagttaattagccccgcacggcgaggggggaggcgccagttttctggggacactggctgccactgtactcctacccaggggagctcacggagagttggatgaattctgggttgttagctgcggtcagctgggctcccgggagcctgttgctggtggagaacagggggcgcctggccaagggaccagcggcttgctgagactcaacatgacactcctggggtctgagcattccttgctgattaggagcaagttcagatcagttttacagttaagacttcaacaaagaaggacccaggaacaactggctaaccaaggcataataccaccactgaaacgtccagctgaattccatgagcaaagaaaacatttggatagtgacaaggctaaaaattccctgaagcgcaaagccagaaacaggtgcaacagtgccgacttggttaatatgcacatactccaagcttccactgcagagaggtccattccaactgctcagatgaagctgaaaagagcccgactcgccgatgatctcaatgaaaaaattgctctacgaccagggccactggagctggtggaaaaaaacattcttcctgtggattctgctgtgaaagaggccataaaaggtaaccaggtgagtttctccaaatccacggatgcttttgcctttgaagaggacagcagcagcgatgggctttctccggatcagactcgaagtgaagacccccaaaactcagcgggatccccgccagacgctaaagcctcagataccccttcgacaggttctctggggacaaaccaggatcttgcttctggctcagaaaatgacagaaatgactcagcctcacagcccagccaccagtcagatgcggggaagcaggggcttggcccccccagcacccccatagccgtgcatgctgctgtaaagtccaaatccttgggtgacagtaagaaccgccacaaaaagcccaaggaccccaagccaaaggtgaagaagcttaaatatcaccagtacattcccccagaccagaaggcagagaagtcccctccacctatggactcagcctacgctcggctgctccagcaacagcagctgttcctgcagctccaaatcctcagccagcagcagcagcagcagcaacaccgattcagctacctagggatgcaccaagctcagcttaaggaaccaaatgaacagatggtcagaaatccaaactcttcttcaacgccactgagcaatacccccttgtctcctgtcaaaaacagtttttctggacaaactggtgtctcttctttcaaaccaggcccactcccacctaacctggatgatctgaaggtctctgaattaagacaacagcttcgaattcggggcttgcctgtgtcaggcaccaaaacggctctcatggaccggcttcgacccttccaggactgctctggcaacccagtgccgaactttggggatataacgactgtcacttttcctgtcacacccaacacgctgcccaattaccagtcttcctcttctaccagtgccctgtccaacggcttctaccactttggcagcaccagctccagccccccgatctccccagcctcctctgacctgtcagtcgctgggtccctgccggacaccttcaatgatgcctccccctccttcggcctgcacccgtccccagtccacgtgtgcacggaggaaagtctcatgagcagcctgaatgggggctctgttccttctgagctggatgggctggactccgagaaggacaagatgctggtggagaagcagaaggtgatcaatgaactcacctggaaactccagcaagagcagaggcaggtggaggagctgaggatgcagcttcagaagcagaaaaggaataactgttcagagaagaagccgctgcctttcctggctgcctccatcaagcaggaagaggctgtctccagctgtccttttgcatcccaagtacctgtgaaaagacaaagcagcagctcagagtgtcacccaccggcttgtgaagctgctcaactccagcctcttggaaatgctcattgtgtggagtcctcagatcaaaccaatgtactttcttccacatttctcagcccccagtgttcccctcagcattcaccgctgggggctgtgaaaagcccacagcacatcagtttgcccccatcacccaacaaccctcactttctgccctcatcctccggggcccagggagaagggcacagggtctcctcgcccatcagcagccaggtgtgcactgcacagaactcaggagcacacgatggccatcctccaagcttctctccccattcttccagcctccacccgcccttctctggagcccaagcagacagcagtcatggtgccgggggaaacccttgtcccaaaagcccatgtgtacagcaaaagcaaatgacccggagtcagcagatggatgaactcctggacgtgcttattgaaagcggagaaatgccagcagacgctagagaggatcactcatgtcttcaaaaagtcccaaagatacccagatcttcccgaagtccaactgctgtcctcaccaagccctcggcttcctttgaacaagcctcttcaggcagccagatcccctttgatccctatgccaccgacagtgatgagcatcttgaagtcttattaaattcccagagccccctaggaaagatgagtgatgtcacccttctaaaaattgggagcgaagagcctcactttgatgggataatggatggattctctgggaaggctgcagaagacctcttcaatgcacatgagatcttgccaggccccctctctccaatgcagacacagttttcaccctcttctgtggacagcaatgggctgcagttaagcttcactgaatctccctgggaaaccatggagtggctggacctcactccgccaaattccacaccaggctttagcgccctcaccaccagcagccccagcatcttcaacatcgatttcctggatgtcactgatctcaatttgaattcttccatggaccttcacttgcagcagtggtagaatgcccaatgcaccagtgctatggaagaccaatggagttccatgggggaaagcacacagccatacatactttactgtccaaaaacagaagaagaagaagagaattaaaaagaagcaatgatttctgtgccaatgaacaagaacaaaagtcatttttagaaatacatatactgtaatatttaccaacagtcagtaactgttaatgatttcaacaatgcattaaaagaatgtgctttctcagattaaggatgccaaaaaagatatttcactgccttttcaaagaccagtatattttctagcccataatttttctcaggcattgttggggcataagctcacactgtaagcttttctcatgaattcactagacataacgtggaaggaaaacgtagtcttttgggagtacagggaagccagcccctcaaagcttatggaagacatacctgcaatggaagctgttgcccaatgtctccattactatctttcaaaagagaagccagacccagcttcagatcaaaagttcttgagacagaggaacaaaaccaatcgatttccagggaagctaatcaactctcttttccctctaccacaaaactgccctgctggagtggttctgaacctgtacccaggactcgatgtggtcactaataacaattaacctgaactgagtccacagaactccactcggaactttcttcttttttaactagtggcccaatcattcccaccatctctgtgctgataagtacgtgtcctagatgagaaccctgaagaatgcagaccttcttcccccgaaggagatgccacaagctctccaacacagccccctttagttccaaagactagagatgaccacattggtagaagtatatctcgaggcacaggaagggagccccaccagggataattcagacaggactagagaataacatcatttcacataccctgggataaacaccctgggttcctatagaaggactattacttatgggagtccaacttctccttttgttttgttattatcagtttatctttctcccactccacttttccttcaaggtaccaatcctttcctgttcctcgtttggccatctttctttttctgcctccacattgggaggggaggacttctcagttctaacaagctgccatactcctaagaaagccatttttgaaaaatttaacaatccaggttcttctggagaactcattctccacacgcacagtttgctgcaaaaggaagttgcaagaatttcttgaggaagaaactggtgacttggtccatcagtcacgaagttctttctattctcgtttagttttcaagaaattattggtttgtgttgctctggggaaattggaaatcattacattgtaaagacaaatatggatgatatttacaagagagaatttcagatctgggtttttgaaagaaaacagaattgcgcattgaaaacgatggaaggaaaaagacaatggtctaatgtgcattcctcattacctctcgtggctttggctgggagttggaaaaagctaaaatttcagaacagtctctgtaaggctctctgtggctccagttcaccattttatattgttgcatgctgtagaaaggagctattgctgttgttttgtttttttatttaaatcactaaggcactgtttttatcttttgtaaaaaaaaaaaaaaagttgttcactgtgcacttatagaaaaaataatcaaaaatgttgggattttagaagctctctttttgataaaccaaagatttagaagtcattccattgttaacttgtaaaaatgtgtgaacacagagagtttttggtgattgctactctgaaagctgccagatcttattctgggggtgggatgtggaggaatacacatacacacacaaacatacatgtatgtataatagatatatacatatgtgtatattatatctgtgtgtgcatgtatctccaaaagcggcgttacagagttctacaccaaaagcctttaacccttaatctgctgtgaatgatacctggcctttctcactatgaatttctgattaaccaaccagactacacgttgcctctctgtgtatgactaacggctccaacccgatgactcacagctacttgcttatcgtgaacaagctcatcttggcaatgaatatggatgtgaaaagacagaacagcttcaccattagtagctggaaatggtatcacagtctcttatagaggaatatgaaaggaacaagaaaatcattttacattccttttatctgtattgtgctttaaaagatccacatggtaaattttttattttgcttttatgtcagtcatcagaaccaaaaaaatccagaagaaaaaattgccagtgtttcctttgaagatgaagctactggggaagaaaaccttattaatacactccacacatttgttcattcctcagctgttggtgttttcttggggtcttgacaaagcttgctggtcagtgcacttttcaggtgtcacgttttgctgtttgtatgttttttcttccccttacttcctttggaaaacaaactcacacagtgcccctactctgagacctgggactgagtgttaattattttttccttgggtatttctatctgagagactagacctagttaggaggcctctgtacttctccagattgtacctttttatggggatctttgaggctatgacccaggactgatagatatgccttacggaagacaaaagataaaatggttcctatatcctaatgcaaaccaacacagttaaaagagcagatctctggataactgctctcaacctgcttctacagtctccacaaaccgcattcaccctctctcttcatagctcagacatgaaatttgagggagaaaactggagataattgggagaaaattgatgaagttggctgcttccagtagatcagataatccatgaatttgtctcccattgagaattttattttaaattcttttaaactcttcgttgtgtcttttgtgatgacaaatcaggcatgactaaaagatgtacagagacttacgaagatggtcacattcaagttccctaatgctcttagaacctgaagatgaccatgtgtagttttcttaagacctctgaacccccatggtgatgaagacttgaagacatttgcagctatctgctgcagtctggtagattcatacttatctaaagaagtcaaaaaatttattcgtgcaagtgcttgcaggaagccagtgcttattagtagtgaccctgcttctatcaacgttattgagacaacacatattctattctaagggagaaagagggaggaagagagggagggagggaggaagaagagggagggagcgaggaaggaagataggagatgggtaggggggtaaagagaaaaggagggagaagggaaggaaggaaagaagagaggaaagaaaggagggaaggaaaaaagggccaaactttctgatctatgaacttctcagttcagctgtcacattatgagaagtaaatcagaatttttttaaggagaagtcattcttagcactacaataattgtaccagtaattgaggaaaccaagacaatcttcacctgaataatagagggtctgagaactgtcagccttttgccattcaaaaacatttatgtccaacctgaaaaaaaagcatcaataaaacctatcccaagcattc

SEQ ID NO: 274589 - DNA, 3632 bp, Artificial Sequence
  derived and/or modified sequence
ttcctgcagctccaaatcctcagccagcagcagcagcagcagcaacaccgattcagctacctagggatgcaccaagctcagcttaaggaaccaaatgaacagatggtcagaaatccaaactcttcttcaacgccactgagcaatacccccttgtctcctgtcaaaaacagtttttctggacaaactggtgtctcttctttcaaaccaggcccactcccacctaacctggatgatctgaaggtctctgaattaagacaacagcttcgaattcggggcttgcctgtgtcaggcaccaaaacggctctcatggaccggcttcgacccttccaggactgctctggcaacccagtgccgaactttggggatataacgactgtcacttttcctgtcacacccaacacgctgcccaattaccagtcttcctcttctaccagtgccctgtccaacggcttctaccactttggcagcaccagctccagccccccgatctccccagcctcctctgacctgtcagtcgctgggtccctgccggacaccttcaatgatgcctccccctccttcggcctgcacccgtccccagtccacgtgtgcacggaggaaagtctcatgagcagcctgaatgggggctctgttccttctgagctggatgggctggactccgagaaggacaagatgctggtggagaagcagaaggtgatcaatgaactcacctggaaactccagcaagagcagaggcaggtggaggagctgaggatgcagcttcagaagcagaaaaggaataactgttcagagaagaagccgctgcctttcctggctgcctccatcaagcaggaagaggctgtctccagctgtccttttgcatcccaagtacctgtgaaaagacaaagcagcagctcagagtgtcacccaccggcttgtgaagctgctcaactccagcctcttggaaatgctcattgtgtggagtcctcagatcaaaccaatgtactttcttccacatttctcagcccccagtgttcccctcagcattcaccgctgggggctgtgaaaagcccacagcacatcagtttgcccccatcacccaacaaccctcactttctgccctcatcctccggggcccagggagaagggcacagggtctcctcgcccatcagcagccaggtgtgcactgcacagaactcaggagcacacgatggccatcctccaagcttctctccccattcttccagcctccacccgcccttctctggagcccaagcagacagcagtcatggtgccgggggaaacccttgtcccaaaagcccatgtgtacagcaaaagcaaatgacccggagtcagcagatggatgaactcctggacgtgcttattgaaagcggagaaatgccagcagacgctagagaggatcactcatgtcttcaaaaagtcccaaagatacccagatcttcccgaagtccaactgctgtcctcaccaagccctcggcttcctttgaacaagcctcttcaggcagccagatcccctttgatccctatgccaccgacagtgatgagcatcttgaagtcttattaaattcccagagccccctaggaaagatgagtgatgtcacccttctaaaaattgggagcgaagagcctcactttgatgggataatggatggattctctgggaaggctgcagaagacctcttcaatgcacatgagatcttgccaggccccctctctccaatgcagacacagttttcaccctcttctgtggacagcaatgggctgcagttaagcttcactgaatctccctgggaaaccatggagtggctggacctcactccgccaaattccacaccaggctttagcgccctcaccaccagcagccccagcatcttcaacatcgatttcctggatgtcactgatctcaatttgaattcttccatggaccttcacttgcagcagtggtagaatgcccaatgcaccagtgctatggaagaccaatggagttccatgggggaaagcacacagccatacatactttactgtccaaaaacagaagaagaagaagagaattaaaaagaagcaatgatttctgtgccaatgaacaagaacaaaagtcatttttagaaatacatatactgtaatatttaccaacagtcagtaactgttaatgatttcaacaatgcattaaaagaatgtgctttctcagattaaggatgccaaaaaagatatttcactgccttttcaaagaccagtatattttctagcccataatttttctcaggcattgttggggcataagctcacactgtaagcttttctcatgaattcactagacataacgtggaaggaaaacgtagtcttttgggagtacagggaagccagcccctcaaagcttatggaagacatacctgcaatggaagctgttgcccaatgtctccattactatctttcaaaagagaagccagacccagcttcagatcaaaagttcttgagacagaggaacaaaaccaatcgatttccagggaagctaatcaactctcttttccctctaccacaaaactgccctgctggagtggttctgaacctgtacccaggactcgatgtggtcactaataacaattaacctgaactgagtccacagaactccactcggaactttcttcttttttaactagtggcccaatcattcccaccatctctgtgctgataagtacgtgtcctagatgagaaccctgaagaatgcagaccttcttcccccgaaggagatgccacaagctctccaacacagccccctttagttccaaagactagagatgaccacattggtagaagtatatctcgaggcacaggaagggagccccaccagggataattcagacaggactagagaataacatcatttcacataccctgggataaacaccctgggttcctatagaaggactattacttatgggagtccaacttctccttttgttttgttattatcagtttatctttctcccactccacttttccttcaaggtaccaatcctttcctgttcctcgtttggccatctttctttttctgcctccacattgggaggggaggacttctcagttctaacaagctgccatactcctaagaaagccatttttgaaaaatttaacaatccaggttcttctggagaactcattctccacacgcacagtttgctgcaaaaggaagttgcaagaatttcttgaggaagaaactggtgacttggtccatcagtcacgaagttctttctattctcgtttagttttcaagaaattattggtttgtgttgctctggggaaattggaaatcattacattgtaaagacaaatatggatgatatttacaagagagaatttcagatctgggtttttgaaagaaaacagaattgcgcattgaaaacgatggaaggaaaaagacaatggtctaatgtgcattcctcattacctctcgtggctttggctgggagttggaaaaagctaaaatttcagaacagtctctgtaaggctctctgtggctccagttcaccattttatattgttgcatgctgtagaaaggagctattgctgttgttttgtttttttatttaaatcactaaggcactgtttttatcttttgtaaaaaaaaaaaaaaa

SEQ ID NO: 274590 - DNA, 1989 bp, Artificial Sequence
  derived and/or modified sequence
atggacagcgcctacgcccggctgctgcagcagcagcagctgttcctacaacttcagattctgagtcaacaacagcagcagcagcagcatcgattcagctacctgggaatgcaccaggcacagctgaaggagcctaatgaacagatggtaaggaacccaaactcctcctccactccactttccaacacaccgctctcaccagtgaagaatagtttcagcggacagacaggagtgagctcattcaaacctggacctctgcccccgaacttggatgacctaaaggtaagtgagttacggcagcagcttcggatcagagggttgcccgttagtggcaccaaaacagccctgatggatcgcttgaggccctttcaggactgcagtgggaatcctgtcccaaatttcggtgatataaccacagttacttttcccgttacaccgaacaccctgcctaactaccagtcgtcctcttctaccagtgcactgagtaatgggttttatcacttcggaagtacatctagtagccctccgatctcgcctgcaagtagcgatctgagcgtcgcaggaagtcttcccgatacgtttaacgatgctagcccaagtttcgggctacatccgtcacctgtgcatgtgtgtaccgaagaaagtctcatgtcctctctgaatggtggatcagtccccagcgaattggacgggttggattctgaaaaggataagatgctggtggagaaacagaaggttataaacgagctcacatggaaactccaacaggaacaaaggcaggtggaagagcttagaatgcaactccaaaaacagaagagaaacaattgttccgaaaaaaagccgctacctttccttgccgctagtattaaacaggaggaagcagtgtcatcgtgtccattcgcttctcaggtgcccgtcaaacgccagtccagctcatctgaatgtcatcctccagcatgtgaggcagcgcaacttcagcccctgggcaatgcccattgcgtcgagtccagcgatcaaacaaatgttctctcaagcacatttctttcaccacagtgcagtccgcagcatagcccactgggggccgtaaagagcccgcagcacatttccttaccaccttcccccaacaatccacacttcttaccctccagctccggcgcgcaaggagaaggacaccgggtgagttctccaatcagtagccaagtatgcaccgcccaaaactccggtgcgcacgacggtcatccacccagtttctctccccactcttcatccttgcatcctccattttccggtgcgcaggcagacagtagccatggcgccggtggtaacccttgccctaaatcaccctgcgttcagcagaagcagatgacgcggagtcaacaaatggacgagctgctagatgtactgattgagagcggagagatgccggctgacgcccgtgaagaccattcttgcttgcagaaggtccctaaaattcccaggtcttccagaagtcccaccgcagtacttaccaaaccgtctgcctcattcgagcaagcctcgtcggggtctcagattcccttcgatccatatgccacagattccgacgagcacctggaggtccttttaaattcgcaatccccactgggcaaaatgtccgatgtgactctgttaaagattgggagtgaggagccgcattttgatggaataatggacggcttttcagggaaagccgccgaggacttgtttaatgcccatgagatcctgcctggccctctctccccgatgcagacacagttcagcccaagttccgtggactccaacggcttacaactgagcttcacagagtccccctgggagactatggaatggctagacctcacgccccctaactcaacccccggcttttctgccctgaccacaagctccccctctatcttcaacatcgacttcctggacgtgaccgatcttaatttaaattcttccatggatcttcacttgcagcaatggtag

SEQ ID NO: 274591 - DNA, 1947 bp, Artificial Sequence
  derived and/or modified sequence
ttcctgcagctgcagatcctgagccagcagcagcagcagcagcagcaccgcttttcgtacctgggcatgcatcaggctcagctcaaagaaccgaatgaacagatggttcggaaccctaacagcagcagtacacccctgtcaaatacccctctaagtccagtcaaaaacagcttctccggacagaccggcgtgtcatcttttaagcctgggcctcttccgcctaatctggatgatttgaaggtttccgagctacgccaacagttacgtatccgtggcttgcccgtgagtggtaccaaaacggcattgatggataggttacgccccttccaggattgctccggtaatccagtgcctaattttggggacattactactgtgacctttcctgtcacccctaacaccctgccaaactatcagtcatcttcctccactagtgccctttctaatggattctaccatttcggctccacctcctctagccctcccataagcccagcttcctccgatttatccgtcgcagggagcttacctgacacattcaacgatgcgagcccctccttcgggctgcaccctagccccgtgcacgtgtgcacagaggagagcctcatgtcctccttgaatgggggctccgtgcctagtgaactggacggtctcgacagcgagaaagataaaatgctcgttgaaaagcagaaagttattaatgagcttacatggaagctccagcaggaacagaggcaggtcgaagaacttagaatgcagctgcagaagcaaaagaggaacaactgttctgagaagaagcccctcccatttctggcagcatcaattaagcaagaggaagccgtgagcagctgcccttttgcaagccaggtcccggtcaagcgtcagagctcatcctccgaatgccatcctccagcttgtgaggcagcacagctgcagcccctgggtaacgctcattgcgtggagtctagtgaccaaaccaacgtcctgagctccacctttctgagcccacagtgttcgccacaacactcacctctgggggctgtcaagtcgcctcagcacatctccctgcctccaagccctaacaatccacatttcctgcccagctcttcaggcgcccagggcgaagggcaccgggtttcctccccgatcagttcccaggtgtgcaccgcacagaacagcggagctcacgacggacacccacctagtttcagtcctcattcctcctcccttcatcccccctttagcggagcccaggccgacagtagccatggtgctggcggaaatccctgtcccaagagtccctgcgttcagcagaaacagatgacgcggagccaacaaatggatgagctcctagacgtgcttatagagagcggagaaatgcccgcggatgctcgagaagaccattcgtgcttacagaaagtccctaagatccctcggtcctcccgaagccctacggctgttctgacgaaaccatcagcatctttcgagcaggctagttcaggcagccagatcccgttcgatccctatgctaccgactcggatgaacacctcgaggtgctccttaatagccagagccccctgggcaagatgtcagacgtgaccctccttaaaataggctccgaagaaccgcacttcgacggcattatggacggatttagcgggaaggccgctgaggacctttttaacgcccacgaaattcttcccggccctctgtctcctatgcagacccaattctctccttccagcgtggattcaaacggactgcagctgagcttcaccgagtccccgtgggaaaccatggagtggctggacttgactccacctaattccacgcctggattctccgccctgactacctcttccccttctatcttcaacatagattttctggatgttaccgaccttaacttaaacagctcaatggacctgcatctgcagcagtggtag

SEQ ID NO: 274592 - DNA, 1989 bp, Artificial Sequence
  derived and/or modified sequence
atggatagtgcctatgcgaggctgctgcaacagcagcagcttttcctacagctccaaatcttgagtcagcaacaacaacaacagcagcaccggttctcttacctcgggatgcatcaggcacagttaaaagaacctaacgagcagatggtcaggaacccaaatagttctagtactcccctctcaaacacacctctaagtcctgtgaagaacagtttcagcggccagactggtgtctcatccttcaaaccaggaccactgccccctaacctcgatgatcttaaggtgtcggaactgcgccagcagttgcggattcgtgggctacctgtcagcggcacaaaaacagccttgatggatcgactacgcccatttcaggattgctccggtaacccagtgccaaacttcggggacatcactacagtcacctttccggtgactcctaacacgctgccaaattatcagtcttcatctagtacatccgcactcagcaacggattttatcactttggctccacgagcagctcccccccaatttctccggcatcttctgatctgtcagtcgccggatctctgcctgacacattcaacgatgcctcacccagtttcgggctgcatccaagtcccgtgcatgtttgtacggaagagagccttatgtcctctctgaacggcggttccgtgccttctgagctcgatggcctcgactctgagaaggataagatgctagtggaaaagcagaaggtgattaacgaactcacatggaagctccaacaggagcagcgccaagttgaggaactacgcatgcagctgcagaagcagaagaggaataactgcagcgaaaagaagcctctcccgtttctcgccgcatctattaagcaggaagaagctgtttcctcctgcccttttgcttcccaggtcccggtgaaacgccaaagttcatccagtgaatgtcaccctccagcatgtgaagcagctcagctgcagcctctcggcaacgctcattgcgtggagtctagcgatcagacgaatgtactgagctccacctttttgtccccacagtgttcccctcaacacagcccattgggagcagtcaagtccccacagcatatctcactcccaccttcgcctaataaccctcacttcctcccaagctcttccggggctcagggcgaaggccatcgtgtctcatctcctatctcctctcaagtgtgcaccgcccaaaacagtggagctcacgacggacacccgcctagtttttcaccccactctagctcactgcatccaccattcagcggcgctcaggccgattcctcgcacggtgccggtggcaatccttgcccaaagtctccctgcgtgcagcaaaagcagatgactaggagtcagcagatggacgaacttctggacgtgctcatagagagtggagagatgcccgcagatgctagagaagatcattcatgtctgcagaaagtgcccaagatcccacgttcgtctcggtcaccgaccgccgttctgacgaagcccagcgcttcctttgagcaggcctctagtggcagtcagatcccatttgatccctatgctaccgattctgacgagcatcttgaagtgttactgaactcccagtctccactagggaagatgtcggatgtaactctattgaagattggcagtgaggagccgcacttcgacggaattatggatggtttctctgggaaagctgcagaggacctgttcaacgcccacgaaatcctgcccggacccctctctcctatgcagactcagttttcacctagtagcgtagacagtaacggtctccaattatcctttacagaatccccttgggagaccatggaatggctggatttgaccccacctaacagcaccccgggattctccgcactgactaccagtagcccatccatctttaacatagacttcctcgatgtcacagatctcaatctgaacagttctatggacctacacctccagcagtggtag

SEQ ID NO: 274593 - DNA, 1947 bp, Artificial Sequence
  derived and/or modified sequence
ttcctgcagctccagattctgagccagcaacagcagcaacagcagcacagattctcttacctgggcatgcatcaggcacaattaaaggagcccaatgagcagatggtgaggaaccccaattcatcatctacaccgctatccaacacaccattatcaccagtaaaaaattcgttctccggccaaacaggggtctcatcctttaaaccaggaccactccctccgaacctcgatgatctgaaagtaagcgagctgcgacagcagctgcggattagaggcttacccgtctcgggtacaaagacagctctcatggacagacttaggccctttcaggattgtagtgggaaccccgtgcctaactttggtgacatcacaaccgtgacctttccagttactccgaacacgttaccaaattatcagtccagtagctctacctcagccttgtcaaacggcttttaccatttcggttccaccagttcttcccccccaatctctcccgctagctccgacctgagcgtggcgggttccctccccgataccttcaacgatgcatccccatccttcggccttcacccatcccctgtccacgtttgtactgaggaatccctgatgtcaagcttaaacggcggatccgtcccttcagagctcgacgggctagacagtgaaaaagataaaatgctggtggagaagcagaaagttataaatgagttgacctggaaactgcaacaggagcagaggcaagtggaagagctgcggatgcagctgcaaaagcaaaagagaaacaactgtagtgaaaaaaagcctttgcccttcttggctgcttccattaaacaggaggaggccgtttcttcctgtcccttcgcttcccaagtgcccgtgaagcgccagagtagtagctcagaatgtcacccccctgcctgcgaagctgcccaattgcagccgctcggtaatgcacactgcgtcgagtcctcagatcagacaaacgtcctctctagcacatttctctctccacagtgcagcccccagcactccccactcggcgcagtgaagtccccacagcacatcagcttgcctcctagccccaacaatccccacttcctgccatcctcctccggagcccagggcgagggccacagggtctccagccccatctcttcacaggtttgcacagcccagaatagcggggctcacgatggacatcccccaagcttttccccccatagtagctctctgcaccctccttttagcggcgcacaggcagacagttctcatggggcaggcggaaacccatgcccaaagagcccttgcgttcagcaaaagcagatgacaaggagtcagcagatggacgagctgcttgacgtcctgatagagagtggcgagatgcctgccgatgctcgggaagatcattcctgtctgcagaaagttccgaaaatcccacgctccagcagaagccctacagcagttctcaccaaaccaagcgcctccttcgagcaggcttcaagcggttcccaaatcccattcgatccatacgccacagactccgatgaacacctggaggtgttgctgaatagtcagtcaccactcggcaagatgagtgatgtgaccctcctcaagattggtagcgaagagcctcactttgatggtataatggacgggttctccggtaaggccgctgaggacctatttaatgcccacgagattctgccagggcctctgtcccctatgcagactcaattttcgcctagcagcgtggattccaatggactgcagctgagctttaccgagtccccctgggaaaccatggaatggctcgacctaacccctcctaattctacccccggatttagtgcattaactacttcctcccccagcatttttaatatcgatttcttggatgtgacagatttgaatcttaacagctccatggatctgcacctgcagcaatggtag

SEQ ID NO: 274594 - DNA, 1989 bp, Artificial Sequence
  derived and/or modified sequence
atggacagcgcctacgccagactgctgcagcagcagcagctgttcctgcagctgcagatcctgagccagcagcagcagcagcagcagcacagattcagctacctgggcatgcaccaggcccagctgaaggagcccaacgagcagatggtgagaaaccccaacagcagcagcacccccctgagcaacacccccctgagccccgtgaagaacagcttcagcggccagaccggcgtgagcagcttcaagcccggccccctgccccccaacctggacgacctgaaggtgagcgagctgagacagcagctgagaatcagaggcctgcccgtgagcggcaccaagaccgccctgatggacagactgagacccttccaggactgcagcggcaaccccgtgcccaacttcggcgacatcaccaccgtgaccttccccgtgacccccaacaccctgcccaactaccagagcagcagcagcaccagcgccctgagcaacggcttctaccacttcggcagcaccagcagcagcccccccatcagccccgccagcagcgacctgagcgtggccggcagcctgcccgacaccttcaacgacgccagccccagcttcggcctgcaccccagccccgtgcacgtgtgcaccgaggagagcctgatgagcagcctgaacggcggcagcgtgcccagcgagctggacggcctggacagcgagaaggacaagatgctggtggagaagcagaaggtgatcaacgagctgacctggaagctgcagcaggagcagagacaggtggaggagctgagaatgcagctgcagaagcagaagagaaacaactgcagcgagaagaagcccctgcccttcctggccgccagcatcaagcaggaggaggccgtgagcagctgccccttcgccagccaggtgcccgtgaagagacagagcagcagcagcgagtgccacccccccgcctgcgaggccgcccagctgcagcccctgggcaacgcccactgcgtggagagcagcgaccagaccaacgtgctgagcagcaccttcctgagcccccagtgcagcccccagcacagccccctgggcgccgtgaagagcccccagcacatcagcctgccccccagccccaacaacccccacttcctgcccagcagcagcggcgcccagggcgagggccacagagtgagcagccccatcagcagccaggtgtgcaccgcccagaacagcggcgcccacgacggccacccccccagcttcagcccccacagcagcagcctgcacccccccttcagcggcgcccaggccgacagcagccacggcgccggcggcaacccctgccccaagagcccctgcgtgcagcagaagcagatgaccagaagccagcagatggacgagctgctggacgtgctgatcgagagcggcgagatgcccgccgacgccagagaggaccacagctgcctgcagaaggtgcccaagatccccagaagcagcagaagccccaccgccgtgctgaccaagcccagcgccagcttcgagcaggccagcagcggcagccagatccccttcgacccctacgccaccgacagcgacgagcacctggaggtgctgctgaacagccagagccccctgggcaagatgagcgacgtgaccctgctgaagatcggcagcgaggagccccacttcgacggcatcatggacggcttcagcggcaaggccgccgaggacctgttcaacgcccacgagatcctgcccggccccctgagccccatgcagacccagttcagccccagcagcgtggacagcaacggcctgcagctgagcttcaccgagagcccctgggagaccatggagtggctggacctgaccccccccaacagcacccccggcttcagcgccctgaccaccagcagccccagcatcttcaacatcgacttcctggacgtgaccgacctgaacctgaacagcagcatggacctgcacctgcagcagtggtag

SEQ ID NO: 274595 - DNA, 1947 bp, Artificial Sequence
  derived and/or modified sequence
ttcctgcagctgcagatcctgagccagcagcagcagcagcagcagcacagattcagctacctgggcatgcaccaggcccagctgaaggagcccaacgagcagatggtgagaaaccccaacagcagcagcacccccctgagcaacacccccctgagccccgtgaagaacagcttcagcggccagaccggcgtgagcagcttcaagcccggccccctgccccccaacctggacgacctgaaggtgagcgagctgagacagcagctgagaatcagaggcctgcccgtgagcggcaccaagaccgccctgatggacagactgagacccttccaggactgcagcggcaaccccgtgcccaacttcggcgacatcaccaccgtgaccttccccgtgacccccaacaccctgcccaactaccagagcagcagcagcaccagcgccctgagcaacggcttctaccacttcggcagcaccagcagcagcccccccatcagccccgccagcagcgacctgagcgtggccggcagcctgcccgacaccttcaacgacgccagccccagcttcggcctgcaccccagccccgtgcacgtgtgcaccgaggagagcctgatgagcagcctgaacggcggcagcgtgcccagcgagctggacggcctggacagcgagaaggacaagatgctggtggagaagcagaaggtgatcaacgagctgacctggaagctgcagcaggagcagagacaggtggaggagctgagaatgcagctgcagaagcagaagagaaacaactgcagcgagaagaagcccctgcccttcctggccgccagcatcaagcaggaggaggccgtgagcagctgccccttcgccagccaggtgcccgtgaagagacagagcagcagcagcgagtgccacccccccgcctgcgaggccgcccagctgcagcccctgggcaacgcccactgcgtggagagcagcgaccagaccaacgtgctgagcagcaccttcctgagcccccagtgcagcccccagcacagccccctgggcgccgtgaagagcccccagcacatcagcctgccccccagccccaacaacccccacttcctgcccagcagcagcggcgcccagggcgagggccacagagtgagcagccccatcagcagccaggtgtgcaccgcccagaacagcggcgcccacgacggccacccccccagcttcagcccccacagcagcagcctgcacccccccttcagcggcgcccaggccgacagcagccacggcgccggcggcaacccctgccccaagagcccctgcgtgcagcagaagcagatgaccagaagccagcagatggacgagctgctggacgtgctgatcgagagcggcgagatgcccgccgacgccagagaggaccacagctgcctgcagaaggtgcccaagatccccagaagcagcagaagccccaccgccgtgctgaccaagcccagcgccagcttcgagcaggccagcagcggcagccagatccccttcgacccctacgccaccgacagcgacgagcacctggaggtgctgctgaacagccagagccccctgggcaagatgagcgacgtgaccctgctgaagatcggcagcgaggagccccacttcgacggcatcatggacggcttcagcggcaaggccgccgaggacctgttcaacgcccacgagatcctgcccggccccctgagccccatgcagacccagttcagccccagcagcgtggacagcaacggcctgcagctgagcttcaccgagagcccctgggagaccatggagtggctggacctgaccccccccaacagcacccccggcttcagcgccctgaccaccagcagccccagcatcttcaacatcgacttcctggacgtgaccgacctgaacctgaacagcagcatggacctgcacctgcagcagtggtag

SEQ ID NO: 274596 - DNA, 2055 bp, Artificial Sequence
  derived and/or modified sequence
atgaagttaaagagagccagactcgctgatgaccttaacgagaagattgcgctgaggcccggtccgttagagcttgtagaaaagaatattttgcctgttgacagcgcggtcaaagaggccatcaaaggcaaccaggtgtcattttcaaagagtactgatgccttcgcatttgaagaggacagttcttcggatgggctgtcccccgatcaaacacgcagcgaagatccacagaacagcgcaggttcaccgcctgatgctaaggcctcagacaccccttcaaccggatctctaggcactaaccaagatctcgcctcaggctctgaaaatgatcgcaacgactctgcaagccaaccttctcatcagtccgatgcgggaaagcaagggctgggtcctccttccactccaatcgcagtacacgccgccgtcaagagcaagtcactaggggactctaagaacagacataagaaaccaaaagaccctaagcctaaggtaaagaaactgaaataccatcagtacatcccacctgaccagaaagccgagaaatcgcctcccccgatggattcagcctatgccaggctcctgcagcaacaacaactcttcttgcaattgcagattctctctcaacagcagcagcagcagcaacaccgcttctcctatctcggaatgcaccaggctcaacttaaggagcccaatgaacagatggttcgcaacccaaacagtagcagtactccactatcaaataccccgttatcccctgtgaaaaactccttttctggccagaccggtgtcagctccttcaagccaggtccccttcccccgaacttggatgatctgaaagtctccgagcttcggcaacagctcaggataagggggctgcccgtgagcggaaccaagacagctcttatggatcggttgcgtccgtttcaggattgttccggcaacccagtccctaactttggtgacattacgacagtgacgtttcccgtgactcccaataccttgcctaattaccagtccagcagttcaacctcagccctgtccaacggattttaccatttcggttccacctcatcttcacctccaatatctcccgcctcaagtgatctctcggtcgccggttccctccccgacacctttaatgacgcctctccgagcttcggactgcatcccagccctgtgcacgtatgtacggaagaaagcctgatgtcttccttaaacggtggctccgtcccctcagagctggatggcctcgatagcgaaaaggataagatgttagttgagaagcagaaagtgatcaatgaattgacctggaaacttcagcaggagcagcggcaggtcgaggagctacgtatgcagctccaaaagcagaagaggaacaactgtagtgagaaaaagccactgcccttcctggcagcctctatcaaacaagaggaagccgtaagctcctgcccatttgccagtcaagtgcccgtcaaaaggcagtccagctcatcggaatgccacccccctgcctgcgaggccgcccagctccagcctctcggaaacgcgcactgcgtagaaagctcagatcagaccaatgtgctgagctcaacattcctgtcacctcagtgctctcctcaacactccccattgggggccgttaagtcgcctcagcatatctcgcttccaccctcaccgaataaccctcatttcctccctagctctagcggtgcccagggcgaaggccatcgcgtgagttcacctatctccagtcaggtgtgcaccgcacagaattccggcgctcatgacggccacccaccctctttttcacctcactctagcagtctgcatcctcccttctccggggcccaggccgactcctcccacggagcagggggtaacccttgccctaagtccccttgcgtccagcagaaaatggcaggcctgcattcttccgataaagtcgggcccaaattctcgatcccgagcccaacattctctaagtcttcttccgccatttcggaggtcacccagccaccatcatacgaagatgcggttaaacaagtcactatgtag

SEQ ID NO: 274597 - DNA, 2055 bp, Artificial Sequence
  derived and/or modified sequence
atgaagctgaagagggcccggctggctgatgacctgaatgagaagatcgccctgcggcccggccccctggagctggtggagaagaacatcctgcctgtggacagcgctgtgaaggaggccatcaagggcaaccaggtgtccttcagcaagagcacagatgcctttgcctttgaggaggacagcagcagtgatggcctgagcccagaccagaccaggtctgaggacccccagaacagcgctggcagccccccagatgccaaggccagtgacacccccagcacaggcagcctgggcaccaaccaggacctggccagcggctctgaaaatgacagaaatgacagcgccagccagcccagccaccagagtgatgctgggaagcagggcctgggcccccccagcacccccatcgctgtgcacgccgctgtgaagagcaagagcctgggggacagcaagaacagacacaagaagcccaaggaccccaagcccaaggtgaagaagctgaagtaccaccagtacatccccccagaccagaaggccgagaagagccccccacccatggacagcgcctatgcccggctgctgcagcagcagcagctgttcctgcagctgcagatcctgagccagcagcagcagcagcagcagcaccgcttctcctacctgggcatgcaccaggcccagctgaaggagcccaatgagcagatggtgaggaaccccaacagcagcagcacccccctgagcaacacccccctgagccctgtgaagaacagcttcagcggccagacaggagtgtcctccttcaagccaggccccctgccccccaacctggatgacctgaaggtgtctgagctgcggcagcagctgcgcatccggggcctgcctgtgtctggcaccaagacagccctgatggaccggctgcggcccttccaggactgcagcggcaaccctgtgcccaactttggagacatcaccaccgtgaccttccctgtgacccccaacaccctgcccaactaccagagcagcagcagcaccagcgccctgagcaatggcttctaccacttcggcagcaccagcagcagcccccccatcagccctgccagcagtgacctgtctgtggccggcagcctgcctgacaccttcaatgatgccagccccagctttggcctgcaccccagccctgtgcacgtgtgcacagaggagagcctgatgagcagcctgaatggaggctctgtgcccagcgagctggatggcctggacagcgagaaggacaagatgctggtggagaagcagaaggtgatcaatgagctgacctggaagctgcagcaggagcagaggcaggtggaggagctgaggatgcagctgcagaagcagaagaggaacaactgcagcgagaagaagcccctgcccttcctggccgccagcatcaagcaggaggaggccgtgagcagctgcccctttgccagccaggtgcctgtgaagaggcagagcagcagcagcgagtgccaccccccagcctgtgaggccgcccagctgcagcccctgggcaatgcccactgtgtggagagcagtgaccagaccaacgtgctgagcagcaccttcctgagcccccagtgcagcccccagcacagccccctgggcgctgtgaagagcccccagcacatcagcctgccccccagccccaacaacccccacttcctgcccagcagcagcggggcccagggcgagggccaccgggtgagcagccccatcagcagccaggtgtgcacagcccagaacagcggggcccatgatggccaccccccatccttcagcccccacagcagcagcctgcacccccccttcagcggggcccaggccgacagcagccacggggccggcggcaacccctgccccaagagcccctgtgtgcagcagaagatggccggcctgcacagcagtgacaaggtgggccccaagttcagcatccccagccccaccttcagcaagagcagcagcgccatcagcgaggtgacccagccccccagctatgaagatgctgtgaagcaggtgaccatgtag

SEQ ID NO: 274598 - DNA, 2344 bp, Artificial Sequence
  derived and/or modified sequence
aaaatcgattgctctctgccacaaaccggagacccttcttgggcgatccgctttctcagcatgtggaaggtttttctctctctcttctttttctactaaaccttccgctcctaaacccattcctcgtgtgtatccctgtcctgaattctttctcgaccatgacaaagaaccagcttccactgcagagaggtccattccaactgctcagatgaagctgaaaagagcccgactcgccgatgatctcaatgaaaaaattgctctacgaccagggccactggagctggtggaaaaaaacattcttcctgtggattctgctgtgaaagaggccataaaaggtaaccaggtgagtttctccaaatccacggatgcttttgcctttgaagaggacagcagcagcgatgggctttctccggatcagactcgaagtgaagacccccaaaactcagcgggatccccgccagacgctaaagcctcagataccccttcgacaggttctctggggacaaaccaggatcttgcttctggctcagaaaatgacagaaatgactcagcctcacagcccagccaccagtcagatgcggggaagcaggggcttggcccccccagcacccccatagccgtgcatgctgctgtaaagtccaaatccttgggtgacagtaagaaccgccacaaaaagcccaaggaccccaagccaaaggtgaagaagcttaaatatcaccagtacattcccccagaccagaaggcagagaagtcccctccacctatggactcagcctacgctcggctgctccagcaacagcagctgttcctgcagctccaaatcctcagccagcagcagcagcagcagcaacaccgattcagctacctagggatgcaccaagctcagcttaaggaaccaaatgaacagatggtcagaaatccaaactcttcttcaacgccactgagcaatacccccttgtctcctgtcaaaaacagtttttctggacaaactggtgtctcttctttcaaaccaggcccactcccacctaacctggatgatctgaaggtctctgaattaagacaacagcttcgaattcggggcttgcctgtgtcaggcaccaaaacggctctcatggaccggcttcgacccttccaggactgctctggcaacccagtgccgaactttggggatataacgactgtcacttttcctgtcacacccaacacgctgcccaattaccagtcttcctcttctaccagtgccctgtccaacggcttctaccactttggcagcaccagctccagccccccgatctccccagcctcctctgacctgtcagtcgctgggtccctgccggacaccttcaatgatgcctccccctccttcggcctgcacccgtccccagtccacgtgtgcacggaggaaagtctcatgagcagcctgaatgggggctctgttccttctgagctggatgggctggactccgagaaggacaagatgctggtggagaagcagaaggtgatcaatgaactcacctggaaactccagcaagagcagaggcaggtggaggagctgaggatgcagcttcagaagcagaaaaggaataactgttcagagaagaagccgctgcctttcctggctgcctccatcaagcaggaagaggctgtctccagctgtccttttgcatcccaagtacctgtgaaaagacaaagcagcagctcagagtgtcacccaccggcttgtgaagctgctcaactccagcctcttggaaatgctcattgtgtggagtcctcagatcaaaccaatgtactttcttccacatttctcagcccccagtgttcccctcagcattcaccgctgggggctgtgaaaagcccacagcacatcagtttgcccccatcacccaacaaccctcactttctgccctcatcctccggggcccagggagaagggcacagggtctcctcgcccatcagcagccaggtgtgcactgcacagaactcaggagcacacgatggccatcctccaagcttctctccccattcttccagcctccacccgcccttctctggagcccaagcagacagcagtcatggtgccgggggaaacccttgtcccaaaagcccatgtgtacagcaaaagatggctggtttacactcttctgataaggtggggccaaagttttcaattccatccccaactttttctaagtcaagttcagcaatttcagaggtaacacagcctccatcctatgaagatgccgtaaagcaggtaaccatgtgatttgttctttatggaagaatagactgactcaatgaacagacattgtttgatatgattaaacttcacgcagtttgtaaattc

SEQ ID NO: 274599 - DNA, 2055 bp, Artificial Sequence
  derived and/or modified sequence
atgaagctgaagcgggcccggctggccgacgacctgaacgagaagatagctttgcgtccgggccctttggagctagtcgagaagaacatcctgccagtggattctgctgtcaaggaggccatcaagggaaatcaagtttcatttagtaaatccacagatgcttttgctttcgaagaggacagcagttctgacggtctttcgccagatcagacccgcagcgaagatccacagaacagcgctggatcccctcccgatgcaaaagcatctgacacgccaagcacggggtctctcggcacaaaccaggatctagcatcgggatcggaaaatgatcggaacgactccgccagccagccttcccaccaaagcgatgcagggaaacaggggctgggtcctccttccactcccatcgctgtgcacgctgccgtgaagtctaaaagcctcggggactctaaaaaccggcataagaagcccaaggatcccaagcctaaagtgaaaaagctcaagtatcatcaatacatcccacccgaccagaaagcagagaagtctcctccaccaatggacagcgcatatgcacggctgctgcagcagcagcagctgtttctgcagctgcagatcttaagtcagcaacagcaacagcagcagcacaggttttcttatctgggaatgcatcaggcacagctcaaggagccaaacgaacagatggtaagaaaccccaactcaagcagtactcccctcagtaataccccactcagtcccgttaaaaattcattctccggccagacaggagtgagcagttttaagcccgggccactcccgccgaatcttgacgacctgaaagtcagcgaattgagacagcaactgaggattaggggtctccctgtatcgggaacaaagactgctcttatggatcggctgaggccatttcaggattgttcgggaaaccctgtgccaaattttggagacatcacgaccgtgaccttcccagtgacacctaataccctgcctaattaccagtcgtcaagcagcacctccgcattgtccaacgggttctaccacttcggctcaacctcttcaagcccacccatctctcccgccagttccgatctgagtgtcgctggaagtttgcctgacactttcaatgacgcttctccatcttttggtctgcacccaagcccagttcatgtctgcacagaggagtccttgatgagtagcctgaatggggggtcggtacctagtgagcttgacgggttagattctgagaaagacaaaatgctcgtggagaagcagaaggtcattaacgagctcacctggaagctccaacaggaacagagacaagtggaagaactccgaatgcagctgcagaaacagaagcgaaataattgctctgaaaaaaaaccgctgccattcctggcagcctcgatcaaacaggaagaggccgtgtctagttgcccatttgcctctcaggtgccagtgaagcggcagtcatcgtcaagtgagtgccacccacccgcatgtgaagcggcccagcttcagccattgggaaatgctcattgtgtagaatccagtgaccaaaccaatgttttgagtagtaccttcctgtctccccagtgctcaccacagcattcccccctaggagccgtcaaatcccctcagcatatctcactgccaccatcccccaataaccctcatttcttaccctctagctccggcgcccaaggtgaaggtcatcgtgtgtcaagtcccatcagttcccaggtctgcaccgcccaaaacagcggtgctcatgatggacaccccccatccttctccccacatagctcttctctgcacccccctttctctggggctcaagccgactcctcacacggcgctggcgggaacccctgccctaaaagcccttgcgtacagcaaaaaatggctgggctgcattcttcagataaggtgggtcccaagttctctatcccgagccccactttctctaaatcctctagcgccataagtgaggtgacacagcccccttcttatgaagacgcagtgaagcaggtcaccatgtag

SEQ ID NO: 274600 - DNA, 2055 bp, Artificial Sequence
  derived and/or modified sequence
atgaaactgaaaagggccaggctggccgatgacctgaatgaaaagatcgcgttaaggcctggcccactggagttggtcgaaaagaacattttacccgtggattctgccgtcaaagaagccattaagggtaaccaagtgagcttcagtaagtccacagacgcctttgccttcgaggaagactcatcaagcgacgggttgtcgcccgaccagacccggtcggaggaccctcagaattcagccggatcacccccagatgcgaaggcctctgacacaccaagcaccggatccctgggcactaatcaggacttggcttcaggtagtgaaaacgaccgaaatgacagcgcgagtcagcccagccaccagtctgacgccggaaagcaaggactggggccaccatccaccccgatagcagtccacgccgcagttaagagtaaaagtttaggagacagtaaaaatcggcataagaagcctaaagaccccaaacctaaggtcaagaagcttaagtaccaccagtacatccccccagatcaaaaggctgagaaatctccacccccaatggattcagcttatgccaggctgctgcagcagcagcagctatttcttcagctgcagatcctgtcccagcagcaacagcagcaacaacacagattcagctatctcgggatgcaccaggcccagctgaaagagcccaacgagcagatggttcgcaatcctaacagcagtagtacccctctgtccaacactcccctgagcccagtgaaaaactccttcagcggccagactggcgtgagcagcttcaaacccggacccctgccaccaaacttggacgatctgaaagtttcggaactgaggcagcagcttcgaatcaggggtctgccagtgtctggtactaaaaccgcgctgatggacagactgaggccttttcaagactgttcgggcaacccggtacccaattttggcgatattacaaccgtgacttttcctgtaactcccaacacgttacctaattaccagtcatcaagttcaacatctgccttgtcaaatggcttttaccactttggaagtacctcttcttccccaccaatcagccctgctagttcagacctgtctgtggcaggaagcctgccagatactttcaacgacgcatcaccttcgttcggattgcacccttcaccggtgcatgtctgcacggaagagagtctgatgagtagcttgaatggtggtagtgtgccatctgagcttgatggattggattcagagaaagataaaatgctggtggagaaacagaaagtgattaatgaacttacctggaagctgcagcaagagcaacgccaagtcgaagaactgagaatgcagctgcaaaagcagaaacgtaacaactgcagcgagaagaagcctttgccttttctcgcggcaagcatcaaacaagaggaggccgtgagcagttgtccctttgcctcccaagtcccagtaaagagacaaagctcatccagcgaatgtcacccccctgcttgtgaggctgcccaacttcaacccctgggaaacgcccattgcgttgagtccagcgaccagacaaacgttctgagttccacgtttctttcaccgcagtgctcacctcagcatagcccgctcggtgcagtgaaatcacctcaacatatctcgctaccacccagtcccaacaatccacacttcctgccttcctccagtggcgcacagggggaggggcaccgcgtgagctcccctattagctctcaggtctgcactgcccaaaacagcggcgctcatgacggccatcccccttctttcagcccacactctagtagcttgcaccctccattctcaggagcacaggccgacagttctcacggcgctggagggaatccctgtcctaagtcgccgtgcgtgcagcagaagatggccggactgcacagcagcgataaggttggacctaagttctcaatccccagccctactttcagcaaatcctcctctgcaatatcggaggtgacccagccaccctcttacgaggacgcagttaagcaagtcaccatgtag

SEQ ID NO: 274601 - DNA, 2055 bp, Artificial Sequence
  derived and/or modified sequence
atgaagctgaagagagccagactggccgacgacctgaacgagaagatcgccctgagacccggccccctggagctggtggagaagaacatcctgcccgtggacagcgccgtgaaggaggccatcaagggcaaccaggtgagcttcagcaagagcaccgacgccttcgccttcgaggaggacagcagcagcgacggcctgagccccgaccagaccagaagcgaggacccccagaacagcgccggcagcccccccgacgccaaggccagcgacacccccagcaccggcagcctgggcaccaaccaggacctggccagcggcagcgagaacgacagaaacgacagcgccagccagcccagccaccagagcgacgccggcaagcagggcctgggcccccccagcacccccatcgccgtgcacgccgccgtgaagagcaagagcctgggcgacagcaagaacagacacaagaagcccaaggaccccaagcccaaggtgaagaagctgaagtaccaccagtacatcccccccgaccagaaggccgagaagagccccccccccatggacagcgcctacgccagactgctgcagcagcagcagctgttcctgcagctgcagatcctgagccagcagcagcagcagcagcagcacagattcagctacctgggcatgcaccaggcccagctgaaggagcccaacgagcagatggtgagaaaccccaacagcagcagcacccccctgagcaacacccccctgagccccgtgaagaacagcttcagcggccagaccggcgtgagcagcttcaagcccggccccctgccccccaacctggacgacctgaaggtgagcgagctgagacagcagctgagaatcagaggcctgcccgtgagcggcaccaagaccgccctgatggacagactgagacccttccaggactgcagcggcaaccccgtgcccaacttcggcgacatcaccaccgtgaccttccccgtgacccccaacaccctgcccaactaccagagcagcagcagcaccagcgccctgagcaacggcttctaccacttcggcagcaccagcagcagcccccccatcagccccgccagcagcgacctgagcgtggccggcagcctgcccgacaccttcaacgacgccagccccagcttcggcctgcaccccagccccgtgcacgtgtgcaccgaggagagcctgatgagcagcctgaacggcggcagcgtgcccagcgagctggacggcctggacagcgagaaggacaagatgctggtggagaagcagaaggtgatcaacgagctgacctggaagctgcagcaggagcagagacaggtggaggagctgagaatgcagctgcagaagcagaagagaaacaactgcagcgagaagaagcccctgcccttcctggccgccagcatcaagcaggaggaggccgtgagcagctgccccttcgccagccaggtgcccgtgaagagacagagcagcagcagcgagtgccacccccccgcctgcgaggccgcccagctgcagcccctgggcaacgcccactgcgtggagagcagcgaccagaccaacgtgctgagcagcaccttcctgagcccccagtgcagcccccagcacagccccctgggcgccgtgaagagcccccagcacatcagcctgccccccagccccaacaacccccacttcctgcccagcagcagcggcgcccagggcgagggccacagagtgagcagccccatcagcagccaggtgtgcaccgcccagaacagcggcgcccacgacggccacccccccagcttcagcccccacagcagcagcctgcacccccccttcagcggcgcccaggccgacagcagccacggcgccggcggcaacccctgccccaagagcccctgcgtgcagcagaagatggccggcctgcacagcagcgacaaggtgggccccaagttcagcatccccagccccaccttcagcaagagcagcagcgccatcagcgaggtgacccagccccccagctacgaggacgccgtgaagcaggtgaccatgtag

SEQ ID NO: 274602 - protein, 545 aa, Artificial Sequence
  derived and/or modified sequence
MSSSGYPPNQGAFSTEQSRYPPHSVQYTFPNTRHQQEFAVPDYRSSHLEVSQASQLLQQQQQQQLRRRPSLLSEFHPGSDRPQERRTSYEPFHPGPSPVDHDSLESKRPRLEQVSDSHFQRVSAAVLPLVHPLPEGLRASADAKKDPAFGGKHEAPSSPISGQPCGDDQNASPSKLSKEELIQSMDRVDREIAKVEQQILKLKKKQQQLEEEAAKPPEPEKPVSPPPVEQKHRSIVQIIYDENRKKAEEAHKIFEGLGPKVELPLYNQPSDTKVYHENIKTNQVMRKKLILFFKRRNHARKQREQKICQRYDQLMEAWEKKVDRIENNPRRKAKESKTREYYEKQFPEIRKQREQQERFQRVGQRGAGLSATIARSEHEISEIIDGLSEQENNEKQMRQLSVIPPMMFDAEQRRVKFINMNGLMEDPMKVYKDRQFMNVWTDHEKEIFKDKFIQHPKNFGLIASYLERKSVPDCVLYYYLTKKNENYKALVRRNYGKRRGRNQQQIARPSQEEKVEEKEEDKAEKTEKKEEEKKDEEEKDEKEDS

SEQ ID NO: 274603 - DNA, 1638 bp, Artificial Sequence
  derived and/or modified sequence
atgagcagcagcggctacccccccaaccagggcgccttcagcaccgagcagagcagataccccccccacagcgtgcagtacaccttccccaacaccagacaccagcaggagttcgccgtgcccgactacagaagcagccacctggaggtgagccaggccagccagctgctgcagcagcagcagcagcagcagctgagaagaagacccagcctgctgagcgagttccaccccggcagcgacagaccccaggagagaagaaccagctacgagcccttccaccccggccccagccccgtggaccacgacagcctggagagcaagagacccagactggagcaggtgagcgacagccacttccagagagtgagcgccgccgtgctgcccctggtgcaccccctgcccgagggcctgagagccagcgccgacgccaagaaggaccccgccttcggcggcaagcacgaggcccccagcagccccatcagcggccagccctgcggcgacgaccagaacgccagccccagcaagctgagcaaggaggagctgatccagagcatggacagagtggacagagagatcgccaaggtggagcagcagatcctgaagctgaagaagaagcagcagcagctggaggaggaggccgccaagccccccgagcccgagaagcccgtgagccccccccccgtggagcagaagcacagaagcatcgtgcagatcatctacgacgagaacagaaagaaggccgaggaggcccacaagatcttcgagggcctgggccccaaggtggagctgcccctgtacaaccagcccagcgacaccaaggtgtaccacgagaacatcaagaccaaccaggtgatgagaaagaagctgatcctgttcttcaagagaagaaaccacgccagaaagcagagagagcagaagatctgccagagatacgaccagctgatggaggcctgggagaagaaggtggacagaatcgagaacaaccccagaagaaaggccaaggagagcaagaccagagagtactacgagaagcagttccccgagatcagaaagcagagagagcagcaggagagattccagagagtgggccagagaggcgccggcctgagcgccaccatcgccagaagcgagcacgagatcagcgagatcatcgacggcctgagcgagcaggagaacaacgagaagcagatgagacagctgagcgtgatcccccccatgatgttcgacgccgagcagagaagagtgaagttcatcaacatgaacggcctgatggaggaccccatgaaggtgtacaaggacagacagttcatgaacgtgtggaccgaccacgagaaggagatcttcaaggacaagttcatccagcaccccaagaacttcggcctgatcgccagctacctggagagaaagagcgtgcccgactgcgtgctgtactactacctgaccaagaagaacgagaactacaaggccctggtgagaagaaactacggcaagagaagaggcagaaaccagcagcagatcgccagacccagccaggaggagaaggtggaggagaaggaggaggacaaggccgagaagaccgagaagaaggaggaggagaagaaggacgaggaggagaaggacgagaaggaggacagctag

SEQ ID NO: 274604 - DNA, 1638 bp, Artificial Sequence
  derived and/or modified sequence
atgtcatcctccggctaccctcctaaccagggggcttttagcacagagcagtctcgctaccctccgcactccgtgcagtacactttccctaatactagacaccagcaggagttcgcggtccccgattacaggagcagccacctcgaagtgagccaggcatcacagttactccagcagcagcagcaacagcagctgaggcgacgtccatcgctcttgtccgagttccatccgggcagcgatagaccccaggaaagaagaacctcttacgagcctttccaccctggcccttcccccgtcgatcacgattctcttgaaagcaagagacctaggctcgagcaggtcagtgacagtcacttccagagagttagcgcagcagtgttgcccttggtgcatcctctgccagaaggtctgcgcgcatccgccgatgctaagaaggacccagccttcggtgggaaacacgaggccccctcctcccccattagcggtcagccgtgtggagacgatcagaatgctagccccagtaagctctccaaggaagagctgatacagagcatggaccgcgtcgatcgggaaattgctaaggtggaacaacagatcctgaaactgaaaaaaaagcagcagcagctggaggaagaggccgccaagcccccagagccagaaaaacctgtttcaccgccgccagtggagcagaagcacagatcgatagttcaaatcatctacgacgagaaccggaaaaaagccgaagaagctcataaaattttcgagggcctcggcccaaaggtggagctccccctgtataatcagccgagcgatacaaaagtctaccatgaaaatattaagaccaatcaagtcatgcggaaaaaactaatcctgttctttaagaggaggaaccacgctaggaagcagcgcgagcagaaaatttgtcagcgatacgaccagctaatggaggcatgggagaagaaagttgatcggatagaaaacaaccccaggcgcaaagccaaggaatcaaagactcgggagtattacgagaaacagttcccggagatccgaaaacagagagagcaacaggaaaggtttcagcgtgtgggccaaagaggagctggtcttagtgccacgatcgcgaggtcggagcacgagatttcagagattatcgacgggctcagcgagcaagaaaacaatgaaaagcagatgcggcagctcagcgttatcccacctatgatgttcgacgccgaacagagaagggtaaagtttatcaatatgaacgggctcatggaggacccaatgaaagtatataaagaccgacaattcatgaacgtttggactgaccatgagaaggagatttttaaagataagttcattcagcacccaaaaaacttcggactgatcgcatcgtacctggaacgtaaatcagtccccgactgcgtgctgtactattacctgaccaaaaagaacgaaaattacaaggccctcgtgcgcaggaattatggtaaacgtagaggacgaaatcagcagcagatcgcccgcccctctcaagaagaaaaggtggaggagaaggaagaggataaagccgagaagacagagaagaaagaggaggagaaaaaggatgaggaggagaaagacgagaaggaggattcttag

SEQ ID NO: 274605 - DNA, 1638 bp, Artificial Sequence
  derived and/or modified sequence
atgagcagcagcggctacccacccaaccagggcgccttcagcacagagcagagccgctacccaccccacagcgtgcagtacaccttccccaacaccaggcaccagcaggagtttgctgtgcctgactaccgcagcagccacctggaggtgtcccaggccagccagctgctgcagcagcagcagcagcagcagctgcggcggcggcccagcctgctgtctgagttccaccctggcagtgaccggccccaggagaggaggaccagctatgagcccttccaccctggccccagccctgtggaccatgacagcctggagagcaagaggccccggctggagcaggtgtctgacagccacttccagagggtgtctgctgctgtgctgcccctggtgcaccccctgcctgagggcctgcgggccagcgcagatgccaagaaggaccctgcctttggaggcaagcatgaggcccccagcagccccatcagcggccagccctgtggagatgaccagaatgccagccccagcaagctgagcaaggaggagctgatccagagcatggacagagtggaccgggagatcgccaaggtggagcagcagatcctgaagctgaagaagaagcagcagcagctggaggaggaggccgccaagcccccagagcctgagaagcctgtgtccccacctcctgtggagcagaagcacaggagcatcgtgcagatcatctatgatgagaacaggaagaaggccgaggaggcccacaagatctttgagggcctgggccccaaggtggagctgcccctgtacaaccagcccagcgacaccaaggtgtaccacgagaacatcaagaccaaccaggtgatgaggaagaagctgatcctcttcttcaagagaagaaaccacgccaggaagcagcgggagcagaagatctgccagagatatgaccagctgatggaggcctgggagaagaaggtggacagaattgagaacaaccccaggaggaaggccaaggagagcaagacccgggagtactatgagaagcagtttcctgagatcaggaagcagcgggagcagcaggagcgcttccagagggtgggccagagaggagctggcctgagcgccaccatcgcccggtctgagcacgagatcagcgagatcattgatggcctgtctgagcaggagaacaatgagaagcagatgaggcagctgagcgtcatcccccccatgatgtttgatgctgagcagaggagagtgaagttcatcaacatgaatggcctgatggaggaccccatgaaggtgtacaaggaccggcagttcatgaatgtgtggacagaccacgagaaggagatcttcaaggacaagttcatccagcaccccaagaactttggcctcatcgccagctacctggagaggaagtctgtgcctgactgtgtgctgtactactacctgaccaagaagaatgaaaactacaaggccctggtgagaagaaattatggcaagaggcggggcaggaaccagcagcagatcgcccggcccagccaggaggagaaggtggaggagaaggaggaggacaaggccgagaagacagagaagaaggaggaggagaagaaggatgaggaggagaaggatgagaaggaggacagctag

SEQ ID NO: 274606 - DNA, 1638 bp, Artificial Sequence
  derived and/or modified sequence
atgagcagcagcggctacccccccaaccagggcgccttcagcaccgaacagtcccggtatcccccccactccgtgcagtacactttccctaatacccgccatcagcaagagtttgccgtgcccgattataggagcagccatttggaagtgagccaggcgagccagctactgcagcagcagcaacagcagcagctccgccggagaccttccctccttagcgagtttcaccctggctcagatcgtccccaagaaagaaggacctcttatgagccgttccaccccggcccatcaccggtggaccacgactcactcgagtcgaaacgcccccggctggaacaagtatctgattcccacttccagcgagtgtcggccgctgtattgccactcgttcaccctctgccggaaggactgagagcctctgcagatgctaagaaggacccggcattcgggggcaaacatgaagccccctccagccccatttccggccagccctgcggggatgaccagaacgctagtccgtcaaaactgagcaaagaggaacttattcagtcgatggacagggtcgatcgcgagattgccaaagtggagcagcaaatcctgaaattaaaaaaaaagcaacagcaactggaggaggaggccgcaaagccaccagagcctgagaaaccagtttctcccccaccagttgagcagaagcatcgttcaatcgtccagattatttacgacgagaacaggaaaaaggcagaggaagcccataagatcttcgagggtttgggcccgaaagtggaactcccactgtacaatcagcccagcgacacaaaagtgtaccatgaaaatattaagacgaaccaggtaatgaggaagaaactgattctttttttcaaaaggcgcaatcatgccagaaagcagcgggaacagaagatctgtcaacgttatgaccagctgatggaggcctgggaaaagaaggtggataggattgaaaataatccacgtcgaaaggcaaaagaaagcaagactagggaatattacgaaaagcaattccctgagatccgtaagcagcgcgaacagcaggagaggttccagcgcgtgggccaaaggggcgccggactcagcgctaccatagcccgctcagagcacgagatctctgagatcatagacgggcttagtgaacaggaaaacaacgagaaacagatgcggcagctctcagttattcctcccatgatgttcgacgcagagcaaagaagggtgaaattcatcaatatgaatggcttgatggaggatcccatgaaggtatataaagatcgccagttcatgaatgtctggaccgaccatgagaaagagattttcaaagacaagtttatccaacaccccaagaacttcggactgatcgcatcttacctggaaagaaaaagcgtgcccgactgtgtactgtactactatctcacaaaaaagaacgaaaactataaagccctggtgagacggaactatggcaaaaggcgagggcgcaaccaacagcaaatcgctagaccatctcaggaggaaaaagtagaagagaaggaagaagataaagccgagaagacagagaagaaagaggaggaaaagaaagatgaagaggaaaaagacgaaaaagaggatagttag

SEQ ID NO: 274607 - DNA, 1883 bp, Artificial Sequence
  derived and/or modified sequence
gttgagtcaagatggcggccaaggtggcgaagcagcagccgcggcggcggcggcggctggagtgagcgtccgactcgccgcgccgaacgaggtcccggtgtagggccgcgcgccgtggccgcgtcccactcctcaggccggggcgcacgtcggctcccacgcttagccagctcccggtggtttcctagaaacatgattgtttattggcattgatctcacagtctggtgaggacttctttactgataatgtcaagttcaggttatcctcccaaccaaggagcattcagcacagaacaaagtcgttatcctcctcactctgtccagtatacatttcccaacacccgccaccagcaggagttcgcagtccctgattatcgttcctctcatcttgaagtgagtcaggcatcacagcttttgcagcaacagcagcagcaacagcttcgaaggcgaccttccttgctttcagaatttcacccaggttctgacaggcctcaagaaaggagaactagttatgaaccgtttcatccaggcccatccccagtggatcatgattcactggaatcgaagcgaccacgtctggaacaggtttctgattctcattttcagcgtgtcagtgctgcggttttgcctttagtgcacccgctgccagaagggctgagggcttctgcagatgctaagaaggatccagcattcggaggcaaacatgaagctccatcctctccaatttcggggcaaccatgtggagatgatcaaaatgcttcaccttcaaaactctcaaaggaagagttaatacagagtatggatcgtgtagatcgagaaattgcaaaagtagaacagcagatccttaaactgaaaaagaaacaacaacagcttgaagaagaggcagctaaacctcctgagcctgagaagcccgtgtcccctcctcctgtggagcagaaacaccgcagtattgtccaaattatttatgatgagaatcggaaaaaagcagaagaagctcataaaatttttgaaggtcttggcccaaaagttgaactgccactgtataaccagccatcagataccaaggtgtaccatgagaacatcaagacaaaccaggtgatgaggaaaaaactcattttattttttaaaagaagaaatcatgcaagaaaacaaagggaacaaaaaatctgccagcgttatgatcagctcatggaggcatgggagaaaaaagtggacagaatagaaaataatcctcggaggaaagctaaagaaagcaaaacaagggaatactatgaaaagcagtttccagaaattcgaaaacaaagagaacagcaagaaagatttcagcgagttgggcagaggggagctggtctttcagccaccattgctaggagtgagcatgagatttctgaaattattgatgggctctctgagcaggagaataatgagaaacaaatgcggcagctctctgtgattccacctatgatgtttgatgcagaacaaagacgagtcaagttcattaacatgaatgggcttatggaggaccctatgaaagtgtataaagataggcagtttatgaatgtttggactgaccatgaaaaggagatctttaaggacaagtttatccagcatccaaaaaactttggactaattgcatcatacttggagaggaagagtgttcctgattgtgttttgtattactatttaaccaagaaaaatgagaattataaagccctcgtcagaaggaattatgggaaacgcagaggcagaaaccagcagcaaattgctcgaccctcgcaagaagaaaaagtagaagaaaaagaagaggataaagcagaaaaaacagaaaaaaaagaagaagaaaagaaagatgaagaggaaaaagatgaaaaagaagactccaa

SEQ ID NO: 274608 - DNA, 1638 bp, Artificial Sequence
  derived and/or modified sequence
atgtccagtagtgggtatccgcctaatcaaggcgctttcagcacagagcaatcccgctaccctccccactccgtgcagtacactttccccaacacccgccatcaacaggagtttgcggtgcccgactacagatcatctcacctggaggtgagtcaggcctctcaactcctgcagcagcagcaacagcagcagctccggcgtcggccaagcctgctgagcgagtttcatcctggctcagatcgccctcaagagagaagaacaagttacgagccattccatcctgggccatcaccagttgatcatgatagtttggagagtaaacggcctcggctggagcaggtgtctgacagccacttccaaagagtctctgctgccgtgcttccgctggtgcaccccctgcccgaggggcttagggcctcagctgatgctaagaaggatcccgcttttggaggaaaacacgaggcaccttctagtcccatctctgggcaaccctgtggggatgaccagaatgctagtccttctaagcttagcaaggaggagctgatccaatcaatggaccgcgtagaccgcgaaattgctaaagtggaacagcagatccttaagctgaaaaagaaacagcagcagctggaggaagaagcggctaagccacccgaacccgagaaacctgtcagcccaccgcctgtggaacagaaacaccggtctatcgtgcagattatatacgatgaaaaccgtaagaaagccgaagaagcccataaaattttcgaggggttaggacctaaggtggaattgccactgtacaatcaaccctccgacaccaaggtgtaccacgagaatattaaaactaaccaagtgatgagaaagaagttaattctgttctttaagagacgcaatcacgcccgtaaacaaagggagcagaagatctgccagcgatatgaccagctgatggaggcgtgggagaaaaaagtagacagaattgagaacaatccgagacgaaaggctaaagagtcaaagacacgagagtactacgaaaagcaattccccgaaatccggaagcagcgagaacagcaggaaagattccaacgggtgggtcaacggggagccggactgtcggccactattgcacggagtgaacacgagatctccgagataatcgacgggctgtccgagcaggaaaacaacgagaagcagatgagacaattgtctgtcatcccacctatgatgttcgatgccgaacagcgaagggtcaagtttatcaatatgaacggactcatggaggatccaatgaaggtttataaagacaggcaatttatgaacgtgtggacagatcacgaaaaggagatctttaaagacaaattcatccagcatccgaaaaattttggcttgattgcgagttatctggagagaaagtctgtacctgactgtgtgttatattattacctgaccaagaagaatgagaactataaagccttggtccggcgtaactacggaaagagacgcggtaggaaccagcagcaaatcgccaggccctctcaggaagagaaagttgaggaaaaagaagaggacaaggctgagaagactgagaagaaagaggaagagaaaaaagacgaagaagaaaaagacgagaaggaggatagttag

SEQ ID NO: 274609 - DNA, 7941 bp, Artificial Sequence
  derived and/or modified sequence
tcaagatggcggccaaggtggcgaagcagcagccgcggcggcggcggcggctggagtgagcgtccgactcgccgcgccgaacgaggtcccggtgtagggccgcgcgccgtggccgcgtcccactcctcaggccggggcgcacgtcggctcccacgcttagccagctcccggtggtttcctagaaacatgattgtttattggcattgatctcacagtctggtgaggacttctttactgataatgtcaagttcaggttatcctcccaaccaaggagcattcagcacagaacaaagtcgttatcctcctcactctgtccagtatacatttcccaacacccgccaccagcaggagttcgcagtccctgattatcgttcctctcatcttgaagtgagtcaggcatcacagcttttgcagcaacagcagcagcaacagcttcgaaggcgaccttccttgctttcagaatttcacccaggttctgacaggcctcaagaaaggagaactagttatgaaccgtttcatccaggcccatccccagtggatcatgattcactggaatcgaagcgaccacgtctggaacaggtttctgattctcattttcagcgtgtcagtgctgcggttttgcctttagtgcacccgctgccagaagggctgagggcttctgcagatgctaagaaggatccagcattcggaggcaaacatgaagctccatcctctccaatttcggggcaaccatgtggagatgatcaaaatgcttcaccttcaaaactctcaaaggaagagttaatacagagtatggatcgtgtagatcgagaaattgcaaaagtagaacagcagatccttaaactgaaaaagaaacaacaacagcttgaagaagaggcagctaaacctcctgagcctgagaagcccgtgtcccctcctcctgtggagcagaaacaccgcagtattgtccaaattatttatgatgagaatcggaaaaaagcagaagaagctcataaaatttttgaaggtcttggcccaaaagttgaactgccactgtataaccagccatcagataccaaggtgtaccatgagaacatcaagactggagtacctgcaaggcgcatgatgaaaaaccaggtgatgaggaaaaaactcattttattttttaaaagaagaaatcatgcaagaaaacaaagggaacaaaaaatctgccagcgttatgatcagctcatggaggcatgggagaaaaaagtggacagaatagaaaataatcctcggaggaaagctaaagaaagcaaaacaagggaatactatgaaaagcagtttccagaaattcgaaaacaaagagaacagcaagaaagatttcagcgagttgggcagaggggagctggtctttcagccaccattgctaggagtgagcatgagatttctgaaattattgatgggctctctgagcaggagaataatgagaaacaaatgcggcagctctctgtgattccacctatgatgtttgatgcagaacaaagacgagtcaagttcattaacatgaatgggcttatggaggaccctatgaaagtgtataaagataggcagtttatgaatgtttggactgaccatgaaaaggagatctttaaggacaagtttatccagcatccaaaaaactttggactaattgcatcatacttggagaggaagagtgttcctgattgtgttttgtattactatttaaccaagaaaaatgagaattataaagccctcgtcagaaggaattatgggaaacgcagaggcagaaaccagcaaattgctcgaccctcgcaagaagaaaaagtagaagaaaaagaagaggataaagcagaaaaaacagaaaaaaaagaagaagaaaagaaagatgaagaggaaaaagatgaaaaagaagactccaaagaaaataccaaggaaaaggacaagatagatggtacagcagaagaaactgaggaaagagagcaagccacaccccgggggcgaaagactgccaacagtcagggccgccgtaagggccggatcaccaggtccatgacaaacgaagctgcagctgccagtgctgcagccgcagcggctactgaagagcccccaccacctctgccaccgccaccagaacccatttctacagagcctgtggagacctctcgatggacagaagaagaaatggaagttgctaaaaaaggtctagtagaacatggtcgtaactgggcagcaattgctaaaatggtgggaacgaaaagtgaagctcaatgtaaaaacttctattttaactataaaaggcgacacaatcttgacaacctcttacagcagcataaacagaaaacttcacgaaaacctcgtgaagagcgagatgtgtctcaatgtgaaagtgtcgcttccactgtttctgctcaggaggatgaagatattgaagcctccaatgaagaagaaaatccagaagacagcgaagttgaagctgtcaagcccagcgaggacagtcctgaaaatgctacttctcgaggaaacacagaacctgcggttgagcttgagcccaccacggaaactgcacccagtacatctccctccttagcagttccaagtacaaaaccagctgaagatgaaagtgtggagacccaggtgaatgacagcatcagtgctgagacagcagagcagatggatgtagatcagcaggagcacagtgctgaagagggttctgtttgtgatcccccacccgctaccaaagctgactctgtggacgttgaagtgagggtgccagaaaaccatgcatctaaagttgaaggtgataataccaaagaaagagacttggatagagccagtgagaaggtggaacctagagatgaagatttggtggtagctcagcaaataaatgcccaaaggcccgagccccagtcagacaatgattccagtgccacgtgcagcgctgatgaggatgtggatggagagccagagaggcagagaatgtttcctatggactcaaagccttcactgttaaaccccactggatctatactcgtctcatctccgttaaaaccaaatccactggatctgccacagcttcagcatcgagctgctgttatcccaccaatggtatcctgcaccccatgtaacataccaattggaaccccagtgagcggctatgctctctaccagcgacacattaaagcaatgcatgagtcagcactcctggaggagcagcggcagagacaagaacagatagatttggaatgtagaagttctacaagtccatgtggcacatccaagagtccaaacagagagtgggaagtccttcagcctgctccacatcaagtgataactaatctccctgaaggcgttcggcttccgacaactcgaccaaccaggccaccgccccctctcatcccgtcatccaaaaccacagtggcttcagaaaaaccatcttttataatgggaggctccatctcacagggaacaccaggcacttatttgacttctcataatcaggcttcctacactcaagaaacacccaagccgtcagtgggatctatctctcttggactgccacggcaacaggaatctgccaaatcagctactttgccctacatcaagcaggaagaattttctccccgaagccaaaactcacaacctgagggtctgttggtcagggcccaacatgaaggtgtagtcagaggtaccgcaggagccatacaagaaggaagtataactcggggaactccaaccagcaaaatttcagtggagagcattccatccctacggggctctatcactcagggcaccccggctctgccccagactggcataccaacagaggctttggtgaaggggtccatttcgagaatgcccattgaagacagcagtcctgagaaaggcagagaggaagctgcatccaaaggccatgttatttatgaaggcaaaagtggacatatcttgtcatatgataatattaagaatgcccgagaagggactaggagtccaagaacagctcatgaaatcagtttaaagagaagctatgaatcagtggaaggaaatataaagcaagggatgtcaatgagggagtctcctgtatcagcaccgttagaggggctgatatgccgagcattacccagggggagtcctcattctgacctcaaagaaaggactgtattgtctggctccataatgcaggggacaccaagagcaacaactgaaagctttgaagatggccttaaatatcccaaacaaattaaaagggaaagtcctcccatacgagcatttgaaggtgccattaccaaaggaaaaccatatgatggcatcaccaccatcaaagaaatggggcgttccattcatgagattccaaggcaagatattttaactcaggaaagtcggaaaactccagaagtggtccagagcacacggccgataattgagggttccatttcccagggcacaccaataaagtttgacaacaactcaggtcaatctgccatcaaacacaatgtcaaatccttaatcacggggcctagcaaactatcccgtggaatgcctccgctggaaattgtgccagagaacataaaagtggtagaacggggaaaatatgaggatgtgaaagcaggcgagaccgtgcgttcccggcacacgtcagtggtaagctctggcccctccgttcttaggtccacactgcatgaagctcccaaagcacaactgagccctgggatttatgatgacaccagtgcacggaggacccctgtgagttatcaaaacaccatgtccagaggctcacccatgatgaacagaacttctgatgttacaatttcttctaacaagtctaccaatcatgaaaggaaatcgacactgacccctacccagagggaaagtatcccagcgaagtctccagtgcctggggtggaccctgtcgtgagccacagtccgtttgatccccatcacagaggcagcactgcaggcgaggtttatcggagccacctgcccacgcacttggatccagccatgccttttcacagggctttggatcctgcagcggctgcttacctgtttcagagacagctttcaccaactccaggttacccaagtcagtatcagctttacgcaatggagaacacaagacagacaatcttaaatgattacattacctcacaacagatgcaagtgaacttgcgtccagatgtggccagaggactctccccaagagagcagccactgggtctcccatacccagcaacgagaggaatcattgacctgaccaatatgcctccaacaattttagtgcctcatccagggggaacaagcactcctcccatggacagaatcacttatattcctggtacacagattactttccctcccaggccgtacaactctgcttccatgtctccaggacacccaacacaccttgcagctgctgcaagtgctgagagggaacgggaacgggagcgggagaaggagcgggagcgggaacggattgctgcagcttcctccgacctctacctgcggccaggctcagaacagcctggccgacctggcagtcatggatatgttcgctccccttccccttcagtaagaactcaggagaccatgttgcaacagagacccagtgttttccaaggaaccaatggaaccagtgtaatcacacctttggatccaactgctcagctacgaatcatgccactgcctgctgggggcccttcaataagccaaggcctgccagcctcccgttacaacactgctgcggatgccctggctgctcttgtggatgctgcagcttctgcaccccagatggatgtgtccaaaacaaaagagagtaagcatgaagctgccaggttagaagaaaatttgagaagcaggtcagcagcagttagtgaacagcagcagctagagcagaaaaccctggaggtggagaagagatctgttcagtgtttatacacttcttcagcctttccaagtggcaagccccagcctcattcttcagtagtttattctgaggctgggaaagataaagggcctcctccaaaatccagatatgaggaagagctaaggaccagagggaagactaccattactgcagctaacttcatagacgtgatcatcacccggcaaattgcctcggacaaggatgcgagggaacgtggctctcaaagttcagactcttctagtagcttatcttctcacaggtatgaaacacctagcgatgctattgaggtgataagtcctgccagctcacctgcgccaccccaggagaaactgcagacctatcagccagaggttgttaaggcaaatcaagcggaaaatgatcctaccagacaatatgaaggaccattacatcactatcgaccacagcaggaatcaccatctccccaacaacagctgcccccttcttcacaggcagagggaatggggcaagtgcccaggacccatcggctgatcacacttgctgatcacatctgtcaaattatcacacaagattttgctagaaatcaagtttcctcgcagactccccagcagcctcctacttctacattccagaactcaccttctgctttggtatctacacctgtgaggactaaaacatcaaaccgttacagcccagaatcccaggctcagtctgtccatcatcaaagaccaggttcaagggtctctccagaaaatcttgtggacaaatccaggggaagtaggcctggaaaatccccagagaggagtcacgtctcttcggagccctacgagcccatctccccaccccaggttccggttgtgcatgagaaacaggacagcttgctgctcttgtctcagaggggcgcagagcctgcagagcagaggaatgatgcccgctcaccagggagtataagctacttgccttcattcttcaccaagcttgaaaatacatcacccatggttaaatcaaagaagcaggagatttttcgtaagttgaactcctctggtggaggtgactctgatatggcagctgctcagccaggaactgagatctttaatctgccagcagttactacgtcaggctcagttagctctagaggccattcttttgctgatcctgccagtaatcttgggctggaagacattatcaggaaggctctcatgggaagctttgatgacaaagttgaggatcatggagttgtcatgtcccagcctatgggagtagtgcctggtactgccaacacctcagttgtgaccagtggtgagacacgaagagaggaaggggacccatcacctcattcaggaggagtttgcaaaccaaagctgatcagcaagtcaaacagcaggaaatctaagtctcctatacctgggcaaggctacttaggaacggaacggccctcttcagtctcctctgtacattcagaaggggattaccataggcagacgccagggtgggcctgggaagacaggccctcttcaacaggctcaactcagtttccttataaccctctgactatgcggatgctcagcagtactccaccaacaccgattgcatgtgctccctctgcggtgaaccaagcagctcctcaccaacagaacaggatctgggagcgagagcctgccccactgctctcagcacagtacgagaccctgtcggatagtgatgactgaactgcacaaagtgaggggaacagggtgcaggagagggatctctagtttttgtggtttaatttttagtagcaggtcaaaaacctgccctcctgtgacttattccctgagacttttcaggagagccagcccacagatgatgaagaaatgatggaagttcatttggagagtcaaatgggaaaaaaacaaacaaaaaactgcctttgatacaggcaattcagtggactataataatagtggagggttgagatgtagagtttttaaaaagtgaacagttgctgttcttacatctgtaaagaaaaccataatgtctttaaatcactcttctgtaaatagatgacctttttgcagtgt

SEQ ID NO: 274610 - protein, 125 aa, Artificial Sequence
  derived and/or modified sequence
MSSSGYPPNQGAFSTEQSRYPPHSVQYTFPNTRHQQEFAVPDYRSSHLEVSQASQLLQQQQQQQLRRRPSLLSEFHPGSDRPQERRTSYEPFHPGPSPVDHDSLESKRPRLEQVSDSHFQRVSAA

SEQ ID NO: 274611 - protein, 92 aa, Artificial Sequence
  derived and/or modified sequence
  misc_feature (1)..(1): Xaa can be any naturally occurring amino acid
XRSSTSPCGTSKSPNREWEGKSVAYMPYAEVKRALEQEAQMHNTAARSASPCRLSPREVSKAAPQPDMSAARYSVPPVLQPAPHQVITNLPE

SEQ ID NO: 274612 - protein, 1123 aa, Artificial Sequence
  derived and/or modified sequence
MNSPNESADGMSGREPSLEILPRTSLHSIPVTVEVKPVLPRAMPSSMGGGGGGSPSPVELRGALVGSVDPTLREQQLQQELLALKQQQQLQKQLLFAEFQKQHDHLTRQHEVQLQKHLKQQQEMLAAKQQQEMLAAKRQQELEQQRQREQQRQEELEKQRLEQQLLILRNKEKSKESAIASTEVKLRLQEFLLSKSKEPTPGGLNHSLPQHPKCWGAHHASLDQSSPPQSGPPGTPPSYKLPLPGPYDSRDDFPLRKTASEPNLKVRSRLKQKVAERRSSPLLRRKDGTVISTFKKRAVEITGAGPGASSVCNSAPGSGPSSPNSSHSTIAENGFTGSVPNIPTEMLPQHRALPLDSSPNQFSLYTSPSLPNISLGLQATVTVTNSHLTASPKLSTQQEAERQALQSLRQGGTLTGKFMSTSSIPGCLLGVALEGDGSPHGHASLLQHVLLLEQARQQSTLIAVPLHGQSPLVTGERVATSMRTVGKLPRHRPLSRTQSSPLPQSPQALQQLVMQQQHQQFLEKQKQQQLQLGKILTKTGELPRQPTTHPEETEEELTEQQEVLLGEGALTMPREGSTESESTQEDLEEEDEEDDGEEEEDCIQVKDEEGESGAEEGPDLEEPGAGYKKLFSDAQPLQPLQVYQAPLSLATVPHQALGRTQSSPAAPGGMKSPPDQPVKHLFTTGVVYDTFMLKHQCMCGNTHVHPEHAGRIQSIWSRLQETGLLSKCERIRGRKATLDEIQTVHSEYHTLLYGTSPLNRQKLDSKKLLGPISQKMYAVLPCGGIGVDSDTVWNEMHSSSAVRMAVGCLLELAFKVAAGELKNGFAIIRPPGHHAEESTAMGFCFFNSVAITAKLLQQKLNVGKVLIVDWDIHHGNGTQQAFYNDPSVLYISLHRYDNGNFFPGSGAPEEVGGGPGVGYNVNVAWTGGVDPPIGDVEYLTAFRTVVMPIAHEFSPDVVLVSAGFDAVEGHLSPLGGYSVTARCFGHLTRQLMTLAGGRVVLALEGGHDLTAICDASEACVSALLSVELQPLDEAVLQQKPNINAVATLEKVIEIQSKHWSCVQKFAAGLGRSLREAQAGETEEAETVSAMALLSVGAEQAQAAAAREHSPRPAEEPMEQEPAL

SEQ ID NO: 274613 - DNA, 3372 bp, Artificial Sequence
  derived and/or modified sequence
atgaacagcccaaacgaatctgctgacggcatgagcggtcgagagccttctctggagattttgccccgaactagtttgcactcgattccagtaacagtagaagtcaaacctgtacttcctcgtgctatgcccagttctatggggggaggaggaggaggttctccatcaccggtggagctgaggggagcactagtgggcagcgtggatccgaccttgagggagcagcaactgcagcaggagctgctggcccttaagcagcagcagcagctgcagaagcaactactattcgccgaatttcagaaacagcatgaccatcttaccaggcagcacgaagtccagctgcagaagcatctgaaacaacagcaggaaatgctggccgcaaagcagcagcaggaaatgttggctgcaaaacgccagcaggagctggaacagcagcggcaacgcgagcagcagaggcaggaagagctggaaaagcaacgactcgagcaacaactgctgatccttagaaataaggaaaagagtaaagaatctgctatcgctagtactgaggtcaaactgaggctgcaggagtttttgctttccaagtcaaaggagccaactcctggcgggctcaatcatagcctgccccagcaccccaaatgttggggagcccaccacgccagtctcgatcagtccagtccaccgcagagcggaccgcctggcacccctccctcttacaagctacccctgcctggaccgtacgatagtcgagacgattttcccctccgcaagacagcttccgagcctaatctgaaggtgcgtagccgcttaaagcaaaaagtggcagagcgccgatcttcacccctgttgaggaggaaagatggaaccgtgatatcaaccttcaaaaagcgggctgtggagatcaccggtgccgggcccggagcttcttcagtatgcaactccgcccccggttctggacccagctccccaaatagctctcacagtactattgctgaaaacggatttacaggctccgttccgaacataccaactgaaatgctgccccagcatcgggccctcccactcgatagcagcccaaaccagttcagtctctataccagtccaagtttaccaaacatctccctgggtttgcaagccaccgtaacagtaacgaatagccacctcactgcttctccaaaactgagcacacagcaagaggcagagaggcaggcgctgcagtcgttgagacagggcgggacactgacagggaaatttatgtcaaccagcagcattcctggttgccttttaggagtggccctggaaggcgacggctctcctcatggccacgcgagcctgctccagcacgttctgctactcgagcaagcacgccagcagtccacgcttatcgccgtcccccttcacggacagtctcccctagtgaccggcgagcgtgttgcaactagcatgaggacagtgggtaaactgccccggcaccgaccactgagccggacgcagtcttccccgttgccccagtcaccccaggcgctgcagcagctggtcatgcagcagcagcaccagcagtttttggagaaacagaaacagcagcaattacagttaggaaaaatcctgaccaagactggggaactgccacgccaaccaacaactcacccagaggaaacggaggaagaactgactgaacaacaggaagtccttttgggggagggcgctctaacaatgcccagagagggaagcacggaaagtgagagcactcaagaagacctggaggaagaggatgaagaagacgatggcgaggaggaggaggattgcatccaagtcaaggacgaagaaggtgagagtggggcggaggagggccccgatttggaagaaccgggtgctggatacaagaaactgttcagtgatgctcaacccttgcagccgctccaggtgtaccaggctccactgagtctcgcaacagtgccacaccaggcgctgggaagaactcagtccagccccgcagcgccagggggaatgaagagtccacctgatcagcctgtgaaacacttatttacaaccggggtggtgtatgatacatttatgctgaagcatcagtgcatgtgcgggaacacccacgtccacccagagcacgccggcagaatccagtcaatctggtccaggttacaggagacaggcttgctatctaagtgcgagagaattagaggacggaaagccacattggatgaaattcagaccgttcactccgagtaccacaccctgttatatgggacgtctccactcaatcggcaaaagctggactcaaagaaactgctggggcccatctcacagaagatgtacgccgtgttgccttgcggggggattggggtcgacagtgacacggtgtggaacgaaatgcatagctctagtgctgttaggatggctgtgggatgcctgctagagttggcgttcaaggtggcggcaggcgagttgaagaatggattcgccatcatcagaccacctgggcaccacgcagaagaatccacagctatgggtttttgctttttcaactctgtggccatcaccgctaaactgctgcagcaaaaactgaatgtcggcaaggtcctgattgtggattgggacattcatcatggtaatggaacgcaacaagctttttacaatgacccttcggtgttgtatattagcctgcacaggtacgataatgggaatttcttccccgggtcaggcgctccagaggaagtcgggggcggacctggcgttgggtacaacgttaatgttgcttggacagggggagtggacccccctattggggatgtcgagtatctcacagccttccgaactgtggtcatgccaatcgcccacgaattttccccggacgtggtgcttgtctccgccggattcgacgcggtggaagggcatctgagccccctcggcggatattctgtgactgcaagatgctttgggcatctgaccaggcagctgatgacactggcagggggtagggtcgtactggcactcgaaggtggccacgatctgactgcgatatgtgacgctagtgaggcctgtgtatcggcgctgctgagcgtggagctgcagcctcttgatgaagctgtcctgcagcaaaaaccaaatatcaacgccgtcgccacactggaaaaagtcattgagatccagtcaaagcattggtcctgcgttcaaaagttcgccgcaggcctcgggcggtctctgagagaggcccaagcgggtgagactgaagaggctgaaactgtgagtgcaatggcccttctgagcgtgggggccgagcaagctcaggcagcggcggccagagaacactcccctcggccggctgaagaaccaatggagcaggaacccgcgctgtag

SEQ ID NO: 274614 - DNA, 5327 bp, Artificial Sequence
  derived and/or modified sequence
cgaatgttgttgttggtggcggcggcgagcggagccggaggagccgccgcaaagatggaggagccgtcgaggaggtgctgccgccgctgccgccgccgctgctgccgccgccgcccgcgaagccggagctcgagccgcagcggggatgccgttctgagtgcctgactgcctcgccccgaaggatggcctcggatgggcattagaggcacggcggccccgggctcccgtcccgtccgtctgtctgttatcgtctgtctctcttgacatcaccgcagctccaccccctcccgtcccagcccccaacgccagcttcctgcaggcccagagccggcatgaactctcccaacgagtcggcagatgggatgtcaggtcgggaaccatccttggaaatcctgccgcggacttctctgcacagcatccctgtgacagtggaggtgaagccggtgctgccaagagccatgcccagttccatggggggtgggggtggaggcagccccagccctgtggagctacggggggctctggtgggctctgtggaccccacactgcgggagcagcaactgcagcaggagctcctggcgctcaagcagcagcagcagctgcagaagcagctcctgttcgctgagttccagaaacagcatgaccacctgacaaggcagcatgaggtccagctgcagaagcacctcaagcagcagcaggagatgctggcagccaagcagcagcaggagatgctggcagccaagcggcagcaggagctggagcagcagcggcagcgggagcagcagcggcaggaagagctggagaagcagcggctggagcagcagctgctcatcctgcggaacaaggagaagagcaaagagagtgccattgccagcactgaggtaaagctgaggctccaggaattcctcttgtcgaagtcaaaggagcccacaccaggcggcctcaaccattccctcccacagcaccccaaatgctggggagcccaccatgcttctttggaccagagttcccctccccagagcggcccccctgggacgcctccctcctacaaactgcctttgcctgggccctacgacagtcgagacgacttccccctccgcaaaacagcctctgaacccaacttgaaagtgcgttcaaggctaaaacagaaggtggctgagcggagaagcagtcccctcctgcgtcgcaaggatgggactgttattagcacctttaagaagagagctgttgagatcacaggtgccgggcctggggcgtcgtccgtgtgtaacagcgcacccggctccggccccagctctcccaacagctcccacagcaccatcgctgagaatggctttactggctcagtccccaacatccccactgagatgctccctcagcaccgagccctccctctggacagctcccccaaccagttcagcctctacacgtctccttctctgcccaacatctccctagggctgcaggccacggtcactgtcaccaactcacacctcactgcctccccgaagctgtcgacacagcaggaggccgagaggcaggccctccagtccctgcggcagggtggcacgctgaccggcaagttcatgagcacatcctctattcctggctgcctgctgggcgtggcactggagggcgacgggagcccccacgggcatgcctccctgctgcagcatgtgctgttgctggagcaggcccggcagcagagcaccctcattgctgtgccactccacgggcagtccccactagtgacgggtgaacgtgtggccaccagcatgcggacggtaggcaagctcccgcggcatcggcccctgagccgcactcagtcctcaccgctgccgcagagtccccaggccctgcagcagctggtcatgcaacaacagcaccagcagttcctggagaagcagaagcagcagcagctacagctgggcaagatcctcaccaagacaggggagctgcccaggcagcccaccacccaccctgaggagacagaggaggagctgacggagcagcaggaggtcttgctgggggagggagccctgaccatgccccgggagggctccacagagagtgagagcacacaggaagacctggaggaggaggacgaggaagacgatggggaggaggaggaggattgcatccaggttaaggacgaggagggcgagagtggtgctgaggaggggcccgacttggaggagcctggtgctggatacaaaaaactgttctcagatgcccagccgctgcagcctttgcaggtgtaccaggcgcccctcagcctggccactgtgccccaccaggccctgggccgtacccagtcctcccctgctgcccctgggggcatgaagagccccccagaccagcccgtcaagcacctcttcaccacaggtgtggtctacgacacgttcatgctaaagcaccagtgcatgtgcgggaacacacacgtgcaccctgagcatgctggccggatccagagcatctggtcccggctgcaggagacaggcctgcttagcaagtgcgagcggatccgaggtcgcaaagccacgctagatgagatccagacagtgcactctgaataccacaccctgctctatgggaccagtcccctcaaccggcagaagctagacagcaagaagttgctcggccccatcagccagaagatgtatgctgtgctgccttgtgggggcatcggggtggacagtgacaccgtgtggaatgagatgcactcctccagtgctgtgcgcatggcagtgggctgcctgctggagctggccttcaaggtggctgcaggagagctcaagaatggatttgccatcatccggcccccaggacaccacgccgaggaatccacagccatgggattctgcttcttcaactctgtagccatcaccgcaaaactcctacagcagaagttgaacgtgggcaaggtcctcatcgtggactgggacattcaccatggcaatggcacccagcaggcgttctacaatgacccctctgtgctctacatctctctgcatcgctatgacaacgggaacttctttccaggctctggggctcctgaagaggttggtggaggaccaggcgtggggtacaatgtgaacgtggcatggacaggaggtgtggacccccccattggagacgtggagtaccttacagccttcaggacagtggtgatgcccattgcccacgagttctcacctgatgtggtcctagtctccgccgggtttgatgctgttgaaggacatctgtctcctctgggtggctactctgtcaccgccagatgttttggccacttgaccaggcagctgatgaccctggcagggggccgggtggtgctggccctggagggaggccatgacttgaccgccatctgtgatgcctctgaggcttgtgtctcggctctgctcagtgtagagctgcagcccttggatgaggcagtcttgcagcaaaagcccaacatcaacgcagtggccacgctagagaaagtcatcgagatccagagcaaacactggagctgtgtgcagaagttcgccgctggtctgggccggtccctgcgagaggcccaagcaggtgagaccgaggaggccgagactgtgagcgccatggccttgctgtcggtgggggccgagcaggcccaggctgcggcagcccgggaacacagccccaggccggcagaggagcccatggagcaggagcctgccctgtgacgccccggcccccatccctctgggcttcaccattgtgattttgtttattttttctattaaaaacaaaaagtcacacattcaacaaggtgtgccgtgtgggtctctcagccttgcccctcctgctcctctacgctgcctcaggcccccagccctgtggcttccacctcagctctagaagcctgctccctctgcagggggtggtggtgtcttcccagccctgtcccatgtgtccctccccccattttcctgcattctgtctgtccttttcctccttggagcctgggccagctcaaggtgggcacgggggcccagacagtactctccagttctggggccccccgagtgaggagggaacgggaagtcggtgccttggtttcagctgatttggggggaaatgccttaatttcactctcctcccttctccagcctcaggggaggatctggaggatccactactgtctttaagatgcagagtggaggggaggtgggcacccaccctgcgattctccaccctttccccttctttcgtcctcaccatctctgcagacccctctcctcctccttcctcttggtctcagcactgatgggaggctggtgcccaagctgtggcctgcagtctgtgaggagggctgtcttgcctcacactcctcacagcctacttccccttccccggggctgagagggtgaaagtgtgtggggaaggagaggactggtttcctgggttctcaggggccaggaggagtaacagaaccaggtctgctccccaccttactcggatggcctccctgcccctctgctggcacagcctgggcaaggggagaaggtggtccctgcagaggggctccaggctggtgagagcccccctgctgtcaggaccagattttcccagccatccagcatgctgcggggagaaggggcagaggctcacctccctcctggggccttttgttttggatcctggggatggtgagaatggaggttctagaaggggtaaggccagaacccagggatccaggagtcggctctcagctggagcttccataccttctgggctccctttgctgaccaccagcccaagggagctaagaccaggagggggctgggcgctgtcccttctctttcccaggagccctgccaggggctgtgggcctacaaggcttccaggggatgccatccagcctgtaggaaaccaaagatgggaagtggctcctagggggctgactcttccttcctcctcctccccagtaccacatatactttctctccttctatctccagggccccaccaatctgtttacatatttattatcctatgggggcctgagcaggattgagggagccaggggaggggcaggagtcccagcaccatcggttcatagtgtgcttgtgtgtttgttttagatcctcctgggggatggggatggggccaggctcagtgtactaggcctctctgtgctgagccccaggctcccggccccttacccactctctccctgtggctggtctggttctcatgtaaacccactccttgctttgtctccctggatatggatttcagttaagtattttgtaacccgttacactgtgtgtccttgtgtaaataaacttgtttctggcagtgcc

SEQ ID NO: 274615 - DNA, 3372 bp, Artificial Sequence
  derived and/or modified sequence
atgaacagccccaatgaatctgcagatggcatgagcggccgggagcccagcctggagatcctgcccaggaccagcctgcacagcatccctgtgacagtggaggtgaagcctgtgctgccccgggccatgcccagctccatgggcggcggcggcggcggcagccccagccctgtggagctgcggggggccctggtgggctctgtggaccccaccctgcgggagcagcagctgcagcaggagctgctggccctgaagcagcagcagcagctgcagaagcagctgctgtttgctgagttccagaagcagcacgaccacctgacccggcagcacgaggtgcagctgcagaagcacctgaagcagcagcaggagatgctggccgccaagcagcagcaggagatgctggccgccaagaggcagcaggagctggagcagcagaggcagcgggagcagcagaggcaggaggagctggagaagcagaggctggagcagcagctgctgatcctgaggaacaaggagaagagcaaggagagcgccatcgccagcacagaggtgaagctgcggctgcaggagttcctgctgagcaagagcaaggagcccaccccaggcggcctgaaccacagcctgccccagcaccccaagtgctggggcgcccaccacgccagcctggaccagagcagccccccccagagcggccccccaggcaccccacccagctacaagctgcccctgcccggcccctatgacagcagagatgacttccccctgaggaagacagccagcgagcccaacctgaaggtgcgcagccggctgaagcagaaggtggccgagaggaggagcagccccctgctgcggaggaaggatggcaccgtcatcagcaccttcaagaagagagctgtggagatcaccggggccggccctggggccagctctgtgtgcaacagcgcccctggcagcggccccagcagccccaacagcagccacagcaccatcgccgagaatggcttcaccggctctgtgcccaacatccccacagagatgctgccccagcaccgggccctgcccctggacagcagccccaaccagttcagcctgtacaccagccccagcctgcccaacatcagcctgggcctgcaggccaccgtgacagtgaccaacagccacctgacagccagccccaagctgagcacccagcaggaggccgagcggcaggccctgcagagcctgcggcagggcggcaccctgaccgggaagttcatgagcaccagcagcatccctggctgcctgctgggcgtggccctggagggagatggcagcccccacggccacgccagcctgctgcagcacgtgctgctgctggagcaggcccggcagcagagcaccctgattgctgtgcccctgcacggccagagccccctggtgactggagagcgggtggccacctccatgaggacagtgggcaagctgcccaggcaccggcccctgagcaggacccagagcagccccctgccccagagcccccaggccctgcagcagctggtgatgcagcagcagcaccagcagttcctggagaagcagaagcagcagcagctgcagctgggcaagatcctgaccaagacaggagagctgccccggcagcccaccacccaccctgaggagacagaggaggagctgacagagcagcaggaggtgctgctgggggagggcgccctgaccatgccccgggagggcagcacagagagcgagagcacccaggaggacctggaggaggaggatgaagaagatgatggagaggaggaggaggactgcatccaggtgaaggatgaggagggggagagcggggctgaggagggccctgacctggaggagcctggagctggctacaagaagctgttcagtgatgcccagcccctgcagcccctgcaggtgtaccaggcccccctgagcctggccaccgtgccccaccaggccctgggccgcacccagagcagccctgctgcccctgggggcatgaagagccccccagaccagcctgtgaagcacctgttcaccaccggggtggtgtatgacaccttcatgctgaagcaccagtgcatgtgtggcaacacccacgtgcaccctgagcacgccggccgcatccagagcatctggagccggctgcaggagaccggcctgctgagcaaatgtgagcgcatccggggcaggaaggccaccctggatgagatccagacagtgcacagcgagtaccacaccctgctgtatggcaccagccccctgaaccggcagaagctggacagcaagaagctgctgggccccatcagccagaagatgtatgctgtgctgccctgtggcggcattggagtggacagcgacacagtgtggaatgagatgcacagcagcagcgctgtgaggatggctgtgggctgcctgctggagctggccttcaaggtggccgccggggagctgaagaatggatttgccatcatccggcccccaggccaccacgccgaggagagcacagccatgggcttctgcttcttcaacagcgtggccatcacagccaagctgctgcagcagaagctgaatgtgggcaaggtgctgattgtggactgggacatccaccacggcaatggcacccagcaggccttctacaatgaccccagcgtgctgtacatcagcctgcacagatatgacaatggaaacttcttccctggcagcggggcccctgaggaggtgggcggcggccctggggtgggctacaacgtgaatgtggcctggacaggaggagtggacccccccatcggagatgtggagtacctgacagccttcagaacagtggtgatgcccatcgcccacgagttctccccagatgtggtgctggtgtctgctggctttgatgctgtggagggccacctgagccccctgggcggctacagcgtgacagcccgctgcttcggccacctgacccggcagctgatgaccctggccggcggccgggtggtgctggccctggagggcggccatgacctgacagccatctgtgatgccagcgaggcctgtgtgtctgccctgctgtctgtggagctgcagcccctggatgaggccgtgctgcagcagaagcccaacatcaatgctgtggccaccctggagaaggtgattgagatccagagcaagcactggagctgtgtgcagaagtttgctgctggcctgggccgcagcctgcgggaggcccaggccggggagacagaggaggccgagaccgtgtctgccatggccctgctgtctgtgggcgctgagcaggcccaggccgccgccgcccgggagcacagccccaggcctgctgaggagcccatggagcaggagcccgccctgtag

SEQ ID NO: 274616 - DNA, 3372 bp, Artificial Sequence
  derived and/or modified sequence
atgaacagccccaacgagagcgccgacggcatgagcggccgggagccaagcctggaaatcctgccccggacgtcacttcactccatccctgtgaccgtcgaggtcaagccggtccttccccgcgcgatgcctagctccatgggaggtggtgggggcgggtcaccctctcctgtcgagcttcggggtgccttggtaggcagcgtggaccctaccttgcgcgaacaacaattgcaacaggaactgctagcactgaaacagcagcagcagttgcagaagcagctgttatttgccgaatttcagaaacagcacgaccacctgacccgccagcacgaggtacagctgcagaagcacctgaagcagcagcaggagatgctggcagcaaagcagcaacaagaaatgttggcagccaagcgccagcaagaattggagcagcagcggcagcgggaacagcagcgacaggaggagttagaaaaacagagactggagcagcagttgctgatcctgcgcaacaaggagaagtccaaagaatccgcaattgctagcacagaagtgaagctcagactgcaagagttcttgctttctaagagtaaggagcccacccccgggggcttaaatcactctttaccacagcatcctaagtgttggggggcccatcacgcgtctcttgatcagtcctcaccacctcaatccggaccacccggcaccccaccgtcgtacaagctgccccttccaggcccatacgactctagggatgacttccccctcaggaaaacggccagcgagccgaacctgaaggtgcggagccgcctcaagcagaaggtcgccgagcgccggtcctcacctctacttagaagaaaagacgggactgtcatctccacatttaagaagagagccgttgagattaccggagccgggcccggtgccagcagtgtttgcaattccgcaccaggtagtggcccttcttctcccaatagctctcacagcacaattgctgagaatggttttacggggagtgtgccaaatattccaactgaaatgttgccccagcaccgcgccctgccccttgactcttcccctaatcaattcagtctctacacaagtccctcccttcctaacatttctctggggctacaggctacggtcacagtgacaaatagtcatctcaccgcttctcccaagctctctacacagcaggaggccgaacggcaagccttgcaatcgctaaggcagggaggaaccctgactggtaaatttatgagtacatcatcaatacccggctgtctgctcggggtcgccctggagggcgacggatcacctcacggtcacgcttccctgttacagcatgtgcttctcctcgagcaggcccggcagcagtctacactaatcgccgtcccgcttcacggacaatccccacttgtgacaggtgaacgcgtcgctacaagtatgcgcaccgtgggaaaactgccccgccaccgcccactcagtcggacgcagagttcccctctaccccagtcccctcaggcattgcagcagctagtgatgcagcaacagcatcaacagttcctcgagaagcagaaacagcagcaactccagttaggaaaaatcctgaccaagacgggggaactgccacgacagcccacaacacatccggaggagacggaggaggaacttacagagcagcaagaagttctcttgggcgagggggcgctcactatgccccgcgaggggtccactgaatccgaaagcacacaggaagatctggaagaagaggacgaggaagacgacggagaagaggaagaagattgcattcaggtcaaagacgaggagggggagtcgggagcagaggaaggacctgacctggaggagccgggagctggatacaagaagctcttctccgatgcccagcctctgcagcccttgcaagtctaccaggccccactatctttggcaactgtgccgcaccaggcactaggacgaacccagagctcgcctgccgcacctggtggcatgaaatccccgcccgaccagcctgttaaacacctgtttaccacaggcgtggtttatgacacctttatgcttaagcaccagtgtatgtgcggaaacacacacgtccaccctgaacacgctggacgaatccaatccatctggagccgtctccaagagaccggcctcctaagcaaatgtgagcgaattcgaggccgaaaggctacacttgatgagatccagaccgtccactccgagtaccatactctgctgtatggcacctctccccttaaccgccaaaagttggactcaaagaagcttctcggtcctatctctcagaagatgtatgctgtgctgccttgcggaggaataggagtggacagcgatactgtgtggaacgaaatgcattcgtcctccgctgtgcgcatggctgttgggtgtctgctcgagctcgcatttaaggtggcagcaggggaattgaaaaacggcttcgccatcatcaggccacctggccaccatgctgaagagtccactgcgatgggcttttgcttttttaatagcgtagcaattactgcaaagcttctacagcagaaattgaacgtgggcaaggtactgattgttgattgggatatccaccacggcaatggcacacagcaggcattttacaacgacccttcagtgctgtacatatcccttcaccgctatgacaacggtaacttcttccccggctccggcgcacccgaggaagtcgggggcggaccgggtgtcggctacaatgtgaatgtcgcatggaccggcggtgtggatcctccgatcggggatgtggagtaccttactgcctttaggactgtggtgatgcccattgcccacgagttcagcccagacgtcgttcttgtgtcagcagggtttgatgccgtcgaaggccatctgtctcccctggggggatactctgttacggcccgttgcttcggacatttaaccagacagctgatgacgttggccggaggccgcgtcgtgctggcactggagggaggccatgacctcacagcaatttgtgatgccagcgaagcttgtgtgagcgcccttctgtctgttgaattgcagcctctagatgaggcggtgttgcagcagaagcccaacattaacgctgttgctacgctagaaaaggtgatcgaaatccaatctaaacattggtcgtgtgtgcagaagtttgccgctggcctgggccgctccctacgggaggctcaggctggcgagacggaggaagccgagacggtctcagccatggccctattaagcgtaggcgcagagcaagcgcaggctgcggccgcccgggagcattcccctaggcccgcagaagagcctatggagcaggagccagccctctag

SEQ ID NO: 274617 - DNA, 3372 bp, Artificial Sequence
  derived and/or modified sequence
atgaacagtccaaacgaatccgcggatgggatgagcggaagggagcccagcctggaaatactgccacgcaccagcctccacagcattccggtcaccgtggaggtgaaacctgtactcccccgagcgatgccctcgtcaatgggtggcggaggcggaggctctccctcaccagtggaactgagaggggcactagtgggtagcgtggatcccacgctgcgcgaacagcagctccagcaggaactgctcgcacttaaacagcagcagcagcttcagaagcagctccttttcgctgaattccagaaacaacacgaccatttaacccggcagcacgaagtacaattgcagaaacatctgaagcaacagcaggagatgttagcagctaaacagcaacaggagatgctggcagcgaaaagacaacaagagcttgaacagcagcggcaacgcgagcagcagcggcaggaagaactggaaaagcagcgtctggagcaacaactgcttatcctgagaaataaggagaaaagcaaagaaagcgccatagcttccaccgaagttaaactgcgtctccaggaattcctgctcagcaagagcaaggaacctacaccaggtggcctgaaccacagcctgccgcagcaccctaaatgttggggagcccaccacgcgagcctggaccagtcctcaccacctcagtctggccctcctggtactccgccaagctataagctgcctctgcccggaccgtacgacagcagggacgatttcccactccgaaaaactgcaagcgaaccaaacttaaaggtaaggtccagactaaagcagaaggttgcagaaagacggtccagtcccctgctaaggcgcaaagacggaacggtgatttccacgtttaaaaagcgggcagttgagattactggcgcagggccaggtgcaagctctgtttgcaacagtgctccgggatccgggccaagctctccaaactcctcacacagtaccatagctgaaaacggttttacaggatctgtgccaaatatcccaactgagatgctgccccagcaccgggcacttccactggattcgagccccaatcagttctccctgtatacaagcccatctctgccaaacatttctcttggtttgcaagcgacagtcacagtgaccaactctcacctcactgcaagtccaaagttgtctacccagcaagaagccgagcgccaggcactgcagagcctgcgccaaggaggcacactgacaggaaaatttatgtccactagcagtatccccggttgtttactcggtgtcgccctagagggagatggctctccacatggtcatgcttcacttctgcaacacgtcctgctcttagaacaggccagacagcagtctactttgattgccgtgccactccatggacagagtcctctggtgaccggcgaaagagttgccacctccatgagaaccgtcggcaagttaccaagacatcgaccactctcgcgaacacagtcctcaccgttgcctcagtccccccaagcactgcagcagctggtcatgcagcagcaacatcagcaattcctagagaagcaaaaacagcagcaattgcagctagggaaaatattgacaaagactggagagctgcctagacagcctacaactcacccggaagagactgaagaggagctgaccgagcagcaagaggtgctgttaggagagggtgctttgaccatgccaagggaggggtccaccgagtccgaaagcacacaagaggatctggaagaagaggatgaggaagatgacggcgaagaagaagaagattgtatacaggtaaaagacgaagagggggagtcgggcgctgaagagggtcccgaccttgaggagcctggagccggatacaaaaagctgttttctgacgctcagccattgcagcccttgcaggtgtaccaggctcctctctctctggctaccgtgcctcaccaggctctgggacgaacccaatcctcccccgcagcccctggtggaatgaagtcaccgcctgaccagcccgtcaaacacctgttcactacgggagtggtatacgatacattcatgctaaagcatcaatgcatgtgcgggaatactcacgtccatccagaacatgctggtagaattcagtccatctggtccagactgcaggagactggcctgttaagtaagtgtgagcgaatcaggggacgaaaagccactctggacgaaatacagaccgtccactcagaataccacaccctgctctacgggacgtccccacttaatcgccagaaactggattcaaagaagctgctcggcccaattagccagaaaatgtatgccgttttaccatgtggtggtataggagtggactcagacacagtatggaacgaaatgcattcgtcatcagcggtccgaatggctgtcggatgcctgctggaactcgcatttaaggttgccgcaggggaactgaagaacggcttcgccataattcggccaccgggtcatcacgcagaggaaagtaccgctatgggtttttgcttctttaatagcgtagccatcaccgccaagttattacagcagaagctgaacgtgggaaaagttctcatcgttgactgggacattcatcatgggaacggcactcaacaggccttttataacgatcccagcgttctctacatttctctgcacaggtacgacaatggaaacttttttccaggttcaggggcaccggaggaagtgggagggggaccgggagtgggttacaatgtgaacgtggcttggaccggcggagtcgatccccctatcggagatgtggaatacctaaccgccttcaggactgttgtgatgcccattgcccacgaattcagccccgacgtggtgctggtgtcagcaggtttcgatgctgtcgaaggccatttaagccctctggggggatacagcgtaactgcacgttgttttggccatctgacccgtcagcttatgactttagcagggggacgcgtcgtgctggccctggaaggcggacacgatcttactgccatctgcgacgcctctgaggcatgtgtgagcgcactccttagcgtggagctccaacctcttgatgaggccgtactccagcagaaaccaaatataaatgcggtggcgacgctcgagaaagtcatcgagattcagagcaagcactggtcttgcgtccagaagtttgccgcaggcctgggacgcagtttgcgtgaagctcaggctggggagaccgaggaggccgaaaccgtttcagcaatggccctgctgagcgtgggcgcagaacaggcccaggcagccgcagcgagggaacactccccgaggcccgctgaggaacctatggagcaggaaccggcactgtag

SEQ ID NO: 274618 - DNA, 3372 bp, Artificial Sequence
  derived and/or modified sequence
atgaacagccccaacgagagcgccgacggcatgagcggcagagagcccagcctggagatcctgcccagaaccagcctgcacagcatccccgtgaccgtggaggtgaagcccgtgctgcccagagccatgcccagcagcatgggcggcggcggcggcggcagccccagccccgtggagctgagaggcgccctggtgggcagcgtggaccccaccctgagagagcagcagctgcagcaggagctgctggccctgaagcagcagcagcagctgcagaagcagctgctgttcgccgagttccagaagcagcacgaccacctgaccagacagcacgaggtgcagctgcagaagcacctgaagcagcagcaggagatgctggccgccaagcagcagcaggagatgctggccgccaagagacagcaggagctggagcagcagagacagagagagcagcagagacaggaggagctggagaagcagagactggagcagcagctgctgatcctgagaaacaaggagaagagcaaggagagcgccatcgccagcaccgaggtgaagctgagactgcaggagttcctgctgagcaagagcaaggagcccacccccggcggcctgaaccacagcctgccccagcaccccaagtgctggggcgcccaccacgccagcctggaccagagcagccccccccagagcggcccccccggcaccccccccagctacaagctgcccctgcccggcccctacgacagcagagacgacttccccctgagaaagaccgccagcgagcccaacctgaaggtgagaagcagactgaagcagaaggtggccgagagaagaagcagccccctgctgagaagaaaggacggcaccgtgatcagcaccttcaagaagagagccgtggagatcaccggcgccggccccggcgccagcagcgtgtgcaacagcgcccccggcagcggccccagcagccccaacagcagccacagcaccatcgccgagaacggcttcaccggcagcgtgcccaacatccccaccgagatgctgccccagcacagagccctgcccctggacagcagccccaaccagttcagcctgtacaccagccccagcctgcccaacatcagcctgggcctgcaggccaccgtgaccgtgaccaacagccacctgaccgccagccccaagctgagcacccagcaggaggccgagagacaggccctgcagagcctgagacagggcggcaccctgaccggcaagttcatgagcaccagcagcatccccggctgcctgctgggcgtggccctggagggcgacggcagcccccacggccacgccagcctgctgcagcacgtgctgctgctggagcaggccagacagcagagcaccctgatcgccgtgcccctgcacggccagagccccctggtgaccggcgagagagtggccaccagcatgagaaccgtgggcaagctgcccagacacagacccctgagcagaacccagagcagccccctgccccagagcccccaggccctgcagcagctggtgatgcagcagcagcaccagcagttcctggagaagcagaagcagcagcagctgcagctgggcaagatcctgaccaagaccggcgagctgcccagacagcccaccacccaccccgaggagaccgaggaggagctgaccgagcagcaggaggtgctgctgggcgagggcgccctgaccatgcccagagagggcagcaccgagagcgagagcacccaggaggacctggaggaggaggacgaggaggacgacggcgaggaggaggaggactgcatccaggtgaaggacgaggagggcgagagcggcgccgaggagggccccgacctggaggagcccggcgccggctacaagaagctgttcagcgacgcccagcccctgcagcccctgcaggtgtaccaggcccccctgagcctggccaccgtgccccaccaggccctgggcagaacccagagcagccccgccgcccccggcggcatgaagagcccccccgaccagcccgtgaagcacctgttcaccaccggcgtggtgtacgacaccttcatgctgaagcaccagtgcatgtgcggcaacacccacgtgcaccccgagcacgccggcagaatccagagcatctggagcagactgcaggagaccggcctgctgagcaagtgcgagagaatcagaggcagaaaggccaccctggacgagatccagaccgtgcacagcgagtaccacaccctgctgtacggcaccagccccctgaacagacagaagctggacagcaagaagctgctgggccccatcagccagaagatgtacgccgtgctgccctgcggcggcatcggcgtggacagcgacaccgtgtggaacgagatgcacagcagcagcgccgtgagaatggccgtgggctgcctgctggagctggccttcaaggtggccgccggcgagctgaagaacggcttcgccatcatcagaccccccggccaccacgccgaggagagcaccgccatgggcttctgcttcttcaacagcgtggccatcaccgccaagctgctgcagcagaagctgaacgtgggcaaggtgctgatcgtggactgggacatccaccacggcaacggcacccagcaggccttctacaacgaccccagcgtgctgtacatcagcctgcacagatacgacaacggcaacttcttccccggcagcggcgcccccgaggaggtgggcggcggccccggcgtgggctacaacgtgaacgtggcctggaccggcggcgtggacccccccatcggcgacgtggagtacctgaccgccttcagaaccgtggtgatgcccatcgcccacgagttcagccccgacgtggtgctggtgagcgccggcttcgacgccgtggagggccacctgagccccctgggcggctacagcgtgaccgccagatgcttcggccacctgaccagacagctgatgaccctggccggcggcagagtggtgctggccctggagggcggccacgacctgaccgccatctgcgacgccagcgaggcctgcgtgagcgccctgctgagcgtggagctgcagcccctggacgaggccgtgctgcagcagaagcccaacatcaacgccgtggccaccctggagaaggtgatcgagatccagagcaagcactggagctgcgtgcagaagttcgccgccggcctgggcagaagcctgagagaggcccaggccggcgagaccgaggaggccgagaccgtgagcgccatggccctgctgagcgtgggcgccgagcaggcccaggccgccgccgccagagagcacagccccagacccgccgaggagcccatggagcaggagcccgccctgtag

SEQ ID NO: 274619 - protein, 1037 aa, Artificial Sequence
  derived and/or modified sequence
MNSPNESDGMSGREPSLEILPRTSLHSIPVTVEVKPVLPRAMPSSMGGGGGGSPSPVELRGALVGSVDPTLREQQLQQELLALKQQQQLQKQLLFAEFQKQHDHLTRQHEVQLQKHLKQQQEMLAAKQQQEMLAAKRQQELEQQRQREQQRQEELEKQRLEQQLLILRNKEKSKESAIASTEVKLRLQEFLLSKSKEPTPGGLNHSLPQHPKCWGAHHASLDQSSPPQSGPPGTPPSYKLPLPGPYDSRDDFPLRKTASEPNLKVRSRLKQKVAERRSSPLLRRKDGTVISTFKKRAVEITGAGPGASSVCNSAPGSGPSSPNSSHSTIAENGFTGSVPNIPTEMLPQHRALPLDSSPNQFSLYTSPSLPNISLGLQATVTVTNSHLTASPKLSTQQEAERQALQSLRQGGTLTGKFMSTSSIPGCLLGVALEGDGSPHGHASLLQHVLLLEQARQQSTLIAVPLHGQSPLVTGERVATSMRTVGKLPRHRPLSRTQSSPLPQSPQALQQLVMQQQHQQFLEKQKQQQLQLGKILTKTGELPRQPTTHPEETEEELTEQQEVLLGEGALTMPREGSTESESTQEDLEEEDEEDDGEEEEDCIQVKDEEGESGAEEGPDLEEPGAGYKKLFSDAQPLQPLQVYQAPLSLATVPHQALGRTQSSPAAPGGMKSPPDQPVKHLFTTGPISQKMYAVLPCGGIGVDSDTVWNEMHSSSAVRMAVGCLLELAFKVAAGELKNGFAIIRPPGHHAEESTAMGFCFFNSVAITAKLLQQKLNVGKVLIVDWDIHHGNGTQQAFYNDPSVLYISLHRYDNGNFFPGSGAPEEVGGGPGVGYNVNVAWTGGVDPPIGDVEYLTAFRTVVMPIAHEFSPDVVLVSAGFDAVEGHLSPLGGYSVTARCFGHLTRQLMTLAGGRVVLALEGGHDLTAICDASEACVSALLSVELQPLDEAVLQQKPNINAVATLEKVIEIQSKHWSCVQKFAAGLGRSLREAQAGETEEAETVSAMALLSVGAEQAQAAAAREHSPRPAEEPMEQEPAL

SEQ ID NO: 274620 - protein, 1122 aa, Artificial Sequence
  derived and/or modified sequence
MNSPNESDGMSGREPSLEILPRTSLHSIPVTVEVKPVLPRAMPSSMGGGGGGSPSPVELRGALVGSVDPTLREQQLQQELLALKQQQQLQKQLLFAEFQKQHDHLTRQHEVQLQKHLKQQQEMLAAKQQQEMLAAKRQQELEQQRQREQQRQEELEKQRLEQQLLILRNKEKSKESAIASTEVKLRLQEFLLSKSKEPTPGGLNHSLPQHPKCWGAHHASLDQSSPPQSGPPGTPPSYKLPLPGPYDSRDDFPLRKTASEPNLKVRSRLKQKVAERRSSPLLRRKDGTVISTFKKRAVEITGAGPGASSVCNSAPGSGPSSPNSSHSTIAENGFTGSVPNIPTEMLPQHRALPLDSSPNQFSLYTSPSLPNISLGLQATVTVTNSHLTASPKLSTQQEAERQALQSLRQGGTLTGKFMSTSSIPGCLLGVALEGDGSPHGHASLLQHVLLLEQARQQSTLIAVPLHGQSPLVTGERVATSMRTVGKLPRHRPLSRTQSSPLPQSPQALQQLVMQQQHQQFLEKQKQQQLQLGKILTKTGELPRQPTTHPEETEEELTEQQEVLLGEGALTMPREGSTESESTQEDLEEEDEEDDGEEEEDCIQVKDEEGESGAEEGPDLEEPGAGYKKLFSDAQPLQPLQVYQAPLSLATVPHQALGRTQSSPAAPGGMKSPPDQPVKHLFTTGVVYDTFMLKHQCMCGNTHVHPEHAGRIQSIWSRLQETGLLSKCERIRGRKATLDEIQTVHSEYHTLLYGTSPLNRQKLDSKKLLGPISQKMYAVLPCGGIGVDSDTVWNEMHSSSAVRMAVGCLLELAFKVAAGELKNGFAIIRPPGHHAEESTAMGFCFFNSVAITAKLLQQKLNVGKVLIVDWDIHHGNGTQQAFYNDPSVLYISLHRYDNGNFFPGSGAPEEVGGGPGVGYNVNVAWTGGVDPPIGDVEYLTAFRTVVMPIAHEFSPDVVLVSAGFDAVEGHLSPLGGYSVTARCFGHLTRQLMTLAGGRVVLALEGGHDLTAICDASEACVSALLSVELQPLDEAVLQQKPNINAVATLEKVIEIQSKHWSCVQKFAAGLGRSLREAQAGETEEAETVSAMALLSVGAEQAQAAAAREHSPRPAEEPMEQEPAL

SEQ ID NO: 274621 - DNA, 3114 bp, Artificial Sequence
  derived and/or modified sequence
atgaacagccctaacgaaagtgatggaatgagcggacgcgaaccaagccttgaaatcctcccccgtacctcactccacagcattccagtaaccgtggaggtgaagcccgttctaccacgcgccatgccgtcatcaatgggaggaggcggcggcgggtcccccagtccggtggaactgaggggcgcactggtgggcagtgtggatccaaccctgagggaacagcaattacagcaagaactgctggccctaaagcagcagcagcaattgcagaagcaattactgttcgccgagtttcagaagcaacacgaccatctcactagacagcacgaagtacaactccagaaacatcttaaacaacaacaagagatgctggcagccaagcaacagcaagagatgcttgcagctaagcgccaacaggagctggaacaacagcgacagagagagcagcagcgccaggaggagttggagaaacaacgactagagcaacaactgctgatactgagaaacaaggaaaagtcaaaagaaagcgctatagcctcaactgaagtcaagctgaggctgcaagagtttttgctttccaaatccaaggaaccgactccggggggcctgaaccatagcctgccacagcatcctaaatgctggggggcacatcatgcgtcacttgatcagtcttcacctccacaaagcgggccacccggcacccctccgtcgtataagttaccactccctggcccttatgacagccgcgatgacttccctttgagaaaaacagccagtgagcccaacctgaaagttcgttctaggctaaagcagaaagtcgcagaacgaaggtcatcccctctcctccggcggaaggatggaacagttatttcaacatttaagaaacgcgcggtggaaatcaccggggctggacccggtgctagcagtgtttgtaactccgcccctggcagcggccctagctcgcccaacagttcacacagcacaattgcagaaaacggtttcacgggatccgtgccaaacatccccaccgaaatgttaccacagcatcgagcactgccactggattcctcaccgaatcagtttagcctctacacctcccccagcttgcctaatatcagcctggggctacaggctacagtgacagtcacaaatagccacctgactgcttctcccaagctcagtactcaacaggaagccgaaaggcaggctctgcaaagcctgagacaggggggaacacttactggcaagtttatgtctacgtcaagcattccgggatgcctgctcggcgtggcactcgaaggcgatgggtctcctcacggtcatgccagtttgctgcagcacgtgttactcctggaacaggcacgacagcagtcaactcttatcgccgtgcctctgcacggccagagccctttggtgactggtgagcgcgtagccacgagcatgagaaccgtaggcaagctccctaggcatagacctctgtcgaggacgcagtcttctccacttccccaaagtcctcaggctctccagcagctcgtgatgcagcagcagcatcaacaatttctggagaagcaaaagcagcagcagttgcagctggggaagatattaactaaaacaggagagctacctcgtcagccgacgacacatcctgaggagactgaggaggagctaacagaacaacaggaggtgttgctgggcgagggcgcactgacgatgccccgggagggatctaccgagtccgaatctacccaagaggatctcgaggaagaagatgaggaggatgacggtgaagaagaggaggattgtatccaagtgaaagatgaggaaggcgaatcaggggccgaagaaggccctgacctggaagagccgggggccggctataaaaagctgttctcggatgcgcagccattgcagcccttacaggtctatcaggccccccttagccttgccactgtacctcaccaggctctaggtcggacccagtcatccccggccgcaccaggcggaatgaagagtcctcccgatcagcctgtgaagcacctgttcacaacaggcccaatatcacagaaaatgtacgcagtgcttccttgcggcggtatcggtgtcgactccgacactgtttggaatgagatgcactccagtagcgcggttcggatggccgttggttgtctgctagagttggctttcaaggtggccgcgggcgagcttaagaatggctttgcaatcatacgaccccccggtcatcatgccgaggagtctaccgcgatgggattctgcttttttaactctgtggccatcacagccaagctgctgcagcaaaaacttaacgttggaaaggtcctgattgtggattgggatattcaccatggtaatggaacccagcaggctttctacaacgatccttctgtgttgtacatctccctccaccggtatgataatggtaatttctttccagggagtggggcacctgaagaagtgggaggcggaccaggcgttggctataatgtgaacgtcgcctggaccggtggtgtggatccgcccatcggggacgtagagtacctgactgcctttcgtacagtggtgatgcccatcgcacatgagtttagcccagacgttgtcctggtgtcagctggctttgatgccgtggaaggccacctatctccactgggaggctattccgtcaccgcacgatgttttggacacctcacacgccagctgatgaccctagctggtgggagggtggttctggctctggaaggcggccatgaccttacagcgatctgcgatgcctctgaagcctgcgttagcgctttgttgagcgtggaactgcagcccctcgatgaggccgtgctccagcagaaacctaacatcaatgccgtcgccactctggaaaaggtgattgagattcagtctaagcactggagctgcgtgcagaagtttgctgctggactggggcgttccctaagggaggcccaggccggggaaacggaagaggcagagacagtctccgccatggctctgctgagcgtcggggctgagcaggcccaggccgccgctgcccgggagcactcccctaggcctgcagaggagccaatggagcaggaaccagctctgtag

SEQ ID NO: 274622 - DNA, 3369 bp, Artificial Sequence
  derived and/or modified sequence
atgaactctccgaacgagtcagatggcatgtccgggagggagccttccttggagatcttacccaggacctctttacattcgatacctgtcaccgtggaagttaaaccagtattgccccgggcaatgcctagctcaatgggaggcggcggtggcggcagcccatcccccgtcgagctacgaggcgcgttagtcggatcagtggatcccacactgagggaacaacaattacagcaggaactgctcgctctaaagcagcaacaacagttgcaaaaacagttgctctttgccgaattccagaagcaacatgaccatctcacacgacaacatgaggtccaactacagaagcatctcaagcaacagcaggaaatgctggccgccaaacaacaacaggagatgctcgctgcgaagagacaacaggagctggagcaacagaggcaacgagaacaacagcgacaggaagagctggagaagcaacggctcgagcagcagctgctgattttgcggaacaaggaaaaatctaaggagtctgccatcgcaagcactgaagtcaaacttaggctccaggagttcctactgagcaaatccaaagagcccaccccaggcggcctgaaccattcccttccacagcatcccaagtgctggggcgcccatcacgcgagtctcgatcagtcgtccccaccgcagtcaggacctcccggcacccctccaagctacaagctgccacttccgggcccatatgattccagggacgatttccccctgcggaagaccgcatcagagccgaacttgaaagtacgctctagactgaagcagaaagtggctgagcggagatccagtccccttttacgcagaaaggatggcaccgttatctccacttttaagaaacgagcagtggaaatcacgggggctgggccaggcgcatccagtgtgtgcaacagtgcaccgggctctggaccctcctcccccaactcctcacattcgactattgccgaaaacggctttacaggcagcgtgcctaacatcccaacagagatgctgccgcagcaccgcgccctacctctggattcttcccctaatcagttcagtctgtacacctcccccagtttgccaaacatttccttgggtctgcaagccaccgtcaccgtgaccaatagtcacttgactgcttccccgaagctctctactcagcaagaagcagagaggcaggccctgcagtcactcaggcagggcggtaccctcacggggaagtttatgagtacttccagtattcctggctgtctactcggagtcgccctggagggcgacggcagcccacatggacacgcttccctgctacagcacgtcttacttttggaacaggcaaggcagcagagcacgttgatcgccgttcccctgcacgggcagagccccctcgtgaccggggagcgggtcgccacatccatgaggacggtggggaagctcccacggcataggccgctttctcgcacacagagttccccattgccacagtcacctcaggccctccaacagttagttatgcagcagcagcaccagcagttcctcgaaaagcagaagcaacaacagctgcagttgggaaagatattgacgaagacaggcgagttgccccggcagccaacgacccatcctgaggagaccgaggaggaactgaccgagcagcaggaagtgttactgggagagggcgcgttaaccatgcctcgggagggcagtaccgagtctgaaagtacacaggaagacttggaggaagaagacgaggaggacgacggggaagaggaagaagattgtatacaggtgaaggacgaagaaggcgaaagcggagcggaggagggccccgatttagaagaaccaggcgccggctataaaaaactgttttccgacgcacaacccttgcagccccttcaggtataccaggcacccctgtctctggcaactgtgcctcaccaggctctgggaagaacacaaagctctcccgctgctcctggtggcatgaagagtccgcccgatcagcccgtgaagcacctcttcacaaccggagtggtgtacgacactttcatgctgaaacaccagtgtatgtgcggaaatactcacgtgcaccccgagcacgccggtcgaatacagagcatttggagcagacttcaggagaccggacttttgtccaaatgtgagcggattaggggacgaaaggccacactggacgaaatccaaacagtgcattctgagtaccacacgctcctttacggcaccagccccctgaacagacagaaacttgactccaaaaagttgctcgggccgatcagccaaaagatgtatgccgtcctcccctgtgggggaatcggggtggactctgatactgtttggaacgaaatgcactcttccagcgccgtgcgaatggctgtcgggtgcctgctcgagctcgcctttaaagttgctgctggcgagctgaagaacgggtttgctatcatcaggccccccggacaccacgctgaggaaagtactgctatgggtttttgtttcttcaacagtgttgccatcacagccaagctactgcaacagaaactgaacgtgggcaaggtgcttattgtggactgggacattcaccacggaaatgggacacagcaagctttctacaatgatccctccgttctctacatatccctacatagatatgataacggaaatttcttcccaggcagcggcgcacccgaagaggtggggggcgggcctggcgtaggttacaatgtgaacgtcgcgtggacaggaggcgttgaccctccaatcggcgatgtggagtacctcacggcttttcgcaccgtagtcatgcctattgctcacgagttttctccggatgtcgtgctggtgtccgccggctttgatgctgttgagggacacctttcacccctgggcggatacagcgtcactgccaggtgcttcgggcacttaaccaggcaactcatgaccctggcaggcggccgggtggtcctggcgcttgaagggggtcatgaccttactgctatctgcgacgcctcagaggcatgcgtctcagctttgttgtccgtcgaattacagccacttgatgaggcagtgttgcaacagaaacccaacatcaacgctgtggcaaccctcgaaaaggtgatcgagattcagagtaaacactggtcgtgcgttcagaaattcgccgccggactcggtcggtctctgcgggaagcacaggctggagagaccgaagaagccgaaaccgtctctgcgatggccctactgtctgttggtgccgagcaggcccaagctgctgccgcccgcgaacatagccctcggccagcagaggaaccaatggaacaggaaccagccctctag

SEQ ID NO: 274623 - DNA, 5069 bp, Artificial Sequence
  derived and/or modified sequence
cgaatgttgttgttggtggcggcggcgagcggagccggaggagccgccgcaaagatggaggagccgtcgaggaggtgctgccgccgctgccgccgccgctgctgccgccgccgcccgcgaagccggagctcgagccgcagcggggatgccgttctgagtgcctgactgcctcgccccgaaggatggcctcggatgggcattagaggcacggcggccccgggctcccgtcccgtccgtctgtctgttatcgtctgtctctcttgacatcaccgcagctccaccccctcccgtcccagcccccaacgccagcttcctgcaggcccagagccggcatgaactctcccaacgagtcggatgggatgtcaggtcgggaaccatccttggaaatcctgccgcggacttctctgcacagcatccctgtgacagtggaggtgaagccggtgctgccaagagccatgcccagttccatggggggtgggggtggaggcagccccagccctgtggagctacggggggctctggtgggctctgtggaccccacactgcgggagcagcaactgcagcaggagctcctggcgctcaagcagcagcagcagctgcagaagcagctcctgttcgctgagttccagaaacagcatgaccacctgacaaggcagcatgaggtccagctgcagaagcacctcaagcagcagcaggagatgctggcagccaagcagcagcaggagatgctggcagccaagcggcagcaggagctggagcagcagcggcagcgggagcagcagcggcaggaagagctggagaagcagcggctggagcagcagctgctcatcctgcggaacaaggagaagagcaaagagagtgccattgccagcactgaggtaaagctgaggctccaggaattcctcttgtcgaagtcaaaggagcccacaccaggcggcctcaaccattccctcccacagcaccccaaatgctggggagcccaccatgcttctttggaccagagttcccctccccagagcggcccccctgggacgcctccctcctacaaactgcctttgcctgggccctacgacagtcgagacgacttccccctccgcaaaacagcctctgaacccaacttgaaagtgcgttcaaggctaaaacagaaggtggctgagcggagaagcagtcccctcctgcgtcgcaaggatgggactgttattagcacctttaagaagagagctgttgagatcacaggtgccgggcctggggcgtcgtccgtgtgtaacagcgcacccggctccggccccagctctcccaacagctcccacagcaccatcgctgagaatggctttactggctcagtccccaacatccccactgagatgctccctcagcaccgagccctccctctggacagctcccccaaccagttcagcctctacacgtctccttctctgcccaacatctccctagggctgcaggccacggtcactgtcaccaactcacacctcactgcctccccgaagctgtcgacacagcaggaggccgagaggcaggccctccagtccctgcggcagggtggcacgctgaccggcaagttcatgagcacatcctctattcctggctgcctgctgggcgtggcactggagggcgacgggagcccccacgggcatgcctccctgctgcagcatgtgctgttgctggagcaggcccggcagcagagcaccctcattgctgtgccactccacgggcagtccccactagtgacgggtgaacgtgtggccaccagcatgcggacggtaggcaagctcccgcggcatcggcccctgagccgcactcagtcctcaccgctgccgcagagtccccaggccctgcagcagctggtcatgcaacaacagcaccagcagttcctggagaagcagaagcagcagcagctacagctgggcaagatcctcaccaagacaggggagctgcccaggcagcccaccacccaccctgaggagacagaggaggagctgacggagcagcaggaggtcttgctgggggagggagccctgaccatgccccgggagggctccacagagagtgagagcacacaggaagacctggaggaggaggacgaggaagacgatggggaggaggaggaggattgcatccaggttaaggacgaggagggcgagagtggtgctgaggaggggcccgacttggaggagcctggtgctggatacaaaaaactgttctcagatgcccagccgctgcagcctttgcaggtgtaccaggcgcccctcagcctggccactgtgccccaccaggccctgggccgtacccagtcctcccctgctgcccctgggggcatgaagagccccccagaccagcccgtcaagcacctcttcaccacaggccccatcagccagaagatgtatgctgtgctgccttgtgggggcatcggggtggacagtgacaccgtgtggaatgagatgcactcctccagtgctgtgcgcatggcagtgggctgcctgctggagctggccttcaaggtggctgcaggagagctcaagaatggatttgccatcatccggcccccaggacaccacgccgaggaatccacagccatgggattctgcttcttcaactctgtagccatcaccgcaaaactcctacagcagaagttgaacgtgggcaaggtcctcatcgtggactgggacattcaccatggcaatggcacccagcaggcgttctacaatgacccctctgtgctctacatctctctgcatcgctatgacaacgggaacttctttccaggctctggggctcctgaagaggttggtggaggaccaggcgtggggtacaatgtgaacgtggcatggacaggaggtgtggacccccccattggagacgtggagtaccttacagccttcaggacagtggtgatgcccattgcccacgagttctcacctgatgtggtcctagtctccgccgggtttgatgctgttgaaggacatctgtctcctctgggtggctactctgtcaccgccagatgttttggccacttgaccaggcagctgatgaccctggcagggggccgggtggtgctggccctggagggaggccatgacttgaccgccatctgtgatgcctctgaggcttgtgtctcggctctgctcagtgtagagctgcagcccttggatgaggcagtcttgcagcaaaagcccaacatcaacgcagtggccacgctagagaaagtcatcgagatccagagcaaacactggagctgtgtgcagaagttcgccgctggtctgggccggtccctgcgagaggcccaagcaggtgagaccgaggaggccgagactgtgagcgccatggccttgctgtcggtgggggccgagcaggcccaggctgcggcagcccgggaacacagccccaggccggcagaggagcccatggagcaggagcctgccctgtgacgccccggcccccatccctctgggcttcaccattgtgattttgtttattttttctattaaaaacaaaaagtcacacattcaacaaggtgtgccgtgtgggtctctcagccttgcccctcctgctcctctacgctgcctcaggcccccagccctgtggcttccacctcagctctagaagcctgctccctctgcagggggtggtggtgtcttcccagccctgtcccatgtgtccctccccccattttcctgcattctgtctgtccttttcctccttggagcctgggccagctcaaggtgggcacgggggcccagacagtactctccagttctggggccccccgagtgaggagggaacgggaagtcggtgccttggtttcagctgatttggggggaaatgccttaatttcactctcctcccttctccagcctcaggggaggatctggaggatccactactgtctttaagatgcagagtggaggggaggtgggcacccaccctgcgattctccaccctttccccttctttcgtcctcaccatctctgcagacccctctcctcctccttcctcttggtctcagcactgatgggaggctggtgcccaagctgtggcctgcagtctgtgaggagggctgtcttgcctcacactcctcacagcctacttccccttccccggggctgagagggtgaaagtgtgtggggaaggagaggactggtttcctgggttctcaggggccaggaggagtaacagaaccaggtctgctccccaccttactcggatggcctccctgcccctctgctggcacagcctgggcaaggggagaaggtggtccctgcagaggggctccaggctggtgagagcccccctgctgtcaggaccagattttcccagccatccagcatgctgcggggagaaggggcagaggctcacctccctcctggggccttttgttttggatcctggggatggtgagaatggaggttctagaaggggtaaggccagaacccagggatccaggagtcggctctcagctggagcttccataccttctgggctccctttgctgaccaccagcccaagggagctaagaccaggagggggctgggcgctgtcccttctctttcccaggagccctgccaggggctgtgggcctacaaggcttccaggggatgccatccagcctgtaggaaaccaaagatgggaagtggctcctagggggctgactcttccttcctcctcctccccagtaccacatatactttctctccttctatctccagggccccaccaatctgtttacatatttattatcctatgggggcctgagcaggattgagggagccaggggaggggcaggagtcccagcaccatcggttcatagtgtgcttgtgtgtttgttttagatcctcctgggggatggggatggggccaggctcagtgtactaggcctctctgtgctgagccccaggctcccggccccttacccactctctccctgtggctggtctggttctcatgtaaacccactccttgctttgtctccctggatatggatttcagttaagtattttgtaacccgttacactgtgtgtccttgtgtaaataaacttgtttctggcagtgcc

SEQ ID NO: 274624 - DNA, 5324 bp, Artificial Sequence
  derived and/or modified sequence
cgaatgttgttgttggtggcggcggcgagcggagccggaggagccgccgcaaagatggaggagccgtcgaggaggtgctgccgccgctgccgccgccgctgctgccgccgccgcccgcgaagccggagctcgagccgcagcggggatgccgttctgagtgcctgactgcctcgccccgaaggatggcctcggatgggcattagaggcacggcggccccgggctcccgtcccgtccgtctgtctgttatcgtctgtctctcttgacatcaccgcagctccaccccctcccgtcccagcccccaacgccagcttcctgcaggcccagagccggcatgaactctcccaacgagtcggatgggatgtcaggtcgggaaccatccttggaaatcctgccgcggacttctctgcacagcatccctgtgacagtggaggtgaagccggtgctgccaagagccatgcccagttccatggggggtgggggtggaggcagccccagccctgtggagctacggggggctctggtgggctctgtggaccccacactgcgggagcagcaactgcagcaggagctcctggcgctcaagcagcagcagcagctgcagaagcagctcctgttcgctgagttccagaaacagcatgaccacctgacaaggcagcatgaggtccagctgcagaagcacctcaagcagcagcaggagatgctggcagccaagcagcagcaggagatgctggcagccaagcggcagcaggagctggagcagcagcggcagcgggagcagcagcggcaggaagagctggagaagcagcggctggagcagcagctgctcatcctgcggaacaaggagaagagcaaagagagtgccattgccagcactgaggtaaagctgaggctccaggaattcctcttgtcgaagtcaaaggagcccacaccaggcggcctcaaccattccctcccacagcaccccaaatgctggggagcccaccatgcttctttggaccagagttcccctccccagagcggcccccctgggacgcctccctcctacaaactgcctttgcctgggccctacgacagtcgagacgacttccccctccgcaaaacagcctctgaacccaacttgaaagtgcgttcaaggctaaaacagaaggtggctgagcggagaagcagtcccctcctgcgtcgcaaggatgggactgttattagcacctttaagaagagagctgttgagatcacaggtgccgggcctggggcgtcgtccgtgtgtaacagcgcacccggctccggccccagctctcccaacagctcccacagcaccatcgctgagaatggctttactggctcagtccccaacatccccactgagatgctccctcagcaccgagccctccctctggacagctcccccaaccagttcagcctctacacgtctccttctctgcccaacatctccctagggctgcaggccacggtcactgtcaccaactcacacctcactgcctccccgaagctgtcgacacagcaggaggccgagaggcaggccctccagtccctgcggcagggtggcacgctgaccggcaagttcatgagcacatcctctattcctggctgcctgctgggcgtggcactggagggcgacgggagcccccacgggcatgcctccctgctgcagcatgtgctgttgctggagcaggcccggcagcagagcaccctcattgctgtgccactccacgggcagtccccactagtgacgggtgaacgtgtggccaccagcatgcggacggtaggcaagctcccgcggcatcggcccctgagccgcactcagtcctcaccgctgccgcagagtccccaggccctgcagcagctggtcatgcaacaacagcaccagcagttcctggagaagcagaagcagcagcagctacagctgggcaagatcctcaccaagacaggggagctgcccaggcagcccaccacccaccctgaggagacagaggaggagctgacggagcagcaggaggtcttgctgggggagggagccctgaccatgccccgggagggctccacagagagtgagagcacacaggaagacctggaggaggaggacgaggaagacgatggggaggaggaggaggattgcatccaggttaaggacgaggagggcgagagtggtgctgaggaggggcccgacttggaggagcctggtgctggatacaaaaaactgttctcagatgcccagccgctgcagcctttgcaggtgtaccaggcgcccctcagcctggccactgtgccccaccaggccctgggccgtacccagtcctcccctgctgcccctgggggcatgaagagccccccagaccagcccgtcaagcacctcttcaccacaggtgtggtctacgacacgttcatgctaaagcaccagtgcatgtgcgggaacacacacgtgcaccctgagcatgctggccggatccagagcatctggtcccggctgcaggagacaggcctgcttagcaagtgcgagcggatccgaggtcgcaaagccacgctagatgagatccagacagtgcactctgaataccacaccctgctctatgggaccagtcccctcaaccggcagaagctagacagcaagaagttgctcggccccatcagccagaagatgtatgctgtgctgccttgtgggggcatcggggtggacagtgacaccgtgtggaatgagatgcactcctccagtgctgtgcgcatggcagtgggctgcctgctggagctggccttcaaggtggctgcaggagagctcaagaatggatttgccatcatccggcccccaggacaccacgccgaggaatccacagccatgggattctgcttcttcaactctgtagccatcaccgcaaaactcctacagcagaagttgaacgtgggcaaggtcctcatcgtggactgggacattcaccatggcaatggcacccagcaggcgttctacaatgacccctctgtgctctacatctctctgcatcgctatgacaacgggaacttctttccaggctctggggctcctgaagaggttggtggaggaccaggcgtggggtacaatgtgaacgtggcatggacaggaggtgtggacccccccattggagacgtggagtaccttacagccttcaggacagtggtgatgcccattgcccacgagttctcacctgatgtggtcctagtctccgccgggtttgatgctgttgaaggacatctgtctcctctgggtggctactctgtcaccgccagatgttttggccacttgaccaggcagctgatgaccctggcagggggccgggtggtgctggccctggagggaggccatgacttgaccgccatctgtgatgcctctgaggcttgtgtctcggctctgctcagtgtagagctgcagcccttggatgaggcagtcttgcagcaaaagcccaacatcaacgcagtggccacgctagagaaagtcatcgagatccagagcaaacactggagctgtgtgcagaagttcgccgctggtctgggccggtccctgcgagaggcccaagcaggtgagaccgaggaggccgagactgtgagcgccatggccttgctgtcggtgggggccgagcaggcccaggctgcggcagcccgggaacacagccccaggccggcagaggagcccatggagcaggagcctgccctgtgacgccccggcccccatccctctgggcttcaccattgtgattttgtttattttttctattaaaaacaaaaagtcacacattcaacaaggtgtgccgtgtgggtctctcagccttgcccctcctgctcctctacgctgcctcaggcccccagccctgtggcttccacctcagctctagaagcctgctccctctgcagggggtggtggtgtcttcccagccctgtcccatgtgtccctccccccattttcctgcattctgtctgtccttttcctccttggagcctgggccagctcaaggtgggcacgggggcccagacagtactctccagttctggggccccccgagtgaggagggaacgggaagtcggtgccttggtttcagctgatttggggggaaatgccttaatttcactctcctcccttctccagcctcaggggaggatctggaggatccactactgtctttaagatgcagagtggaggggaggtgggcacccaccctgcgattctccaccctttccccttctttcgtcctcaccatctctgcagacccctctcctcctccttcctcttggtctcagcactgatgggaggctggtgcccaagctgtggcctgcagtctgtgaggagggctgtcttgcctcacactcctcacagcctacttccccttccccggggctgagagggtgaaagtgtgtggggaaggagaggactggtttcctgggttctcaggggccaggaggagtaacagaaccaggtctgctccccaccttactcggatggcctccctgcccctctgctggcacagcctgggcaaggggagaaggtggtccctgcagaggggctccaggctggtgagagcccccctgctgtcaggaccagattttcccagccatccagcatgctgcggggagaaggggcagaggctcacctccctcctggggccttttgttttggatcctggggatggtgagaatggaggttctagaaggggtaaggccagaacccagggatccaggagtcggctctcagctggagcttccataccttctgggctccctttgctgaccaccagcccaagggagctaagaccaggagggggctgggcgctgtcccttctctttcccaggagccctgccaggggctgtgggcctacaaggcttccaggggatgccatccagcctgtaggaaaccaaagatgggaagtggctcctagggggctgactcttccttcctcctcctccccagtaccacatatactttctctccttctatctccagggccccaccaatctgtttacatatttattatcctatgggggcctgagcaggattgagggagccaggggaggggcaggagtcccagcaccatcggttcatagtgtgcttgtgtgtttgttttagatcctcctgggggatggggatggggccaggctcagtgtactaggcctctctgtgctgagccccaggctcccggccccttacccactctctccctgtggctggtctggttctcatgtaaacccactccttgctttgtctccctggatatggatttcagttaagtattttgtaacccgttacactgtgtgtccttgtgtaaataaacttgtttctggcagtgcc

SEQ ID NO: 274625 - DNA, 3114 bp, Artificial Sequence
  derived and/or modified sequence
atgaacagccccaatgaaagtgatggcatgagcggccgggagcccagcctggagatcctgcccaggaccagcctgcacagcatccctgtgacagtggaggtgaagcctgtgctgccccgggccatgcccagctccatgggcggcggcggcggcggcagccccagccctgtggagctgcggggggccctggtgggctctgtggaccccaccctgcgggagcagcagctgcagcaggagctgctggccctgaagcagcagcagcagctgcagaagcagctgctgtttgctgagttccagaagcagcacgaccacctgacccggcagcacgaggtgcagctgcagaagcacctgaagcagcagcaggagatgctggccgccaagcagcagcaggagatgctggccgccaagaggcagcaggagctggagcagcagaggcagcgggagcagcagaggcaggaggagctggagaagcagaggctggagcagcagctgctgatcctgaggaacaaggagaagagcaaggagagcgccatcgccagcacagaggtgaagctgcggctgcaggagttcctgctgagcaagagcaaggagcccacccctgggggcctgaaccacagcctgccccagcaccccaagtgctggggcgcccaccacgccagcctggaccagagcagccccccccagagcggccccccaggcaccccacccagctacaagctgcccctgcccggcccctatgacagcagagatgacttccccctgaggaagacagccagcgagcccaacctgaaggtgcgcagccggctgaagcagaaggtggccgagcggcgcagcagccccctgctgcggaggaaggatggcaccgtcatcagcaccttcaagaagagagctgtggagatcactggagctggccctggggccagctctgtgtgcaacagcgcccctggcagcggccccagcagccccaacagcagccacagcaccatcgcagaaaatggcttcaccggctctgtgcccaacatccccacagagatgctgccccagcaccgggccctgcccctggacagcagccccaaccagttcagcctgtacaccagccccagcctgcccaacatcagcctgggcctgcaggccaccgtgacagtgaccaacagccacctgacagccagccccaagctgagcacccagcaggaggccgagcggcaggccctgcagagcctgcggcagggcggcaccctgaccgggaagttcatgagcaccagcagcatccctggctgcctgctgggcgtggccctggagggagatggcagcccccacggccacgccagcctgctgcagcacgtgctgctgctggagcaggcccggcagcagagcaccctgattgctgtgcccctgcacggccagagccccctggtgactggagagcgggtggccacctccatgaggacagtgggcaagctgcccaggcaccggcccctgagcaggacccagagcagccccctgccccagagcccccaggccctgcagcagctggtgatgcagcagcagcaccagcagttcctggagaagcagaagcagcagcagctgcagctgggcaagatcctgaccaagacaggagagctgccccggcagcccaccacccaccctgaggagacagaggaggagctgacagagcagcaggaggtgctgctgggggagggcgccctgaccatgccccgggagggcagcacagaaagtgagagcacccaggaggacctggaggaggaggatgaggaggatgatggagaggaggaggaggactgcatccaggtgaaggatgaggagggggagagcggggctgaggagggccctgacctggaggagcccggggccggctacaagaagctgttcagtgatgcccagcccctgcagcccctgcaggtgtaccaggcccccctgagcctggccaccgtgccccaccaggccctgggccgcacccagagcagccctgctgcccctgggggcatgaagagccccccagaccagcctgtgaagcacctgttcaccaccggccccatcagccagaagatgtatgctgtgctgccctgtggcggcattggagtggacagcgacacagtgtggaatgagatgcacagcagcagcgctgtgaggatggctgtgggctgcctgctggagctggccttcaaggtggccgccggggagctgaagaatggatttgccatcatccggcccccaggccaccacgccgaggagagcacagccatgggcttctgcttcttcaacagcgtggccatcacagccaagctgctgcagcagaagctgaatgtgggcaaggtgctgattgtggactgggacatccaccacggcaatggcacccagcaggccttctacaatgaccccagcgtgctgtacatcagcctgcacagatatgacaatggaaacttcttccctggcagcggggcccctgaggaggtgggcggcggccctggggtgggctacaacgtgaatgtggcctggacaggaggagtggacccccccatcggagatgtggagtacctgacagccttcagaacagtggtgatgcccatcgcccacgagttctccccagatgtggtgctggtgtctgctggctttgatgctgtggagggccacctgagccccctgggcggctacagcgtgacagcccgctgcttcggccacctgacccggcagctgatgaccctggccggcggccgggtggtgctggccctggagggcggccatgacctgacagccatctgtgatgccagcgaggcctgtgtgtctgccctgctgtctgtggagctgcagcccctggatgaggccgtgctgcagcagaagcccaacatcaatgctgtggccaccctggagaaggtgattgagatccagagcaagcactggagctgtgtgcagaagtttgctgctggcctgggccgcagcctgcgggaggcccaggccggggagacagaggaggccgagaccgtgtctgccatggccctgctgtctgtgggcgctgagcaggcccaggccgccgccgcccgggagcacagccccaggcctgctgaggagcccatggagcaggagcccgccctgtag

SEQ ID NO: 274626 - DNA, 3369 bp, Artificial Sequence
  derived and/or modified sequence
atgaacagccccaatgaaagtgatggcatgagcggccgggagcccagcctggagatcctgcccaggaccagcctgcacagcatccctgtgacagtggaggtgaagcctgtgctgccccgggccatgcccagctccatgggcggcggcggcggcggcagccccagccctgtggagctgcggggggccctggtgggctctgtggaccccaccctgcgggagcagcagctgcagcaggagctgctggccctgaagcagcagcagcagctgcagaagcagctgctgtttgctgagttccagaagcagcacgaccacctgacccggcagcacgaggtgcagctgcagaagcacctgaagcagcagcaggagatgctggccgccaagcagcagcaggagatgctggccgccaagaggcagcaggagctggagcagcagaggcagcgggagcagcagaggcaggaggagctggagaagcagaggctggagcagcagctgctgatcctgaggaacaaggagaagagcaaggagagcgccatcgccagcacagaggtgaagctgcggctgcaggagttcctgctgagcaagagcaaggagcccacccctgggggcctgaaccacagcctgccccagcaccccaagtgctggggcgcccaccacgccagcctggaccagagcagccccccccagagcggccccccaggcaccccacccagctacaagctgcccctgcccggcccctatgacagcagagatgacttccccctgaggaagacagccagcgagcccaacctgaaggtgcgcagccggctgaagcagaaggtggccgagcggcgcagcagccccctgctgcggaggaaggatggcaccgtcatcagcaccttcaagaagagagctgtggagatcactggagctggccctggggccagctctgtgtgcaacagcgcccctggcagcggccccagcagccccaacagcagccacagcaccatcgcagaaaatggcttcaccggctctgtgcccaacatccccacagagatgctgccccagcaccgggccctgcccctggacagcagccccaaccagttcagcctgtacaccagccccagcctgcccaacatcagcctgggcctgcaggccaccgtgacagtgaccaacagccacctgacagccagccccaagctgagcacccagcaggaggccgagcggcaggccctgcagagcctgcggcagggcggcaccctgaccgggaagttcatgagcaccagcagcatccctggctgcctgctgggcgtggccctggagggagatggcagcccccacggccacgccagcctgctgcagcacgtgctgctgctggagcaggcccggcagcagagcaccctgattgctgtgcccctgcacggccagagccccctggtgactggagagcgggtggccacctccatgaggacagtgggcaagctgcccaggcaccggcccctgagcaggacccagagcagccccctgccccagagcccccaggccctgcagcagctggtgatgcagcagcagcaccagcagttcctggagaagcagaagcagcagcagctgcagctgggcaagatcctgaccaagacaggagagctgccccggcagcccaccacccaccctgaggagacagaggaggagctgacagagcagcaggaggtgctgctgggggagggcgccctgaccatgccccgggagggcagcacagaaagtgagagcacccaggaggacctggaggaggaggatgaggaggatgatggagaggaggaggaggactgcatccaggtgaaggatgaggagggggagagcggggctgaggagggccctgacctggaggagcccggggccggctacaagaagctgttcagtgatgcccagcccctgcagcccctgcaggtgtaccaggcccccctgagcctggccaccgtgccccaccaggccctgggccgcacccagagcagccctgctgcccctgggggcatgaagagccccccagaccagcctgtgaagcacctgttcaccactggagtggtgtatgacaccttcatgctgaagcaccagtgcatgtgtggcaacacccacgtgcaccctgagcacgccggccgcatccagagcatctggagccggctgcaggagaccggcctgctgagcaaatgtgagcgcatccggggcaggaaggccaccctggatgagatccagacagtgcacagcgagtaccacaccctgctgtatggcaccagccccctgaaccggcagaagctggacagcaagaagctgctgggccccatcagccagaagatgtatgctgtgctgccctgtggcggcatcggcgtggacagcgacacagtgtggaatgagatgcacagcagcagcgctgtgaggatggctgtgggctgcctgctggagctggccttcaaggtggccgccggggagctgaagaatggatttgccatcatccggcccccaggccaccacgccgaggagagcacagccatgggcttctgcttcttcaacagcgtggccatcacagccaagctgctgcagcagaagctgaatgtgggcaaggtgctgattgtggactgggacatccaccacggcaatggcacccagcaggccttctacaatgaccccagcgtgctgtacatcagcctgcacagatatgacaatggaaacttcttccctggcagcggggcccctgaggaggtgggcggcggccctggggtgggctacaacgtgaatgtggcctggacaggaggagtggacccccccatcggagatgtggagtacctgacagccttcagaacagtggtgatgcccatcgcccacgagttctccccagatgtggtgctggtgtctgctggctttgatgctgtggagggccacctgagccccctgggcggctacagcgtgacagcccgctgcttcggccacctgacccggcagctgatgaccctggccggcggccgggtggtgctggccctggagggcggccatgacctgacagccatctgtgatgccagcgaggcctgtgtgtctgccctgctgtctgtggagctgcagcccctggatgaagctgtgctgcagcagaagcccaacatcaatgctgtggccaccctggagaaggtgattgagatccagagcaagcactggagctgtgtgcagaagtttgctgctggcctgggccgcagcctgcgggaggcccaggccggggagacagaggaggccgagaccgtgtctgccatggccctgctgtctgtgggcgctgagcaggcccaggccgctgctgcccgggagcacagccccaggcctgctgaggagcccatggagcaggagcccgccctgtag

SEQ ID NO: 274627 - DNA, 3114 bp, Artificial Sequence
  derived and/or modified sequence
atgaacagccccaacgagagcgacggcatgagcggccgggagcccagtctggagatccttcctaggacctcactgcattcaatccctgtgactgtcgaggtcaagcccgtcctgccacgggccatgccaagtagtatgggcgggggggggggtggttcaccatcccccgtggaactgcggggggctctggtgggctccgtggacccaaccctgagagaacagcagcttcaacaggagctgctcgccctgaagcagcagcagcaacttcaaaagcagctgctttttgctgaatttcagaaacagcacgatcacctcacgcggcagcatgaggtgcagctgcaaaaacacttgaagcagcagcaggagatgctcgcggcaaaacagcagcaggagatgctcgccgccaaaagacaacaggagctggagcagcaacgacaacgggagcagcagagacaggaggagttagaaaaacagaggcttgagcaacagttacttatcttgagaaacaaagagaaatcgaaagaatcagccatcgcatctacagaggtgaagctcagactgcaggagttccttctgtccaagtctaaagagccaacccccggcggcctcaaccactctcttccccagcatcctaagtgttggggcgcccaccacgcatccttagatcagagctcgcccccccagtctggcccacctggaacgcctccatcctacaagctgcctctccctgggccatatgattcccgagacgacttccctttgaggaaaacagcctctgaacccaatctgaaggttcgctccagactgaaacagaaggtggcagaacggcgcagctcccccctgctgaggcggaaggacggaacagtgattagcacgtttaagaaaagggccgtcgagattacaggagccggcccgggagcctcatctgtctgcaacagcgcacctgggtcaggcccctcctcacctaacagctcacattctaccattgccgagaatggcttcacaggttctgtcccgaatatacccactgaaatgctgccgcaacaccgtgcccttcccttggacagtagccccaatcaattcagtctgtacacttctccctccctccctaacatctcactgggtctccaggcgacagtaaccgtcacaaactcccacttgaccgcgtcgcctaaactttctacccagcaggaggccgaaagacaggctctccagagtcttcggcagggaggaaccttgacaggcaaatttatgtctacctcatcaatccccggctgtttgctcggtgtggctctggagggtgacggatccccccacggtcacgcaagcctgttgcaacatgtactgctgctggagcaggcccggcaacaatccactctgattgcggtgccgctccacggtcaatcacctcttgtgaccggagagagggttgcgacgtccatgcgcactgttggcaagctgcctagacatcgtccactgagtaggacacaatcatcaccactgccccaatctccccaagcactgcagcagctagtgatgcagcagcagcaccagcagttcttagagaagcagaagcagcagcagcttcagctggggaaaatcttgactaaaacaggcgagctccctcgacagcctactacccacccagaggagacagaggaggaactgaccgaacaacaggaggtattgctcggagaaggcgccctcaccatgccccgcgaagggtctactgaaagcgaatcgacccaagaggacctggaggaagaagacgaagaagacgacggagaagaagaggaagactgcattcaggtgaaggacgaggagggtgaatccggagcggaggagggtccggacctagaagagcctggcgccgggtacaaaaagctcttttccgacgcccagccactgcagccgctccaggtgtatcaggcccctctatccctggcaactgtgccacaccaagccctaggccgaacccagagtagccctgccgcgccgggtggcatgaagtcccctccggatcagcctgtgaaacacctgtttacgactgggcctatttctcagaagatgtatgccgtcctgccctgcggaggtattggtgtcgattctgatacagtgtggaacgagatgcattccagcagtgctgtgaggatggctgtgggttgtctgctagaacttgcctttaaagttgctgccggcgagctcaaaaacggctttgccattatcagacctccagggcatcacgcggaagaaagtaccgcaatgggcttttgtttctttaattccgtcgctataacggccaagctgctgcagcagaagctgaatgtggggaaagtgcttatcgtggattgggatatacatcatggtaacgggactcaacaagccttctataacgatccatccgttctgtacatttccctgcaccgctacgacaatgggaatttcttccctgggtctggggctcccgaagaggtgggcggcggccctggcgtgggctacaacgtgaacgtggcatggacaggcggggtggaccccccaattggcgatgtggaatatctaacagccttcagaaccgttgtgatgccaatcgcacatgaattctctccagacgtcgttctcgtttccgcaggattcgacgccgtggaaggacatttatcacctctggggggctactcagtgaccgcccgctgttttggacatctaaccaggcagctgatgacactcgctggggggcgagtagtgttagctctggaagggggccacgatctgactgctatatgcgatgccagcgaagcgtgtgtatccgcgctcctgagtgttgagctacagcctctggatgaagctgtgttgcaacaaaaaccgaatatcaatgcggtggcaaccctggaaaaagtgattgaaatccaaagtaaacattggagttgcgtacagaagttcgctgccgggctgggccggtctctgagggaagctcaagctggggaaacagaggaagctgagactgtctcagccatggcactcttgtccgtaggcgctgaacaagcccaggccgccgcagccagagaacattccccccggccagccgaagaaccaatggagcaagaacctgcactgtag

SEQ ID NO: 274628 - DNA, 3369 bp, Artificial Sequence
  derived and/or modified sequence
atgaacagccccaacgagagcgacggcatgagcggccgggagccctcattggagattctgcctaggacatctctgcactccattccagtcactgtggaggtgaaacccgtcctgcctcgagctatgccaagcagtatgggcggcggtggaggcggcagccctagccccgtcgagctgagaggagccttggtaggcagcgtagatcccacccttagggaacagcaactgcagcaagagctgctcgctctgaaacaacaacagcaactgcagaaacagcttctttttgccgagtttcagaagcaacatgatcatctgaccagacaacacgaagtacagcttcagaagcacctgaaacagcagcaagagatgctggccgccaagcagcagcaagagatgcttgctgctaagcggcagcaggaattagaacaacagcgccagagagagcagcagcgccaggaagaactggagaagcagaggctggaacaacagctgctcattttgcgcaataaggaaaaaagcaaggagtcagcaattgcctcaacagaagtgaaactccgcctgcaggaattcctactttcaaagtctaaggagcctacccccggtggactaaaccactcactgccacagcaccccaaatgctggggcgcacatcacgccagcctggaccagtcgtcacccccacagagtggcccaccaggcacccccccctcctacaaactacctttacccggcccctacgactcacgtgatgatttcccccttcgaaagactgctagcgagcctaacctcaaagtgcgttcaagactgaaacagaaagtcgcggaaagacggagctcccctttactgaggcggaaagacggaactgtgatttcaacctttaagaagagagcagttgagattactggcgcaggcccgggcgcctcttccgtctgcaacagtgccccaggcagcggaccttcatcccctaatagttctcattcaacaatcgcagagaacggcttcaccggtagcgtccccaatatcccaaccgagatgctcccacagcatagggccctccctctggactcatcacccaaccaattctctctttatacctccccatcgttgccaaatatttctctgggtttgcaggccacagtaacagtgactaattcacacctcacagctagccctaaactcagcacccagcaagaggccgaaaggcaggccttgcagtctctccggcagggcggcactttaactggaaaattcatgtccacctctagcatccccgggtgcttgcttggcgtcgccctggaaggcgatgggagtccccatggtcacgctagtctgctccagcacgtactattgctggagcaggctaggcaacagagcacactcatcgccgtaccacttcacggacagagcccactcgttactggggagcgtgtcgctacaagcatgcggaccgttggcaaattacctcggcataggcctctgagccgtactcaatcgtccccgcttccacagagtccacaggctttgcaacagctggtgatgcaacagcagcaccagcaattcctggaaaagcaaaagcaacaacagctccagctgggcaagattttgaccaaaaccggggaacttccccggcagccaacaacgcacccagaggaaaccgaagaagagcttaccgagcaacaagaagtgttgctaggagaaggagcgctcaccatgcctagagagggatcgacggagagcgagagcactcaagaggacctggaggaagaggacgaggaggacgatggcgaggaggaggaggactgcatccaggtgaaagatgaggagggcgaatcaggcgctgaggagggcccagacttagaagagcccggggcaggttataaaaagctttttagcgatgcccagcctctgcagcctctacaagtgtaccaagctccattgtcactggcgacagtgccccaccaagcactaggacggacacagtccagccctgccgctcctggtggcatgaaatctccacctgaccagcccgtaaagcatctttttaccaccggtgtcgtatatgacaccttcatgctgaagcatcagtgcatgtgcggtaacacccacgtgcacccggagcatgcaggccgcatccagagcatctggagtagactacaggaaacaggtttgctttctaagtgcgagcgaatacgcgggaggaaggcaacgctagacgagatccaaacggtgcactccgaataccacacccttctttatggcacgtccccgcttaataggcagaaactggattccaagaaattactcggtcccatttcacagaaaatgtatgcggtgctgccctgcggagggatcggcgttgatagcgacacagtctggaatgaaatgcattcctccagcgctgtgcgaatggctgttgggtgcttgctagaacttgcttttaaggtggccgcaggtgaactgaagaatgggtttgccattatacggccccctgggcatcacgccgaagagagtacagctatgggattttgttttttcaattcagtagcgattacagcaaaattgttacagcaaaagctgaatgtgggcaaggtattgattgtggactgggatatccaccacggcaatggcactcaacaagccttctacaacgaccccagcgtgctctacataagcctgcatcggtacgacaatggtaatttcttccctgggtccggggcgccggaagaagtcggaggggggcctggagtgggctataacgttaacgtcgcttggacaggaggtgtggatccgcccattggcgacgtcgagtatctcaccgccttcaggaccgtcgtcatgccaattgcccacgaattttcccctgacgtcgtgctggtctcggccggattcgatgctgtggagggacacctgtcacccctaggcggctacagcgtcaccgctcggtgttttgggcatctgacgcggcaactgatgactctcgccgggggacgtgttgtgctcgctctggagggcggacatgacctgacagcaatctgtgacgcctcagaagcatgcgtcagcgccctgctgagcgtagaactacagcctctggacgaggctgtcctgcagcaaaagcctaacatcaacgccgtagccacattagagaaggtgatagagatacagagtaagcactggtcatgtgtgcagaaattcgccgctgggcttggccgaagccttagagaagcccaggctggggagaccgaggaggcagaaaccgtgtccgctatggctctgctaagcgttggcgccgagcaggcccaggcggcggcagccagagaacatagtccaagacctgccgaggagccaatggagcaagagccggctttatag

SEQ ID NO: 274629 - DNA, 3114 bp, Artificial Sequence
  derived and/or modified sequence
atgaacagccccaacgaatccgacggaatgtccggcagagaaccaagtctcgaaatactgccacggacatccctgcatagtatccctgtgacggttgaggtgaagcctgtgctcccgcgagctatgccttcttccatgggtgggggtgggggtggaagtccctcacccgtggagttgagaggagccctggtcgggagcgtggacccaaccttgagggaacaacaattgcagcaggaattgctcgcgctgaaacaacagcagcaattacagaagcagctgctgtttgccgaatttcagaagcagcacgaccatctgacacgccagcacgaagtgcagctacagaagcacctcaagcagcaacaagagatgttagcagctaagcaacagcaagagatgctggcagccaagcgccaacaggagctggaacaacagaggcagagggaacagcagcgtcaagaagagttggaaaaacaacggctcgagcagcaattgctgatcctgaggaacaaagaaaagagtaaggaatccgccatcgctagcactgaagtaaagctgcgactccaggagtttctcctttccaaatccaaagaacctaccccaggcggactgaaccattcgctcccacagcaccccaaatgttggggcgctcatcacgcctcactggatcaaagctctccacctcaaagcgggccaccaggaacgcccccaagttataagctgcctctacccggaccttacgatagccgcgacgacttccctctgaggaaaaccgcatccgagccaaatttaaaagtgcggagtaggctcaagcagaaagtggctgaacgtcgatccagccccctcttgaggaggaaggacgggacagtcatctccaccttcaagaaacgagctgtggagatcactggggcaggaccaggagcttcatcagtgtgcaactcagcccctgggtccggtccctcttctccgaactcctcccactcgaccatcgctgaaaatgggttcacaggatctgtgcctaatattccaaccgaaatgctaccacagcaccgcgctctgcctctggactcttcgcccaatcagttttctctgtacacgagtccctcactgcccaacatcagcctagggctccaggccaccgtgaccgttactaatagtcacctcacagcaagccctaaactgtcgacacagcaagaggcggaaagacaagcgctccagtcacttcgccaagggggtaccctcactggcaagttcatgagcacatcctccatacctgggtgcctgctgggagtggccctagaaggcgacggatcacctcacggccacgcttctctgctgcaacatgtccttctactggagcaagcaagacagcagtctactctgattgccgtccccctgcacggacagtccccgctggtgacgggggagagggtggctacctcaatgaggaccgtgggaaaacttccccgacatcggccactcagcagaactcagagctcccctcttccgcagagccctcaggccctccaacaactggtcatgcagcaacagcaccagcagttcctagaaaaacagaaacagcagcaactacagctgggtaaaatcctcaccaaaactggcgagttgcccagacagcccaccactcaccccgaggagactgaagaagagctgaccgagcaacaggaggtacttttgggagaaggcgcactcacaatgccgcgagagggcagcacagaatccgagtcaacccaggaggatctggaggaagaagacgaggaggacgacggggaagaggaagaggactgtattcaagtgaaggatgaagagggcgaatcaggcgcagaggagggaccagacctggaggagcctggtgcgggttataagaaactgtttagtgacgcacagcctctccagccccttcaggtatatcaggcaccactgtccctggctactgtgcctcaccaggcactcggtcggacacagtcttcccccgcagcgcctggtggcatgaagtcaccaccagatcagcccgtaaaacatctgtttactacgggacccatatctcagaagatgtacgcagtcctcccgtgcgggggtatcggggtggacagtgacactgtgtggaatgagatgcacagctctagtgctgttagaatggcagtgggatgtctgcttgagctggccttcaaggtggcagctggggagctgaagaacggcttcgccattattcggccaccaggccatcacgccgaggaaagcaccgctatgggtttttgcttctttaactctgtcgccatcaccgcgaagctcctccaacagaaactcaatgttggaaaagtcctaattgtggattgggacatccaccatgggaatggcactcagcaggctttttacaacgatccgtccgttctgtatatctccttgcatcgctacgataacggtaacttcttccctggtagtggagcccctgaagaggttggcggaggacctggagtgggttataatgtcaacgttgcctggactggcggtgttgaccctccaatcggcgatgttgagtacctaacggccttcaggacagtggttatgccaatcgcacacgagtttagtcccgatgtcgttctggtctctgcgggttttgatgccgtcgaaggccacctgagccccctcggcggatactccgttaccgcgagatgcttcgggcatttgacacggcagttgatgaccttggcaggcggacgggtggtccttgcccttgagggaggtcatgatctaaccgctatctgcgatgcctcagaagcgtgcgtctcagcactcctgagtgtggaactacagcctttggacgaggcggttctgcagcagaagcccaacatcaatgctgtggccacattggagaaagtgatcgagatccagagcaaacattggagctgcgttcagaaattcgctgctggcttgggtagaagtctaagagaagcccaagcgggtgagaccgaggaggcagaaaccgtgagcgcaatggctcttttgtctgtgggagccgagcaggctcaagcagcagcggcacgagagcactctccgagacccgctgaggagcccatggaacaagagccggctctgtag

SEQ ID NO: 274630 - DNA, 3369 bp, Artificial Sequence
  derived and/or modified sequence
atgaatagccccaacgagtccgacggaatgtcaggcagagaaccaagcctcgagatcttgcctaggacgagtctccacagcatacctgtcaccgtggaagtcaaacctgtcctgccccgtgccatgccatcttccatggggggtgggggagggggttcaccatctccagtagagctgagaggggctctagttgggtccgtagacccgaccctgagggagcaacagttgcagcaagaactgctggcgttaaagcagcaacagcagctacaaaagcaactgttgttcgccgaattccagaaacaacacgatcacctgacgcgacaacacgaagtgcagttgcagaaacacctgaaacagcaacaggagatgctggctgccaagcagcaacaagaaatgttggcggctaagcgccagcaggagcttgagcagcagcggcagagagagcagcagcgccaagaagagctcgagaagcagcggttggagcagcagttattgattctccgaaacaaggaaaagtccaaagaaagtgcaattgccagtactgaagtcaagcttaggttacaggaatttctcttatccaaatccaaagagcctactcctggtgggctgaatcatagcttgccccaacacccaaaatgttggggcgctcatcacgcctctctggatcagagctccccaccccaatctggcccacctggcactccaccatcctacaaacttcccttgccagggccttacgacagtcgggatgacttccctctgcgaaagacagctagtgaacctaatttgaaggtgagatcgagactgaagcagaaagtggccgagcgcaggagttctcccctcctacgaaggaaagacggcacagtgatctcgaccttcaaaaagagagcagtcgagattacaggagccggacctggggcaagttccgtgtgcaactcggcccctggtagtgggccatcaagtccaaatagctcacattccaccatagcggagaacggattcacaggctccgtgcctaatattccaactgagatgcttccacagcacagggcacttcctctcgattcgtccccaaatcagttttccctgtacacttcaccttcccttcctaatattagcctggggttacaggccactgtaacagtaaccaatagccacctgactgcctcccctaagctttccactcagcaggaagcagagcgccaggccctgcaaagtctccgccagggcggaaccctgaccgggaagttcatgagcacgagcagcatacctggatgtttgctcggcgtggcgttggagggtgatggatcaccacacggccatgcctctctcctgcagcacgttctgctactcgaacaggcaagacagcagagcaccctgattgccgtgcctctgcacggacaaagcccgttggtaacaggggagagggtcgccacctcaatgagaacagtcggtaaactccctcgtcaccgccctctgtctaggacccagtcctcaccccttccgcagtcaccacaggcgctgcaacaactggttatgcagcaacaacatcagcagttcctcgaaaagcaaaaacaacagcagctacaactcggcaaaatactgacaaagacgggggaactgccaaggcagcccactacacaccccgaggagactgaagaagagctgacagagcagcaggaggtgctcctgggcgagggtgctcttacgatgccccgtgagggctctaccgagagcgaatccactcaggaagacctcgaggaggaagatgaagaagatgatggggaagaggaagaagactgcattcaagttaaggacgaggaaggagagtctggcgcagaggagggaccagatctcgaagagccaggagctgggtataaaaagctgtttagtgatgcacagcccctgcagccacttcaagtttaccaggcgcctctgtcactcgccacagttcctcatcaggccctgggacgaacccagagctcacccgcagcacctgggggaatgaaaagtcctcccgaccagcctgttaaacatctgtttactacaggcgtggtgtacgacacatttatgttgaagcaccagtgcatgtgcggcaatactcatgtccaccctgagcatgctggccgtattcagtccatttggtctaggctccaggagacaggacttctgtccaaatgcgaaaggatacggggaagaaaagcgacgctggatgagatccaaacagtgcattccgagtatcacaccctgctgtacggcacttcccctctgaaccgtcaaaaactggatagtaagaagctcctcggtccaatctcccagaagatgtatgccgtactgccttgtggaggtatcggggtggattcagacaccgtttggaacgaaatgcatagtagttccgcagttagaatggctgtcggttgccttttggaactggctttcaaagtcgccgcaggagaacttaagaatggattcgccattatccgcccaccagggcaccacgccgaggaatcaaccgcgatgggtttttgcttctttaattcagtggccatcaccgccaagttacttcagcaaaaactcaatgtcggaaaggtcctgatagttgactgggacatacaccatggaaatggcactcagcaggccttttacaacgatccttccgtgctgtatatctcactccatagatacgataatggtaatttttttcccggttcgggagcgcctgaagaagtcggtggtggacctggggttgggtataacgtgaacgtggcctggactggaggagtggacccccctattggggacgttgaatacctaaccgcgttccgaacagtcgtaatgccaatagcgcatgagttcagtccagatgtggttcttgtgtcagctggcttcgatgccgtggagggacacctgtcgcctttgggaggttattctgtaaccgccagatgcttcggacacctcactaggcagttaatgacgttggctggtggacgcgtggttttagcacttgaaggtggacacgacttgaccgccatctgtgacgcttcggaagcgtgcgtctcggccctactgagtgtggagctccaacccttggacgaggccgtgctgcagcaaaaacccaacatcaatgccgtggcgacacttgagaaagtgatagagatccagagcaagcattggagctgcgttcagaagtttgcagccggtcttggacgctctctccgcgaggcccaggctggcgaaacagaagaagccgaaaccgtgagtgctatggccctcctatccgtcggtgctgaacaggcccaagcggcagcagctagggagcacagtccgagaccagccgaggaaccgatggaacaggaacctgcactgtag

SEQ ID NO: 274631 - DNA, 3114 bp, Artificial Sequence
  derived and/or modified sequence
atgaacagccccaacgagagcgacggcatgagcggcagagagcccagcctggagatcctgcccagaaccagcctgcacagcatccccgtgaccgtggaggtgaagcccgtgctgcccagagccatgcccagcagcatgggcggcggcggcggcggcagccccagccccgtggagctgagaggcgccctggtgggcagcgtggaccccaccctgagagagcagcagctgcagcaggagctgctggccctgaagcagcagcagcagctgcagaagcagctgctgttcgccgagttccagaagcagcacgaccacctgaccagacagcacgaggtgcagctgcagaagcacctgaagcagcagcaggagatgctggccgccaagcagcagcaggagatgctggccgccaagagacagcaggagctggagcagcagagacagagagagcagcagagacaggaggagctggagaagcagagactggagcagcagctgctgatcctgagaaacaaggagaagagcaaggagagcgccatcgccagcaccgaggtgaagctgagactgcaggagttcctgctgagcaagagcaaggagcccacccccggcggcctgaaccacagcctgccccagcaccccaagtgctggggcgcccaccacgccagcctggaccagagcagccccccccagagcggcccccccggcaccccccccagctacaagctgcccctgcccggcccctacgacagcagagacgacttccccctgagaaagaccgccagcgagcccaacctgaaggtgagaagcagactgaagcagaaggtggccgagagaagaagcagccccctgctgagaagaaaggacggcaccgtgatcagcaccttcaagaagagagccgtggagatcaccggcgccggccccggcgccagcagcgtgtgcaacagcgcccccggcagcggccccagcagccccaacagcagccacagcaccatcgccgagaacggcttcaccggcagcgtgcccaacatccccaccgagatgctgccccagcacagagccctgcccctggacagcagccccaaccagttcagcctgtacaccagccccagcctgcccaacatcagcctgggcctgcaggccaccgtgaccgtgaccaacagccacctgaccgccagccccaagctgagcacccagcaggaggccgagagacaggccctgcagagcctgagacagggcggcaccctgaccggcaagttcatgagcaccagcagcatccccggctgcctgctgggcgtggccctggagggcgacggcagcccccacggccacgccagcctgctgcagcacgtgctgctgctggagcaggccagacagcagagcaccctgatcgccgtgcccctgcacggccagagccccctggtgaccggcgagagagtggccaccagcatgagaaccgtgggcaagctgcccagacacagacccctgagcagaacccagagcagccccctgccccagagcccccaggccctgcagcagctggtgatgcagcagcagcaccagcagttcctggagaagcagaagcagcagcagctgcagctgggcaagatcctgaccaagaccggcgagctgcccagacagcccaccacccaccccgaggagaccgaggaggagctgaccgagcagcaggaggtgctgctgggcgagggcgccctgaccatgcccagagagggcagcaccgagagcgagagcacccaggaggacctggaggaggaggacgaggaggacgacggcgaggaggaggaggactgcatccaggtgaaggacgaggagggcgagagcggcgccgaggagggccccgacctggaggagcccggcgccggctacaagaagctgttcagcgacgcccagcccctgcagcccctgcaggtgtaccaggcccccctgagcctggccaccgtgccccaccaggccctgggcagaacccagagcagccccgccgcccccggcggcatgaagagcccccccgaccagcccgtgaagcacctgttcaccaccggccccatcagccagaagatgtacgccgtgctgccctgcggcggcatcggcgtggacagcgacaccgtgtggaacgagatgcacagcagcagcgccgtgagaatggccgtgggctgcctgctggagctggccttcaaggtggccgccggcgagctgaagaacggcttcgccatcatcagaccccccggccaccacgccgaggagagcaccgccatgggcttctgcttcttcaacagcgtggccatcaccgccaagctgctgcagcagaagctgaacgtgggcaaggtgctgatcgtggactgggacatccaccacggcaacggcacccagcaggccttctacaacgaccccagcgtgctgtacatcagcctgcacagatacgacaacggcaacttcttccccggcagcggcgcccccgaggaggtgggcggcggccccggcgtgggctacaacgtgaacgtggcctggaccggcggcgtggacccccccatcggcgacgtggagtacctgaccgccttcagaaccgtggtgatgcccatcgcccacgagttcagccccgacgtggtgctggtgagcgccggcttcgacgccgtggagggccacctgagccccctgggcggctacagcgtgaccgccagatgcttcggccacctgaccagacagctgatgaccctggccggcggcagagtggtgctggccctggagggcggccacgacctgaccgccatctgcgacgccagcgaggcctgcgtgagcgccctgctgagcgtggagctgcagcccctggacgaggccgtgctgcagcagaagcccaacatcaacgccgtggccaccctggagaaggtgatcgagatccagagcaagcactggagctgcgtgcagaagttcgccgccggcctgggcagaagcctgagagaggcccaggccggcgagaccgaggaggccgagaccgtgagcgccatggccctgctgagcgtgggcgccgagcaggcccaggccgccgccgccagagagcacagccccagacccgccgaggagcccatggagcaggagcccgccctgtag

SEQ ID NO: 274632 - DNA, 3369 bp, Artificial Sequence
  derived and/or modified sequence
atgaacagccccaacgagagcgacggcatgagcggcagagagcccagcctggagatcctgcccagaaccagcctgcacagcatccccgtgaccgtggaggtgaagcccgtgctgcccagagccatgcccagcagcatgggcggcggcggcggcggcagccccagccccgtggagctgagaggcgccctggtgggcagcgtggaccccaccctgagagagcagcagctgcagcaggagctgctggccctgaagcagcagcagcagctgcagaagcagctgctgttcgccgagttccagaagcagcacgaccacctgaccagacagcacgaggtgcagctgcagaagcacctgaagcagcagcaggagatgctggccgccaagcagcagcaggagatgctggccgccaagagacagcaggagctggagcagcagagacagagagagcagcagagacaggaggagctggagaagcagagactggagcagcagctgctgatcctgagaaacaaggagaagagcaaggagagcgccatcgccagcaccgaggtgaagctgagactgcaggagttcctgctgagcaagagcaaggagcccacccccggcggcctgaaccacagcctgccccagcaccccaagtgctggggcgcccaccacgccagcctggaccagagcagccccccccagagcggcccccccggcaccccccccagctacaagctgcccctgcccggcccctacgacagcagagacgacttccccctgagaaagaccgccagcgagcccaacctgaaggtgagaagcagactgaagcagaaggtggccgagagaagaagcagccccctgctgagaagaaaggacggcaccgtgatcagcaccttcaagaagagagccgtggagatcaccggcgccggccccggcgccagcagcgtgtgcaacagcgcccccggcagcggccccagcagccccaacagcagccacagcaccatcgccgagaacggcttcaccggcagcgtgcccaacatccccaccgagatgctgccccagcacagagccctgcccctggacagcagccccaaccagttcagcctgtacaccagccccagcctgcccaacatcagcctgggcctgcaggccaccgtgaccgtgaccaacagccacctgaccgccagccccaagctgagcacccagcaggaggccgagagacaggccctgcagagcctgagacagggcggcaccctgaccggcaagttcatgagcaccagcagcatccccggctgcctgctgggcgtggccctggagggcgacggcagcccccacggccacgccagcctgctgcagcacgtgctgctgctggagcaggccagacagcagagcaccctgatcgccgtgcccctgcacggccagagccccctggtgaccggcgagagagtggccaccagcatgagaaccgtgggcaagctgcccagacacagacccctgagcagaacccagagcagccccctgccccagagcccccaggccctgcagcagctggtgatgcagcagcagcaccagcagttcctggagaagcagaagcagcagcagctgcagctgggcaagatcctgaccaagaccggcgagctgcccagacagcccaccacccaccccgaggagaccgaggaggagctgaccgagcagcaggaggtgctgctgggcgagggcgccctgaccatgcccagagagggcagcaccgagagcgagagcacccaggaggacctggaggaggaggacgaggaggacgacggcgaggaggaggaggactgcatccaggtgaaggacgaggagggcgagagcggcgccgaggagggccccgacctggaggagcccggcgccggctacaagaagctgttcagcgacgcccagcccctgcagcccctgcaggtgtaccaggcccccctgagcctggccaccgtgccccaccaggccctgggcagaacccagagcagccccgccgcccccggcggcatgaagagcccccccgaccagcccgtgaagcacctgttcaccaccggcgtggtgtacgacaccttcatgctgaagcaccagtgcatgtgcggcaacacccacgtgcaccccgagcacgccggcagaatccagagcatctggagcagactgcaggagaccggcctgctgagcaagtgcgagagaatcagaggcagaaaggccaccctggacgagatccagaccgtgcacagcgagtaccacaccctgctgtacggcaccagccccctgaacagacagaagctggacagcaagaagctgctgggccccatcagccagaagatgtacgccgtgctgccctgcggcggcatcggcgtggacagcgacaccgtgtggaacgagatgcacagcagcagcgccgtgagaatggccgtgggctgcctgctggagctggccttcaaggtggccgccggcgagctgaagaacggcttcgccatcatcagaccccccggccaccacgccgaggagagcaccgccatgggcttctgcttcttcaacagcgtggccatcaccgccaagctgctgcagcagaagctgaacgtgggcaaggtgctgatcgtggactgggacatccaccacggcaacggcacccagcaggccttctacaacgaccccagcgtgctgtacatcagcctgcacagatacgacaacggcaacttcttccccggcagcggcgcccccgaggaggtgggcggcggccccggcgtgggctacaacgtgaacgtggcctggaccggcggcgtggacccccccatcggcgacgtggagtacctgaccgccttcagaaccgtggtgatgcccatcgcccacgagttcagccccgacgtggtgctggtgagcgccggcttcgacgccgtggagggccacctgagccccctgggcggctacagcgtgaccgccagatgcttcggccacctgaccagacagctgatgaccctggccggcggcagagtggtgctggccctggagggcggccacgacctgaccgccatctgcgacgccagcgaggcctgcgtgagcgccctgctgagcgtggagctgcagcccctggacgaggccgtgctgcagcagaagcccaacatcaacgccgtggccaccctggagaaggtgatcgagatccagagcaagcactggagctgcgtgcagaagttcgccgccggcctgggcagaagcctgagagaggcccaggccggcgagaccgaggaggccgagaccgtgagcgccatggccctgctgagcgtgggcgccgagcaggcccaggccgccgccgccagagagcacagccccagacccgccgaggagcccatggagcaggagcccgccctgtag

SEQ ID NO: 274633 - protein, 1435 aa, Artificial Sequence
  derived and/or modified sequence
MSKRRMSVGQQTWALLCKNCLKKWRMKRQTLLEWLFSFLLVLFLYLFFSNLHQVHDTPQMSSMDLGRVDSFNDTNYVIAFAPESKTTQEIMNKVASAPFLKGRTIMGWPDEKSMDELDLNYSIDAVRVIFTDTFSYHLKFSWGHRIPMMKEHRDHSAHCQAVNEKMKCEGSEFWEKGFVAFQAAINAAIIEIATNHSVMEQLMSVTGVHMKILPFVAQGGVATDFFIFFCIISFSTFIYYVSVNVTQERQYITSLMTMMGLRESAFWLSWGLMYAGFILIMATLMALIVKSAQIVVLTGFVMVFTLFLLYGLSLITLAFLMSVLIKKPFLTGLVVFLLIVFWGILGFPALYTRLPAFLEWTLCLLSPFAFTVGMAQLIHLDYDVNSNAHLDSSQNPYLIIATLFMLVFDTLLYLVLTLYFDKILPAEYGHRCSPLFFLKSCFWFQHGRANHVVLENETDSDPTPNDCFEPVSPEFCGKEAIRIKNLKKEYAGKCERVEALKGVVFDIYEGQITALLGHSGAGKTTLLNILSGLSVPTSGSVTVYNHTLSRMADIENISKFTGFCPQSNVQFGFLTVKENLRLFAKIKGILPHEVEKEVQRVVQELEMENIQDILAQNLSGGQNRKLTFGIAILGDPQVLLLDEPTAGLDPLSRHRIWNLLKEGKSDRVILFSTQFIDEADILADRKVFISNGKLKCAGSSLFLKKKWGIGYHLSLHLNERCDPESITSLVKQHISDAKLTAQSEEKLVYILPLERTNKFPELYRDLDRCSNQGIEDYGVSITTLNEVFLKLEGKSTIDESDIGIWGQLQTDGAKDIGSLVELEQVLSSFHETRKTISGVALWRQQVCAIAKVRFLKLKKERKSLWTILLLFGISFIPQLLEHLFYESYQKSYPWELSPNTYFLSPGQQPQDPLTHLLVINKTGSTIDNFLHSLRRQNIAIEVDAFGTRNGTDDPSYNGAIIVSGDEKDHRFSIACNTKRLNCFPVLLDVISNGLLGIFNSSEHIQTDRSTFFEEHMDYEYGYRSNTFFWIPMAASFTPYIAMSSIGDYKKKAHSQLRISGLYPSAYWFGQALVDVSLYFLILLLMQIMDYIFSPEEIIFIIQNLLIQILCSIGYVSSLVFLTYVISFIFRNGRKNSGIWSFFFLIVVIFSIVATDLNEYGFLGLFFGTMLIPPFTLIGSLFIFSEISPDSMDYLGASESEIVYLALLIPYLHFLIFLFILRCLEMNCRKKLMRKDPVFRISPRSNAIFPNPEEPEGEEEDIQMERMRTVNAMAVRDFDETPVIIASCLRKEYAGKKKNCFSKRKKKIATRNVSFCVKKGEVIGLLGHNGAGKSTTIKMITGDTKPTAGQVILKGSGGGEPLGFLGYCPQENALWPNLTVRQHLEVYAAVKGLRKGDAMIAITRLVDALKLQDQLKAPVKTLSEGIKRKAGDSGHL

SEQ ID NO: 274634 - DNA, 4308 bp, Artificial Sequence
  derived and/or modified sequence
atgagcaagagaaggatgtccgttggtcagcagacttgggcactgctctgtaaaaattgtctgaagaagtggcgcatgaaacggcagacacttctggagtggttgtttagcttcttactggtgctatttctgtacctattcttctctaacctgcaccaggttcatgacacaccccagatgtcctcaatggatcttggccgggtggactcgttcaacgacaccaactatgtaatcgcattcgctccagagtccaaaaccacacaggagatcatgaataaggttgcctcggcccccttcctgaaaggcaggaccatcatggggtggcctgatgaaaaaagcatggacgagttggatctgaactactccatcgatgcagtcagggtgatatttaccgataccttcagttaccacctgaagttttcgtgggggcaccgaatacctatgatgaaagagcatcgagaccactcagcccactgccaagcagtgaacgagaagatgaaatgtgaaggcagcgaattctgggagaaaggctttgtggcattccaggccgccatcaacgcagccataatcgagatagctacaaaccactctgtaatggagcagctcatgtctgtcacgggagttcacatgaagatccttccattcgtagcgcagggaggggtagccacagacttcttcatttttttctgcataataagcttctcaactttcatatattacgtgagtgtgaacgtgacacaagagcggcagtacattacgagcctgatgacaatgatggggctgcgggaaagcgctttctggctctcctggggacttatgtacgcgggttttatcctaattatggcaaccttaatggccctcatcgtgaagtccgcacaaattgtagtgctgacagggttcgtgatggtgttcacccttttcctgctgtacggacttagtctcatcactctggctttcctcatgagtgtcttaatcaagaagccttttttgaccgggctggttgtgtttcttctgattgttttttggggcattctgggatttcctgccctctatactcggctgcctgctttcctcgagtggacactctgtctcctgtctccattcgcattcactgtcggcatggcccaattaatccacctggattacgatgtcaattccaacgctcacctggattcgagccagaacccttatctcattatcgctaccctgttcatgttggtcttcgataccttgctgtatctggtgttgacgctctactttgacaagatcttgccagctgaatatggtcatagatgctcgccgttgtttttcctcaagagttgtttttggttccaacacggccgtgctaaccatgtggttttagaaaacgaaaccgactctgaccctactccgaatgactgtttcgaacccgtctccccagagttttgcgggaaagaggcgatccggattaaaaacctaaaaaaggagtatgctggcaaatgcgaacgggttgaagcgttgaagggtgtggtcttcgacatttacgaaggacagataacagccctcctcggacattcaggcgccggcaagactaccctgctgaacatactgtctgggcttagcgtgcccactagcggatctgtcacggtgtacaaccacacactgtctaggatggccgacattgaaaatatcagtaaatttaccggattctgcccccagagtaacgttcagttcggatttctgaccgttaaggagaatcttaggctgtttgcaaaaatcaaggggatcctgcctcatgaagttgagaaagaggttcaaagggtcgttcaggagctggagatggagaacatccaagacattctggcccagaatctctcgggtggacagaacaggaagctgaccttcggaattgccatcttgggtgatccccaggtgctcttgcttgatgaacctacggcaggacttgacccactctctaggcatagaatatggaatcttctcaaggaaggcaaaagcgatcgggtgatcctgtttagtacccagttcatcgatgaagctgacatcctggccgacaggaaagttttcattagcaatgggaagttaaagtgcgcaggctcttcgctgtttttgaagaagaagtggggcatcggatatcacctttccctccacctgaatgaacggtgcgatcccgaatccatcacctccctggtaaaacagcatatcagcgacgctaagctgaccgcccaatcagaagagaagctggtgtatatactgccgctagagaggacaaacaaattccctgagctatatagggacctcgataggtgcagtaaccagggcattgaagactacggtgtctccattaccactcttaacgaggtattcttgaagcttgaaggtaaatctacaatagatgagagtgatatcggaatctgggggcagctgcaaaccgatggtgccaaggacatcggttcactagtggagctggaacaggtgctatccagctttcacgagacgcggaagacaatcagtggtgtggccctgtggcggcagcaagtgtgcgctattgccaaagtgagatttctcaaactaaaaaaggagagaaaaagcctctggactattcttctcctgtttggcatatccttcatccctcaactgctagagcacctcttttatgagtcgtaccagaagtcatacccgtgggagctcagtcccaacacctacttcctcagtcctggacagcagccacaggaccctctcactcacctgttggttattaacaagacggggtctacaattgacaatttcctgcattcactccgaaggcaaaatattgcgatcgaggtcgacgcattcggcacacggaacggaaccgatgatcctagctataacggggctatcatcgtgtccggggacgagaaagaccaccggttcagtattgcttgtaatactaagaggttgaactgttttccagttcttctggacgtcatctctaatgggctactagggatcttcaatagcagcgaacacatacagaccgacagatccactttctttgaggaacatatggactacgaatatggttatcgatctaacaccttcttctggattcccatggccgcatcttttaccccctatattgccatgtcctctatcggagattataaaaagaaggcccactcccaactgagaatctccggactctatcctagtgcttattggttcggtcaggcgcttgttgatgtgtccttatattttcttattctgttattgatgcagatcatggactatatcttcagtccggaggaaattatattcatcatccagaaccttcttatccagatcctgtgtagtattggctacgtgagttcacttgtgttcctgacatacgtgatctcgtttatatttcgcaatggaagaaagaacagcggcatttggagcttcttctttctaatagtggtaattttcagcatcgtggccacagacttgaatgagtacggcttccttggcttgttcttcggaacaatgttgatccctccatttaccttaattggatcactgtttatttttagtgaaatatcacctgactccatggactatctgggcgccagcgagagtgagatcgtctacttggccttgcttatcccttacctgcactttttgatcttcctctttattctgcgttgcttggaaatgaactgtagaaagaagctcatgaggaaggacccagtttttcgcatctcaccacgctcaaacgccatcttccctaatcccgaagagcctgaaggagaggaggaggacatccaaatggaacgcatgcggactgttaatgctatggccgtgcgggacttcgatgaaacaccagtaataattgcaagctgtctgcggaaagaatacgccggcaagaagaaaaattgttttagcaaacggaaaaaaaagatcgccacaagaaatgtatccttttgcgtaaaaaaaggggaagttataggtctattgggccacaacggggccgggaaaagcaccacaatcaaaatgatcacgggggacacaaagccgaccgccggccaggtcattctcaagggctccggtggcggagaacctcttggatttctgggatactgtccccaggagaatgctctatggccgaatctcacagtccggcagcacctggaggtatatgccgcggtcaagggcctgcgtaaaggtgatgcaatgatcgccattacacgccttgtagacgctctaaagctgcaggatcaattgaaggcaccagtgaagaccttatccgaagggatcaaaagaaaagccggtgatagcggccatctgtag

SEQ ID NO: 274635 - DNA, 4308 bp, Artificial Sequence
  derived and/or modified sequence
atgagcaagaggaggatgtctgtgggccagcagacctgggccctgctgtgcaagaactgcctgaagaagtggaggatgaagaggcagaccctgctggagtggctgttctccttcctgctggtgctcttcctgtacctgttcttcagcaacctgcaccaggtgcatgacaccccccagatgagctccatggacctgggccgggtggacagcttcaatgacaccaactacgtgattgcctttgcccctgagagcaagaccacccaggagatcatgaacaaggtggccagcgcccccttcctgaagggccgcaccatcatgggctggccagatgagaagtccatggatgagctggacctgaactacagcattgatgctgtgcgggtcatcttcacagacaccttctcctaccacctgaagttctcctggggccaccgcatccccatgatgaaggagcaccgggaccacagcgcccactgccaggccgtgaatgagaagatgaagtgtgagggcagcgagttctgggagaagggctttgtggccttccaggccgccatcaatgctgccatcatcgagatcgccaccaaccacagcgtgatggagcagctgatgtctgtgactggagtgcacatgaagatcctgccctttgtggcccagggcggcgtggccacagacttcttcatcttcttctgcatcatctccttcagcaccttcatctactacgtgtctgtgaatgtgacccaggagcggcagtacatcaccagcctgatgaccatgatgggcctgcgggagagcgccttctggctgtcctggggcctgatgtatgccggcttcatcctgatcatggccaccctgatggccctgattgtgaagagcgcccagatcgtggtgctgaccggctttgtgatggtgttcaccctcttcctgctgtatggcctgagcctcatcaccctggccttcctgatgtctgtgctgatcaagaagcccttcctgaccggcctggtggtgttcctgctgattgtgttctggggcatcctgggcttccctgccctgtacacccggctgcctgccttcctggagtggaccctgtgcctgctgagcccctttgccttcaccgtgggcatggcccagctgatccacctggactatgatgtgaacagcaatgcccacctggacagcagccagaacccctacctgatcatcgccaccctcttcatgctggtgtttgacaccctgctgtacctggtgctgaccctgtactttgacaagatcctgcctgcagaatatggccaccgctgcagccccctcttcttcctgaagagctgcttctggttccagcacggccgggccaaccacgtggtgctggagaatgaaacagacagcgaccccaccccaaatgactgctttgagcctgtgtccccagagttctgtgggaaggaggccatccgcatcaagaacctgaagaaggagtatgctggaaaatgtgagcgggtggaggccctgaagggcgtggtgtttgacatctatgagggccagatcacagccctgctgggccacagcggggccggcaagaccaccctgctgaacatcctgagcggcctgtctgtgcccaccagcggctctgtgacagtgtacaaccacaccctgagcaggatggctgacatcgagaacatcagcaagttcaccggcttctgcccccagagcaatgtgcagtttggcttcctgactgtgaaggagaacctgcggctgtttgccaagatcaagggcatcctgccccatgaggtggagaaggaggtgcagagggtggtgcaggagctggagatggagaacatccaggacatcctggcccagaacctgagcggcggccagaacaggaagctgaccttcggcatcgccatcctgggggacccccaggtgctgctgctggatgagcccacagctggcctggaccccctgagccgccaccgcatctggaacctgctgaaggagggcaagagtgacagagtcatcctcttcagcacccagttcattgatgaagctgacatcctggccgacaggaaggtgttcatcagcaatggcaagctgaagtgtgccggcagcagcctcttcctgaagaagaagtggggcatcggctaccacctgagcctgcacctgaatgaaagatgtgaccctgagagcatcaccagcctggtgaagcagcacatcagtgatgccaagctgacagcccagagcgaggagaagctggtgtacatcctgcccctggagaggaccaacaagtttcctgagctgtacagagacctggaccgctgcagcaaccagggcattgaagattatggagtgtccatcaccaccctgaatgaggtgttcctgaagctggagggcaagagcaccattgatgaaagtgacatcggcatctggggccagctgcagacagatggagccaaggacatcggcagcctggtggagctggagcaggtgctgagcagcttccacgagaccaggaagaccatctctggagtggccctgtggaggcagcaggtgtgtgccatcgccaaggtgcgcttcctgaagctgaagaaggagaggaagagcctgtggaccatcctgctgctgtttggcatctccttcatcccccagctgctggagcacctgttctatgagagctaccagaagagctacccctgggagctgagccccaacacctacttcctgagccctggccagcagccccaggaccccctgacccacctgctggtgatcaacaagacaggcagcaccatcgacaacttcctgcacagcctgcggcggcagaacatcgccatcgaggtggatgccttcggcaccagaaatggaacagatgaccccagctacaatggagccatcatcgtgtctggagatgagaaggaccaccgcttcagcatcgcctgcaacaccaagaggctgaactgcttccctgtgctgctggatgtgatcagcaatggcctgctgggcatcttcaacagcagcgagcacatccagacagacaggagcaccttctttgaggagcacatggactatgaatatggctaccgcagcaacaccttcttctggatccccatggccgccagcttcaccccctacatcgccatgagcagcattggagactacaagaagaaggcccacagccagctgcgcatcagcggcctgtaccccagcgcctactggtttggccaggccctggtggatgtgtccctgtacttcctgatcctgctgctgatgcagatcatggactacatcttcagccctgaggagatcatcttcatcatccagaacctgctgatccagatcctgtgcagcatcggctacgtgagcagcctggtgttcctgacctacgtgatctccttcatcttcagaaatggaaggaagaacagcggcatctggagcttcttcttcctgattgtggtgatcttcagcatcgtggccacagacctgaatgaatatggcttcctgggcctcttcttcggcaccatgctgatcccccccttcaccctgattggcagcctcttcatcttcagcgagatcagcccagacagcatggactacctgggcgccagcgagagcgagatcgtgtacctggccctgctgatcccctacctgcacttcctgatcttcctgttcatcctgcgctgcctggagatgaactgcaggaagaagctgatgaggaaggaccccgtcttccgcatcagccccaggagcaatgccatcttccccaaccctgaggagcctgagggggaggaggaggacatccagatggagaggatgaggacagtgaatgccatggctgtgcgggactttgatgagacccctgtgatcatcgccagctgcctgaggaaggagtatgccggcaagaagaagaactgcttcagcaagaggaagaagaagatcgccaccagaaatgtgtccttctgtgtgaagaagggggaggtgattggcctgctgggccacaacggggccggcaagagcaccaccatcaagatgatcaccggggacaccaagcccacagctggccaggtgatcctgaagggcagcggcggcggggagcccctgggcttcctgggctactgcccccaggagaatgccctgtggcccaacctgactgtgcggcagcacctggaggtgtatgctgctgtgaagggcctgaggaaaggagatgccatgattgccatcacccggctggtggatgccctgaagctgcaggaccagctgaaggcccctgtgaagaccctgtctgagggcatcaagaggaaggccggggacagcggccacctgtag

SEQ ID NO: 274636 - DNA, 4308 bp, Artificial Sequence
  derived and/or modified sequence
atgagcaagcggcggatgagcgtgggccagcagacctgggccctgctctgcaaaaactgtttaaagaaatggcggatgaaacgacaaaccttactggagtggctctttagcttccttctggtgcttttcctctatctcttttttagcaaccttcatcaggtgcatgacaccccccagatgtcaagcatggacctaggcagggtggacagtttcaatgatactaattacgtgattgcttttgcccctgagtcgaagacaacacaagagatcatgaataaagtggcgtccgccccgttcttaaaaggcaggaccattatgggctggcccgacgagaaaagtatggatgagcttgacctgaactacagcatcgacgccgtaagagtcatctttacagacaccttttcttatcacctgaagttttcttgggggcaccgcattccgatgatgaaagagcatagagaccattcagcccactgccaggctgtgaatgagaagatgaagtgcgagggatcagaattctgggagaaaggctttgtcgcattccaggccgccattaacgctgcaatcatagagatagccaccaaccactcagtaatggaacagctgatgagtgttaccggcgtgcatatgaagattttgccctttgtggctcagggcggagttgcaactgatttcttcatcttcttctgtattatctctttctccacttttatttactacgtctcagttaatgtgacacaagaacggcagtatattaccagtctgatgaccatgatggggctgcgggagtctgcattttggctctcatggggactgatgtatgccggctttatcctcataatggctacattgatggccttgattgtgaaatccgcgcaaatcgtcgtcttgacaggcttcgtgatggtttttacattgttcctgttgtatgggctatccttaatcactctggcttttctcatgtccgtactgattaagaagcctttcttgaccgggttggtagtattcctgctaatcgttttttggggtatcctgggttttcctgccctgtacacaagactgcctgcctttttggagtggacactgtgtctgctatcaccctttgcgttcaccgtcggaatggctcaattgattcatctggattatgatgtcaattcaaacgcacatctggactcgtcacagaacccatatcttatcatcgcaactttgttcatgttggtgtttgacacattactctatctagtgttaacactctattttgacaagattctaccagctgaatacggccatcgatgttctccactcttctttcttaagagctgtttctggttccagcacggcagggctaatcatgtggttcttgaaaacgaaaccgactcggaccccacacccaacgactgcttcgaacctgtctcacctgaattctgcggtaaagaggcaatccggataaagaatctgaaaaaggagtacgccgggaaatgcgagcgcgtggaggcactcaaaggggtggtgttcgacatttacgagggtcagatcaccgctttgctaggacatagcggcgccgggaagactaccctactaaatatcctctcaggtctgagcgtgcccacctctgggagcgttactgtatataaccacactctgtcaaggatggcagatattgaaaacatctcaaaattcaccggattttgcccacagtccaatgtccagtttggattcttgaccgtcaaggaaaaccttcgtctcttcgccaagatcaagggaattctgcctcacgaagtcgagaaagaagtacagagagtcgtgcaggagttggagatggagaacatccaggatattctcgcgcagaatttaagtggtggacagaatcgcaaactcacgtttggcattgccatcctcggggatccccaggtgttgctgttggacgagccaactgctggccttgacccgctgtcccgccatcggatatggaacctgttaaaggaaggtaagtcagacagggtcattctattctcgactcagtttatcgacgaagctgacatcctagcagacaggaaagtcttcatcagtaacggcaagctgaaatgtgccggaagctccctgtttctgaagaagaaatggggcatcgggtaccatctttcactgcacctcaacgaacgatgtgaccccgaatctatcactagcctcgttaaacagcacatctcagacgcaaagctcactgcccagtctgaggaaaagctcgtatacattcttccccttgagagaaccaacaagttccctgaactctatagggatctggaccgatgctccaatcaaggcattgaggactatggagtctccatcaccactctgaatgaagtattcctgaaattggagggaaaaagtacaattgacgagtccgatattggaatttggggtcagctacagacagatggggcaaaggacattggaagcctggtggagttagagcaggttttaagctcattccacgaaacccggaagactatcagcggcgtggcattatggaggcagcaggtttgtgccattgctaaagtgagatttctgaagctcaaaaaggagagaaagagcctgtggacgatcctgctactctttggcataagcttcatcccacagctactcgagcatctcttctatgaatcatatcaaaaatcatatccatgggagctcagccccaacacatacttcctcagtcccggacaacaaccccaagaccccttaacgcacctgctagttatcaataagaccggaagtacaatagacaattttctccacagtttgcgcaggcagaatatcgcaatcgaggtcgatgcatttgggactcgcaacggcaccgatgacccttcttacaatggagccatcattgtttctggagatgagaaggatcaccgctttagcatagcatgtaatacgaagaggttgaattgttttcctgttctgttagacgtcattagcaacggcctgctgggaatttttaattcctccgaacacatccaaaccgacagatccacatttttcgaggagcatatggactatgaatatgggtatagatcgaatacattcttttggattccaatggcagcttcttttaccccatatattgccatgtcctcaattggcgattataaaaaaaaggcacactctcagctgcgcatttctggactctatccaagcgcatactggttcggtcaggccttagtggacgtttctctatactttctgatcttactgcttatgcaaattatggactatatattcagtcctgaggagattattttcattatccaaaacttgctgatacagattctgtgctccattggttacgttagctctctagttttcttgacatatgtcatctcctttatcttcaggaacggaagaaagaatagcggcatatggtcctttttcttccttatagtggtgatcttttctattgttgcgacagatttaaacgagtatggctttctcggcctgttctttgggactatgctaatccccccctttaccctgatcggcagtttatttattttcagcgagatatcccccgactcgatggactatctgggcgcctcggaaagcgagattgtgtatctggctctgctgatcccctacctgcactttctgatattcctcttcatactcagatgtctcgagatgaactgtcgcaaaaagctaatgagaaaggatcctgtgttcagaatcagccctagatccaacgccatttttcctaaccctgaggagcctgagggcgaagaagaagatatccagatggagcggatgcggaccgttaatgccatggcggtccgggattttgatgaaacgcccgtcatcattgcctcttgcctaaggaaagagtacgctggtaaaaagaaaaattgcttctcaaaacggaagaaaaagattgctaccaggaatgtatcattttgcgtgaaaaagggcgaagtcattggtctcctcgggcataacggcgcaggcaagagcaccacaatcaaaatgatcacgggagacacaaaacccactgccggacaagtgatccttaaggggtccggaggaggtgaacccctgggattccttggctattgcccacaagaaaacgcgctctggccaaatctgactgtgcgccagcacttggaagtgtatgcggccgtaaaaggtttaaggaagggtgacgcaatgatcgctatcacacgcctcgtcgatgccctaaagctacaggaccagctgaaggccccggtgaaaacactgtctgaaggcattaagaggaaagccggtgacagcgggcatttgtag

SEQ ID NO: 274637 - DNA, 4308 bp, Artificial Sequence
  derived and/or modified sequence
atgtctaaaagacgtatgtcagtgggccagcagacgtgggccttgttgtgtaagaattgccttaagaagtggcgcatgaagagacagaccttgctcgagtggctgtttagcttcctccttgtgctttttctgtatctttttttttcaaatttacaccaagttcacgacacaccccaaatgtcatcgatggatctcgggagagtggacagttttaatgacaccaattatgtgatcgcatttgctcccgagagcaagactactcaggagataatgaacaaggtggcctccgccccatttttaaaaggtaggactatcatgggatggcctgacgagaagtccatggacgagcttgatctcaattacagcatcgatgcagtgagagtaattttcactgacaccttttcttaccacttgaagttctcctggggccatcgcatccctatgatgaaagaacaccgggatcattccgctcattgccaagccgtcaacgaaaaaatgaaatgcgaaggatctgagttctgggaaaagggatttgttgcattccaggctgcaatcaatgcagccattatcgaaatcgctactaatcatagcgtcatggagcagttgatgagcgtgaccggggttcatatgaaaatcctacctttcgtggcccaaggtggagttgccaccgatttttttatttttttctgtatcatctctttctctacattcatctattatgtgtcagtgaacgtcactcaagagagacagtacatcaccagcctgatgaccatgatgggcctgagagagtcagctttctggctatcctggggcctgatgtacgctggattcattctgattatggccacgcttatggcacttattgtgaaaagtgcacaaattgttgtcctaactgggtttgttatggtcttcaccctgttcctactttacggtctgagcctgatcaccctcgcttttcttatgtcagtgctaattaagaagccatttttaacaggcctcgtggtctttcttctaattgtattctggggaatcctgggcttccctgcgctatacactcgattgcctgcatttctggaatggaccctgtgcctcctttctcccttcgcgtttaccgtggggatggctcagctaattcacctggattacgatgtgaattccaacgcccatctcgatagtagtcagaacccgtacttgattatagcaactctcttcatgctagttttcgacacgctgttgtatctggtcttgacgttgtatttcgacaaaattctgccggctgagtatggccaccggtgtagccctctattctttctgaaaagttgcttctggtttcagcacggccgtgctaatcatgtggtcctggaaaacgagactgacagtgaccccactcccaacgattgctttgaacccgtttctccagaattctgtggaaaagaggccatcaggataaaaaacctcaagaaagagtacgcgggaaagtgcgaacgggttgaagctctgaaaggagttgtctttgatatttacgaaggccaaattactgcgctactagggcactctggcgctggcaaaaccaccttattgaacatcctttcaggcctgtcagtaccaacaagcggatccgttacggtgtacaaccacaccctgtcacgcatggctgacatcgaaaacatttcgaaattcaccggcttttgtcctcaaagcaatgtgcagttcggctttttgactgtcaaagagaacttgcgcctgtttgcaaaaatcaaaggcatccttccccacgaggttgagaaagaggtacaaagagttgtgcaggagctcgaaatggaaaatatccaagatatcctggcccagaatttaagtggaggtcaaaacaggaaactgacattcggcattgccattcttggagatccacaggtgctccttctggacgagcccacagcgggactcgaccccttatcccgccacagaatctggaaccttctcaaggaggggaagtctgatcgggtgattctcttttcgacccaattcattgatgaggcagatatccttgccgatagaaaagtgttcatcagcaacgggaaactgaaatgtgctggatcatcactgtttctgaaaaaaaagtggggcatcggttaccaccttagccttcacctcaacgaaaggtgtgatcctgaaagcattacctctttggtgaaacaacatatcagcgacgccaaacttacggcccaatcagaagagaagttggtgtatatcctgccattggaaaggaccaacaagtttcctgaactgtatcgcgatcttgatcggtgtagcaatcagggcattgaagattacggcgtctctattactactctgaacgaggtctttttgaagctcgaagggaagtccacgattgacgagtcagacatcggcatctgggggcagcttcagacagatggtgcaaaggacatcggctcccttgtcgagctggagcaggtgctgtcatcctttcatgaaacacggaaaacgattagcggtgtggccctctggaggcagcaggtttgcgccattgctaaagttcggtttctcaaactgaagaaggaaagaaagtcactgtggacaatcttattgctgttcggcatttccttcattccccagctgctggagcatctgttctacgagtcataccaaaaatcctacccctgggagctctccccgaatacatattttctcagtcccggacagcagccccaagacccccttactcatctcctggtcattaataagaccggctccacaattgacaatttcctccactctctgcgacgtcagaatatagccatagaggtggacgcatttggaactaggaatggaacagatgatccctcctacaatggtgctataatagtttccggagacgagaaggatcatagattctcaatcgcgtgcaacacaaagcgcctgaattgcttccctgtcctgctggacgtgatatcgaatggattgttgggtatattcaactctagtgagcatatacagacagacagatcaacctttttcgaagagcacatggattatgaatacggatatcggagtaacacattcttttggatcccaatggccgcaagcttcacaccctacattgccatgtcttctattggtgactataaaaagaaggcccactcccaactaaggatcagcgggctatacccctcggcttactggtttggacaggcactcgtggatgttagcctgtatttccttatccttttactgatgcagatcatggactatatattttcacctgaggaaattatttttatcatccagaatctgttaatccagattttatgtagcatcggttacgtatcatctctggtgttcctgacctacgttatctcatttattttcagaaacggaagaaagaactctggcatttggtcatttttctttctcatagtggtgatcttttccatagttgcaactgatctcaatgagtatgggtttttaggcctgttctttggcactatgctaatccctccctttaccctaattggttctctctttattttctctgaaatctccccagatagcatggattatctgggggcatctgagagtgagatcgtttatttggctctactgataccatatctccatttcctgatatttttgtttatcctgagatgccttgaaatgaactgtaggaaaaagctcatgcgcaaggatcccgtgtttcggatatctcctcggtcaaacgccatttttccaaacccagaggaaccggagggagaggaagaagatattcagatggaaagaatgagaacagtgaacgcgatggccgttcgagactttgatgaaacccccgttattatcgcttcctgcctgcggaaagaatatgcaggcaaaaaaaaaaattgcttcagcaaacgcaagaaaaaaattgctacacggaacgtgtccttttgtgtgaaaaagggcgaggtaatcggactcctcggccacaacggggcaggcaaaagcaccactatcaaaatgataaccggagacacaaagccgacagctggccaggtgatccttaagggctccggcggaggagagcctcttggcttcctcggatactgtcctcaagagaatgctttgtggcctaacctcacagtgcggcagcatctagaggtgtacgctgccgtgaagggcctgcgcaagggcgacgccatgatagcaattacccgccttgtggatgccttgaagttgcaagaccagctgaaggctcctgtaaagacactttccgaaggaatcaaacggaaggctggggacagtggacacctatag

SEQ ID NO: 274638 - DNA, 6205 bp, Artificial Sequence
  derived and/or modified sequence
attcacaatgaatgtgaaattaaaagcatgatgtagtagtgacccaaaaggaatgtgaattctcctccagaacatgcagagacccatggatgaactgtgtttctagatttttcctccagctttcctgagagaaacaggtcaaaatgagcaagagacgcatgagcgtgggtcagcaaacatgggctcttctctgcaagaactgtctcaaaaaatggagaatgaaaagacagaccttgttggaatggctcttttcatttcttctggtactgtttctgtacctatttttctccaatttacatcaagttcatgacactcctcaaatgtcttcaatggatctgggacgtgtagatagttttaatgatactaattatgttattgcatttgcacctgaatccaaaactacccaagagataatgaacaaagtggcttcagccccattcctaaaaggaagaacaatcatggggtggcctgatgaaaaaagcatggatgaattggatttgaactattcaatagacgcagtgagagtcatctttactgataccttctcctaccatttgaagttttcttggggacatagaatccccatgatgaaagagcacagagaccattcagctcactgtcaagcagtgaatgaaaaaatgaagtgtgaaggttcagagttctgggagaaaggctttgtagcttttcaagctgccattaatgctgctatcatagaaatcgcaacaaatcattcagtgatggaacagctgatgtcagttactggtgtacatatgaagatattaccttttgttgcccaaggaggagttgcaactgattttttcattttcttttgcattatttctttttctacatttatatactatgtatcagtcaatgttacacaagaaagacaatacattacgtcattgatgacaatgatgggactccgagagtcagcattctggctttcctggggtttgatgtatgctggcttcatccttatcatggccactttaatggctcttattgtaaaatctgcacaaattgtcgtcctgactggttttgtgatggtcttcaccctctttctcctctatggcctgtctttgataactttagctttcctgatgagtgtgttgataaagaaacctttccttacgggcttggttgtgtttctccttattgtcttttgggggatcctgggattcccagcattgtatacacgtcttcctgcatttttggaatggactttgtgtcttcttagcccctttgccttcactgttgggatggcccagcttatacatttggactatgatgtgaattctaatgcccacttggattcttcacaaaatccatacctcataatagctactcttttcatgttggtttttgacacccttctgtatttggtattgacattatattttgacaaaattttgcccgctgaatatggacatcgatgttctcccttgtttttcctgaaatcctgtttttggtttcaacacggaagggctaatcatgtggtccttgagaatgaaacagattctgatcctacacctaatgactgttttgaaccagtgtctccagaattctgtgggaaagaagccatcagaatcaaaaatcttaaaaaagaatatgcagggaagtgtgagagagtagaagctttgaaaggtgtggtgtttgacatatatgaaggccagatcactgccctccttggtcacagtggagctggaaaaactaccctgttaaacatacttagtgggttgtcagttccaacatcaggttcagtcactgtctataatcacacactttcaagaatggctgatatagaaaatatcagcaagttcactggattttgtccacaatccaatgtgcaatttggatttctcactgtgaaagaaaacctcaggctgtttgctaaaataaaagggattttgccacatgaagtggagaaagaggtacaacgagttgtacaggaattagaaatggaaaatattcaagacatccttgctcaaaacttaagtggtggacaaaataggaaactaacttttgggattgccattttaggagatcctcaagttttgctattggatgaaccgactgctggattggatcctctttcaaggcaccgaatatggaatctcctgaaagaggggaaatcagacagagtaattctcttcagcacccagtttatagatgaggctgacattctggcggacaggaaggtgttcatatccaatgggaagctgaagtgtgcaggctcttctctgttccttaagaagaaatggggcataggctaccatttaagtttgcatctgaatgaaaggtgtgatccagagagtataacatcactggttaagcagcacatctctgatgccaaattgacagcacaaagtgaagaaaaacttgtatatattttgcctttggaaaggacaaacaaatttccagaactttacagggatcttgatagatgttctaaccaaggcattgaggattatggtgtttccataacaactttgaatgaggtgtttctgaaattagaaggaaaatcaactattgatgaatcagatattggaatttggggacaattacaaactgatggggcaaaagatataggaagccttgttgagctggaacaagttttgtcttccttccacgaaacaaggaaaacaatcagtggcgtggcgctctggaggcagcaggtctgtgcaatagcaaaagttcgcttcctaaagttaaagaaagaaagaaaaagcctgtggactatattattgctttttggtattagctttatccctcaacttttggaacatctattctacgagtcatatcagaaaagttacccgtgggaactgtctccaaatacatacttcctctcaccaggacaacaaccacaggatcctctgacccatttactggtcatcaataagacagggtcaaccattgataactttttacattcactgaggcgacagaacatagctatagaagtggatgcctttggaactagaaatggcacagatgacccatcttacaatggtgctatcattgtgtcaggtgatgaaaaggatcacagattttcaatagcatgtaatacaaaacggctgaattgctttcctgtcctcctggatgtcattagcaatggactacttggaatttttaattcgtcagaacacattcagactgacagaagcacattttttgaagagcatatggattatgagtatgggtaccgaagtaacaccttcttctggataccgatggcagcctctttcactccatacattgcaatgagcagcattggtgactacaaaaaaaaagctcattcccagctacggatttcaggcctctacccttctgcatactggtttggccaagcactggtggatgtttccctgtactttttgatcctcctgctaatgcaaataatggattatatttttagcccagaggagattatatttataattcaaaacctgttaattcaaatcctgtgtagtattggctatgtctcatctcttgttttcttgacatatgtgatttcattcatttttcgcaatgggagaaaaaatagtggcatttggtcatttttcttcttaattgtggtcatcttctcgatagttgctactgatctaaatgaatatggatttctagggctattttttggcaccatgttaatacctcccttcacattgattggctctctattcattttttctgagatttctcctgattccatggattacttaggagcttcagaatctgaaattgtatacctggcactgctaataccttaccttcattttctcatttttcttttcattctgcgatgcctagaaatgaactgcaggaagaaactaatgagaaaggatcctgtgttcagaatttctccaagaagcaacgctatttttccaaacccagaagagcctgaaggagaggaggaagatatccagatggaaagaatgagaacagtgaatgctatggctgtgcgagactttgatgagacacccgtcatcattgccagctgtctacggaaggaatatgcaggcaaaaagaaaaattgcttttctaaaaggaagaaaaaaattgccacaagaaatgtctctttttgtgttaaaaaaggtgaagttataggactgttaggacacaatggagctggtaaaagtacaactattaagatgataactggagacacaaaaccaactgcaggacaggtgattttgaaagggagcggtggaggggaacccctgggcttcctggggtactgccctcaggagaatgcgctgtggcccaacctgacagtgaggcagcacctggaggtgtacgctgccgtgaaaggtctcaggaaaggggacgcaatgatcgccatcacacggttagtggatgcgctcaagctgcaggaccagctgaaggctcccgtgaagaccttgtcagagggaataaagcgaaaggcaggtgattcgggccacctttagaaacacggagaggggcgccctcctgaccacccactacatggcagaggctgaggcggtgtgtgaccgagtggccatcatggtgtcaggaaggctgagatgtattggttccatccaacacctgaaaagcaaatttggcaaagactacctgctggagatgaagctgaagaacctggcacaaatggagcccctccatgcagagatcctgaggcttttcccccaggctgctcagcaggaaaggttctcctccctgatggtctataagttgcctgttgaggatgtgcgacctttatcacaggctttcttcaaattagagatagttaaacagagtttcgacctggaggagtacagcctctcacagtctaccctggagcaggttttcctggagctctccaaggagcaggagctgggtgatcttgaagaggactttgatccctcggtgaagtggaaactcctcctgcaggaagagccttaaagctccaaataccctatatctttctttaatcctgtgactcttttaaagataatattttatagccttaatatgccttatatcagaggtggtacaaaatgcatttgaaactcatgcaataattatcctcagtagtatttcttacagtgagacaacaggcgatgtcagtgagggcgatcatagggcataagcctaagccataccatgcagcctttgtgccagcaaccaaatcccatgtttcctactgtgttaagtttaaaaatgcatttattatagaattgtctacatttctgaggatgtcatggagaatgcttaattttctttctctgaacttcaaaatattaaatattttcttatttatttttttgattaaagtataaattaagacaccctattgacttccgggtaaggggagtcaattgattacccagcagcacagtatttgctttttataattccctttttaaatacttgttcttaattcactggttttccttttctgtcatttttcagagtttagattgtgagtccatgttttgtctgttgtgcctataaaggaaatttgaaatctgtatcattctactataaagacacatgcacacgtatgtttattgcagcactgtttacaatagcaaagacttggaaccaaccaaaatacccacaaatgatagaccggataaagaaaacgtgacacatatacaccatggaatactatgcagccatagaaaaggatgagttcatattcttcacagggacatggatgaagctggaaaccatcatcctcagcaaactaacacaggaacagaaaaccaaacaccgcatgttctcactcataagtgggaattgaacaatgagaatacatggacacagggaggggaacaccacaccctggggcctgttggggggatgggggctaggggagggatagcattaggagaaatacctgatgtagatgatgggttgatgggtgcagcaaagtaccatggcacatgtatacctgtgtaacaaacctgcacattcagcacatgtatcccagaacttaaagtataataaaaataaataaataatttcagtaagaacctgatcaagttgaacatgtatatatatgttatacacaagtttgaaacatatttctgtttttatatgttttcttatgatgcaagggcatactcttatgcaaataattaaaacttcataggtcttaatttcccatatctctatatattattatgacctatccaactggtaaccctatgaacaccttaaaataaacttgtatactctt

SEQ ID NO: 274639 - DNA, 4308 bp, Artificial Sequence
  derived and/or modified sequence
atgagcaagagaagaatgagcgtgggccagcagacctgggccctgctgtgcaagaactgcctgaagaagtggagaatgaagagacagaccctgctggagtggctgttcagcttcctgctggtgctgttcctgtacctgttcttcagcaacctgcaccaggtgcacgacaccccccagatgagcagcatggacctgggcagagtggacagcttcaacgacaccaactacgtgatcgccttcgcccccgagagcaagaccacccaggagatcatgaacaaggtggccagcgcccccttcctgaagggcagaaccatcatgggctggcccgacgagaagagcatggacgagctggacctgaactacagcatcgacgccgtgagagtgatcttcaccgacaccttcagctaccacctgaagttcagctggggccacagaatccccatgatgaaggagcacagagaccacagcgcccactgccaggccgtgaacgagaagatgaagtgcgagggcagcgagttctgggagaagggcttcgtggccttccaggccgccatcaacgccgccatcatcgagatcgccaccaaccacagcgtgatggagcagctgatgagcgtgaccggcgtgcacatgaagatcctgcccttcgtggcccagggcggcgtggccaccgacttcttcatcttcttctgcatcatcagcttcagcaccttcatctactacgtgagcgtgaacgtgacccaggagagacagtacatcaccagcctgatgaccatgatgggcctgagagagagcgccttctggctgagctggggcctgatgtacgccggcttcatcctgatcatggccaccctgatggccctgatcgtgaagagcgcccagatcgtggtgctgaccggcttcgtgatggtgttcaccctgttcctgctgtacggcctgagcctgatcaccctggccttcctgatgagcgtgctgatcaagaagcccttcctgaccggcctggtggtgttcctgctgatcgtgttctggggcatcctgggcttccccgccctgtacaccagactgcccgccttcctggagtggaccctgtgcctgctgagccccttcgccttcaccgtgggcatggcccagctgatccacctggactacgacgtgaacagcaacgcccacctggacagcagccagaacccctacctgatcatcgccaccctgttcatgctggtgttcgacaccctgctgtacctggtgctgaccctgtacttcgacaagatcctgcccgccgagtacggccacagatgcagccccctgttcttcctgaagagctgcttctggttccagcacggcagagccaaccacgtggtgctggagaacgagaccgacagcgaccccacccccaacgactgcttcgagcccgtgagccccgagttctgcggcaaggaggccatcagaatcaagaacctgaagaaggagtacgccggcaagtgcgagagagtggaggccctgaagggcgtggtgttcgacatctacgagggccagatcaccgccctgctgggccacagcggcgccggcaagaccaccctgctgaacatcctgagcggcctgagcgtgcccaccagcggcagcgtgaccgtgtacaaccacaccctgagcagaatggccgacatcgagaacatcagcaagttcaccggcttctgcccccagagcaacgtgcagttcggcttcctgaccgtgaaggagaacctgagactgttcgccaagatcaagggcatcctgccccacgaggtggagaaggaggtgcagagagtggtgcaggagctggagatggagaacatccaggacatcctggcccagaacctgagcggcggccagaacagaaagctgaccttcggcatcgccatcctgggcgacccccaggtgctgctgctggacgagcccaccgccggcctggaccccctgagcagacacagaatctggaacctgctgaaggagggcaagagcgacagagtgatcctgttcagcacccagttcatcgacgaggccgacatcctggccgacagaaaggtgttcatcagcaacggcaagctgaagtgcgccggcagcagcctgttcctgaagaagaagtggggcatcggctaccacctgagcctgcacctgaacgagagatgcgaccccgagagcatcaccagcctggtgaagcagcacatcagcgacgccaagctgaccgcccagagcgaggagaagctggtgtacatcctgcccctggagagaaccaacaagttccccgagctgtacagagacctggacagatgcagcaaccagggcatcgaggactacggcgtgagcatcaccaccctgaacgaggtgttcctgaagctggagggcaagagcaccatcgacgagagcgacatcggcatctggggccagctgcagaccgacggcgccaaggacatcggcagcctggtggagctggagcaggtgctgagcagcttccacgagaccagaaagaccatcagcggcgtggccctgtggagacagcaggtgtgcgccatcgccaaggtgagattcctgaagctgaagaaggagagaaagagcctgtggaccatcctgctgctgttcggcatcagcttcatcccccagctgctggagcacctgttctacgagagctaccagaagagctacccctgggagctgagccccaacacctacttcctgagccccggccagcagccccaggaccccctgacccacctgctggtgatcaacaagaccggcagcaccatcgacaacttcctgcacagcctgagaagacagaacatcgccatcgaggtggacgccttcggcaccagaaacggcaccgacgaccccagctacaacggcgccatcatcgtgagcggcgacgagaaggaccacagattcagcatcgcctgcaacaccaagagactgaactgcttccccgtgctgctggacgtgatcagcaacggcctgctgggcatcttcaacagcagcgagcacatccagaccgacagaagcaccttcttcgaggagcacatggactacgagtacggctacagaagcaacaccttcttctggatccccatggccgccagcttcaccccctacatcgccatgagcagcatcggcgactacaagaagaaggcccacagccagctgagaatcagcggcctgtaccccagcgcctactggttcggccaggccctggtggacgtgagcctgtacttcctgatcctgctgctgatgcagatcatggactacatcttcagccccgaggagatcatcttcatcatccagaacctgctgatccagatcctgtgcagcatcggctacgtgagcagcctggtgttcctgacctacgtgatcagcttcatcttcagaaacggcagaaagaacagcggcatctggagcttcttcttcctgatcgtggtgatcttcagcatcgtggccaccgacctgaacgagtacggcttcctgggcctgttcttcggcaccatgctgatcccccccttcaccctgatcggcagcctgttcatcttcagcgagatcagccccgacagcatggactacctgggcgccagcgagagcgagatcgtgtacctggccctgctgatcccctacctgcacttcctgatcttcctgttcatcctgagatgcctggagatgaactgcagaaagaagctgatgagaaaggaccccgtgttcagaatcagccccagaagcaacgccatcttccccaaccccgaggagcccgagggcgaggaggaggacatccagatggagagaatgagaaccgtgaacgccatggccgtgagagacttcgacgagacccccgtgatcatcgccagctgcctgagaaaggagtacgccggcaagaagaagaactgcttcagcaagagaaagaagaagatcgccaccagaaacgtgagcttctgcgtgaagaagggcgaggtgatcggcctgctgggccacaacggcgccggcaagagcaccaccatcaagatgatcaccggcgacaccaagcccaccgccggccaggtgatcctgaagggcagcggcggcggcgagcccctgggcttcctgggctactgcccccaggagaacgccctgtggcccaacctgaccgtgagacagcacctggaggtgtacgccgccgtgaagggcctgagaaagggcgacgccatgatcgccatcaccagactggtggacgccctgaagctgcaggaccagctgaaggcccccgtgaagaccctgagcgagggcatcaagagaaaggccggcgacagcggccacctgtag

SEQ ID NO: 274640 - DNA, 312 bp, Artificial Sequence
  derived and/or modified sequence
atgtggctgccctgggccctgctgctgctgtgggtgcccgccggcgaccacagcgagctgagccagaaccccaagcaggccgccacccagagcgagctgcactacgccaacctggagctgctgatgtggcccctgcaggagaagcccgccccccccagagaggtggaggtggagtacagcaccgtggccagccccagagaggagctgcactacgccagcgtggtgttcgacagcaacaccaacagaatcgccgcccagagacccagagaggaggagcccgacagcgactacagcgtgatcagaaagacctag

SEQ ID NO: 274641 - DNA, 312 bp, Artificial Sequence
  derived and/or modified sequence
atgtggttgccatgggcactgttattactgtgggtgcccgccggcgaccactccgagttatcccagaaccccaaacaggcggccacacaatcagaacttcattacgcgaatcttgagctactgatgtggcccctgcaggagaaacctgctccgccgcgggaagtagaagtggagtattccaccgttgcttctccccgcgaggagctgcattacgcaagcgtggtgtttgattccaacacgaatcgcatagctgctcagcgcccaagagaggaggagccagactctgactattcagtgatcagaaaaacctag

SEQ ID NO: 274642 - DNA, 312 bp, Artificial Sequence
  derived and/or modified sequence
atgtggctgccctgggccctgctgctgctgtgggtgcctgctggggaccacagcgagctgagccagaaccccaagcaggccgccacccagagcgagctgcactacgccaacctggagctgctgatgtggcccctgcaggagaagccagccccaccccgggaggtggaggtggagtacagcacagtggccagcccccgggaggagctgcactacgcctctgtggtgtttgacagcaacaccaacagaattgctgcccagaggccccgggaggaggagccagacagcgactacagcgtcatcaggaagacctag

SEQ ID NO: 274643 - DNA, 312 bp, Artificial Sequence
  derived and/or modified sequence
atgtggctgccctgggccctgctgctgctgtgggtgcccgccggcgatcatagtgaactgagtcagaacccaaagcaggcagcaacacagtccgagctgcactacgctaaccttgagctgttgatgtggcctcttcaagaaaagcccgcccctcctagggaggtggaagtggagtactctactgtggcttctccacgggaagagttacactacgcctcagtggttttcgactctaataccaaccgtatcgcagcccagagacccagggaagaagagcccgactcagactatagtgtaatcaggaaaacctag

SEQ ID NO: 274644 - DNA, 312 bp, Artificial Sequence
  derived and/or modified sequence
atgtggctgccatgggccctgctgcttctttgggttcccgcaggcgaccatagcgagttgtcacaaaaccccaagcaagctgcaacacagagcgaactgcattatgcaaacctggagctactgatgtggcccctccaggagaaacctgcaccacccagagaagtggaggtggaatattcaaccgtcgcatcgcccagagaagagctgcactatgccagcgtggtttttgattccaataccaatagaatagccgcacagcgtccgagagaggaagaacctgactcagattactcagtgattcgtaagacgtag

SEQ ID NO: 274645 - DNA, 1295 bp, Artificial Sequence
  derived and/or modified sequence
cggggaagtgagagtcggggatcagtcctgcaagctacggagtcactacagggagaggtctcatcactagaaatagccgaagaacctgcagcctcaaccagcgttaaggaggacgtgccgtttctagggagtcttagtcggggctcaccagcttcctgcattttctgaccggctccaggaatagaaccaaaagaagctgaacaaggaagcagcgcggcaccaagaaaagcagaagtcggggccttggaggcgtgactttcccctcgggtccaggtagggcctggagctgctgcaagtgccgcctgtgctggggaagggaccatgtggctgccttgggctctgttgcttctctgggtcccagctggtgaccattcagagctgtcccagaaccccaagcaggctgccacgcagagtgagctgcactacgcaaatctggagctgctgatgtggcctctgcaggaaaagccagcaccaccaagggaggtggaggtggaatacagcactgtggcctcccccagggaagaacttcactatgcctcggtggtgtttgattctaacaccaacaggatagctgctcagaggcctcgggaggaggaaccagattcagattacagtgtgataaggaagacataggcttttgtcctgcctcgccatcggagctctcatgggccccaggaagtccagggacagctcccttatacctggcccacgtccttctcagcctgccctcgacaacagtgaccaacagacaggcagctgggtttcccaggccatccctctgttgccatcagcttgattggcttccccgagggccagcagggctgggggctccggagagcagcaggaagcactcccagccaccagtgcctgtcacctctttcccctttgcccctgcttcatcccagctctgtgtgtggaggacaaagcttcttcctgcgtggctccaggaaaagatgtggctcacgtaggtggcacctgccaatagctttgtcaatcacagccccataggaacgtctggaattgcttgggagttggggagaactgtcaagaagagtgaagagagtgccaaagcggagatctgttcacctgggggccatggaggggggacccactaaagatcaagatcaaagattctccccatctcacagacaaggaaactgaggccagagggaggagagaattgctcatggctccagaactggtggcaagtttctctggactcttaggtttatttttaatatgaaatataaaaacagtttcaaatatcttattgagggagaagtaaaaacttattt

SEQ ID NO: 274646 - protein, 384 aa, Artificial Sequence
  derived and/or modified sequence
MAHSFGESYRVGSTSGIHAITVFCSWDYKVTQKRASRLQQDNIRTRLKELLAEWQLRHSPRSVCGRLRQAAVLGLVWLLCLGTALGCAVAVHVFSEFMIQSPEAAGQEAVLLVLPLVVGLLNLGAPYLCRVLAALEPHDSPVLEVYVAICRIISEKKLKRRRKPEFDIARNVLELIYGQTLTWLGVLFSPLLPAVQIIKLLLVFYVKKTSLLANCQAPRRPWLASHMSTVFLTLLCFPAFLGAAVFLCYAVWQVKPSSTCGPFRTLDTMYEAGRVWVRHLEAAGPRVSWLPWVHRYLMENTFFVFLVSALLLAVIYLNIQVVRGQRKVICLLKEQISNEGEDKIFLINKLHSIYERKEREERSRVGTTEEAAAPPALLTDEQDA

SEQ ID NO: 274647 - DNA, 1155 bp, Artificial Sequence
  derived and/or modified sequence
atggcccacagcttcggcgagagctacagagtgggcagcaccagcggcatccacgccatcaccgtgttctgcagctgggactacaaggtgacccagaagagagccagcagactgcagcaggacaacatcagaaccagactgaaggagctgctggccgagtggcagctgagacacagccccagaagcgtgtgcggcagactgagacaggccgccgtgctgggcctggtgtggctgctgtgcctgggcaccgccctgggctgcgccgtggccgtgcacgtgttcagcgagttcatgatccagagccccgaggccgccggccaggaggccgtgctgctggtgctgcccctggtggtgggcctgctgaacctgggcgccccctacctgtgcagagtgctggccgccctggagccccacgacagccccgtgctggaggtgtacgtggccatctgcagaatcatcagcgagaagaagctgaagagaagaagaaagcccgagttcgacatcgccagaaacgtgctggagctgatctacggccagaccctgacctggctgggcgtgctgttcagccccctgctgcccgccgtgcagatcatcaagctgctgctggtgttctacgtgaagaagaccagcctgctggccaactgccaggcccccagaagaccctggctggccagccacatgagcaccgtgttcctgaccctgctgtgcttccccgccttcctgggcgccgccgtgttcctgtgctacgccgtgtggcaggtgaagcccagcagcacctgcggccccttcagaaccctggacaccatgtacgaggccggcagagtgtgggtgagacacctggaggccgccggccccagagtgagctggctgccctgggtgcacagatacctgatggagaacaccttcttcgtgttcctggtgagcgccctgctgctggccgtgatctacctgaacatccaggtggtgagaggccagagaaaggtgatctgcctgctgaaggagcagatcagcaacgagggcgaggacaagatcttcctgatcaacaagctgcacagcatctacgagagaaaggagagagaggagagaagcagagtgggcaccaccgaggaggccgccgccccccccgccctgctgaccgacgagcaggacgcctag

SEQ ID NO: 274648 - DNA, 1155 bp, Artificial Sequence
  derived and/or modified sequence
atggcgcattcattcggcgaatcttacagagtgggttcgacctcaggcattcatgcgattaccgttttctgctcatgggactataaggtgactcaaaaacgagctagtcggctccagcaggataacattagaactcggctgaaggagctgctcgccgaatggcagttgaggcattcccctaggagtgtatgtgggcgactgcgccaggccgcggtgctggggctagtttggctcctgtgcttgggaacggcactcggatgcgctgtggcggtgcatgtgttttcagaattcatgatccaatcccccgaggcggcaggtcaggaagcggtgttgctcgtcctcccattggtagttgggctgttaaatctgggagcaccctatttgtgtagagtccttgcagctctggagcctcacgacagtcccgtcttagaagtgtatgtggcgatctgtaggatcatcagcgagaagaagttaaagcggaggagaaaacctgagttcgatatcgccaggaacgtgttggagctgatatatggacagactctgacctggcttggggttctgttttctcctctcctgccagcggtacagattatcaagcttctcctggttttctacgtaaagaagacatcactcttggcaaattgccaggccccacgacgtccgtggttggcttcccacatgagcactgttttccttacactcctgtgctttcccgccttcttgggagctgccgtctttctctgttacgctgtctggcaggtgaaaccgagctccacatgtggtcccttcaggacgctggatacgatgtatgaggctggcagggtgtgggtgcggcacctggaggctgcggggcccagagtctcatggctgccttgggtgcaccggtacctgatggagaatactttcttcgtttttctggtgagcgccctgctgctggccgtgatttatctgaatatccaagttgttcgcgggcagaggaaagttatatgcctccttaaggagcagattagtaatgaaggcgaagataaaatctttttgataaataagctgcattcaatttatgaacgtaaggagcgagaagagaggagtcgagtggggaccaccgaggaagctgcggcccccccggccctgctcactgatgagcaagatgcctag

SEQ ID NO: 274649 - DNA, 1155 bp, Artificial Sequence
  derived and/or modified sequence
atggcccacagctttggagagagctacagagtgggcagcaccagcggcatccacgccatcaccgtcttctgctcctgggactacaaggtgacccagaagagggccagccggctgcagcaggacaacatccgcacccggctgaaggagctgctggccgagtggcagctgcggcacagccccaggtctgtgtgtggccgcctgcggcaggccgctgtgctgggcctggtgtggctgctgtgcctgggcacagccctgggctgtgctgtggccgtgcacgtgttttctgagttcatgatccagagccctgaggccgccggccaggaggccgtgctgctggtgctgcccctggtggtgggcctgctgaacctgggcgccccctacctgtgccgggtgctggccgccctggagccccatgacagccctgtgctggaggtgtatgtggccatctgccgcatcatcagcgagaagaagctgaagagaagaaggaagccagagtttgacatcgccagaaatgtgctggagctgatctacggccagaccctgacctggctgggcgtgctcttcagccccctgctgcctgctgtgcagatcatcaagctgctgctggtgttctacgtgaagaagaccagcctgctggccaactgccaggccccccggcggccctggctggccagccacatgagcacagtgttcctgaccctgctgtgcttccctgccttcctgggcgctgctgtgttcctgtgctatgctgtgtggcaggtgaagcccagcagcacctgtggccccttccgcaccctggacaccatgtatgaggccggccgggtgtgggtgcgccacctggaggccgccggcccccgggtgtcctggctgccctgggtgcaccgctacctgatggagaacaccttctttgtgttcctggtgtctgccctgctgctggccgtcatctacctgaacatccaggtggtgcggggccagaggaaggtgatctgcctgctgaaggagcagatcagcaatgaaggagaggacaagatcttcctgatcaacaagctgcacagcatctatgaaaggaaggagcgggaggagaggagccgggtgggcaccacagaggaggccgccgcccccccagccctgctgacagatgagcaggatgcctag

SEQ ID NO: 274650 - DNA, 1155 bp, Artificial Sequence
  derived and/or modified sequence
atggcccacagcttcggcgagagctaccgggtgggcagcaccagcggcatccacgcaattacagttttctgctcttgggactacaaagtcactcagaaaagagcctcaagactacagcaggacaatatccgcactcggctcaaggaacttctggccgagtggcaactgaggcacagtccgcgcagcgtatgtggcaggttgcgccaggctgccgtgctggggctggtgtggctcctctgcctcggaactgccctgggatgcgccgtcgcagtccatgtgttcagcgaatttatgattcaaagtcctgaggctgcgggacaggaggcagttttactggtccttcctttagttgtaggactgctaaacctgggggccccttacctgtgccgcgtcctggctgcacttgagccacatgacagcccagtgctggaagtgtacgtggccatctgtcggatcatcagcgagaaaaaactgaagcgccgacgcaagcccgagttcgacattgcaagaaatgtgctcgaactgatttacggccagacattgacatggttaggtgtgctcttctctcccctgttacccgccgtgcagattattaaactgcttcttgtgttctacgtgaagaaaacgtctttgctggccaattgccaggcccccaggaggccatggttggcttcccatatgagtacagtgttcctgactttgctctgtttccctgcattccttggcgccgccgtattcctgtgttacgccgtatggcaggtgaaaccttcatctacgtgcggcccctttcggacactagacacaatgtatgaagctgggagagtttgggtgcggcacctggaagcagctggaccgcgtgtcagttggcttccgtgggtgcaccgctacctaatggagaacacattctttgtttttctcgttagcgcattgttgctggctgtaatctacctgaacattcaagtggtgcgcggccagcggaaggttatttgtttattaaaagagcagatctcaaatgaaggggaggataagatcttcttgatcaataagcttcatagtatctacgagagaaaggagcgcgaggaacggagtcgtgtgggtacgaccgaagaggccgctgccccaccggctctgctgactgatgagcaggatgcatag

SEQ ID NO: 274651 - DNA, 1155 bp, Artificial Sequence
  derived and/or modified sequence
atggctcatagttttggggagtcctatcgagtcggtagtactagtgggattcatgcgataactgtgttctgcagttgggattacaaggtgacacagaaaagggccagccgccttcagcaagataacattcggacccggcttaaggagctcttagccgagtggcaactgcgtcactctcctcgctcagtgtgtggcaggctccgacaggccgctgtgcttggactcgtttggctcctgtgtctgggtaccgcattgggttgcgccgtcgccgtacacgtgttcagcgagtttatgattcagtctcccgaggccgctggacaggaggcagtgcttctggtgctccctctggtagttggactcctgaacctgggggctccttacctctgccgggtattggctgccctagaaccccacgactctcctgtcttagaagtttatgtcgctatctgtagaatcatttctgagaagaagttaaaaagacgccgtaagccagaatttgatatcgccaggaacgtgctggagctgatctacggacagaccctgacctggctcggggttttgttctctccacttttacccgctgtgcagattattaaactgctcctcgtgttctatgtaaagaaaaccagcctcttagccaactgccaggctcctaggcgcccttggcttgcaagccatatgtccacagtgttcttaacactgctatgtttcccagcattcttaggtgccgcagtctttctctgttacgccgtttggcaggtgaaacccagcagtacatgcggcccattcaggaccttggataccatgtacgaggctggcagagtgtgggtgcgacatctcgaggcagcgggacctcgcgtttcctggctcccatgggtacaccgctatcttatggagaataccttctttgtttttctggtgtctgccctgctcttagccgtcatttatctcaatattcaggttgtccgcggtcagcgaaaggtaatctgccttctcaaagaacagatttccaacgaaggagaagacaagattttcttaatcaacaagctccacagcatctacgagcggaaagagcgcgaagagcggtcacgggtgggcaccaccgaggaagctgctgcccctcctgccctcttaaccgacgaacaagatgcgtag

SEQ ID NO: 274652 - DNA, 2711 bp, Artificial Sequence
  derived and/or modified sequence
gtgcggctactcccccggccccggcagacctgcgactggcccagtcgcccctggggccctttgccactcccttggcaaggagagccgagacctcagttcccggcggctcttgcggggcacaggtgagccctggctgcgcgcgcggcccctcctccccggcgcctcccagatgggggctccggaggtggcgcccaggctctgagctaccctaggtctgcagactagcgggcattggccagagacatggcccagccactggccttcatcctcgatgtccctgagaccccaggggaccagggccagggccccagcccctatgatgaaagcgaagtgcacgactccttccagcagctcatccaggagcagagccagtgcacggcccaggaggggctggagctgcagcagagagagcgggaggtgacaggaagtagccagcagacactctggcggcccgagggcacccagagcacggccacactccgcatcctggccagcatgcccagccgcaccattggccgcagccgaggtgccatcatctcccagtactacaaccgcacggtgcagcttcggtgcaggagcagccggcccctgctcgggaactttgtccgctccgcctggcccagcctccgcctgtacgacctggagctggaccccacggccctggaggaggaggagaagcagagcctcctggtgaaggagctccagagcctggcagtggcacagcgggaccacatgcttcgcgggatgcccttaagcctggctgagaaacgcagcctgcgagagaagagcaggaccccgagggggaagtggaggggccagccgggcagcggcggggtctgctcctgctgtggccggctcagatatgcctgcgtgctggccttgcacagcctgggcctggcgctgctctccgccctgcaggccctgatgccgtggcgctacgccctgaagcgcatcgggggccagttcggctccagcgtgctctcctacttcctctttctcaagaccctgctggctttcaatgccctcctgctgctgctgctggtggccttcatcatgggccctcaggtcgccttcccacccgccctgccgggccctgcccccgtctgcacaggcctggagctcctcacaggcgcgggttgcttcacccacaccgtcatgtactacggccactacagtaacgccacgctgaaccagccgtgtggcagccccctggatggcagccagtgcacacccagggtgggtggcctgccctacaacatgcccctggcctacctctccactgtgggcgtgagcttctttatcacctgcatcaccctggtgtacagcatggctcactctttcggggagagctaccgggtgggcagcacctctggcatccacgccatcaccgtcttctgctcctgggactacaaggtgacgcagaagcgggcctcccgcctccagcaggacaatattcgcacccggctgaaggagctgctggccgagtggcagctgcggcacagccccaggagcgtgtgcgggaggctgcggcaggcggctgtgctggggcttgtgtggctgctgtgtctggggaccgcgctgggctgcgccgtggccgtccacgtcttctcggagttcatgatccagagtccagaggctgctggccaggaggctgtgctgctggtcctgcccctggtggttggcctcctcaacctgggggccccctacctgtgccgtgtcctggccgccctggagccgcatgactccccggtactggaggtgtacgtggccatctgcaggattatctccgagaagaagctgaagaggaggcggaagccggagtttgacattgcccggaatgtcctggagctgatttatgggcagactctgacctggctgggggtgctcttctcgcccctcctccccgccgtgcagatcatcaagctgctgctcgtcttctatgtcaagaagaccagccttctggccaactgccaggcgccgcgccggccctggctggcctcacacatgagcaccgtcttcctcacgctgctctgcttccccgccttcctgggcgccgctgtcttcctctgctacgccgtctggcaggtgaagccctcgagcacctgcggccccttccggaccctggacaccatgtacgaggccggcagggtgtgggtgcgccacctggaggcggcaggccccagggtctcctggctgccctgggtgcaccggtacctgatggaaaacaccttctttgtcttcctggtgtcagccctgctgctggccgtgatctacctcaacatccaggtggtgcggggccagcgcaaggtcatctgcctgctcaaggagcagatcagcaatgagggtgaggacaaaatcttcttaatcaacaagcttcactccatctacgagaggaaggagagggaggagaggagcagggttgggacaaccgaggaggctgcggcaccccctgccctgctcacagatgaacaggatgcctagggggacggcgatgggcctcacgggcccgcccagcaccctgagaccacactgttgcctcccagtgaccctgctgggacaccaggacaaggaagacagtttcgcctctcgaaagccgcagctgcgcctaggctggagctggaagggtgggtgaatccggcttgggcatccccaatgaactctgccctgcctgggactctatttattctgattaaaggggttttgcaaatggg

SEQ ID NO: 274653 - protein, 380 aa, Artificial Sequence
  derived and/or modified sequence
MGGEKFDSTHPEGYLFGENSDLNFLGNRPVVFPYAAPPPQEPVKTLRSLVNIRKDTLRLVKCAEEVKSPGEEASKAKVHYNVEFTFDTDARVAITIYYQATEEFQNGIASYIPKDNSLQSETVQYKRGVCQQFCLPSHTVDPSEWAEEELGFDLDREVYPLVVHAVVDEGDEYFGHCHVLLGTFEKHTDGTFCVKPLKQKQVVDGVSYLLQEIYGIENKYNTQDSKVAEDEVSDNSAECVVCLSDVRDTLILPCRHLCLCNTCADTLRYQANNCPICRLPFRALLQIRAMRKKLGPLSPTSFNPIISSQTSDSEEHPSSENIPPGYEVVSLLEALNGPLTPPSLLKIQKISWAWLQAPVVPATWEAEAGEWPEPGRRSLQ

SEQ ID NO: 274654 - protein, 324 aa, Artificial Sequence
  derived and/or modified sequence
MFIGGLSWQTSPDSLRDYFSKFGEIRECMVMRDPTTKRSRGFGFVTFADPASVDKVLGQPHHELDSKTIDPKVAFPRRAQPKMVTRTKKIFVGGLSANTVVEDVKQYFEQFGKVEDAMLMFDKTTNRHRGFGFVTFENEDVVEKVCEIHFHEINNKMVECKKAQPKEVMFPPGTRGRARGLPYTMDAFMLGMGMLGYPNFVATYGRGYPGFAPSYGYQFPGFPAAAYGPVAAAAVAAARGSVLNSYSAQPNFGAPASPAGSNPARPGGFPGANSPGPVADLYGPASQDSGVGNYISAASPQPGSGFGHGIAGPLIATAFTNGYH

SEQ ID NO: 274655 - DNA, 975 bp, Artificial Sequence
  derived and/or modified sequence
atgttcatcggcggcctgagctggcagaccagccccgacagcctgagagactacttcagcaagttcggcgagatcagagagtgcatggtgatgagagaccccaccaccaagagaagcagaggcttcggcttcgtgaccttcgccgaccccgccagcgtggacaaggtgctgggccagccccaccacgagctggacagcaagaccatcgaccccaaggtggccttccccagaagagcccagcccaagatggtgaccagaaccaagaagatcttcgtgggcggcctgagcgccaacaccgtggtggaggacgtgaagcagtacttcgagcagttcggcaaggtggaggacgccatgctgatgttcgacaagaccaccaacagacacagaggcttcggcttcgtgaccttcgagaacgaggacgtggtggagaaggtgtgcgagatccacttccacgagatcaacaacaagatggtggagtgcaagaaggcccagcccaaggaggtgatgttcccccccggcaccagaggcagagccagaggcctgccctacaccatggacgccttcatgctgggcatgggcatgctgggctaccccaacttcgtggccacctacggcagaggctaccccggcttcgcccccagctacggctaccagttccccggcttccccgccgccgcctacggccccgtggccgccgccgccgtggccgccgccagaggcagcgtgctgaacagctacagcgcccagcccaacttcggcgcccccgccagccccgccggcagcaaccccgccagacccggcggcttccccggcgccaacagccccggccccgtggccgacctgtacggccccgccagccaggacagcggcgtgggcaactacatcagcgccgccagcccccagcccggcagcggcttcggccacggcatcgccggccccctgatcgccaccgccttcaccaacggctaccactag

SEQ ID NO: 274656 - DNA, 975 bp, Artificial Sequence
  derived and/or modified sequence
atgtttattgggggactctcatggcagactagccctgactccctgagagattacttttccaagttcggggagatccgggagtgcatggtaatgagagatcccacaactaagcgttctaggggattcggattcgtgaccttcgcagatccagcgtccgtcgacaaggtattagggcaaccccaccatgaactggacagcaaaaccatcgatcctaaggtggcctttcctcggcgggcccagccaaagatggtgaccaggaccaagaagatcttcgttggggggctgtccgccaacaccgtggtcgaggatgtgaaacagtacttcgaacaattcgggaaggttgaagatgccatgttgatgtttgataagacgaccaatagacaccgcggcttcggattcgtgacctttgaaaatgaggatgtggtggagaaagtgtgcgaaatacacttccatgagattaacaacaaaatggtggagtgcaagaaggctcagcccaaagaagtgatgtttccgccaggtactaggggacgcgcccgcgggttaccatatactatggatgcctttatgctagggatgggaatgttgggatacccaaactttgttgctacatatggccgcgggtaccctggattcgccccatcatatggatatcagttccctgggttccccgccgcagcgtatggacccgtggccgcagctgccgtagcggccgcccgcggtagcgttctgaattcatactccgctcagccaaattttggcgccccagcgtcacccgccggaagtaacccagcgagaccgggtggattccccggggccaattcccccggtccagtggccgacctgtatgggcccgcttcacaagacagcggcgtgggaaactatatctcagccgcctccccgcagcccgggagtggtttcggtcatggaatagcaggccccctgattgccacggcattcaccaatgggtaccattag

SEQ ID NO: 274657 - DNA, 975 bp, Artificial Sequence
  derived and/or modified sequence
atgtttattggaggcctgtcctggcagaccagcccagacagcctgcgggactacttcagcaagtttggagagatccgggagtgcatggtgatgagggaccccaccaccaagaggagccggggcttcggctttgtgacctttgctgaccctgcctctgtggacaaggtgctgggccagccccaccacgagctggacagcaagaccatcgaccccaaggtggccttcccccggcgggcccagcccaagatggtgaccaggaccaagaagatctttgtgggcggcctgagcgccaacacagtggtggaggatgtgaagcagtactttgagcagtttgggaaggtggaggatgccatgctgatgtttgacaagaccaccaacagacaccggggctttggatttgtgacctttgaaaatgaagatgtggtggagaaggtgtgtgagatccacttccacgagatcaacaacaagatggtggagtgcaagaaggcccagcccaaggaggtgatgtttcctcctggcacccggggccgggcccggggcctgccctacaccatggatgccttcatgctgggcatgggcatgctgggctaccccaactttgtggccacctacggccggggctacccaggctttgcccccagctatggctaccagtttcctggcttccctgctgctgcctacggccctgtggccgctgctgctgtggccgccgcccggggctctgtgctgaacagctacagcgcccagcccaactttggagccccagccagccctgctggcagcaacccagcccggcctgggggcttccctggggccaacagccctggccctgtggccgacctgtatggccctgccagccaggacagcggcgtgggcaactacatctctgctgccagcccccagcccggcagcggcttcggccacggcattgctggccccctgattgccacagccttcaccaacggctaccactag

SEQ ID NO: 274658 - DNA, 975 bp, Artificial Sequence
  derived and/or modified sequence
atgttcatcggcggcctgagctggcagaccagccccgacagcctgcgagattacttttccaaatttggcgagattagagaatgcatggtaatgagggatccgaccactaagcgcagcagaggctttggtttcgtcacttttgccgacccagcatctgtggataaagtgctgggccaacctcatcatgaactggacagtaaaaccattgatcctaaagtggcgttccctagaagggcccagccgaagatggttacgagaaccaaaaaaatcttcgtaggagggttgtccgccaacaccgtagttgaagatgtcaagcagtacttcgaacagtttgggaaagtggaagatgcaatgttgatgttcgataaaacaaccaatcgccatcgtggctttggatttgtgacttttgaaaatgaagacgtggtagagaaggtgtgcgagattcatttccatgagataaataataagatggtggaatgtaagaaagctcagcccaaagaagtgatgtttccaccaggtactaggggaagagcacgaggccttccctacactatggatgcgtttatgttaggtatgggaatgttgggctacccaaacttcgtcgccacatacggaagaggataccccggctttgcaccctcttacggctatcagtttcctggcttccccgccgcagcgtacgggcctgtggccgctgccgcggtggctgctgccaggggatcagtgttgaatagttacagcgctcagcctaatttcggcgctccagccagcccggccggcagcaaccctgcccggcccggcggcttccctggagccaatagccctggccctgtggccgatctctacggacccgcatctcaggattccggagtcgggaattatatttccgccgccagcccccagccagggagtgggtttggccatggcatcgccggccctctgatcgcaactgctttcacgaacggctaccactag

SEQ ID NO: 274659 - DNA, 1714 bp, Artificial Sequence
  derived and/or modified sequence
agagccagagagaacttccagcgcaaaaggaaaataaaacttgtggctggtgtttgtgcaggagggtctccgccatcctgaagccccccgatcctggggcgtctcgggggccgccaaaggagcgccagggttaaaatgtttatcggtggactgagctggcagacctcaccagatagccttagagactattttagcaaatttggagaaattagagaatgtatggtcatgagagatcccactacgaaacgctccagaggcttcggtttcgtcacgttcgcagacccagcaagtgtagataaagtattaggtcagccccaccatgagttagattccaagacgattgaccccaaagttgcatttcctcgtcgagcgcaacccaagatggtcacaagaacaaagaaaatatttgtaggcgggttatctgcgaacacagtagtggaagatgtaaagcaatatttcgagcagtttggcaaggtggaagatgcaatgctgatgtttgataaaactaccaacaggcacagagggtttggctttgtcacttttgagaatgaagatgttgtggagaaagtctgtgagattcatttccatgaaatcaataataaaatggtagaatgtaagaaagctcagccgaaagaagtcatgttcccacctgggacaagaggccgggcccggggactgccttacaccatggacgcgttcatgcttggcatggggatgctgggatatcccaacttcgtggcgacctatggccgtggctaccccggatttgctccaagctatggctatcagttcccaggcttcccagcagcggcttatggaccagtggcagcagcggcggtggcggcagcaagaggatcagtcctgaatagctacagtgctcaaccgaattttggcgcgcccgcttccccggcaggctccaacccggcgcggcccggaggcttcccgggggccaacagcccaggacctgtcgccgatctctacggccctgccagccaggactccggagtggggaattacataagtgcggccagcccacagccgggctcgggcttcggccacggcatagctggacctttgattgcaacggcctttacaaatggataccattgagcaggtgctttcgttgccatctcactctgagagcatacctggatgtccaggcaagactgggcgaagtttctgagtggccctttgtttaggtgatgtcctcagacctggacccccaccagcctcactccccatcccaaccagagatggctcacttcggatcgagggttgactacatctcatcatctcacgaatctgctgtaatataagacaacagcttttaaatgtgtatataacccatgatttcggttttgttttgttttgtttttcttgatggtttccctctccctccctctcttcccattctccttttaaatctctttgaatcacatttggtagtgattttgacttagtccagtagtcacatagctttaatatctagttcaaagctaaccatagtataattgttatattaaggagttattttttcttaaaacatttttttttgcttgttttggttctgttctcacttttaaaggatgctgagatggtaatatgactctccatattttggtaccaattctgagactgtatgaattttcaggtggaactttagcacacactgaagcaaagttgtgaagtgcagggcgggaggtgggcgtgagct

SEQ ID NO: 274660 - DNA, 975 bp, Artificial Sequence
  derived and/or modified sequence
atgttcattggaggtcttagttggcagacgagccctgacagcctccgcgattatttttccaaattcggcgaaataagggagtgcatggtcatgcgcgaccctacaacaaagagatcccgaggttttgggttcgtcaccttcgccgaccctgccagtgtggacaaggtattgggtcagccacaccacgaattggactcaaaaacaatcgatccgaaggtagcctttccaaggcgggctcagcctaaaatggtcactcggacaaaaaagatttttgttggcggactttctgccaacaccgtggtcgaagatgtgaaacagtacttcgagcagtttggaaaggtggaagacgccatgcttatgtttgacaagacaaccaaccgacatcgaggctttggctttgttaccttcgaaaacgaagacgtggtcgagaaagtctgtgaaatacatttccacgaaatcaacaataaaatggtggaatgcaagaaggcccagccaaaagaggtcatgtttcctcctggaaccagaggcagggcacgtgggctcccatacacaatggatgctttcatgctcgggatggggatgctcgggtacccaaatttcgtggctacctatggtaggggctatcccggtttcgcaccatcttatggataccagtttcctggctttcccgctgctgcttatggacccgtggccgctgctgccgtggccgctgcccgagggtctgttctgaactcttattcagcccaacccaattttggagctccagcaagccccgcaggaagcaaccccgcaaggccgggaggctttcccggagccaacagcccagggcctgttgccgacctgtacggccctgcctctcaggactcgggtgttggcaattacatctctgctgcttccccccagccaggatccggcttcgggcacgggatagccggaccgctgatcgctaccgccttcactaacggttaccattag

SEQ ID NO: 274661 - protein, 401 aa, Artificial Sequence
  derived and/or modified sequence
MPVQLSEHPEWNESMHSLRISVGGLPVLASMTKAADPRFRPRWKVILTFFVGAAILWLLCSHRPAPGRPPTHNAHNWRLGQAPANWYNDTYPLSPPQRTPAGIRYRIAVIADLDTESRAQEENTWFSYLKKGYLTLSDSGDKVAVEWDKDHGVLESHLAEKGRGMELSDLIVFNGKLYSVDDRTGVVYQIEGSKAVPWVILSDGDGTVEKGFKAEWLAVKDERLYVGGLGKEWTTTTGDVVNENPEWVKVVGYKGSVDHENWVSNYNALRAAAGIQPPGYLIHESACWSDTLQRWFFLPRRASQERYSEKDDERKGANLLLSASPDFGDIAVSHVGAVVPTHGFSSFKFIPNTDDQIIVALKSEEDSGRVASYIMAFTLDGRFLLPETKIGSVKYEGIEFI

SEQ ID NO: 274662 - protein, 350 aa, Artificial Sequence
  derived and/or modified sequence
MPVQLSEHPEWNESMHSLRISVGGLPVLASMTKAADPRFRPRSPPQRTPAGIRYRIAVIADLDTESRAQEENTWFSYLKKGYLTLSDSGDKVAVEWDKDHGVLESHLAEKGRGMELSDLIVFNGKLYSVDDRTGVVYQIEGSKAVPWVILSDGDGTVEKGFKAEWLAVKDERLYVGGLGKEWTTTTGDVVNENPEWVKVVGYKGSVDHENWVSNYNALRAAAGIQPPGYLIHESACWSDTLQRWFFLPRRASQERYSEKDDERKGANLLLSASPDFGDIAVSHVGAVVPTHGFSSFKFIPNTDDQIIVALKSEEDSGRVASYIMAFTLDGRFLLPETKIGSVKYEGIEFI

SEQ ID NO: 274663 - protein, 245 aa, Artificial Sequence
  derived and/or modified sequence
MPVQLSEHPEWNESMHSLRISVGGLPVLASMTKAADPRFRPRWKVILTFFVGAAILWLLCSHRPAPGRPPTHNAHNWRLGQAPANWYNDTYPLSPPQRTPAGIRYRIAVIADLDTESRAQEENTWFSYLKKGYLTLSDSGDKVAVEWDKDHGVLESHLAEKGRGMELSDLIVFNGKLYSVDDRTGVVYQIEGSKAVPWVILSDGDGTVEKGVGGEWEAVREIVRKRWRLVKQVSHVGVLGQWIQR

SEQ ID NO: 274664 - DNA, 110 bp, Artificial Sequence
  derived and/or modified sequence
catcaaacggaatcaaacggaattatcgaatggaatcgaaaagaatcatcgaacggactcgaatggaatcatctaatggaatggaatggaagaatccatggactcgaatg

SEQ ID NO: 274665 - DNA, 105 bp, Artificial Sequence
  derived and/or modified sequence
aaaggaatcaaacggaattatcgaatggaatcgaaaagaatcatcgaacggactcgaatggaatcatctaatggaatggaatggaagaatccatggactcgaatg

SEQ ID NO: 274666 - DNA, 111 bp, Artificial Sequence
  derived and/or modified sequence
acatcaaacggaatcaaacggaattatcgaatggaatcgaaaagaatcatcgaacggactcgaatggaatcatctaatggaatggaatggaagaatccatggactcgaatg

SEQ ID NO: 274667 - DNA, 105 bp, Artificial Sequence
  derived and/or modified sequence
aacggaatcaaacggaattatcgaatggaatcgaaaagaatcatcgaacggactcgaatggaatcatctaatgtaatggaatggaagaatccatggactcgaatg

SEQ ID NO: 274668 - DNA, 147 bp, Artificial Sequence
  derived and/or modified sequence
aacggaatcaaacggaattatcgaatggaatcgaagagaatcatcgaacggactcgaatggaatcatctaatggaatggaatggaagaatccatggactcgaatgcaatcatcatcgaatggaatcgaacggaatcatcgaatggcc

SEQ ID NO: 274669 - DNA, 135 bp, Artificial Sequence
  derived and/or modified sequence
atggaatcaacatcaaacggaatcaaacggaattatcgaatggaatcaaagagaatcatcgaacggactcgaatggaatcatctaatggaatggaatggaagaatccatggactcgaatgcaatcatcatcgaat

SEQ ID NO: 274670 - DNA, 1206 bp, Artificial Sequence
  derived and/or modified sequence
atgccagtgcagctctcagaacaccctgagtggaacgagagcatgcattctctgaggatctccgtaggaggcctgcctgttctagcctctatgactaaagcagctgacccacggtttcgccccaggtggaaagttatactaacctttttcgtgggggcggcaatattatggttgttatgttcccatcggcccgcaccagggcgccctcccacccataatgctcacaactggaggctcggccaggctccagcgaactggtataacgacacttacccattgtctccaccacagagaacacccgccggcattcgctatagaattgccgtgatagcagatctggacacagagtctagggcccaggaggagaatacgtggttctcctaccttaagaaggggtatctcactttgagtgactcaggggacaaagtggcagtagagtgggataaagatcacggcgtcctagaaagccacctggctgagaagggacgaggcatggaactgtctgacttgatcgtgttcaatggcaagctttactccgtggacgatagaacaggggtcgtctatcagatagagggctcaaaagcagtcccttgggtgatactcagcgacggtgatggcacagtggaaaagggcttcaaggctgagtggcttgcggtgaaggatgagagactgtatgtcggaggcttaggcaaggaatggaccacaaccactggggatgtcgtgaatgaaaacccagagtgggttaaggtggttggctataaagggagcgtggatcatgagaactgggtgtctaactataatgccttacgtgccgcggctggcatccagcctcccgggtatctgattcatgagtcggcatgttggtctgacactctgcaacggtggtttttcctccctcgaagagcctcccaggaacgatattcggagaaagacgatgagaggaaaggcgcgaaccttctactgtccgcatctccagatttcggagacattgccgtgagccacgtcggtgctgtcgtaccaactcacggattctcctccttcaaatttattccaaacacagatgatcaaattatcgttgccctgaagtccgaagaagactctggcagagtcgccagctacattatggctttcactctcgacggccgcttcctgcttcctgaaactaagatcgggtccgtgaagtacgaaggcatagagttcatctag

SEQ ID NO: 274671 - DNA, 1053 bp, Artificial Sequence
  derived and/or modified sequence
atgcccgttcagttgagtgaacatccagaatggaacgaaagcatgcactctttacgcatctcggtgggtgggctcccggtacttgccagtatgaccaaagcagccgatcccaggttccggccccggtccccacctcagcggacccctgccggaattaggtatagaattgcggtgatcgcggatctcgacaccgagagcagggcccaggaggagaatacttggtttagttacctgaaaaaaggatatttgacgctctctgatagcggcgataaggtggctgtggagtgggataaggaccacggcgtgctagagagtcacctggccgagaagggacgaggcatggagctctcagatctaattgtgttcaacggtaaactatactcagtggacgacagaaccggcgttgtctatcagatcgagggatcaaaagcagtgccctgggtcatcctgtcagatggggacggtacggtcgagaagggattcaaggccgagtggctggcagttaaggatgaaaggctctacgtgggtgggctgggaaaagagtggactaccacaactggggatgtagtcaatgagaacccggaatgggtcaaagttgttgggtacaaaggaagcgttgatcacgaaaactgggttagcaactacaatgcactgcgcgcagctgccggtatccaacctcccggttatcttatacatgaaagcgcctgttggagtgatacattgcagcgctggtttttcctaccacgtagggctagtcaggagcggtatagtgagaaggacgatgagaggaagggagcgaacctgttactgtccgcaagtcccgacttcggagatattgcagtgtctcatgtgggcgcagttgttcccacccatggctttagtagtttcaaattcatcccgaataccgacgaccagatcatcgttgctttaaagagtgaggaggatagtggcagagtggcttcttatattatggcttttacactcgatggtaggtttctgctgcccgaaactaaaataggttccgtcaagtatgaggggatcgaatttatctag

SEQ ID NO: 274672 - DNA, 1206 bp, Artificial Sequence
  derived and/or modified sequence
atgcctgtacaactgagcgaacaccccgaatggaatgagtctatgcactcactccggatttctgtcggtggcctgcctgtgctagcctcgatgacaaaggctgcagacccccggttccgcccccgatggaaggtcatactgactttctttgttggcgccgcgatattatggctgctgtgttcgcatcggcccgctccgggtaggcctcccactcacaatgcacacaactggaggttgggccaggctccagctaactggtataatgatacataccccttatcacccccccagcggacaccggcaggcatcagatatcggatagccgtcatcgctgacttggataccgagagccgggcccaggaggaaaacacatggttctcttacctgaagaaaggatatctgaccctgtctgactccggagataaggtcgcggtcgagtgggataaggaccacggcgtgctggaatctcatctcgccgaaaaaggacgcggcatggagctgtccgacctcattgtgttcaatggcaagttgtattcagtcgatgataggacgggagtggtataccagatcgagggatctaaggcagtgccctgggtgatactgtctgacggggatggaaccgttgagaaggggtttaaggctgaatggctggccgtgaaagatgagaggttatacgtggggggtctggggaaagaatggaccacaactaccggggatgtggtaaacgagaaccccgagtgggtcaaagtggtgggatacaagggctctgtcgaccacgagaattgggtgtcgaattataatgccctgcgcgcggccgccggaatacagccccctggttacctaatccatgagtcagcctgttggtcggacacactgcagagatggtttttcctgccccgacgggcttcccaagaacgttatagtgaaaaagacgatgagagaaagggtgctaatctacttctgtcagccagccccgacttcggtgacattgcagtaagccatgtaggtgccgtagttcctactcacggtttcagcagtttcaaattcatacctaataccgacgaccagatcattgtggccctgaagtcagaggaagatagcggccgtgtggctagctacatcatggcgttcacattggatggaagatttctcctccctgaaaccaaaatcgggtccgttaagtacgaggggatcgagtttatctag

SEQ ID NO: 274673 - DNA, 738 bp, Artificial Sequence
  derived and/or modified sequence
atgccggtgcagctttcagagcatcctgagtggaacgaatcaatgcacagcctgaggatctccgtgggggggttaccagtactcgcatccatgacaaaggctgcagaccccaggtttcggccgcggtggaaagtcatcctcaccttcttcgttggggccgccattctgtggctcctgtgttcccatcgacccgcacccgggcgccctcctacccacaatgcacacaactggcgcttgggacaggcacctgcaaactggtataatgacacctatcctctgagtcccccccaacgaacacctgcgggaatcagatatcgcatagcagtaattgctgacttagatacagagagccgggctcaagaggaaaacacttggtttagctacttaaaaaagggttatctgaccttatccgacagtggtgacaaagtggcagtcgaatgggataaagatcatggagtccttgagagtcacctggccgagaaggggcgcggtatggaactcagtgacctgattgtgtttaatggaaaactgtatagcgtagacgaccgcacaggcgtcgtgtaccaaattgaaggatccaaggccgtgccctgggtgatcctttcggatggggacggaaccgtggagaaaggcgtcggcggggaatgggaggccgtgagagagatagtgaggaagagatggagactggtgaaacaggtctcacacgtgggcgtcttgggtcagtggatccaaaggtag

SEQ ID NO: 274674 - DNA, 1206 bp, Artificial Sequence
  derived and/or modified sequence
atgcctgtgcagctgtctgagcaccctgagtggaatgaatccatgcacagcctgcgcatctctgtgggcggcctgcctgtgctggcctccatgaccaaggctgctgacccccgcttccggccccgctggaaggtgatcctgaccttctttgtgggcgccgccatcctgtggctgctgtgcagccacaggcctgcccctggccggccccccacccacaatgcccacaactggaggctgggccaggccccagccaactggtacaatgacacctaccccctgagccccccccagaggaccccagctggcatccgctacagaattgctgtgattgctgacctggacacagagagccgggcccaggaggagaacacctggttctcctacctgaagaagggctacctgaccctgagtgacagcggggacaaggtggccgtggagtgggacaaggaccatggagtgctggagagccacctggccgagaagggccggggcatggagctgagtgacctgattgtgttcaacgggaagctgtacagcgtggatgacagaactggagtggtgtaccagatcgagggcagcaaggctgtgccctgggtgatcctgagtgatggagatggcaccgtggagaagggcttcaaggccgagtggctggccgtgaaggatgagcggctgtatgtgggcggcctgggcaaggagtggaccaccaccactggagatgtggtgaatgaaaatcctgagtgggtgaaggtggtgggctacaagggctctgtggaccacgagaactgggtgagcaactacaatgccctgcgggctgctgctggcatccagcccccaggctacctgattcatgaaagtgcctgctggagcgacaccctgcagcgctggttcttcctgccccggcgggccagccaggagcgctacagcgagaaggatgatgagaggaaaggagccaacctgctgctgagcgccagcccagactttggagacattgctgtgagccacgtgggcgctgtggtgcccacccacggcttcagcagcttcaagttcatccccaacacagatgaccagatcatcgtggccctgaagtcagaagaagattctggccgggtggccagctacatcatggccttcaccctggatggccgcttcctgctgcctgagaccaagattggctctgtgaagtatgagggcatcgagttcatctag

SEQ ID NO: 274675 - DNA, 1053 bp, Artificial Sequence
  derived and/or modified sequence
atgcctgtgcagctgtctgagcaccctgagtggaatgaatccatgcacagcctgcgcatctctgtgggcggcctgcctgtgctggcctccatgaccaaggctgctgacccccgcttccggcccaggagccccccccagaggaccccagctggcatccgctacagaattgctgtgattgctgacctggacacagagagccgggcccaggaggagaacacctggttctcctacctgaagaagggctacctgaccctgagtgacagcggggacaaggtggccgtggagtgggacaaggaccacggcgtgctggagagccacctggccgagaagggccggggcatggagctgagtgacctgattgtgttcaacgggaagctgtacagcgtggatgacagaactggagtggtgtaccagatcgagggcagcaaggctgtgccctgggtgatcctgagtgatggagatggcaccgtggagaagggcttcaaggccgagtggctggccgtgaaggatgagcggctgtatgtgggcggcctgggcaaggagtggaccaccaccactggagatgtggtgaatgaaaatcctgagtgggtgaaggtggtgggctacaagggctctgtggaccacgagaactgggtgagcaactacaatgccctgcgggctgctgctggcatccagcccccaggctacctgatccacgagagcgcctgctggagcgacaccctgcagcgctggttcttcctgccccggcgggccagccaggagcgctacagcgagaaggatgatgagaggaagggggccaacctgctgctgagcgccagcccagactttggagacattgctgtgagccacgtgggcgctgtggtgcccacccacggcttcagcagcttcaagttcatccccaacacagatgaccagatcatcgtggccctgaagtctgaggaggacagcggccgggtggccagctacatcatggccttcaccctggatggccgcttcctgctgcctgagaccaagattggctctgtgaagtatgagggcatcgagttcatctag

SEQ ID NO: 274676 - DNA, 738 bp, Artificial Sequence
  derived and/or modified sequence
atgcctgtgcagctgtctgagcaccctgagtggaatgaatccatgcacagcctgcgcatctctgtgggcggcctgcctgtgctggcctccatgaccaaggctgctgacccccgcttccggccccgctggaaggtgatcctgaccttctttgtgggcgccgccatcctgtggctgctgtgcagccacaggcctgcccctggccggccccccacccacaatgcccacaactggaggctgggccaggccccagccaactggtacaatgacacctaccccctgagccccccccagaggaccccagctggcatccgctacagaattgctgtgattgctgacctggacacagagagccgggcccaggaggagaacacctggttctcctacctgaagaagggctacctgaccctgagtgacagcggggacaaggtggccgtggagtgggacaaggaccatggagtgctggagagccacctggccgagaagggccggggcatggagctgagtgacctgattgtgttcaacgggaagctgtacagcgtggatgacagaactggagtggtgtaccagatcgagggcagcaaggctgtgccctgggtgatcctgagtgatggagatggcaccgtggagaagggcgtgggcggggagtgggaggccgtgcgggagatcgtgaggaagcgctggaggctggtgaagcaggtgagccacgtgggcgtgctgggccagtggatccagaggtag

SEQ ID NO: 274677 - DNA, 1206 bp, Artificial Sequence
  derived and/or modified sequence
atgcccgtgcagctgagcgagcaccccgagtggaacgagagcatgcattccctccgcatatcagtcggaggcctccccgtgctcgcgagcatgaccaaagcggctgacccgagattcagacccaggtggaaagtcattctgacttttttcgtgggcgctgccatcttgtggctgttgtgttcccacaggcctgctcctgggagacccccaacccacaacgcacacaattggcggctgggccaggcgcccgccaactggtacaacgacacctaccctctgtctccaccacagcggacccccgctggtatccggtacagaatagccgttattgccgacctcgataccgagtctcgggctcaagaggagaacacctggttctcatatctaaaaaagggttatcttacgttgtctgactccggtgataaggtggcggtggaatgggacaaagatcacggtgtgctcgagagccacttggcagaaaagggaagaggcatggagctgagcgatcttattgtgttcaacggtaagctgtattccgtggatgaccgcacaggagttgtttaccaaatagaaggatctaaggctgtgccgtgggtcatattgtccgatggcgatggcacagttgagaaaggcttcaaggccgagtggttagcagtgaaggacgagcgcctgtacgtgggaggcctgggcaaggaatggaccacaacgacgggcgacgtcgtgaatgaaaaccccgaatgggtgaaagtcgtgggctataagggctctgtagaccacgagaattgggtgagtaactataacgcactccgcgccgcagctggaatccagcccccaggttacctcattcatgaaagcgcttgctggtcagacactctccagcggtggttcttccttccacggcgcgccagtcaagagcggtactctgaaaaggatgacgaacgcaagggggccaatctgctgctcagtgctagtccagacttcggggacatcgccgttagccatgtgggagcagtggtgccaacgcacgggttttcttcttttaagtttatcccaaataccgatgatcagatcattgtggccctgaagtctgaagaagattccggccgagtcgcaagctacattatggctttcacactggacggccggtttctcctgcccgagactaagattggatccgtcaagtatgagggaatagaattcatctag

SEQ ID NO: 274678 - DNA, 1053 bp, Artificial Sequence
  derived and/or modified sequence
atgcccgtgcagctgagcgagcaccccgagtggaacgagagcatgcacagcctgagaattagtgtgggtggcctgccagtgttagccagtatgacaaaggccgctgaccccaggttccggcccagaagtccaccacagagaacaccagctggcatacggtataggatcgccgtgattgctgatctggacaccgagtccagggctcaggaagagaatacgtggttttcttatctcaagaagggttatctgacactgtcggatagtggagataaagtggcagtcgagtgggataaggatcacggcgttctggagagccacctggctgagaagggcagagggatggagctatctgatctgattgtttttaacggcaaactgtattctgtggatgacagaacgggcgtagtctatcagattgagggctctaaggctgtgccatgggtgatactctccgacggcgacgggaccgtggaaaagggcttcaaggccgagtggctcgctgtgaaagacgaacgcctttacgtcggaggtctgggaaaggagtggactacgacgacgggagatgtggtgaacgaaaacccggaatgggtgaaagttgttgggtataagggtagcgtggaccacgagaattgggtctccaactacaacgcccttagagccgccgctggcatccagcctcctgggtacctgattcacgagagcgcctgctggtccgacacactgcaacggtggttttttttaccacggcgagcaagtcaggagcgctactccgagaaggacgatgagcgaaaaggcgctaacctgctactgtcagcatctcccgactttggggatatcgcagtcagtcatgtgggggctgtggtccctacccacgggttctcatcgttcaagttcatacctaacactgacgaccagataatagtggcacttaagagtgaagaagattctggtcgtgttgcctcttatatcatggcatttaccctggatggccgatttttgctccctgagaccaaaattgggagcgtaaagtatgaaggaattgagtttatttag

SEQ ID NO: 274679 - DNA, 1206 bp, Artificial Sequence
  derived and/or modified sequence
atgcccgtgcagctgagcgagcaccccgagtggaacgagagcatgcacagtctacgcatcagcgtcggaggtctcccggttttggcctccatgaccaaagccgccgatccaaggttcaggcctcgctggaaagtgatactgaccttttttgttggagccgctatcttgtggcttctgtgttctcatcgccccgctcccggacgacctccgacccacaatgcccataattggcggctgggccaggctcctgccaattggtacaacgacacataccctctttctcccccgcaacgcacccccgctgggatacgatacagaattgcagtgattgcagatttagacacagaatcaagggcccaagaggagaacacttggttctcctatctgaaaaagggctaccttacactctctgacagtggggacaaggtggccgtggagtgggacaaggatcacggtgtcttagagtctcacctggctgagaagggccggggtatggagctcagcgatctgattgttttcaatggaaagttatattccgtggacgacagaacaggagttgtgtaccagatcgaagggagcaaagccgtcccttgggtcatcctgagtgacggtgacggaacagtggaaaaaggattcaaggctgaatggctggctgtaaaggatgagcggctgtacgttggtggtttggggaaggaatggaccacaaccaccggcgacgtggttaacgaaaaccccgaatgggtgaaagtcgtgggctacaaggggtctgtggaccatgaaaactgggtaagtaactacaatgcactgcgcgcagctgccggaattcaaccacctgggtacctaatccacgagtcggcctgctggtctgacacgcttcagaggtggttttttctgccaagaagggcctcacaggagagatattctgaaaaagatgacgagcgcaagggagctaacctcctgctgtccgcctcacctgattttggagatatcgctgtctcccatgttggcgccgtggtgcctactcacgggttctcttctttcaaattcatcccaaacaccgacgaccaaatcattgtagccttgaagagtgaggaggattctggtagggtggctagttatatcatggcattcactttggacggaaggttcctgctgcccgagacgaagatcgggtctgttaaatacgaaggcatcgaattcatctag

SEQ ID NO: 274680 - DNA, 738 bp, Artificial Sequence
  derived and/or modified sequence
atgcccgtgcagctgagcgagcaccccgagtggaacgagagcatgcattccttgcggatctccgtgggtggcctgccggtccttgcaagtatgaccaaagccgcggatcctcgatttcggccgagatggaaagtgattctgaccttttttgtgggtgctgcaatattgtggcttctgtgtagtcatcggccggcacctggcagacctccgacacacaatgctcataactggcgactcggccaagcacctgctaattggtacaacgacacttatccattgagtccccctcagcggacacctgccggaattcgatacagaattgctgtgattgccgacctggacacagagagtagggcccaggaagagaacacatggtttagttacttgaagaaggggtatctgacactgagcgatagcggagacaaagtggccgtcgagtgggataaagatcacggcgtgctagaatctcacctggctgaaaagggtcgcggaatggaactatcagatctgatagtctttaacgggaagctgtattctgtcgatgatcggacgggggtggtctatcagattgagggatcaaaagccgtgccctgggtgattttgtcggatggcgatggaacagtagaaaagggcgtgggtggggagtgggaagcagtgagggaaatcgtgcgcaagcgctggcggctcgtgaagcaggtgagccacgtgggcgtcttgggccaatggatccagagatag

SEQ ID NO: 274681 - DNA, 1206 bp, Artificial Sequence
  derived and/or modified sequence
atgccagttcaactgtctgagcatcctgaatggaacgagtcaatgcactcattacgtatttctgtaggtggactaccagtcttagcctctatgacgaaggctgctgatcccaggttccgtccaaggtggaaggtgattctaacgttctttgtaggagctgccatcctgtggctcctttgtagtcaccggccagctcccggacggccacccacccacaatgctcacaattggagattaggccaggcacctgccaattggtacaacgatacatatccactgtcaccacctcaacgcacccccgcagggattcgctacaggatagccgtaatcgccgacttggacactgagtctagagcccaggaggaaaatacttggttctcctacctgaagaagggatacctgacactttcagattccggcgacaaggtagcggtggagtgggacaaagaccacggagttctcgaatctcacctggccgagaaagggcgaggcatggagctaagtgacctgattgtatttaatggcaagctatatagcgtggatgacagaaccggggtcgtctatcaaatagagggttctaaagcggtcccgtgggtgatcctgagtgatggggatggcacagtggagaagggttttaaggcggagtggctggctgtgaaagacgagcgcctgtatgtcggcggattaggtaaggagtggaccacgacgacaggggacgtggtgaacgaaaacccagagtgggtgaaagtcgtgggatacaaaggatcagtggatcatgagaactgggtgtctaactataacgccctgagggcagcagccggtatccagccacctggatacctcatccatgaaagcgcatgttggagcgacaccctgcagagatggttttttcttcctaggagagcgtctcaggagagatactccgaaaaagacgatgagagaaagggcgcaaacctgttgctcagcgcgagccctgacttcggggatatcgcagtgagccacgtgggagccgtggttcctacccatgggttcagttccttcaagttcatccctaacaccgacgatcaaattattgttgcattgaagagcgaggaagattccgggagggtagccagctatatcatggccttcactctagatgggcgttttctgctgcctgaaactaaaatcgggtcagttaaatatgagggcatcgaatttatatag

SEQ ID NO: 274682 - DNA, 1053 bp, Artificial Sequence
  derived and/or modified sequence
atgcccgttcagttgtcagagcacccagaatggaacgagtcaatgcactcactccgaatatcagtgggaggattgcctgtactggcaagtatgacaaaagccgcagacccacggttccggccaaggtccccccctcagcgcacacccgctggaatccggtatagaattgctgtcattgccgacttagacactgagtcaagggcacaggaagaaaacacatggttttcctacctcaagaagggctatctcactctttcagacagtggcgacaaggtggccgtggagtgggataaggaccacggagtactcgagtctcatctggctgagaagggtcgcggtatggaactcagcgacttgatcgtgttcaacgggaaactatattccgtggacgaccgaacaggagtggtttatcagatcgaaggaagcaaggcggttccctgggtgatccttagcgacggcgatggcacagttgagaagggtttcaaggctgagtggctagctgttaaagacgagcgactttacgtcggagggctaggaaaggaatggactacgaccacgggcgatgtcgtgaacgaaaaccccgagtgggtgaaagtcgtaggatataaaggcagcgttgaccatgagaactgggtcagtaactataatgccctgagggcagctgcgggaattcagccacctggttacttaatccatgagtcagcctgctggtccgacacactgcaacgctggttttttctgcctaggcgcgcttcacaggagcgctactccgagaaagatgatgagcgcaagggtgctaatttgctgctgagcgcctcacccgattttggagacatagctgtcagtcacgttggagccgtggtgccaacacatggattttcgtcgttcaagtttattcccaataccgatgatcagattattgtggccttgaagtcagaggaggactccggcagagtggccagctacataatggctttcaccctggatgggagatttctgctgcccgagacaaagatcggctcggtcaaatatgaaggtattgagttcatttag

SEQ ID NO: 274683 - DNA, 1206 bp, Artificial Sequence
  derived and/or modified sequence
atgccggtgcaactgtcagagcaccctgagtggaatgagagtatgcactccctcaggatatctgtcggaggtttgcctgtcctggcttcgatgacaaaagccgctgatcctcggttccgacctcggtggaaagtgatactgacattcttcgtgggcgctgccatcctgtggttattgtgttcccaccgaccggctcctggccgaccccctactcataacgcacacaactggcggctgggacaggctcccgctaactggtataatgatacttaccctctgagcccaccacagaggacccccgcaggaatcaggtaccggatcgccgtgatcgctgatctcgacacagagtcacgggcacaagaggaaaatacctggttcagttacttaaagaaaggctatttaaccctctcagactctggtgacaaggtggccgtcgaatgggacaaagaccacggtgttctcgagtctcacctggccgaaaaaggaaggggaatggagctttcagacttgatagtgtttaatggaaaactgtactccgttgacgaccggacgggcgtagtttatcaaatagaaggcagcaaagccgtgccatgggtgatcctgtctgatggtgacggaacagtggagaaaggctttaaggcagagtggctcgcagtcaaagacgaaagactgtatgtgggtggactgggtaaagaatggacaacgacaacaggtgacgtggttaacgaaaaccctgagtgggtaaaagtcgtgggatacaaagggagtgtggaccacgaaaactgggtctcaaactataacgccctgcgcgcagcagctggaattcaacccccaggctacctcatccacgagtcggcatgttggtcggacacactgcaacgatggtttttccttcctcggcgtgcatcgcaggagcggtacagcgagaaggatgacgagcggaagggcgcaaacctattgttgagcgcatctcccgattttggcgacattgccgtaagtcatgtgggtgctgtggtgcctacccacggcttttcttcatttaaatttatcccaaacacagacgaccagatcattgtcgccctcaagagtgaggaagatagcgggagagtggctagctatataatggccttcacccttgacgggcgatttcttttgccagagaccaagataggctccgtcaagtacgaaggaatcgagtttatatag

SEQ ID NO: 274684 - DNA, 738 bp, Artificial Sequence
  derived and/or modified sequence
atgcctgtgcagttgagcgagcacccagagtggaatgagtctatgcattccttaagaatcagcgtcgggggactccctgtgctcgcctccatgaccaaagccgcagacccacggttccgccctcgttggaaagtgattttgacattttttgtcggcgcagccatactgtggttactctgctctcacagacctgctcccggaaggcccccaactcacaatgcacacaactggaggttgggccaggcgccagctaactggtataacgatacctaccctctgagcccacctcaacgcactccggctggcatccgttatcgcatcgctgtgatcgcggatctcgacacagagtcccgcgcacaggaggagaacacatggttctcatacctgaaaaaagggtacttaacactgtccgactctggcgacaaggtggccgtggagtgggacaaagatcatggcgtattagagtcccatttagctgagaaaggcagggggatggagttgtctgatctgattgtgttcaacggtaagctgtattctgtggatgacaggacaggagtagtttaccaaatcgagggttccaaagcagttccttgggtgatcttatccgatggggatggaacagtcgaaaagggcgtcggcggagaatgggaagccgtgagagaaatagtccggaaacgctggcggctggtcaagcaggtctcccacgttggggtgctgggtcagtggatccagaggtag

SEQ ID NO: 274685 - DNA, 3534 bp, Artificial Sequence
  derived and/or modified sequence
agaggctgccgggaacgcgggcccagaggcggggcgagcgcgcgcggggcggaagtcggccaccttcctccgtcccggccgttagcccagccaagcccagccaagcccagccaagccccgccgatcgcgggcaccggagccagccccgcagcggagggaccacagagcaccagcctgcatggaacttccttcctcactcagcttcccacgttgccagctgggacaggggagatggagtaattttgctgtggaaagacttcacgtcttgccgaatgaaagtaagcaaagatactgctagagtcgggaatctagagtcgggaattcattaagccaagggagtaagaatggccacagagtagtgaaatactgtttcttctggaaaagtcagcctccagcgcctgcagcttccggaactaagatgtgactgggcttgcggaggcgctgactcctctcctccctccctggctgtgcaggtcccgcctgtctgtcacgctgatgcccgtgcagctgtctgagcacccggaatggaatgagtctatgcactccctccggatcagtgtggggggccttcctgtgctggcgtccatgaccaaggccgcggacccccgcttccgcccccgctggaaggtgatcctgacgttctttgtgggtgctgccatcctctggctgctctgctcccaccgcccggcccccggcaggccccccacccacaatgcacacaactggaggctcggccaggcgcccgccaactggtacaatgacacctaccccctgtctcccccacaaaggacaccggctgggattcggtatcgaatcgcagttatcgcagacctggacacagagtcaagggcccaagaggaaaacacctggttcagttacctgaaaaagggctacctgaccctgtcagacagtggggacaaggtggccgtggaatgggacaaagaccatggggtcctggagtcccacctggcggagaaggggagaggcatggagctatccgacctgattgttttcaatgggaaactctactccgtggatgaccggacgggggtcgtctaccagatcgaaggcagcaaagccgtgccctgggtgattctgtccgacggcgacggcaccgtggagaaaggcttcaaggccgaatggctggcagtgaaggacgagcgtctgtacgtgggcggcctgggcaaggagtggacgaccactacgggtgatgtggtgaacgagaacccggagtgggtgaaggtggtgggctacaagggcagcgtggaccacgagaactgggtgtccaactacaacgccctgcgggctgctgccggcatccagccgccaggctacctcatccatgagtctgcctgctggagtgacacgctgcagcgctggttcttcctgccgcgccgcgccagccaggagcgctacagcgagaaggacgacgagcgcaagggcgccaacctgctgctgagcgcctcccctgacttcggcgacatcgctgtgagccacgtcggggcggtggtccccactcacggcttctcgtccttcaagttcatccccaacaccgacgaccagatcattgtggccctcaaatccgaggaggacagcggcagagtcgcctcctacatcatggccttcacgctggacgggcgcttcctgttgccggagaccaagatcggaagcgtgaaatacgaaggcatcgagttcatttaactcaaaacggaaacactgagcaaggccatcaggactcagcttttataaaaacaagaggagtgcacttttgttttgttttgttctttttggaactgtgcctgggttggaggtctggacagggagcccagtcccgggccccatagtggtgcgggcactggacccccgggccccacggaggccgcggtctgaactgctttccatgctgccatctggtggtgatttcggtcacttcaggcattgactcaaggcctgcctaactggctgggtcgtttcttccatccgacctcgtttcttttctttcctatgttcttttgttcagtgaatatccctagagctcctaccatatgtcaggccctatgcctcaccctgagaacgcagtgagcatgaggtggacctgtttgctgggaaccccaggtcacccccttttcttcctactctgtgcctggagcatcatgtccacccctgcagatccttggaaaagaaaatgtttatgttgcagggtattgcatggtcacgagtgagggcaggcccctggggacacatctgcccacagctgcacaggccagggcgcaggcacatctgttggttctcaggcctcagataaaaccatctccgcatcatatggccagtgaccgctttctcccttcaagaaaattctgtggctgtgcagtactttgaagttttaattattaacctgctttaattaaagcagtttcctttcttataaagtggaatcaccaaatcttatcacacagagcacagtcctgtagttacccagcccgctccagcagtgcgggagattgtaaggaagcggtggcggctggtgaagcaagtctcacatgtcggcgttcttggccaatggatacaaagataaagaaaatgttgcctttttctaggaactgtcagaaatcctcatgcctttcaagacttctgtgaatgacttgaattttttattccctgcctagggtctgtgaacgaggcctgtctcttccctggggtttctttccatggcctttatttctcctcttccagtgggagttttgcaggctcttctctgtggaaacttcacgagcgttggctgggcctcggcttcgctggagtgtactccagggtgaaggcagagtgggatttgagacccaggttaggcacgacccaggctgagaagggacgtttccatcattcacagtgccctccccacagcactacctcaccccgacccccaccctcactcctaccccaccccgcgatcgtcaggggtgccacggtgggccggagggtgccggctctggctgtccctgtgccggtccctcacaaacctctccccctttgaaactcaagcacagctgcgaggagggcagcgaggagggacccctctctcatggttgtctctttcccccgctatgtcataggtagtggaggaagcgaaggaagtgaacgctgaatgtgacgcatttctgaagagctcagctgtcaccgggcatagcctggaagccccaagtctgttctgactttgcctggctgtctccttgacccgcctcctagatcattgtccttgatgtccaggctgggtcatttaaaatagagatgcaatcaggaaggttgggggacttgggactgtggctgaattgagaccttgctgatgtattcatgtcagcacctgagtcacagcccaggtgcccggaagcagcctcttcgcataggcagtgatttgcgattactttaaagctcaccttttttcttcccctctctgttcgctgctgtcagcataatgattgtgttccttccctatgggatccatctgttttgtaaacaataaagcgtctgagggagtgt

SEQ ID NO: 274686 - DNA, 1373 bp, Artificial Sequence
  derived and/or modified sequence
agaggcggggcgagcgcgcgcggggcggaagtcggccaccttcctccgtcccggccgttagcccagccaagcccagccaagcccagccaagccccgccgatcgcgggcaccggagccagccccgcagcggagggaccacagagcaccagcctgcatggaacttccttcctcactcagcttcccacgttgccagctgggacaggggagatggagtaattttgctgtggaaagacttcacgtcttgccgaatgaaagtcccgcctgtctgtcacgctgatgcccgtgcagctgtctgagcacccggaatggaatgagtctatgcactccctccggatcagtgtggggggccttcctgtgctggcgtccatgaccaaggccgcggacccccgcttccgcccccggtctcccccacaaaggacaccggctgggattcggtatcgaatcgcagttatcgcagacctggacacagagtcaagggcccaagaggaaaacacctggttcagttacctgaaaaagggctacctgaccctgtcagacagtggggacaaggtggccgtggaatgggacaaagaccatggggtcctggagtcccacctggcggagaaggggagaggcatggagctatccgacctgattgttttcaatgggaaactctactccgtggatgaccggacgggggtcgtctaccagatcgaaggcagcaaagccgtgccctgggtgattctgtccgacggcgacggcaccgtggagaaaggcttcaaggccgaatggctggcagtgaaggacgagcgtctgtacgtgggcggcctgggcaaggagtggacgaccactacgggtgatgtggtgaacgagaacccggagtgggtgaaggtggtgggctacaagggcagcgtggaccacgagaactgggtgtccaactacaacgccctgcgggctgctgccggcatccagccgccaggctacctcatccatgagtctgcctgctggagtgacacgctgcagcgctggttcttcctgccgcgccgcgccagccaggagcgctacagcgagaaggacgacgagcgcaagggcgccaacctgctgctgagcgcctcccctgacttcggcgacatcgctgtgagccacgtcggggcggtggtccccactcacggcttctcgtccttcaagttcatccccaacaccgacgaccagatcattgtggccctcaaatccgaggaggacagcggcagagtcgcctcctacatcatggccttcacgctggacgggcgcttcctgttgccggagaccaagatcggaagcgtgaaatacgaaggcatcgagttcatttaactcaaaacggaaacactgagcaaggccatcaggactcagctttt

SEQ ID NO: 274687 - DNA, 3478 bp, Artificial Sequence
  derived and/or modified sequence
agaggctgccgggaacgcgggcccagaggcggggcgagcgcgcgcggggcggaagtcggccaccttcctccgtcccggccgttagcccagccaagcccagccaagcccagccaagccccgccgatcgcgggcaccggagccagccccgcagcgggagcctaacccagaggaagtggagactcctttactgcacatctgtctgctccaggccaggcactgttctaggagccaggatacagaggtggagacagaaacaaacaaaccgataactgtatacaatactctaacgtcagagggaccacagagcaccagcctgcatggaacttccttcctcactcagcttcccacgttgccagctgggacaggggagatggagtaattttgctgtggaaagacttcacgtcttgccgaatgaaagtcccgcctgtctgtcacgctgatgcccgtgcagctgtctgagcacccggaatggaatgagtctatgcactccctccggatcagtgtggggggccttcctgtgctggcgtccatgaccaaggccgcggacccccgcttccgcccccgctggaaggtgatcctgacgttctttgtgggtgctgccatcctctggctgctctgctcccaccgcccggcccccggcaggccccccacccacaatgcacacaactggaggctcggccaggcgcccgccaactggtacaatgacacctaccccctgtctcccccacaaaggacaccggctgggattcggtatcgaatcgcagttatcgcagacctggacacagagtcaagggcccaagaggaaaacacctggttcagttacctgaaaaagggctacctgaccctgtcagacagtggggacaaggtggccgtggaatgggacaaagaccatggggtcctggagtcccacctggcggagaaggggagaggcatggagctatccgacctgattgttttcaatgggaaactctactccgtggatgaccggacgggggtcgtctaccagatcgaaggcagcaaagccgtgccctgggtgattctgtccgacggcgacggcaccgtggagaaaggcttcaaggccgaatggctggcagtgaaggacgagcgtctgtacgtgggcggcctgggcaaggagtggacgaccactacgggtgatgtggtgaacgagaacccggagtgggtgaaggtggtgggctacaagggcagcgtggaccacgagaactgggtgtccaactacaacgccctgcgggctgctgccggcatccagccgccaggctacctcatccatgagtctgcctgctggagtgacacgctgcagcgctggttcttcctgccgcgccgcgccagccaggagcgctacagcgagaaggacgacgagcgcaagggcgccaacctgctgctgagcgcctcccctgacttcggcgacatcgctgtgagccacgtcggggcggtggtccccactcacggcttctcgtccttcaagttcatccccaacaccgacgaccagatcattgtggccctcaaatccgaggaggacagcggcagagtcgcctcctacatcatggccttcacgctggacgggcgcttcctgttgccggagaccaagatcggaagcgtgaaatacgaaggcatcgagttcatttaactcaaaacggaaacactgagcaaggccatcaggactcagcttttataaaaacaagaggagtgcacttttgttttgttttgttctttttggaactgtgcctgggttggaggtctggacagggagcccagtcccgggccccatagtggtgcgggcactggacccccgggccccacggaggccgcggtctgaactgctttccatgctgccatctggtggtgatttcggtcacttcaggcattgactcaaggcctgcctaactggctgggtcgtttcttccatccgacctcgtttcttttctttcctatgttcttttgttcagtgaatatccctagagctcctaccatatgtcaggccctatgcctcaccctgagaacgcagtgagcatgaggtggacctgtttgctgggaaccccaggtcacccccttttcttcctactctgtgcctggagcatcatgtccacccctgcagatccttggaaaagaaaatgtttatgttgcagggtattgcatggtcacgagtgagggcaggcccctggggacacatctgcccacagctgcacaggccagggcgcaggcacatctgttggttctcaggcctcagataaaaccatctccgcatcatatggccagtgaccgctttctcccttcaagaaaattctgtggctgtgcagtactttgaagttttaattattaacctgctttaattaaagcagtttcctttcttataaagtggaatcaccaaatcttatcacacagagcacagtcctgtagttacccagcccgctccagcagtgcgggagattgtaaggaagcggtggcggctggtgaagcaagtctcacatgtcggcgttcttggccaatggatacaaagataaagaaaatgttgcctttttctaggaactgtcagaaatcctcatgcctttcaagacttctgtgaatgacttgaattttttattccctgcctagggtctgtgaacgaggcctgtctcttccctggggtttctttccatggcctttatttctcctcttccagtgggagttttgcaggctcttctctgtggaaacttcacgagcgttggctgggcctcggcttcgctggagtgtactccagggtgaaggcagagtgggatttgagacccaggttaggcacgacccaggctgagaagggacgtttccatcattcacagtgccctccccacagcactacctcaccccgacccccaccctcactcctaccccaccccgcgatcgtcaggggtgccacggtgggccggagggtgccggctctggctgtccctgtgccggtccctcacaaacctctccccctttgaaactcaagcacagctgcgaggagggcagcgaggagggacccctctctcatggttgtctctttcccccgctatgtcataggtagtggaggaagcgaaggaagtgaacgctgaatgtgacgcatttctgaagagctcagctgtcaccgggcatagcctggaagccccaagtctgttctgactttgcctggctgtctccttgacccgcctcctagatcattgtccttgatgtccaggctgggtcatttaaaatagagatgcaatcaggaaggttgggggacttgggactgtggctgaattgagaccttgctgatgtattcatgtcagcacctgagtcacagcccaggtgcccggaagcagcctcttcgcataggcagtgatttgcgattactttaaagctcaccttttttcttcccctctctgttcgctgctgtcagcataatgattgtgttccttccctatgggatccatctgttttgtaaacaataaagcgtctgagggagtgt

SEQ ID NO: 274688 - DNA, 1138 bp, Artificial Sequence
  derived and/or modified sequence
gcgcgcggggcggaagtcggccaccttcctccgtcccggccgttagcccagccaagcccagccaagcccagccaagccccgccgatcgcgggcaccggagccagccccgcagcgggagcctaacccagaggaagtggagactcctttactgcacatctgtctgctccaggccaggcactgttctaggagccaggatacagaggtggagacagaaacaaacaaaccgataactgtatacaatactctaacgtcagagggaccacagagcaccagcctgcatggaacttccttcctcactcagcttcccacgttgccagctgggacaggggagatggagtaattttgctgtggaaagacttcacgtcttgccgaatgaaagtcccgcctgtctgtcacgctgatgcccgtgcagctgtctgagcacccggaatggaatgagtctatgcactccctccggatcagtgtggggggccttcctgtgctggcgtccatgaccaaggccgcggacccccgcttccgcccccgctggaaggtgatcctgacgttctttgtgggtgctgccatcctctggctgctctgctcccaccgcccggcccccggcaggccccccacccacaatgcacacaactggaggctcggccaggcgcccgccaactggtacaatgacacctaccccctgtctcccccacaaaggacaccggctgggattcggtatcgaatcgcagttatcgcagacctggacacagagtcaagggcccaagaggaaaacacctggttcagttacctgaaaaagggctacctgaccctgtcagacagtggggacaaggtggccgtggaatgggacaaagaccatggggtcctggagtcccacctggcggagaaggggagaggcatggagctatccgacctgattgttttcaatgggaaactctactccgtggatgaccggacgggggtcgtctaccagatcgaaggcagcaaagccgtgccctgggtgattctgtccgacggcgacggcaccgtggagaaaggtgtgggtggggagtgggaggcagtgcgggagattgtaaggaagcggtggcggctggtgaagcaagtctcacatgtcggcgttcttggccaatggatacaaagataa

SEQ ID NO: 274689 - DNA, 1206 bp, Artificial Sequence
  derived and/or modified sequence
atgcccgtgcagctgagcgagcaccccgagtggaacgagagcatgcacagcctgagaatcagcgtgggcggcctgcccgtgctggccagcatgaccaaggccgccgaccccagattcagacccagatggaaggtgatcctgaccttcttcgtgggcgccgccatcctgtggctgctgtgcagccacagacccgcccccggcagaccccccacccacaacgcccacaactggagactgggccaggcccccgccaactggtacaacgacacctaccccctgagccccccccagagaacccccgccggcatcagatacagaatcgccgtgatcgccgacctggacaccgagagcagagcccaggaggagaacacctggttcagctacctgaagaagggctacctgaccctgagcgacagcggcgacaaggtggccgtggagtgggacaaggaccacggcgtgctggagagccacctggccgagaagggcagaggcatggagctgagcgacctgatcgtgttcaacggcaagctgtacagcgtggacgacagaaccggcgtggtgtaccagatcgagggcagcaaggccgtgccctgggtgatcctgagcgacggcgacggcaccgtggagaagggcttcaaggccgagtggctggccgtgaaggacgagagactgtacgtgggcggcctgggcaaggagtggaccaccaccaccggcgacgtggtgaacgagaaccccgagtgggtgaaggtggtgggctacaagggcagcgtggaccacgagaactgggtgagcaactacaacgccctgagagccgccgccggcatccagccccccggctacctgatccacgagagcgcctgctggagcgacaccctgcagagatggttcttcctgcccagaagagccagccaggagagatacagcgagaaggacgacgagagaaagggcgccaacctgctgctgagcgccagccccgacttcggcgacatcgccgtgagccacgtgggcgccgtggtgcccacccacggcttcagcagcttcaagttcatccccaacaccgacgaccagatcatcgtggccctgaagagcgaggaggacagcggcagagtggccagctacatcatggccttcaccctggacggcagattcctgctgcccgagaccaagatcggcagcgtgaagtacgagggcatcgagttcatctag

SEQ ID NO: 274690 - DNA, 1053 bp, Artificial Sequence
  derived and/or modified sequence
atgcccgtgcagctgagcgagcaccccgagtggaacgagagcatgcacagcctgagaatcagcgtgggcggcctgcccgtgctggccagcatgaccaaggccgccgaccccagattcagacccagaagccccccccagagaacccccgccggcatcagatacagaatcgccgtgatcgccgacctggacaccgagagcagagcccaggaggagaacacctggttcagctacctgaagaagggctacctgaccctgagcgacagcggcgacaaggtggccgtggagtgggacaaggaccacggcgtgctggagagccacctggccgagaagggcagaggcatggagctgagcgacctgatcgtgttcaacggcaagctgtacagcgtggacgacagaaccggcgtggtgtaccagatcgagggcagcaaggccgtgccctgggtgatcctgagcgacggcgacggcaccgtggagaagggcttcaaggccgagtggctggccgtgaaggacgagagactgtacgtgggcggcctgggcaaggagtggaccaccaccaccggcgacgtggtgaacgagaaccccgagtgggtgaaggtggtgggctacaagggcagcgtggaccacgagaactgggtgagcaactacaacgccctgagagccgccgccggcatccagccccccggctacctgatccacgagagcgcctgctggagcgacaccctgcagagatggttcttcctgcccagaagagccagccaggagagatacagcgagaaggacgacgagagaaagggcgccaacctgctgctgagcgccagccccgacttcggcgacatcgccgtgagccacgtgggcgccgtggtgcccacccacggcttcagcagcttcaagttcatccccaacaccgacgaccagatcatcgtggccctgaagagcgaggaggacagcggcagagtggccagctacatcatggccttcaccctggacggcagattcctgctgcccgagaccaagatcggcagcgtgaagtacgagggcatcgagttcatctag

SEQ ID NO: 274691 - DNA, 738 bp, Artificial Sequence
  derived and/or modified sequence
atgcccgtgcagctgagcgagcaccccgagtggaacgagagcatgcacagcctgagaatcagcgtgggcggcctgcccgtgctggccagcatgaccaaggccgccgaccccagattcagacccagatggaaggtgatcctgaccttcttcgtgggcgccgccatcctgtggctgctgtgcagccacagacccgcccccggcagaccccccacccacaacgcccacaactggagactgggccaggcccccgccaactggtacaacgacacctaccccctgagccccccccagagaacccccgccggcatcagatacagaatcgccgtgatcgccgacctggacaccgagagcagagcccaggaggagaacacctggttcagctacctgaagaagggctacctgaccctgagcgacagcggcgacaaggtggccgtggagtgggacaaggaccacggcgtgctggagagccacctggccgagaagggcagaggcatggagctgagcgacctgatcgtgttcaacggcaagctgtacagcgtggacgacagaaccggcgtggtgtaccagatcgagggcagcaaggccgtgccctgggtgatcctgagcgacggcgacggcaccgtggagaagggcgtgggcggcgagtgggaggccgtgagagagatcgtgagaaagagatggagactggtgaagcaggtgagccacgtgggcgtgctgggccagtggatccagagatag

SEQ ID NO: 274692 - DNA, 576 bp, Artificial Sequence
  derived and/or modified sequence
atgtggtggagcagcactcagaatgccgggaccgagggcgaagctggaccaccgggccttccagggcccccaggtccgaagggtgcgccaggcaaaccaggtaaacccggggaagccggattacctgggctccctggggtcgatggtctcacggggcgtgatggtccccccggccctaagggggccccaggggagcgggggtcattagggccgcccggccctcctgggctcggcggcaagggcctgcccggaccccctggagaagctggagtttctggaccccctggaggaatcggattacgcggtcctcccgggcctagcggcctcccggggctgcctggacctccaggacctcccggaccgccaggtcaccctggtgtgttaccagaaggggctaccgacctccagtgcccctcaatctgcccccctggcccgcctggccctcccggaatgccgggattcaaaggtccgaccggttacaagggcgagcagggcgaggttgggaaggacggcgagaaaggcgacccaggccccccaggccccgctggcctgccgggctctgtgggtctgcaatag

SEQ ID NO: 274693 - DNA, 555 bp, Artificial Sequence
  derived and/or modified sequence
atgcctgtgaagggggccagcagcctgctcttcctgcccctgcccccatctgcctggcagctgtgcctgctgagcaagagaagagtgcaccccatccgcacccccctgcccttccacagctggatcaaggccctggtgatcagcaaccagaaggtgcctgagcgggagaggcctgagggcactggagtgctgagtgatggctgcctgggccagagccaggagggggagcccctgctgagccccccagccctggcccacttccccctgcacgcccgctgctgcggcagctcctgggcctggccaggcagcgctggggaggccatccgcatggtgtctggggcccccttcctgtgcttcctggatggcctggatggcctgccctgcagcagccccatggccgccctgcctgcccccatggccgccctgcctgcccggcggcagaggcaggagcacatcgagggcggcagccagggctgcggcgtgcgcagccctgccccctgccggggcaagccaggcagcgccaccagcagcaccctgcggctgtgcccagcctag

SEQ ID NO: 274694 - DNA, 6727 bp, Artificial Sequence
  derived and/or modified sequence
agcagacgggagtttctcctcggggtcggagcaggaggcacgcggagtgtgaggccacgcatgagcggacgctaaccccctccccagccacaaagagtctacatgtctagggtctagacatgttcagctttgtggacctccggctcctgctcctcttagcggccaccgccctcctgacgcacggccaagaggaaggccaagtcgagggccaagacgaagacatcccaccaatcacctgcgtacagaacggcctcaggtaccatgaccgagacgtgtggaaacccgagccctgccggatctgcgtctgcgacaacggcaaggtgttgtgcgatgacgtgatctgtgacgagaccaagaactgccccggcgccgaagtccccgagggcgagtgctgtcccgtctgccccgacggctcagagtcacccaccgaccaagaaaccaccggcgtcgagggacccaagggagacactggcccccgaggcccaaggggacccgcaggcccccctggccgagatggcatccctggacagcctggacttcccggaccccccggaccccccggacctcccggaccccctggcctcggaggaaactttgctccccagctgtcttatggctatgatgagaaatcaaccggaggaatttccgtgcctggccccatgggtccctctggtcctcgtggtctccctggcccccctggtgcacctggtccccaaggcttccaaggtccccctggtgagcctggcgagcctggagcttcaggtcccatgggtccccgaggtcccccaggtccccctggaaagaatggagatgatggggaagctggaaaacctggtcgtcctggtgagcgtgggcctcctgggcctcagggtgctcgaggattgcccggaacagctggcctccctggaatgaagggacacagaggtttcagtggtttggatggtgccaagggagatgctggtcctgctggtcctaagggtgagcctggcagccctggtgaaaatggagctcctggtcagatgggcccccgtggcctgcctggtgagagaggtcgccctggagcccctggccctgctggtgctcgtggaaatgatggtgctactggtgctgccgggccccctggtcccaccggccccgctggtcctcctggcttccctggtgctgttggtgctaagggtgaagctggtccccaagggccccgaggctctgaaggtccccagggtgtgcgtggtgagcctggcccccctggccctgctggtgctgctggccctgctggaaaccctggtgctgatggacagcctggtgctaaaggtgccaatggtgctcctggtattgctggtgctcctggcttccctggtgcccgaggcccctctggaccccagggccccggcggccctcctggtcccaagggtaacagcggtgaacctggtgctcctggcagcaaaggagacactggtgctaagggagagcctggccctgttggtgttcaaggaccccctggccctgctggagaggaaggaaagcgaggagctcgaggtgaacccggacccactggcctgcccggaccccctggcgagcgtggtggacctggtagccgtggtttccctggcgcagatggtgttgctggtcccaagggtcccgctggtgaacgtggttctcctggccctgctggccccaaaggatctcctggtgaagctggtcgtcccggtgaagctggtctgcctggtgccaagggtctgactggaagccctggcagccctggtcctgatggcaaaactggcccccctggtcccgccggtcaagatggtcgccccggacccccaggcccacctggtgcccgtggtcaggctggtgtgatgggattccctggacctaaaggtgctgctggagagcccggcaaggctggagagcgaggtgttcccggaccccctggcgctgtcggtcctgctggcaaagatggagaggctggagctcagggaccccctggccctgctggtcccgctggcgagagaggtgaacaaggccctgctggctcccccggattccagggtctccctggtcctgctggtcctccaggtgaagcaggcaaacctggtgaacagggtgttcctggagaccttggcgcccctggcccctctggagcaagaggcgagagaggtttccctggcgagcgtggtgtgcaaggtccccctggtcctgctggtccccgaggggccaacggtgctcccggcaacgatggtgctaagggtgatgctggtgcccctggagctcccggtagccagggcgcccctggccttcagggaatgcctggtgaacgtggtgcagctggtcttccagggcctaagggtgacagaggtgatgctggtcccaaaggtgctgatggctctcctggcaaagatggcgtccgtggtctgactggccccattggtcctcctggccctgctggtgcccctggtgacaagggtgaaagtggtcccagcggccctgctggtcccactggagctcgtggtgcccccggagaccgtggtgagcctggtccccccggccctgctggctttgctggcccccctggtgctgacggccaacctggtgctaaaggcgaacctggtgatgctggtgctaaaggcgatgctggtccccctggccctgccggacccgctggaccccctggccccattggtaatgttggtgctcctggagccaaaggtgctcgcggcagcgctggtccccctggtgctactggtttccctggtgctgctggccgagtcggtcctcctggcccctctggaaatgctggaccccctggccctcctggtcctgctggcaaagaaggcggcaaaggtccccgtggtgagactggccctgctggacgtcctggtgaagttggtccccctggtccccctggccctgctggcgagaaaggatcccctggtgctgatggtcctgctggtgctcctggtactcccgggcctcaaggtattgctggacagcgtggtgtggtcggcctgcctggtcagagaggagagagaggcttccctggtcttcctggcccctctggtgaacctggcaaacaaggtccctctggagcaagtggtgaacgtggtccccctggtcccatgggcccccctggattggctggaccccctggtgaatctggacgtgagggggctcctggtgccgaaggttcccctggacgagacggttctcctggcgccaagggtgaccgtggtgagaccggccccgctggaccccctggtgctcctggtgctcctggtgcccctggccccgttggccctgctggcaagagtggtgatcgtggtgagactggtcctgctggtcccaccggtcctgtcggccctgttggcgcccgtggccccgccggaccccaaggcccccgtggtgacaagggtgagacaggcgaacagggcgacagaggcataaagggtcaccgtggcttctctggcctccagggtccccctggccctcctggctctcctggtgaacaaggtccctctggagcctctggtcctgctggtccccgaggtccccctggctctgctggtgctcctggcaaagatggactcaacggtctccctggccccattgggccccctggtcctcgcggtcgcactggtgatgctggtcctgttggtccccccggccctcctggacctcctggtccccctggtcctcccagcgctggtttcgacttcagcttcctgccccagccacctcaagagaaggctcacgatggtggccgctactaccgggctgatgatgccaatgtggttcgtgaccgtgacctcgaggtggacaccaccctcaagagcctgagccagcagatcgagaacatccggagcccagagggcagccgcaagaaccccgcccgcacctgccgtgacctcaagatgtgccactctgactggaagagtggagagtactggattgaccccaaccaaggctgcaacctggatgccatcaaagtcttctgcaacatggagactggtgagacctgcgtgtaccccactcagcccagtgtggcccagaagaactggtacatcagcaagaaccccaaggacaagaggcatgtctggttcggcgagagcatgaccgatggattccagttcgagtatggcggccagggctccgaccctgccgatgtggccatccagctgaccttcctgcgcctgatgtccaccgaggcctcccagaacatcacctaccactgcaagaacagcgtggcctacatggaccagcagactggcaacctcaagaaggccctgctcctccagggctccaacgagatcgagatccgcgccgagggcaacagccgcttcacctacagcgtcactgtcgatggctgcacgagtcacaccggagcctggggcaagacagtgattgaatacaaaaccaccaagacctcccgcctgcccatcatcgatgtggcccccttggacgttggtgccccagaccaggaattcggcttcgacgttggccctgtctgcttcctgtaaactccctccatcccaacctggctccctcccacccaaccaactttccccccaacccggaaacagacaagcaacccaaactgaaccccctcaaaagccaaaaaatgggagacaatttcacatggactttggaaaatatttttttcctttgcattcatctctcaaacttagtttttatctttgaccaaccgaacatgaccaaaaaccaaaagtgcattcaaccttaccaaaaaaaaaaaaaaaaaaagaataaataaataactttttaaaaaaggaagcttggtccacttgcttgaagacccatgcgggggtaagtccctttctgcccgttgggcttatgaaaccccaatgctgccctttctgctcctttctccacaccccccttggggcctcccctccactccttcccaaatctgtctccccagaagacacaggaaacaatgtattgtctgcccagcaatcaaaggcaatgctcaaacacccaagtggcccccaccctcagcccgctcctgcccgcccagcacccccaggccctgggggacctggggttctcagactgccaaagaagccttgccatctggcgctcccatggctcttgcaacatctccccttcgtttttgagggggtcatgccgggggagccaccagcccctcactgggttcggaggagagtcaggaagggccacgacaaagcagaaacatcggatttggggaacgcgtgtcaatcccttgtgccgcagggctgggcgggagagactgttctgttccttgtgtaactgtgttgctgaaagactacctcgttcttgtcttgatgtgtcaccggggcaactgcctgggggcggggatgggggcagggtggaagcggctccccattttataccaaaggtgctacatctatgtgatgggtggggtggggagggaatcactggtgctatagaaattgagatgcccccccaggccagcaaatgttcctttttgttcaaagtctatttttattccttgatatttttctttttttttttttttttttgtggatggggacttgtgaatttttctaaaggtgctatttaacatgggaggagagcgtgtgcggctccagcccagcccgctgctcactttccaccctctctccacctgcctctggcttctcaggcctctgctctccgacctctctcctctgaaaccctcctccacagctgcagcccatcctcccggctccctcctagtctgtcctgcgtcctctgtccccgggtttcagagacaacttcccaaagcacaaagcagtttttccccctaggggtgggaggaagcaaaagactctgtacctattttgtatgtgtataataatttgagatgtttttaattattttgattgctggaataaagcatgtggaaatgacccaaacataatccgcagtggcctcctaatttccttctttggagttgggggaggggtagacatggggaaggggctttggggtgatgggcttgccttccattcctgccctttccctccccactattctcttctagatccctccataaccccactcccctttctctcacccttcttataccgcaaacctttctacttcctctttcattttctattcttgcaatttccttgcaccttttccaaatcctcttctcccctgcaataccatacaggcaatccacgtgcacaacacacacacacactcttcacatctggggttgtccaaacctcatacccactccccttcaagcccatccactctccaccccctggatgccctgcacttggtggcggtgggatgctcatggatactgggagggtgaggggagtggaacccgtgaggaggacctgggggcctctccttgaactgacatgaagggtcatctggcctctgctcccttctcacccacgctgacctcctgccgaaggagcaacgcaacaggagaggggtctgctgagcctggcgagggtctgggagggaccaggaggaaggcgtgctccctgctcgctgtcctggccctgggggagtgagggagacagacacctgggagagctgtggggaaggcactcgcaccgtgctcttgggaaggaaggagacctggccctgctcaccacggactgggtgcctcgacctcctgaatccccagaacacaacccccctgggctggggtggtctggggaaccatcgtgcccccgcctcccgcctactcctttttaagctt

SEQ ID NO: 274695 - DNA, 429 bp, Artificial Sequence
  derived and/or modified sequence
atgaacattaatccatgcttagtactgtgcgagtgttctcttagcatcagcctggacgcagacccactggtgtctccctttgcgactggcccgtgtccaggggcccccagagaggtcgtggccatgcagagcgacgttgggcagggttttcccatgcagagcaactggcgggccccagtccatgcgtgtacctccggggccgtcaggaaagggtggccaggatgtggccgcaggcggcataagatggggggcggtcccgtgtcctgggagcaaagacagaaggaagtggaggccgctcaagggtctgaggagcgcgggcccggatcgttagccgtctctctgttgtccttagccgttggcatccataggataagtccaattctgggattccatatttgctgtatgcaggtgctgatggtgctgaagtag

SEQ ID NO: 274696 - DNA, 4395 bp, Artificial Sequence
  derived and/or modified sequence
atgttctcgttcgtggaccttcgcctgctcctgcttctggccgctactgccctgctcacacatggacaagaagagggacaggtcgaaggccaggacgaggacatcccgcccatcacctgcgtccagaatggacttaggtaccatgacagagacgtgtggaagcccgaaccctgccggatctgtgtatgtgacaacggcaaagtgctgtgtgatgacgttatttgcgacgaaacaaaaaactgtcctggggcagaggtaccggaaggagagtgctgccccgtctgccccgacgggtcagaaagccctaccgatcaagagacaaccggggtagagggaccgaaaggcgacaccgggcctagggggcctagggggcccgcgggaccccctggacgtgatgggattcccggacagcccggcctgccgggaccacccggtccccccggaccgcccggtcctcccgggttgggaggaaatttcgccccccagctgagttatgggtacgacgaaaaaagcacggggggaatcagtgttcctgggcctatgggcccctccggccctagaggtctgcccgggccccccggggcgccgggaccccagggattccaaggccctccaggcgagcccggcgagcctggggcttctggaccaatgggccctagaggcccacctggaccaccagggaaaaatggggacgacggagaagccggcaagcctggcagacccggcgagaggggccccccagggccccagggcgcccgcggactccccgggactgctgggctgccggggatgaagggacatcggggattttccggtttggatggagccaagggtgacgcaggcccggctgggcccaagggtgagccggggtcacctggcgagaatggggcacccggccaaatgggaccacggggactgcctggggagcgtgggaggcctggcgctcctggacccgctggggcccggggaaatgacggggcaaccggagccgccggacctccgggcccaaccgggcccgccgggccacccggctttcctggagccgttggtgcgaagggggaagcaggacctcaagggccgcgcgggtccgaggggccgcaaggcgtccggggggagcctggaccaccaggccccgccggcgcggctgggcccgctggcaacccaggggctgatgggcagcccggggcaaaaggggccaatggcgcccccggaatcgctggagcaccgggattccctggcgcacgaggcccctcagggccccagggtccaggggggccacccgggcccaaagggaattccggagaaccaggagctccaggctccaaaggtgataccggcgccaaaggtgagcccggaccagttggcgtgcagggcccccccggcccagccggggaagaaggaaagcgcggcgctagaggggaacccggccccacaggcctccctggtccaccaggggaacgcggcggacccggttctcggggattccctggggcagacggtgttgctgggcccaaaggaccagcaggagagcggggctcacctgggcctgccggtcccaagggcagccccggcgaggcagggagacccggtgaggccggtttgcctggggcaaagggattgactggatcacctggctccccagggcctgacgggaaaacagggccacccggacctgctgggcaggatggccgtccgggtccacctggtcctccaggcgcacgcggacaagcgggggtcatggggtttccagggccaaagggcgctgctggcgaacccgggaaggcgggggagaggggcgtgccaggccctcccggcgctgtgggccctgcaggcaaagatggcgaagccggggcccaaggacccccagggccagccgggccagctggagaaaggggagagcaagggccagctggaagtcccggcttccagggcctgcccgggccagctggaccaccaggtgaagctggcaagccgggcgagcagggggtgcctggcgaccttggcgcccctggtccctccggggctaggggcgagcgtggattcccgggtgaacggggagtacaaggaccgcccggtcccgccgggccccgcggggcaaatggagccccgggcaatgacggagccaaaggcgatgccggcgctcccggggcacctggtagccagggggcccctggcctgcaggggatgcccggtgagcgtggggccgctggcttgcctggtcccaagggagatagaggagacgccggaccaaagggcgctgacggatctcccggcaaggacggagtgagagggctgacgggcccaatcggcccacccgggccagctggagctcccggtgataaaggggagtccggtccttcgggaccagcaggtccaaccggcgctcggggagcaccaggggatagaggcgaacccggcccacccggacctgctggctttgctggcccacctggtgccgacggacagcctggagccaaaggggagcctggcgacgctggcgccaagggcgacgcaggtccacccggcccagctgggcctgccggtccaccagggcctatcgggaacgtaggggctccaggagccaagggcgcacggggctcagctgggccgccaggcgccactggattccctggcgccgcaggacgggtaggaccacctggcccctcaggaaatgccggccccccaggcccacctggaccagctgggaaggagggcggcaaaggacctcggggcgaaacaggaccagccgggcgccccggggaggttgggccgccgggtcccccaggacccgcaggcgagaaagggagcccaggcgcggacgggcctgccggcgcacccggaacaccaggccctcaaggcatagctggccaaagaggagtggttggccttcctggacagagaggcgaacgcggattccctggcctgcctggcccctccggtgagcctggaaagcagggaccatctggagcatccggcgagcggggccctccgggtcccatgggtcctccagggctggctggaccgcccggcgagagcggtagggagggggcacccggagctgagggatccccaggaagggacgggagcccaggcgctaaaggcgaccgcggtgaaactggacccgcgggaccaccaggagctccaggagcaccaggggcgcctggacccgttggaccggcggggaagtctggtgataggggcgaaacaggcccagccggccctacaggaccagtgggccctgtgggggcgagggggcctgccgggccccaaggccctcgtggagacaagggcgagacaggcgagcagggcgacaggggcattaaaggccacaggggttttagcggtttgcagggccctccaggcccacccggcagccccggagaacagggccccagcggcgcctccggtccggctggccccaggggaccgcctgggagcgccggcgctcctggaaaggacggcctcaatggtttgccaggcccgattggccctccaggtccccgaggccgtacaggggacgctggccccgtcgggcccccagggcctcctggccctcctggaccgcccggaccacccagtgccggtttcgatttcagttttctaccccaaccaccccaggaaaaggcacatgacggaggccggtactacagggccgatgatgccaatgtggtcagagacagagacctcgaggtggatacgacactcaagagtctgagccaacaaatcgaaaatatccgctcacccgaagggtccagaaagaatcctgcgcgtacctgcagggatttgaagatgtgtcattctgactggaaaagcggggagtactggatcgaccccaatcaaggttgcaacctcgatgcaatcaaggttttttgcaacatggagaccggggagacctgtgtgtacccaactcagcccagtgtggcccagaaaaattggtatatctcaaagaatcccaaggataagaggcatgtgtggtttggcgaatctatgactgacggcttccagttcgagtacgggggacaagggtccgaccccgctgacgtcgcaatccaactgactttcttgcggcttatgtcgaccgaggcatcacaaaacatcacataccattgcaagaattctgtggcttatatggaccagcagaccggtaacttaaagaaggcccttctcctccaaggctcaaacgagatcgaaatcagagctgaaggcaactctcgttttacttatagtgttaccgtggacggttgtactagtcacactggtgcatgggggaagacggtgatagagtataagacgacaaaaaccagtaggttgcccatcatcgatgttgcccccctcgacgtgggagcaccagatcaggagttcggcttcgatgtaggccctgtttgctttctgtag

SEQ ID NO: 274697 - DNA, 4395 bp, Artificial Sequence
  derived and/or modified sequence
atgttctcctttgtggacctgcggctgctgctgctgctggccgccacagccctgctgacccacggccaggaggagggccaggtggagggccaggatgaggacatcccccccatcacctgtgtgcagaatggcctgcgctaccatgacagagatgtgtggaagccagagccctgccgcatctgtgtgtgtgacaatggcaaggtgctgtgtgatgatgtgatctgtgatgagaccaagaactgccctggagctgaggtgcctgagggggagtgctgccctgtgtgcccagatggcagcgagagccccacagaccaggagaccaccggggtggagggccccaagggggacaccggcccccggggcccccggggccctgctggccccccaggaagagatggcatccctggccagcccggcctgcccggccccccaggccccccaggccccccaggccccccaggcctgggcggcaactttgccccccagctgtcctatggctatgatgagaagagcactggaggcatctctgtgcccggccccatgggccccagcggcccccggggcctgcccggccccccaggggcccctggcccccagggcttccagggccccccaggagagcccggggagcccggggccagcggccccatgggcccccggggccccccaggccccccaggcaagaatggagatgatggagaggccggcaagccaggccggcctggagagcggggccccccaggcccccagggcgcccggggcctgcccggcacagctggcctgcccggcatgaagggccaccggggcttcagcggcctggatggagccaagggagatgctggccctgctggccccaagggggagcccggcagccctggagaaaatggagcccctggccagatgggcccccggggcctgcctggagagcggggccggcctggggcccctggccctgctggggcccggggaaatgatggagccaccggggctgctggccccccaggccccactggacctgctggccccccaggcttccctggagctgtgggcgccaagggggaggccggcccccagggcccccggggcagcgagggcccccagggcgtgcggggggagcccggccccccaggccctgctggagctgctggccctgctggcaaccctggagcagatggccagcccggggccaagggggccaacggggcccctggcattgctggggcccctggcttccctggggcccggggccccagcggcccccagggccctgggggccccccaggccccaagggcaacagcggggagcccggggcccctggcagcaagggggacacaggagccaagggggagcccggccctgtgggcgtgcagggccccccaggccctgctggggaggagggcaagagaggagcccggggggagcccggccccaccggcctgcccggccccccaggagagcggggcggccctggcagccggggcttccctggagcagatggagtggccggccccaagggccctgctggggagcggggcagccctggccctgctggccccaagggcagccctggagaggccggccggcctggagaggccggcctgcccggggccaagggcctgaccggcagccctggcagccctggcccagatggcaagacaggccccccaggccctgctggccaggacggccggcccggccccccaggccccccaggggcccggggccaggccggcgtgatgggcttccctggccccaagggagctgctggggagcccgggaaggccggggagcggggcgtgcccggccccccaggagctgtgggccctgctgggaaggatggagaggccggggcccagggccccccaggccctgctggccctgctggggagcggggggagcagggccctgctggcagccctggcttccagggcctgcccggccctgctggccccccaggagaggccggcaagccaggagagcagggcgtgcctggggacctgggcgcccctggccccagcggggcccggggggagcggggcttccctggagagcggggcgtgcagggccccccaggccctgctggccccaggggggccaacggggcccctggaaatgatggagccaagggagatgctggggcccctggggcccctggcagccagggcgcccctggcctgcagggcatgcctggagagagaggagctgctggcctgcccggccccaagggggacagaggagatgctggccccaagggagcagatggcagccctgggaaggatggagtgcggggcctgaccggccccatcggccccccaggccctgctggggcccctggggacaagggggagagcggccccagcggccctgctggccccactggagcccggggggcccctggggacagaggagagcccggccccccaggccctgctggctttgctggccccccaggagcagatggccagcccggggccaagggggagcctggagatgctggggccaagggagatgctggccccccaggccctgctggccctgctggccccccaggccccatcggaaatgtgggcgcccctggggccaagggggcccggggcagcgctggccccccaggggccaccggcttccctggagctgctggccgggtgggccccccaggccccagcggaaatgccggccccccaggccccccaggccctgctgggaaggagggcggcaagggccccagaggagaaacaggccctgctggccggcctggagaggtgggccccccaggccccccaggccctgctggggagaagggcagccctggagcagatggccctgctggggcccctggcaccccaggcccccagggcattgctggccagaggggcgtggtgggcctgcccggccagagaggagagcggggcttccctggcctgcccggccccagcggggagcccgggaagcagggccccagcggggccagcggggagcggggccccccaggccccatgggccccccaggcctggccggccccccaggagagagcggccgggagggcgcccctggagctgagggcagccctggaagagatggcagccctggggccaagggggacagaggagaaacaggccctgctggccccccaggggcccctggggcccctggggcccctggccctgtgggccctgctgggaagagcggggacagaggagaaacaggccctgctggccccactggacctgtgggccctgtgggcgcccggggccctgctggcccccagggccccaggggggacaagggggagactggagagcagggcgaccggggcatcaagggccaccggggcttcagcggcctgcagggccccccaggccccccaggcagccctggagagcagggccccagcggggccagcggccctgctggcccccggggccccccaggcagcgctggggcccctgggaaggatggcctgaatggcctgcccggccccatcggccccccaggcccccggggccgcactggagatgctggccctgtgggccccccaggccccccaggccccccaggccccccaggccccccatctgctggctttgacttctccttcctgccccagcccccccaggagaaggcccatgatggcggccgctactacagagcagatgatgccaacgtggtgcgggaccgggacctggaggtggacaccaccctgaagagcctgagccagcagatcgagaacatccgcagccctgagggcagcaggaagaacccagcccggacctgccgggacctgaagatgtgccacagcgactggaagtctggagagtactggattgaccccaaccagggctgcaacctggatgccatcaaggtgttctgcaacatggagactggagagacctgtgtgtaccccacccagcccagcgtggcccagaagaactggtacatcagcaagaaccccaaggacaagagacatgtgtggtttggagagagcatgacagatggcttccagtttgaatatggaggccagggcagtgaccctgcagatgtggccatccagctgaccttcctgcggctgatgagcacagaggccagccagaacatcacctaccactgcaagaacagcgtggcctacatggaccagcagacaggcaacctgaagaaggccctgctgctgcagggcagcaatgaaattgagatccgggcagagggcaacagccgcttcacctacagcgtgacagtggatggctgcaccagccacactggagcctggggcaagacagtgattgagtacaagaccaccaagaccagccggctgcccatcattgatgtggcccccctggatgtgggcgccccagaccaggagtttggatttgatgtgggccctgtgtgcttcctgtag

SEQ ID NO: 274698 - DNA, 4395 bp, Artificial Sequence
  derived and/or modified sequence
atgttcagcttcgtggacctgcggctgctgctgctgctggccgccaccgcattgcttactcacggccaggaagaggggcaggtcgaaggccaggacgaagacatccctccaatcacctgtgtccagaacggcctgagatatcatgaccgcgatgtctggaagcctgagccgtgtcgaatatgcgtgtgcgacaacggaaaggtgctgtgtgacgacgttatttgcgacgagacgaagaattgcccaggggctgaggtgccagaaggcgagtgttgccccgtttgtcctgatggctccgagtctcctaccgatcaggagacaactggcgtggaaggacccaagggagatacgggaccccgggggcctcgcggccctgcagggccaccaggccgcgatggaatccccggacagcctggactgcccgggccaccaggaccccctggcccacccggtccacctggactgggcggaaatttcgccccccaactgagttacggatatgacgagaaaagcacaggcggcatcagcgtgcctggaccaatgggcccttccggacccaggggacttccaggtccccccggagcccctggaccgcagggctttcaaggcccaccaggtgagccaggggagccaggtgcctctggccctatgggacctaggggcccccctggccccccaggtaaaaatggtgatgatggtgaggctggcaaaccaggaaggccaggggaacgtggccctcctggcccccagggggctagggggttgccagggactgctggcctgcccggtatgaagggccatcggggctttagcggccttgacggggctaagggtgatgccggacccgcaggccccaaaggagagcctggaagccctggtgagaatggagcaccagggcagatgggaccgagggggctgccaggcgagcgaggaagaccaggggctccggggccagcaggagctagaggtaatgacggtgcaacaggagcagcgggcccacctggccccactggcccagctggccctccgggatttcccggtgcagttggcgcaaagggagaggcaggacctcagggaccaagggggtctgaagggccccagggagtgcgtggagagccgggccctccaggccctgctggggcagcggggcctgctggcaacccaggagcagacgggcaacctggagcaaagggtgccaatggggcccctgggattgctggcgctcccgggttccccggagctcgtggaccttccggacctcaggggcctggcggcccacctggcccaaaagggaacagcggcgaacctggggcccctggaagtaagggtgacaccggcgcaaaaggggaacctggccctgttggagtccaagggccgcctgggcctgcgggcgaggaaggaaagcgcggcgccaggggtgagccggggccaacagggttgcccggaccaccaggcgaaaggggaggaccaggtagtcgtggctttcctggcgccgatggggtcgctggccctaagggtcctgccggcgaacgcgggtctccggggcccgccggacctaagggcagtccgggtgaagcaggacgcccaggagaggccggtctaccaggagctaagggccttaccggttcccccggctctcctggtcccgacggcaagactggtccacctgggccagccggccaggatggcaggccaggtccgcccggtccacctggggcccgcggccaggccggggtaatggggttcccaggccccaagggagctgccggcgaacccgggaaagcaggggagcggggcgtgccaggccccccaggcgcggtgggccccgccggaaaagacggcgaggccggcgcccagggcccacctggccctgccggaccagctggggagcggggggagcagggccccgcaggaagcccaggcttccagggattaccggggcctgccggccctcctggagaagcagggaagcccggagagcaaggcgtgccgggagatctgggagcacccgggccaagcggcgcaagaggcgaacggggattcccgggggagcggggcgtgcaagggcccccaggccctgcggggcctcggggagccaacggcgctcccggcaatgatggcgctaagggggatgcgggcgctcctggggcacccgggagtcagggcgccccaggtttgcaaggtatgcccggcgagcgcggagccgccggacttcctggacccaagggagatagaggcgacgcaggacccaaaggcgctgatgggtcaccgggaaaggatggagtgcgcgggctgaccgggccgattggacctccggggcccgccggagcccctggagataaaggcgaatccgggccttccggtcctgccggccctaccggggcccgaggtgcaccaggggatcggggcgaacccgggccacccggtccagcaggttttgcaggaccacccggcgccgacggacaacccggtgccaagggggaaccaggggacgccggggctaaaggtgatgctggaccccccggaccagccggaccggccggaccgccgggtccaattggaaacgtcggagcgccgggagctaaaggagcccgagggtccgcagggcctccgggcgcaaccggattccctggagccgctggacgcgttggccctcctggccctagtggcaacgcaggtccacctggcccgcctggccccgccggaaaagagggtggcaaaggaccccgaggcgagaccgggcccgcaggtcggccaggcgaggtagggcccccaggcccccccggaccagccggggagaagggatctcctggtgccgatggcccggccggtgcgcccggcacgcctgggccacagggaatagcagggcagcgcggcgtggtgggcctgcctggccagcgtggagagcgcggctttcccggactccctggtccgagtggcgaaccgggaaagcagggaccaagcggtgcttcaggggagcgggggccccctggccccatgggtccacccggtcttgccggcccgcctggcgaatcagggcgggagggagcaccgggtgcggagggtagccctgggagagacgggagtcccggcgccaagggtgaccggggcgaaaccggtccggcgggccctccgggagcccccggcgcccctggcgctcccgggccagtcggcccagccggcaagtcgggggataggggggagacagggccagcgggcccgaccgggcccgtgggccccgtgggtgccagagggccggctggaccacagggtccgcgcggcgacaagggggagactggtgagcagggagacagagggataaagggacacaggggcttttccggtctgcagggccccccgggcccccctggtagtcccggggagcagggcccctccggcgctagtggccccgccggcccacgcggcccgccagggtcagccggggcccccggtaaggacggacttaatggacttccaggccctatcggaccacctgggcctcgaggccgtactggggacgcagggcctgtgggccctccaggtccgccggggccccccggcccgcccggacccccctcagccggtttcgatttctccttcctgccacagcctccgcaggagaaggctcacgatgggggaaggtactatcgcgcggatgatgccaacgtggtccgtgatcgggacctcgaggtggacactacactgaagagcctatcccagcagattgaaaatatccgaagccctgaaggctcccgtaagaaccccgcacggacatgccgcgacctaaagatgtgccactctgattggaaaagcggtgagtattggatagaccctaaccaggggtgtaacctggatgcaattaaagtgttctgcaatatggagaccggcgagacgtgcgtctatcctacgcagcccagcgtagcccagaaaaattggtacatatcaaagaaccctaaggacaagcgccatgtatggttcggagagagtatgaccgatgggttccagttcgaatacggggggcaggggagcgatccggcggacgtggccatccagctcacctttctgaggctcatgtcaaccgaagcctctcagaacatcacctatcactgcaagaacagtgtggcctacatggatcagcagactgggaatctgaaaaaggctctgctgcttcaaggaagcaatgaaattgagatccgggctgaggggaatagcagattcacatattctgtcaccgtggatggctgtacctcacataccggggcgtgggggaagacggtcattgagtacaaaaccaccaaaacctctagacttcctattatagacgtagcaccattggatgtgggcgccccagatcaggagtttggctttgacgtgggccccgtgtgcttcctgtag

SEQ ID NO: 274699 - DNA, 4395 bp, Artificial Sequence
  derived and/or modified sequence
atgttctccttcgtggatctgcggctcctcctcttactggccgctacggcattgctaacccacggccaagaagagggacaggttgagggacaggacgaagacataccccctataacctgtgttcagaacggccttagataccacgaccgtgatgtgtggaaaccagagccctgtagaatctgcgtctgtgataatgggaaggtgttatgtgatgacgtgatttgtgatgaaactaaaaattgccccggagccgaggttcccgagggcgagtgctgcccggtctgccctgacggctctgagtcacctactgaccaggagactaccggagtagagggcccaaaaggggacaccgggcctaggggcccaagaggcccagctggccctcccggtcgggacggcataccaggacagccaggccttcctggccctcctggccctccagggcctcctggccctccagggctgggcggaaactttgcccctcaactcagctacggctatgacgaaaagtcaaccggcggtatcagtgttcccggtcctatgggcccatctggcccacggggtctccccggaccacctggggcacctgggcctcaggggttccagggacctccaggcgaacctggtgaacctggcgcatccggacccatgggcccaaggggtccccctggacctcccggtaaaaacggagatgatggtgaagctgggaagccaggacgaccaggagagcgcggtccacccggaccacagggagccagaggactgccaggaacggctgggctccccggaatgaaggggcaccggggttttagcggtctggatggggctaaaggcgacgccggaccggcaggtcctaagggggagcccggatcacccggtgagaacggtgctcccggacagatgggaccccgtgggctccctggcgaaagaggtcgcccaggcgctcccggacctgccggagctcggggaaacgacggggctacaggcgcagcgggtccccctggacctaccggtcccgctggccctcccggattccctggggctgttggcgcaaagggggaggcagggcctcaaggtccaagaggctccgagggccctcagggcgtgcgcggtgagccgggaccccctggaccggctggggctgccggacccgctgggaaccccggagcagatggccaacccggagccaagggcgctaacggggctccgggtattgctggcgctcctggcttccccggtgctagagggccaagcggtccacaggggcctggaggtcctcccggtccaaaagggaacagcggcgaacctggagcgccaggctcaaaaggcgatacgggtgccaaaggggaacctggacctgtcggggtgcaaggtcctcccggaccggcaggcgaggaaggcaagcggggagcgaggggcgaacccggacccaccggcctgcctggccctccaggagagcggggaggtccaggctcccggggatttcccggagcggatggcgtggccggacccaagggacctgccggagaaagaggcagcccgggaccagccggtccaaaggggtccccaggagaggctggcagacctggggaagctggcctgccaggtgccaaaggtctcacagggagccctgggtctcccggtccggatgggaagactggcccaccagggcctgccggacaggacgggcgtcccggtccgcctggacccccaggagcccgtggacaggctggcgtaatgggatttcctggccctaaaggtgctgcgggagaaccaggcaaggccggagagcggggtgtcccgggtcctccaggagccgtcggacccgcaggaaaagacggagaggccggagctcagggccctcccggtccagctggtccagccggagagcggggagagcagggacctgcagggagtccagggttccagggactaccaggtccggcagggcctccgggagaggcaggaaagccaggagagcaaggtgtccccggtgacctcggagcaccagggccttccggagctaggggggagaggggctttcctggagaaagaggagtgcagggaccccctggtccagcgggaccaagaggcgcaaatggcgcaccagggaatgatggggcaaagggcgatgccggtgcacccggtgccccaggtagccagggggctcctggcctacaggggatgcccggagagcgcggtgccgctggactgcccggacctaagggggatcgtggagacgctgggcctaaaggcgcagacggctctcctggcaaggacggcgtgagaggcctgacaggccctattggccctcccggaccagccggtgccccaggggataagggcgagtcaggcccatcaggcccagctggacccacgggggctagaggagcccctggggataggggggagcctgggccacccggacctgccggttttgcagggcctccgggagccgatgggcagcccggagcgaagggagaacctggcgatgcaggcgctaagggagacgcgggacctccaggacccgcaggaccagccggaccaccaggcccaatcggaaacgtgggcgcacccggtgccaagggcgcacggggaagtgcagggcctcccggagccaccgggttccctggagccgcaggaagagtgggtccccctggcccttcaggcaacgctggccctcccggaccccctggtcccgctggcaaagagggcggtaagggcccacgcggagagactgggcctgctggaaggccaggcgaggtggggcctccaggccctcccggtcctgctggagagaaagggagccctggggctgatggccctgcaggggctccaggaaccccaggccctcaggggatcgccggtcaacggggagtggtcggcctgccgggacagagaggggaaagaggatttccaggcctaccaggcccaagcggcgaaccgggtaagcaaggccctagcggggcttctggagaaagaggacccccaggacccatgggccctcccggactggcagggccacccggtgaaagcggcagagaaggagcccctggcgctgagggctcacctggcagagacggatctcccggagcaaagggcgatagaggagaaactggcccagccggacccccaggagcccctggcgctccaggcgctccaggccctgtgggaccagcgggaaaatcaggcgatagaggcgagactggccctgctggacccacggggcctgtagggccagtgggagcaaggggtccagctggccctcaagggcctaggggggacaagggcgagaccggcgagcagggagatcgcggaatcaaaggccatcggggattctcgggacttcaggggcctcctgggcctccaggaagtcccggtgaacaagggcctagtggggcaagtgggccagctggtcctcgtggaccccctggatccgccggagctcccggaaaggacggtctcaatggattacccggtcctatcggaccgcctggtccgagaggccgaactggcgatgccggaccggtcggcccaccaggccctccgggacctcctggaccccctggcccaccatccgccggttttgactttagttttctgcctcagcctccccaggagaaggcccatgacgggggtcgctattaccgagctgatgacgcaaacgtggtccgcgacagggatctcgaagtagataccactctgaagagcctgtcccagcagattgagaacatccgaagtccagaaggaagtcggaagaatcccgctcggacgtgtcgtgatctgaagatgtgccatagtgattggaagagtggggagtactggattgatcccaatcagggctgtaaccttgatgcaattaaggtcttttgtaatatggaaaccggcgagacctgtgtctatccaacccagccatcagtggctcagaaaaattggtacatcagtaaaaatcctaaagataaaaggcatgtttggtttggagagtccatgactgatgggtttcagttcgagtatgggggtcaaggctccgatcccgcagatgtggctatccagctgacattcctgaggctgatgagcaccgaggctagtcagaatatcacataccactgcaagaacagtgtagcctacatggatcaacaaacgggcaacctgaaaaaggccctgctcctccagggctccaacgaaatagagatccgcgcagagggaaatagccggtttacctacagtgtcaccgtggacggttgcacttcccacactggagcctggggcaagacagtgatcgaatataaaacaacaaaaacaagccggctgcctataatcgatgtagcaccccttgacgtgggtgcccctgaccaggagttcggattcgacgtggggccagtctgttttctgtag

SEQ ID NO: 274700 - DNA, 4395 bp, Artificial Sequence
  derived and/or modified sequence
atgttcagttttgtcgacttaagactgctcttgctgctggcagcgacagcactgctgacacatggacaggaggagggacaagtcgaaggacaggacgaagatatcccccctatcacatgcgttcaaaacgggttacggtaccatgaccgtgacgtgtggaagccagagccatgccgtatttgcgtgtgcgacaacggtaaagtgctgtgcgatgacgtcatctgcgatgagacgaaaaactgccctggggcagaagtcccagaaggcgagtgttgtcccgtgtgccctgatggctcggagtcccctacagatcaggaaacaacaggggtggaaggccctaaaggggataccggccctcgggggccccggggtccagcaggcccaccaggtagggacggcattccagggcagccaggcttgcctggtccgcccggaccccccggccctcccggcccacccggattgggaggaaatttcgctccccaactgagctacgggtatgatgaaaagtccacgggaggcattagtgtgccaggcccaatgggtccatccggcccccgagggcttcccgggccccctggggcacccggtccacagggctttcaggggccacccggcgaaccgggggaaccgggtgctagcgggcctatgggaccaagaggcccccctggtccccccggaaagaatggtgatgatggggaagcaggcaaacctggacgacctggggagcgcggtcccccagggccacagggtgcgcggggcctgcctgggactgcgggactacctggcatgaaaggccaccgaggcttctcgggtttagacggagcgaaaggcgacgcaggacctgctggacctaaaggagaacctggatcgcctggggagaatggggccccaggccaaatggggccaaggggcctgccgggggagaggggacgcccgggtgccccgggaccggctggtgcgcgcggaaacgatggagctacgggcgccgctggcccacctggccctaccgggcctgccggtcctcccgggtttcctggtgccgtgggcgctaagggggaagcaggaccccaagggcccagaggaagtgaaggccctcaaggcgtgcgaggcgagccaggcccccccgggccagcaggtgcagcgggtcccgccgggaaccctggcgccgatgggcaacccggtgccaagggcgctaacggtgcgcctggtatagcaggagcaccaggctttccaggggcccggggcccttcaggccctcaaggcccaggaggcccccctggccccaagggaaactctggggaacctggggcccctggatcaaaaggtgataccggcgccaaaggcgaaccggggcctgtgggtgtgcaaggtccccccggacccgctggcgaagaaggcaagcggggcgcacgcggtgagcccggccctaccggtttgcccggacctcctggggagagagggggccctgggtcacgcggattcccgggcgcagatggagtggcaggtccgaaggggcctgctggcgaacgtgggagcccaggcccagccgggccgaaaggttctccgggagaggctggcaggcctggggaggctgggttgcctggcgccaaaggactgaccggaagtcctgggtcccctgggcccgacggaaaaaccggaccgccaggtccagccggtcaggatggaaggcccggcccacccggtcctcccggagcaaggggacaggccggcgtcatgggcttccccggcccaaagggagcagccggtgagcctggaaaagccggggaaaggggggtaccagggccacctggcgccgtgggccctgcagggaaagatggcgaggcgggggctcagggacccccgggaccagctggcccagctggtgagcgcggagaacaaggccccgcagggtccccaggcttccagggtctacctggccccgcaggaccccccggagaggctggcaagcccggagaacagggagtcccaggcgatctgggagcgcccggtcccagcggggcgagaggggagagaggcttcccaggcgaaagaggcgtgcaaggaccacctggacccgctggccctcgcggcgcgaatggggctccaggaaacgatggtgctaagggcgatgccggagctcccggagctcccggatctcagggagctcccggactccaggggatgcccggagagcggggagccgctgggctacctgggcccaaaggagatagaggcgatgcaggacctaagggggctgatgggtcaccaggcaaagacggcgtgcgggggctgaccggtcctatcggccctcccggacctgctggagccccaggcgataagggcgaatctggtccaagtggacccgccggtcccactggagcccgaggcgctccaggagaccgcggcgagccagggccacctggtcctgcaggttttgccggacctccaggtgcggacggacagcctggagctaagggcgagcctggcgacgcaggagccaagggcgacgcgggaccaccaggtccagccggacccgcaggtccgccgggacctatcgggaatgtcggagcacctggcgcaaaaggcgcaaggggctccgccggtccacccggcgcaaccgggttccccggtgctgccggacgagtgggtcctccaggcccctcagggaatgcaggtccaccaggtcctcctggtccggcaggcaaggaaggaggaaagggacctcgaggtgagacggggcctgctggtcgtcccggagaggtaggcccgccaggccctcccggcccagcgggtgaaaaaggttcccctggcgccgatggcccggctggcgcccccggaacccctggcccacagggcattgcaggccaaagaggggtcgtaggactaccaggacagcgaggcgaaagaggtttccccgggctgccaggcccctccggggagccagggaaacaaggaccctccggagccagcggggagcgaggcccacccggaccaatgggacccccaggcctggcaggacctcccggggagtccgggagggagggagcaccaggcgccgaggggtcgcctggaagggatggatcaccaggagctaagggcgataggggggagacagggcccgccgggccccccggtgctcctggagccccaggcgcaccagggcccgtgggcccagccggtaaatccggcgatcgcggtgagacagggcccgcaggtcccacaggacccgtggggcctgttggagcccgcgggcctgcagggcctcaaggaccaaggggcgacaaaggagagaccggcgaacagggggatcggggcattaaggggcaccggggcttttccggcctccagggtccccccggccctccaggtagtcccggagaacagggaccttcaggggcatctggcccggccggtcctcgtggtccacctggatccgccggagcacccggcaaggatggtttgaacggtctgcccggtcctattggaccgcccggcccccgggggagaaccggagacgcgggtccagtcgggccacctggcccaccaggtccaccaggcccccctggcccgccgtctgccggctttgatttcagttttcttccacagccaccccaagagaaagctcacgacggcggcagatattaccgggccgatgacgccaacgtagtgagagacagagatctggaagttgatacaacactgaaatcactctcacaacaaatcgaaaatatcagatcacccgaaggatctagaaaaaacccagcccggacctgtcgggacctcaaaatgtgtcacagcgactggaagtcaggggagtactggatcgaccccaaccagggatgcaatcttgacgccattaaagtgttttgcaacatggagactggagagacctgtgtctatcccactcagccctcagtggcccaaaagaattggtacatctccaaaaatcctaaagacaagcgccatgtatggttcggtgaaagcatgactgatggcttccagttcgaatacgggggtcaaggatctgaccctgccgatgttgctattcagcttacttttctccgtttgatgtcaaccgaggcctcgcaaaatattacctatcactgtaaaaatagcgtggcatacatggaccaacagacaggcaatctgaaaaaagctctgctgctgcagggctcaaacgaaatagagatccgcgccgaggggaattccagatttacctactccgtgactgtagacgggtgtacctcacatacaggagcctggggaaaaactgtgatcgagtacaagactaccaaaaccagcagactgccaattatcgacgtggccccactcgacgttggcgcgcctgatcaagaattcggattcgatgtaggccctgtgtgttttttgtag

SEQ ID NO: 274701 - DNA, 4395 bp, Artificial Sequence
  derived and/or modified sequence
atgttctcctttgttgatttaagactactactgctgctagctgccaccgccttgctgacacacggacaggaagaaggacaggtggaaggacaggacgaagatattcccccaattacttgtgtccaaaatgggctgagatatcacgatcgagatgtgtggaagcctgagccttgccggatttgtgtctgcgacaatggcaaagttctctgcgatgatgtgatttgcgacgaaaccaagaattgtccaggcgccgaggtgcccgagggagaatgctgccccgtatgcccagacggctctgagtctcctacagatcaggaaacaaccggcgtcgaaggtccaaaaggcgacactggacctaggggtcctagaggacctgcggggcctcccggaagagatgggatccccggacaacctggtttaccgggccccccaggcccacccggaccgccaggaccccctggcctgggcggtaattttgcacctcagttgtcctacgggtatgatgaaaagagtaccggtggaatctcagtgcctggccctatgggaccgtccggaccccgtggtctaccgggcccaccaggtgcaccgggtccgcaggggtttcaggggccacccggcgaaccgggggaaccgggtgctagcgggcctatgggaccaagaggcccccctggtccccccggaaagaatggtgatgatggggaagcaggcaaacctggacgacctggggagcgcggtcccccagggccacagggtgcgcggggcctgcctgggactgcgggactacctggcatgaaaggccaccgaggcttctcgggtttagacggagcgaaaggcgacgcaggacctgctggacctaaaggagaacctggatcgcctggggagaatggggccccaggccaaatggggcctaggggcttacctggggagagaggtcgacccggtgcacctgggcccgccggagcgcgagggaatgacggtgctacaggcgcagcagggccacccggacccactggtcctgcaggaccccctgggttccctggtgccgtcggtgctaaaggggaagctggacctcaaggcccacggggatctgaaggacctcagggtgtgaggggtgagcccggccctcctggaccggccggagcagccgggccagcaggaaatccaggtgcagatgggcaaccaggggccaaaggagctaacggcgcacctggcatcgccggtgcgccaggcttcccaggtgcacgcggaccctccggacctcagggacctggcgggcccccggggcccaaagggaactcaggtgaaccaggcgccccgggatcaaagggagatacaggcgcaaaaggcgagccgggaccagttggagttcaaggcccacccggacctgccggagaggaaggcaagagaggggccagaggcgaaccaggaccaacagggttaccaggcccccccggagagcgcgggggacctgggagtcgcggctttcctggagctgacggagtggcagggcccaaaggaccggcaggcgaaagggggtcccccggaccagccgggcccaaaggcagtcctggcgaagctggtagaccaggcgaggccggcctgcctggcgctaaggggcttactggttccccaggttcccctggtcccgacggtaagactggaccccccggcccggccggacaagatggacggccaggcccacctggcccacctggtgccaggggacaggccggcgtaatgggctttcccggaccaaaaggagcagctggagagcctgggaaagcgggtgagaggggagttcctggaccccccggcgctgtggggccggcaggcaaagacggagaggctggggcacagggtccacccggaccggctggcccggccggcgaacgtggggagcagggaccagccggttctccaggattccaaggtctacccggaccagcgggaccccctggagaagcaggtaaaccaggtgagcagggagtccccggtgaccttggcgccccggggcccagtggagcgagaggggagaggggatttcccggggaacggggcgtacaaggcccacccggcccagccggccctagaggggctaatggtgctccagggaacgatggcgctaaaggagacgcgggcgctcccggcgctccaggttctcaaggcgctcccggtttacaaggaatgcccggcgaacgtggcgccgccggcctccccggaccaaagggagacagaggcgatgcaggtccaaaaggagcagacggctcccctggtaaggatggtgtgagaggcttgaccggacctatagggcctcccgggccggccggggcccccggagacaaaggcgagagcggaccttcagggcccgcagggcccacaggcgccagaggagccccaggggaccgtggggagcccggaccacccggccccgcaggatttgctggccccccaggtgctgatgggcagcccggggccaagggagaaccaggggacgccggagctaagggagatgccggtcctccaggccctgctggccctgccggacccccaggacccatcggaaacgtcggcgcccccggtgcaaaaggcgcgagaggctcagcaggcccacccggtgcaactggattccccggagcagcaggccgtgtaggtccgccggggccctcaggaaatgccggtccccccgggcctcccgggcctgctggcaaagagggtggaaagggcccaagaggtgagactggtcccgccgggagacccggagaagttgggccccccggaccacccggccctgctggcgagaaaggcagccccggtgccgatggccccgccggcgcacccgggactcctggacctcagggaatagcagggcagcggggagtggtgggccttccaggccaaagaggagaaagaggtttccccggcctgccgggtccaagtggagagcccggcaaacaagggcctagtggggcatcgggtgagagggggccacctggtccgatggggccccctggactggcagggcccccgggagaatcaggtcgggagggagcccctggagctgaaggcagccccggccgcgatggcagtccaggagccaaaggtgatagaggtgagaccggccctgctggccctcccggagcaccaggcgcacccggagctccggggcctgtgggtcctgctgggaagagcggagatcggggcgagacaggcccagctgggccaactggacccgtcgggccagtaggtgctcgaggccctgcaggcccccaggggccaagaggtgacaaaggggagacaggggagcagggagatagaggtatcaagggccaccgcggcttttctggactccagggaccacctgggccccccggctcacccggggaacaaggaccttctggcgcgtccgggcccgccggaccacggggcccacccggcagtgcaggagcccccgggaaagacggccttaacggattgcctggccccattggcccccccggacccagaggcagaacaggtgatgcgggtcccgttggcccccctggcccacctggacccccaggaccaccaggccctccctctgctggctttgacttttcctttcttcctcagccaccccaggaaaaagcccatgacggcggccgctactaccgcgctgatgacgccaatgtggtacgagatagagatctggaagttgatacaacattaaaatccttgtcacagcaaattgaaaatattcgttctccagaaggaagtaggaaaaaccccgctcgcacttgcagagacttgaagatgtgtcactctgattggaagagtggagaatactggatcgatccaaatcagggctgtaacctagatgccatcaaggttttctgcaatatggaaactggggagacttgtgtgtatccaacccagcctagcgtggctcagaagaactggtatatctcaaagaatcccaaggacaagagacatgtgtggtttggcgaaagtatgacagatggctttcaattcgagtacggggggcaagggtcagacccagcagatgtggctatacagttgacattcctaagactcatgtccacagaggcatcacagaacattacctaccactgcaaaaattcagtcgcctatatggatcagcagacagggaatctgaagaaagctttacttttacaaggttcaaacgagattgagattagggccgagggaaatagcagattcacctatagcgtgacagttgatggatgtacaagtcacaccggcgcgtgggggaagaccgtaatagagtacaagaccacaaaaacttctcggctaccaatcatagacgtcgctcctctggatgtcggcgcacccgatcaggagtttggatttgacgtggggcctgtgtgcttcctgtag

SEQ ID NO: 274702 - DNA, 4395 bp, Artificial Sequence
  derived and/or modified sequence
atgttcagcttcgtggacctgagactgctgctgctgctggccgccaccgccctgctgacccacggccaggaggagggccaggtggagggccaggacgaggacatcccccccatcacctgcgtgcagaacggcctgagataccacgacagagacgtgtggaagcccgagccctgcagaatctgcgtgtgcgacaacggcaaggtgctgtgcgacgacgtgatctgcgacgagaccaagaactgccccggcgccgaggtgcccgagggcgagtgctgccccgtgtgccccgacggcagcgagagccccaccgaccaggagaccaccggcgtggagggccccaagggcgacaccggccccagaggccccagaggccccgccggcccccccggcagagacggcatccccggccagcccggcctgcccggcccccccggcccccccggcccccccggcccccccggcctgggcggcaacttcgccccccagctgagctacggctacgacgagaagagcaccggcggcatcagcgtgcccggccccatgggccccagcggccccagaggcctgcccggcccccccggcgcccccggcccccagggcttccagggcccccccggcgagcccggcgagcccggcgccagcggccccatgggccccagaggcccccccggcccccccggcaagaacggcgacgacggcgaggccggcaagcccggcagacccggcgagagaggcccccccggcccccagggcgccagaggcctgcccggcaccgccggcctgcccggcatgaagggccacagaggcttcagcggcctggacggcgccaagggcgacgccggccccgccggccccaagggcgagcccggcagccccggcgagaacggcgcccccggccagatgggccccagaggcctgcccggcgagagaggcagacccggcgcccccggccccgccggcgccagaggcaacgacggcgccaccggcgccgccggcccccccggccccaccggccccgccggcccccccggcttccccggcgccgtgggcgccaagggcgaggccggcccccagggccccagaggcagcgagggcccccagggcgtgagaggcgagcccggcccccccggccccgccggcgccgccggccccgccggcaaccccggcgccgacggccagcccggcgccaagggcgccaacggcgcccccggcatcgccggcgcccccggcttccccggcgccagaggccccagcggcccccagggccccggcggcccccccggccccaagggcaacagcggcgagcccggcgcccccggcagcaagggcgacaccggcgccaagggcgagcccggccccgtgggcgtgcagggcccccccggccccgccggcgaggagggcaagagaggcgccagaggcgagcccggccccaccggcctgcccggcccccccggcgagagaggcggccccggcagcagaggcttccccggcgccgacggcgtggccggccccaagggccccgccggcgagagaggcagccccggccccgccggccccaagggcagccccggcgaggccggcagacccggcgaggccggcctgcccggcgccaagggcctgaccggcagccccggcagccccggccccgacggcaagaccggcccccccggccccgccggccaggacggcagacccggcccccccggcccccccggcgccagaggccaggccggcgtgatgggcttccccggccccaagggcgccgccggcgagcccggcaaggccggcgagagaggcgtgcccggcccccccggcgccgtgggccccgccggcaaggacggcgaggccggcgcccagggcccccccggccccgccggccccgccggcgagagaggcgagcagggccccgccggcagccccggcttccagggcctgcccggccccgccggcccccccggcgaggccggcaagcccggcgagcagggcgtgcccggcgacctgggcgcccccggccccagcggcgccagaggcgagagaggcttccccggcgagagaggcgtgcagggcccccccggccccgccggccccagaggcgccaacggcgcccccggcaacgacggcgccaagggcgacgccggcgcccccggcgcccccggcagccagggcgcccccggcctgcagggcatgcccggcgagagaggcgccgccggcctgcccggccccaagggcgacagaggcgacgccggccccaagggcgccgacggcagccccggcaaggacggcgtgagaggcctgaccggccccatcggcccccccggccccgccggcgcccccggcgacaagggcgagagcggccccagcggccccgccggccccaccggcgccagaggcgcccccggcgacagaggcgagcccggcccccccggccccgccggcttcgccggcccccccggcgccgacggccagcccggcgccaagggcgagcccggcgacgccggcgccaagggcgacgccggcccccccggccccgccggccccgccggcccccccggccccatcggcaacgtgggcgcccccggcgccaagggcgccagaggcagcgccggcccccccggcgccaccggcttccccggcgccgccggcagagtgggcccccccggccccagcggcaacgccggcccccccggcccccccggccccgccggcaaggagggcggcaagggccccagaggcgagaccggccccgccggcagacccggcgaggtgggcccccccggcccccccggccccgccggcgagaagggcagccccggcgccgacggccccgccggcgcccccggcacccccggcccccagggcatcgccggccagagaggcgtggtgggcctgcccggccagagaggcgagagaggcttccccggcctgcccggccccagcggcgagcccggcaagcagggccccagcggcgccagcggcgagagaggcccccccggccccatgggcccccccggcctggccggcccccccggcgagagcggcagagagggcgcccccggcgccgagggcagccccggcagagacggcagccccggcgccaagggcgacagaggcgagaccggccccgccggcccccccggcgcccccggcgcccccggcgcccccggccccgtgggccccgccggcaagagcggcgacagaggcgagaccggccccgccggccccaccggccccgtgggccccgtgggcgccagaggccccgccggcccccagggccccagaggcgacaagggcgagaccggcgagcagggcgacagaggcatcaagggccacagaggcttcagcggcctgcagggcccccccggcccccccggcagccccggcgagcagggccccagcggcgccagcggccccgccggccccagaggcccccccggcagcgccggcgcccccggcaaggacggcctgaacggcctgcccggccccatcggcccccccggccccagaggcagaaccggcgacgccggccccgtgggcccccccggcccccccggcccccccggcccccccggcccccccagcgccggcttcgacttcagcttcctgccccagcccccccaggagaaggcccacgacggcggcagatactacagagccgacgacgccaacgtggtgagagacagagacctggaggtggacaccaccctgaagagcctgagccagcagatcgagaacatcagaagccccgagggcagcagaaagaaccccgccagaacctgcagagacctgaagatgtgccacagcgactggaagagcggcgagtactggatcgaccccaaccagggctgcaacctggacgccatcaaggtgttctgcaacatggagaccggcgagacctgcgtgtaccccacccagcccagcgtggcccagaagaactggtacatcagcaagaaccccaaggacaagagacacgtgtggttcggcgagagcatgaccgacggcttccagttcgagtacggcggccagggcagcgaccccgccgacgtggccatccagctgaccttcctgagactgatgagcaccgaggccagccagaacatcacctaccactgcaagaacagcgtggcctacatggaccagcagaccggcaacctgaagaaggccctgctgctgcagggcagcaacgagatcgagatcagagccgagggcaacagcagattcacctacagcgtgaccgtggacggctgcaccagccacaccggcgcctggggcaagaccgtgatcgagtacaagaccaccaagaccagcagactgcccatcatcgacgtggcccccctggacgtgggcgcccccgaccaggagttcggcttcgacgtgggccccgtgtgcttcctgtag

SEQ ID NO: 274703 - DNA, 2453 bp, Artificial Sequence
  derived and/or modified sequence
agaccgggaggggacctggatcatggctgccgcgccgccgctacgggaccgcctgagctttctacaccggctcccgattctcctgaaggggacgtccgatgatgatgtcccgtgtccgggctacctgtttgaagagattgctaaaatctcccacgagtctccgggcagcagccagtgcctgctggagtacctcctgagccgcctgcacagcagctccggccacgggaagctcaaggtgctgaagatcctgctctatctgtgcagccacggctcctccttcttcctgctcatcctcaaacgcaactctgccttcatccaggaagctgcagcttttgcagggcccccagatcctctgcacgggaacagcttgtaccagaaggttcgcgcggccgcgcaggacttggggagcaccctgttctcggacaccgtgttgccgctggctccctcccagcctctggggaccccgcctgccacaggcatgggctcccaggccaggccgcacagcaccctccagggtttcggctacagcaaggaacacggccgcacgggctcggcaggcgaagccttcctctccaccatccagaaggccgcagaggtggtggccagcgccatgcgccccgggcccgagagtcccagtacccggaggctcctgccgcggggtgacacctaccagcctgccatgatgccttcagccagccacggtcccccaaccctggggaacctactccccggggccattccaggtccccgagctgtgaggcatcagcctgggcaggccggagggggctgggatgagctggacagcggccccagctctcagaattcctcccagaacagcgacctgagcagggtctcggactcgggcagtcattccggcagcgacagccattcaggggccagccgggagccgggtgacctggcagaaagggtcgaggtggtggccctgagtgactgtcagcaggagttgagcttggtgaggactgtgactcggggaccacgcgccttcctgagccgcgaggaggcacagcacttcatcaaagcgtgtggactgctcaactgtgaggccgtgctgcagctgctgacctgccacctgcgtgggaccagtgaatgcacgcagctgagggcgctgtgtgccatcgcctccctggggagcagcgacctcctcccccaggagcacatcctcctccgcacccggccgtggctgcaggagctcagcatgggcagcccgggacctgtgaccaacaaggccaccaagatcctgaggcactttgaggcctcctgtgggcagctgtcccctgcccggggcacctcagctgagcctggccccacagccgccctcccaggcccatctgacctgctgaccgacgctgtgcctctccctgggagccaggtcttcctgcagcctctgagttcaaccccggtctcgtcccggagccctgctccctcatctgggatgccgtccagccctgtgcccaccccacccccagatgcctcccccattccagcccccggagaccccagcgaggccgaggccagactggcagaaagcaggcggtggagacctgaacggatcccagggggcacggacagcccaaagagaggccccagcagctgtgcgtggagccgcgactccttgtttgctggcatggagctggtggcctgtccccgcctggtgggggctggggctgctgcgggagagtcctgtcctgatgctccccgcgccccccaaacatcgtcccagaggacagcagccaaagagcctcctggctcagagccgtcagctttcgcgttcctgaacgcctgacccgatggcctggccctggagtcttcagcttcagctgctgtctggggcggtctgtgcttcctgagcagcctcaaccgtagctgctacagtctccaggcagcttgacttgagaggacgaccctagggctacctcagtttcccccatctcctctgccagaggctctggctatttggacttgaatccctacgagggatggcaggtggcagggcttcagaaatgtcgatctcagggctctcagggggcagtccctgcctgtcttgctctcagacatgaggtttcttgtatgaatgcggaagcgactaccaggttccttatttcattttgatctcagctccctccttccccaggaggtcatgagcagcaacaagccactgctcccccgtcccatcggggtgggctaggtgctgaggctgggtttggtgcatgtgggttgagggtgtcttgtccgggctgccttgtgctgtctggcctgaggccatttcaagtctcagatccctacgtgatccttccctggctctcacctgctcctttaggctgtaattgcttcctacacacgaagcctctgattggagcctctggtccatctcagaaaaaccttccaagagcgctggggtttatgctttctgaataaacactactgtttacatg

SEQ ID NO: 274704 - protein, 244 aa, Artificial Sequence
  derived and/or modified sequence
MTGMALRVVRTDGILALYSGLSASLCRQMTYSLTRFAIYETVRDRVAKGSQGPLPFHEKVLLGSVSGLAGGFVGTPADLVNVRMQNDVKLPQGQRRNYAHALDGLYRVAREEGLRRLFSGATMASSRGALVTVGQLSCYDQAKQLVLSTGYLSDNIFTHFVASFIAGGCATFLCQPLDVLKTRLMNSKGEYQGVFHCAVETAKLGPLAFYKGLVPAGIRLIPHTVLTFVFLEQLRKNFGIKVPS

SEQ ID NO: 274705 - DNA, 735 bp, Artificial Sequence
  derived and/or modified sequence
atgacaggcatggcattgcgggttgtccgaactgatggaattctcgctctgtattctggtctgtctgcctccttatgccgccaaatgacatattccctgacccggttcgccatctacgaaaccgtgcgagatagagtagcgaaaggctctcagggtccattgcccttccacgagaaggtattattgggttcagtgtcaggtctggctgggggatttgtcggtacccctgctgacttagtgaatgtgcggatgcagaacgacgtgaagcttccccagggccagcgaaggaattatgcccatgctctcgatggattatacagagtcgcccgggaagagggcttgagaaggctgttcagtggtgcaaccatggccagcagtcgaggtgccctagtaactgtggggcaattgtcttgctacgaccaagccaagcagttagttctgtctaccggatatttgtccgataatatcttcactcattttgtggccagcttcatcgctggcggctgcgctaccttcctctgtcagccgcttgacgtgctgaagacccgccttatgaacagtaaaggagagtatcagggtgtgtttcattgtgctgtggagaccgccaagctgggtcctctggcattctataagggattggtgccagccggcattcgtctgatcccacacactgtcctaaccttcgtgtttctcgaacagctgagaaagaattttgggattaaagttccatcttag

SEQ ID NO: 274706 - DNA, 735 bp, Artificial Sequence
  derived and/or modified sequence
atgacaggcatggccctgcgggtggtgaggacagatggcatcctggccctgtacagcggcctgagcgccagcctgtgccggcagatgacctacagcctgaccaggtttgccatctatgaaacagtgcgggacagagtggccaagggcagccagggccccctgcccttccacgagaaggtgctgctgggctctgtgtctggcctggccggcggctttgtgggcaccccagctgacctggtgaatgtgaggatgcagaatgatgtgaagctgccccagggccagaggaggaactatgcccacgccctggatggcctgtacagagtggcccgggaggagggcctgcggcggctcttcagcggggccaccatggccagcagcagaggagccctggtgacagtgggccagctgagctgctatgaccaggccaagcagctggtgctgagcacaggctacctgagtgacaacatcttcacccactttgtggccagcttcatcgccggcggctgtgccaccttcctgtgccagcccctggatgtgctgaagacccggctgatgaacagcaagggggagtaccagggcgtcttccactgtgctgtggagacagccaagctgggccccctggccttctacaagggcctggtgcctgctggcatccgcctcatcccccacacagtgctgacctttgtgttcctggagcagctgaggaagaactttggcatcaaggtgcccagctag

SEQ ID NO: 274707 - DNA, 735 bp, Artificial Sequence
  derived and/or modified sequence
atgaccggcatggccctgcgggtggtgcggaccgacggcatcctggctctgtactccggtctcagtgcaagcttatgcaggcaaatgacgtacagtctcactagattcgccatatatgagactgtccgcgaccgagtggccaaaggctcacaggggccccttccctttcacgaaaaggtgctcctagggagtgtgtccggtctggccggggggttcgtggggacgcccgctgacttagtgaacgtgcggatgcaaaatgacgtgaaactcccccagggacagcggcgtaattatgcacatgcacttgatgggctgtacagagttgcaagggaagaaggtcttcgtagactgttttctggtgctacaatggcctcaagtagaggcgctcttgtcactgttgggcagctatcctgctatgaccaggccaagcagctcgtgcttagtaccggctatctgtccgataacatctttacacacttcgtggctagcttcatcgctggaggatgtgccaccttcctgtgtcagcccctggacgtgctgaaaacgcggctcatgaactcaaagggcgagtatcaaggggtctttcactgcgccgtggagacagcaaaactgggtccactcgctttctataagggtctggtgcccgccggaattcgccttattccacataccgtcttgacattcgttttcctggagcagttaaggaaaaactttgggattaaggttcccagctag

SEQ ID NO: 274708 - DNA, 735 bp, Artificial Sequence
  derived and/or modified sequence
atgaccggcatggccttgcgggtggtgaggactgacggtattctggccctctattccggacttagcgctagcctttgcagacagatgacgtattcattgacccgttttgccatctacgagaccgtcagagaccgagtcgccaagggctcccagggccctttgccgtttcacgaaaaagttctcctggggtctgtgagcggacttgctggaggctttgtgggaaccccagccgatctggtcaacgtgaggatgcaaaacgacgtcaaactgccccaaggacagcggcgaaattatgctcatgccctggatggcctgtacagggtggctcgggaagagggcttgcggaggctgtttagcggagctaccatggcgagttccagaggagccctcgttacagttggacagctgagctgctacgatcaggctaagcaattggtgcttagtactggatacctgagtgacaatatcttcacgcatttcgtagcttctttcattgccggaggatgcgccacttttctgtgtcagcctctagacgttttgaaaacaaggctgatgaactcaaagggagaataccagggggtcttccactgtgccgtagaaactgccaagttgggacctctggcgttctataaggggctcgtgccagctggaatccggctgatcccacatacagtgctgacatttgtattcctggaacagttgcggaagaacttcgggatcaaggtgccctcctag

SEQ ID NO: 274709 - DNA, 735 bp, Artificial Sequence
  derived and/or modified sequence
atgaccggcatggccctgagagtggtgagaaccgacggcatcctggccctgtacagcggcctgagcgccagcctgtgcagacagatgacctacagcctgaccagattcgccatctacgagaccgtgagagacagagtggccaagggcagccagggccccctgcccttccacgagaaggtgctgctgggcagcgtgagcggcctggccggcggcttcgtgggcacccccgccgacctggtgaacgtgagaatgcagaacgacgtgaagctgccccagggccagagaagaaactacgcccacgccctggacggcctgtacagagtggccagagaggagggcctgagaagactgttcagcggcgccaccatggccagcagcagaggcgccctggtgaccgtgggccagctgagctgctacgaccaggccaagcagctggtgctgagcaccggctacctgagcgacaacatcttcacccacttcgtggccagcttcatcgccggcggctgcgccaccttcctgtgccagcccctggacgtgctgaagaccagactgatgaacagcaagggcgagtaccagggcgtgttccactgcgccgtggagaccgccaagctgggccccctggccttctacaagggcctggtgcccgccggcatcagactgatcccccacaccgtgctgaccttcgtgttcctggagcagctgagaaagaacttcggcatcaaggtgcccagctag

SEQ ID NO: 274710 - protein, 251 aa, Artificial Sequence
  derived and/or modified sequence
MEGGAAAATPTALPYYVAFSQLLGLTLVAMTGAWLGLYRGGIAWESDLQFNAHPLCMVIGLIFLQGNALLVYRVFRNEAKRTTKVLHGLLHIFALVIALVGLVAVFDYHRKKGYADLYSLHSWCGILVFVLYFVQWLVGFSFFLFPGASFSLRSRYRPQHIFFGATIFLLSVGTALLGLKEALLFNLGGKYSAFEPEGVLANVLGLLLACFGGAVLYILTRADWKRPSQAEEQALSMDFKTLTEGDSPGSQ

SEQ ID NO: 274711 - protein, 138 aa, Artificial Sequence
  derived and/or modified sequence
MEGGAAAATPTALPYYVAFSQLLGLTLVAMTGAWLGLYRGGIAWESDLQFNAHPLCMVIGLIFLQGNALLVYRVFRNEAKRTTKVLHGLLHIFALVIALVGLVAVFDYHRKKGYADLYSLHSWCGILVFVLYFVQGQV

SEQ ID NO: 274712 - protein, 318 aa, Artificial Sequence
  derived and/or modified sequence
MKQKTKPGTGPLSSLEFGVSFLAPSPHMELLASCPRSRLSPWGGWAPPPSHSRDLRPLPQDDGVCLSMEGGAAAATPTALPYYVAFSQLLGLTLVAMTGAWLGLYRGGIAWESDLQFNAHPLCMVIGLIFLQGNALLVYRVFRNEAKRTTKVLHGLLHIFALVIALVGLVAVFDYHRKKGYADLYSLHSWCGILVFVLYFVQWLVGFSFFLFPGASFSLRSRYRPQHIFFGATIFLLSVGTALLGLKEALLFNLGGKYSAFEPEGVLANVLGLLLACFGGAVLYILTRADWKRPSQAEEQALSMDFKTLTEGDSPGSQ

SEQ ID NO: 274713 - DNA, 756 bp, Artificial Sequence
  derived and/or modified sequence
atggaggggggggcagccgctgctactcctacggcgttaccgtactatgtggccttctcacaactccttggcctcaccctggtggctatgaccggggcctggctgggcctgtaccgaggaggtatcgcatgggaatcagacctgcagttcaacgcacaccctctgtgcatggtgatcggcttgatttttttacaggggaatgcactactggtctacagggtgtttagaaacgaggccaagaggacaactaaagtgctacacggtctgcttcacatctttgctcttgtcatagctctggttggtctggttgccgtgtttgactatcaccgcaaaaagggttacgccgatctatatagcttgcatagctggtgcgggattctcgtttttgtgctttactttgtgcagtggctcgtggggttctctttctttctgttccccggggccagcttctcactgcggagcaggtaccggccccagcatatttttttcggagccactatttttttgctgagcgttggaactgcgctcctggggctcaaagaagccttgctcttcaatcttggcggaaaatactcggccttcgaacctgaaggagtcctcgcgaacgtactcggtctgctgttagcatgttttgggggggctgttctgtatatcttaacccgggctgattggaagcggccctcacaagcggaagagcaggccctgtctatggacttcaagaccctaaccgagggcgatagccctgggtcgcaatag

SEQ ID NO: 274714 - DNA, 756 bp, Artificial Sequence
  derived and/or modified sequence
atggaaggcggcgccgcagctgccaccccgaccgctttaccctactacgtcgccttcagtcaattgctgggacttaccctcgtagccatgacaggcgcttggcttgggctgtacagggggggaattgcttgggagagtgatctccaattcaatgcccaccccctgtgcatggtgattggcctcatttttttacagggcaatgccctactggtctaccgcgtgttccgaaatgaagcaaagcgcacgacaaaagtcctgcacggcttactgcacatttttgccttggtgatcgcactggttggactcgtggctgtttttgattatcatcggaagaagggatatgccgacctctactccctgcattcctggtgcgggattttggtcttcgtcctgtactttgtccagtggttggtgggatttagtttttttcttttcccaggtgctagctttagccttagaagtaggtacagacctcagcacattttcttcggagctactatatttctgttgtctgtgggcacagctttacttgggcttaaggaggccctcctgtttaatctgggggggaagtatagtgcttttgagcctgagggggtgctggccaacgttctcgggctgcttctagcctgctttggcggagccgtgctttacattcttacccgggccgattggaagcggccatcgcaggccgaggagcaggcactgtccatggacttcaaaacccttaccgagggcgacagtcccggtagtcagtag

SEQ ID NO: 274715 - DNA, 756 bp, Artificial Sequence
  derived and/or modified sequence
atggagggaggggctgctgcagctacacccacagcactcccctattacgtggccttttcacaactgctcggcctgaccctcgtagccatgaccggcgcctggctcggactgtacaggggcggcatcgcttgggaatccgacctgcagtttaatgcacatcccctttgcatggtcattggactgatttttctccagggtaatgccctactggtttatcgggtctttcgcaatgaagccaagagaaccactaaggtgctgcatggcctgttgcacatcttcgccctggtgatcgcactggtgggcctagtggccgtgttcgactaccacaggaaaaagggctacgcagacctttatagcctacattcatggtgcggtattctggtattcgtcttgtacttcgtgcagtggctggttgggttctctttcttcttgtttccaggagcttccttttccctgaggtctcggtaccgcccacagcatatattcttcggagcgaccatattccttctctccgtgggtaccgcattgctcggattaaaagaggctttgctctttaatctgggcggcaagtattccgcgttcgagcccgaaggtgtcctggcgaacgtacttgggctgcttcttgcctgctttgggggcgctgttctttacatcctcaccagggctgattggaaacggccaagtcaggccgaggagcaggccctgtcgatggactttaaaaccctgaccgaaggtgactcgccgggcagtcagtag

SEQ ID NO: 274716 - DNA, 957 bp, Artificial Sequence
  derived and/or modified sequence
atgaaacaaaagaccaaacccgggactggcccgctgtcctcattagagttcggcgtcagctttctcgccccctctccacacatggaactacttgcctcctgccccaggtcccgactttctccctggggggggtgggcgccccctcccagtcatagccgggacctgcgacccttgcctcaagatgacggagtttgcttgtcgatggaggggggcgccgccgccgccacacccaccgccctgccctactacgtggcctttagtcagctgctgggcctgactctcgtggcaatgacaggtgcgtggctcggcctgtacagagggggtatagcatgggagtccgacctgcagtttaatgctcacccactgtgtatggtcattgggctcattttcttacaaggcaatgcccttttggtctaccgcgtatttcgaaatgaggccaaacgtacaacgaaggtcctccatggccttctgcatatttttgccttagtgatcgctctggtgggcttggtggctgtgttcgactatcacagaaaaaaggggtatgccgatttgtacagtctgcattcatggtgcggcattttggtattcgtgctgtattttgtgcagtggctggtgggatttagcttcttcttatttcctggcgcctcattttctctcagatctagatataggcctcagcatattttcttcggcgccacgatattccttttgagtgtaggcactgccctcctggggctaaaagaggcgcttctctttaacctgggaggaaagtacagtgcattcgaaccagagggcgtgctcgcaaatgtcctgggacttctactggcgtgcttcgggggcgcagtgctctacatccttacaagggccgattggaaacgcccgagccaggctgaagagcaggccctgtccatggacttcaaaaccttgacggagggcgatagtcccgggtcccagtag

SEQ ID NO: 274717 - DNA, 756 bp, Artificial Sequence
  derived and/or modified sequence
atggagggcggcgctgctgctgccacccccacagccctgccctactacgtggccttcagccagctgctgggcctgaccctggtggccatgactggagcctggctgggcctgtaccggggcggcatcgcctgggagagtgacctgcagttcaatgcccaccccctgtgcatggtgattggcctcatcttcctgcagggcaatgccctgctggtgtacagagtcttcagaaatgaggccaagaggaccaccaaggtgctgcacggcctgctgcacatctttgccctggtgattgccctggtgggcctggtggccgtgtttgactaccacaggaagaagggctatgctgacctgtacagcctgcacagctggtgtggcatcctggtgtttgtgctgtactttgtgcagtggctggtgggcttctccttcttcctgtttcctggggccagcttcagcctgcggagccgctaccggccccagcacatcttctttggagccaccatcttcctgctgtctgtgggcacagccctgctgggcctgaaggaggccctgctcttcaacctgggcggcaagtacagcgcctttgagcctgagggcgtgctggccaacgtgctgggcctgctgctggcctgctttggaggagctgtgctgtacatcctgaccagggctgactggaagaggcccagccaggccgaggagcaggccctgtccatggacttcaagaccctgacagaaggagacagccctggcagccagtag

SEQ ID NO: 274718 - DNA, 957 bp, Artificial Sequence
  derived and/or modified sequence
atgaagcagaagaccaagccaggcaccggccccctgagcagcctggagtttggagtgtccttcctggcccccagcccccacatggagctgctggccagctgccccaggagccggctgagcccctggggcggctgggcccccccacccagccacagccgggacctgcggcccctgccccaggatgatggagtgtgcctgtccatggagggcggcgctgctgctgccacccccacagccctgccctactacgtggccttcagccagctgctgggcctgaccctggtggccatgaccggggcctggctgggcctgtacagaggaggcatcgcctgggagagtgacctgcagttcaatgcccaccccctgtgcatggtgattggcctcatcttcctgcagggcaatgccctgctggtgtacagagtcttcagaaatgaggccaagaggaccaccaaggtgctgcacggcctgctgcacatctttgccctggtgattgccctggtgggcctggtggccgtgtttgactaccacaggaagaagggctacgccgacctgtacagcctgcacagctggtgtggcatcctggtgtttgtgctgtactttgtgcagtggctggtgggcttctccttcttcctgtttcctggggccagcttcagcctgcggagccgctaccggccccagcacatcttcttcggggccaccatcttcctgctgtctgtgggcacagccctgctgggcctgaaggaggccctgctcttcaacctgggcggcaagtacagcgcctttgagcctgagggcgtgctggccaacgtgctgggcctgctgctggcctgcttcggcggcgctgtgctgtacatcctgaccagggctgactggaagaggcccagccaggccgaggagcaggccctgtccatggacttcaagaccctgacagaaggagacagccctggcagccagtag

SEQ ID NO: 274719 - DNA, 756 bp, Artificial Sequence
  derived and/or modified sequence
atggagggcggcgccgccgccgccacccccaccgccctgccctactatgtggcctttagtcagttgctagggcttactctagtggcaatgaccggcgcgtggctgggcctttacaggggcggaatcgcttgggaaagtgatctgcagtttaacgctcaccccctgtgtatggtgattggactgatctttctccagggtaatgcgttacttgtgtatcgcgtttttcgtaatgaagctaaacgaacgaccaaggtgttgcacggtctgctccacatttttgctctagtgatcgccctggtgggtcttgtggccgtctttgactaccataggaaaaaaggttacgcagatctgtatagcctacattcatggtgcgggatcctggtgttcgtactttattttgtgcaatggcttgtaggctttagtttctttctgtttccaggtgcatccttttctctgcgatcaagatatcgaccccagcacatcttctttggagctacaatttttctcctctctgtcggcactgccttgctggggctcaaggaggccttgctgttcaatctcggaggtaaatacagtgcgttcgagcccgaaggagttctggctaacgtgttgggtctactgctggcatgcttcggtggtgcagtattatatatactgacccgagcagactggaagcggccatctcaggccgaggagcaggcactcagcatggatttcaagactctgacagagggcgactctccaggatctcagtag

SEQ ID NO: 274720 - DNA, 756 bp, Artificial Sequence
  derived and/or modified sequence
atggagggcggcgccgccgccgccacccccaccgccctgccctactacgttgcgttcagtcagctactcggtctgacactggttgccatgaccggagcttggttgggcctgtatcgagggggcatcgcctgggaaagtgatctgcaatttaatgcgcaccctctctgcatggttatcggacttatattcctgcagggcaacgcccttctggtttaccgtgtgttcagaaatgaagccaagagaacaacaaaagttctccatggattattgcacatttttgccctcgtcatcgcactggtcggattggttgccgtttttgactaccaccgaaagaagggatacgctgacctctacagcctgcacagctggtgcggcatcctagtgttcgtcctgtattttgtccagtggttggtcggtttctccttctttctgttcccaggtgccagcttcagcttgaggagccgctacagaccacagcacattttttttggcgccaccatcttcctcttgagcgtggggacagccctgcttggcctgaaagaggccctgctgtttaatttgggaggtaagtactccgccttcgaaccggagggggttttggcaaacgtccttggccttcttcttgcttgttttggcggtgccgttttatacatacttacgcgggcagactggaagcgtccgtctcaggctgaggaacaagcactttcaatggacttcaagacattgaccgagggcgattcacctggtagccagtag

SEQ ID NO: 274721 - DNA, 756 bp, Artificial Sequence
  derived and/or modified sequence
atggagggcggcgccgccgccgccacccccaccgccctgccctactacgtggctttcagccagttactcggactcacgctcgtggccatgacaggagcctggctcggactttaccggggaggcattgcttgggagtccgaccttcagttcaacgcgcatcccctgtgcatggtgattggcctgattttcctgcaagggaatgcactgctagtgtatagagtgttcaggaatgaggccaagagaaccactaaggtcttgcacggcctgcttcacatcttcgcactcgtcattgcactggtagggctggtggcagtctttgactaccaccgaaaaaagggctatgcggatctgtactcactccatagttggtgcggcattctcgtttttgttctgtatttcgtgcaatggctggttggcttcagtttctttctgtttccaggagccagcttttccctgagaagccggtacagacctcagcatattttcttcggcgccaccatcttcctgctcagcgtaggtacagctttgctgggactgaaggaggccctcttatttaacctgggcgggaaatacagtgctttcgagcccgaaggagtgctggccaatgtgctgggcctgctgttggcgtgcttcggcggcgctgtcctttacatcctgacccgtgcagactggaagcgcccctcacaggcagaggaacaggcgctgagcatggacttcaagacccttaccgagggcgacagccccggaagccaatag

SEQ ID NO: 274722 - DNA, 957 bp, Artificial Sequence
  derived and/or modified sequence
atgaagcagaagaccaagcccggcaccggccccctgagcagcctggagttcggcgtgagtttcttagcgccatctccccacatggagttgctggcttcatgcccccggagccggttgagcccttggggcggatgggcccctcctcctagccacagccgcgatctgcggcccttacctcaggacgacggagtgtgcctgagcatggaggggggagcagcagccgccacccccacagctctaccctattacgtggcattttcacagctcttgggcttgacgctggtcgccatgactggagcttggctgggactctatagaggtggtatcgcctgggagtcggatctccagtttaatgcgcatccactttgcatggtcattggattaatatttctgcaggggaacgctttgctggtgtatcgagtgttcagaaacgaggcaaagcggaccactaaggtgctccacggattgctccacatattcgcgctcgtgattgcattggtcggcttggtcgctgtctttgattaccaccgcaagaagggctacgccgacttgtattcgctccacagctggtgtggcattctggtgttcgtactctatttcgttcagtggctcgttggattctctttttttttatttccaggcgcaagtttctctttacggtcgcggtaccgcccacaacacattttcttcggagcaaccattttcctgctgagcgtcggaactgcactgttgggtcttaaagaagcattactctttaatctcggaggcaagtatagcgcatttgaacccgagggggttctggctaatgttctagggctcttgctggcatgctttggcggcgcagtcctgtacatcctcaccagagcggattggaagaggcctagccaggcggaggagcaagccctcagcatggatttcaagacactcaccgagggcgactctcccggttcccaatag

SEQ ID NO: 274723 - DNA, 756 bp, Artificial Sequence
  derived and/or modified sequence
atggagggcggagctgcagcagccacccctaccgctttgccttattatgtcgctttttcacaactgctgggccttacacttgtagcaatgacaggtgcctggttaggactctatagaggaggaatcgcatgggaaagcgacctgcaatttaatgcgcacccactctgcatggtgatcggtctgattttccttcaagggaacgccctgctggtttatagagtctttagaaatgaagccaagagaaccaccaaggtcctgcacgggttactgcacatcttcgcgttggtcatagcactggtgggactggttgctgtctttgattaccaccgcaagaaaggttatgcggatctgtatagcttgcactcttggtgcggcatcctggtgttcgttttgtattttgttcagtggctggtgggatttagcttttttcttttccccggagcctcattctccctgagatcacgctatcgccctcaacatatcttcttcggagccacaatattccttctctctgttggtaccgcactgctgggtctgaaagaggctctcctttttaaccttgggggaaaatactctgcctttgagccagagggtgtactcgccaacgtgctgggcctgctcctggcgtgtttcgggggtgccgtgttatacattttgaccagggcagattggaagcggccttcacaggctgaggaacaggcactcagcatggactttaagaccctcactgagggggattcccctggtagccagtag

SEQ ID NO: 274724 - DNA, 756 bp, Artificial Sequence
  derived and/or modified sequence
atggaaggcggagcggcagctgccacgccaacagcattgccatactatgtcgccttcagtcagctcttagggctcactctagtcgctatgaccggcgcatggctcggcctatataggggtggcattgcatgggaatcagatctgcaattcaacgctcacccgctatgtatggtcatcgggttgatatttctgcagggcaacgctctgttagtgtatcgtgtgtttagaaacgaagctaagagaactacaaaggtactgcatggcctgttgcacatcttcgcgttggtcatcgccctggtcggactagttgccgtttttgattatcacaggaaaaagggctacgccgatctttacagcctgcactcttggtgcggcattctcgtgtttgtcctctattttgtgcaatggctcgtgggtttcagtttttttctatttccaggagcatctttcagtcttagatctcgttaccgccctcagcacattttttttggcgctaccatatttctgctgtctgtcggcacagcactgctggggctgaaggaggcactgctgtttaacctgggcggaaagtacagtgcttttgagccagagggagtgcttgcaaacgtcttgggactactattagcctgttttggtggggctgtgttgtacatactgaccagagctgactggaaaagacccagccaggcagaggagcaggccttgtcaatggactttaaaaccttgaccgagggagattctccaggatctcagtag

SEQ ID NO: 274725 - DNA, 756 bp, Artificial Sequence
  derived and/or modified sequence
atggaaggcggagctgcggcagcaactcctacagctttaccttactatgtggccttttctcagttactggggctcacactggtggctatgaccggtgcctggttgggcttgtatcgcggtggcattgcttgggaatcagatttgcagttcaatgcccatcctctctgcatggttatcggccttatctttcttcagggcaacgcacttcttgtgtaccgcgtgtttagaaacgaggccaagcgcacaacaaaggtgctgcacggcctacttcatatattcgctttggttattgctttagtgggcctggtcgccgtgttcgactaccaccgcaagaaaggatacgctgacctatattctctgcactcgtggtgtggcattctggtcttcgtgttgtactttgtccagtggctcgtcggcttttcctttttcctcttccctggagcatctttctctttgcggagccgttaccgaccgcagcatattttctttggagcaacaatattcctcctgtctgtggggaccgctttgctaggcttaaaagaggcacttctattcaatctaggcggtaagtactcagcattcgagcccgagggcgttctggccaacgtgctcggattgctgttggcatgtttcgggggtgcagtactctatattctgacccgggctgattggaagaggccctcccaggctgaggagcaggccttatcaatggatttcaagacattaactgaaggagattctccagggtcccaatag

SEQ ID NO: 274726 - DNA, 957 bp, Artificial Sequence
  derived and/or modified sequence
atgaagcaaaagaccaagccgggaaccggacctctgtcatccctcgaattcggcgttagtttcttagcaccgtcccctcacatggagcttttggcatcttgtcctcgcagtcggttgtctccttggggtggatgggcacctccaccctcacatagtcgcgacttgcgcccacttcctcaggatgatggggtctgcctgtcaatggagggaggcgctgcagcagcgacgcccacggccctgccttattatgtggctttctctcagcttttaggcctgacgttagtggctatgacaggagcatggctagggctatacaggggaggcatcgcatgggaatcggatctgcagttcaatgcacatcctttgtgcatggtgatcggcctgattttccttcaaggcaatgcactcctagtctacagagtatttcgcaatgaggctaagcggaccactaaagtacttcatgggcttttgcatattttcgccttggtgattgccctcgtgggcctagtggcagtgtttgactaccaccgcaaaaaaggctacgcagacctgtacagcctgcactcatggtgcgggattctggtgtttgtgttatattttgtacagtggctcgtaggttttagcttctttctcttccccggagcaagttttagccttcgctcccgctacagaccacagcacatttttttcggtgccactattttcttgttgagtgtcggcactgctctgcttggactgaaggaggctcttctgtttaacctcggcggaaagtatagtgcctttgaacctgagggggttctggctaacgttctaggtcttcttcttgcctgcttcggaggtgcagtgctctacattttgacccgggcagattggaagagaccaagccaggctgaggaacaagccctttccatggacttcaaaactttaaccgagggagattctcccggttcacagtag

SEQ ID NO: 274727 - DNA, 2981 bp, Artificial Sequence
  derived and/or modified sequence
caccgcccagcccgccgcccggttgccatggcgacgccgtcgcgccacggcccgcagaaccggccaagcgacccgggcgcggcgcggggaggctgaagggacgctcgggtaggcaagcgtttgcctcagcatggagggcggggccgcggcagccacccccacagcactgccttactacgtggccttctcccagctgctgggcctgaccttggtggccatgaccggcgcgtggctcgggctgtaccgaggcggcattgcctgggagagcgacctgcagttcaacgcgcaccccctctgcatggtcataggcctgatcttcctgcagggaaatgccctgctggtttaccgtgtcttcaggaacgaagctaaacgcaccaccaaggtcctgcacgggctgctgcacatctttgcgctcgtcatcgccctggttggcttggtggcggtgttcgactaccacaggaagaagggctacgctgacctgtacagcctacacagctggtgcgggatccttgtctttgtcctgtactttgtgcagtggctggtgggcttcagcttcttcctgttccccggagcttcattctccctgcggagccgctaccgcccacagcacatcttctttggtgctaccatcttcctcctttccgtgggcaccgccctgctgggcctgaaggaggcactgctgttcaacctcgggggcaagtatagcgcatttgagcccgagggtgtcctggccaacgtgctgggcctgctgctggcctgcttcggtggggcggtgctctacatcttgacccgggccgactggaagcggccttcccaggcggaagagcaggccctctccatggacttcaagacgctgacggagggagatagccccggctcccagtgatgcgcccggccggccctgggggttcgcggggtgtcttcttgcctgcccctgctgaggcgtcttcaggactgcaggctccggagagtggctctggcagcaggcgggcgcgtgggtgcagctgcatctgtttgagtgctgctttctggggtcaggtctccgcctcctctgcttctcctttctccgctgctatagaccagttcattgtgtgtggctcccgtgtctctgttgcccccttcagtgcagaaggctttgggtaggacttcgggtgttcggtcctggtcgcagagcacagatctttaaagaagcgagagaggaggccccaccctcctggcagcagatgcctggggcaaggccaggggaaactgggggggcctcagggacaggcctggaaaggccacgatggctgctgaattcaaacaaggagtccctccagcctgaataacacgtggcacaaatgggcccggcctttggcagaggagcaagtgatatgatgtgtaaagtatgttggtggtgaaagcaaggttccccaggagaggggagggactggcccctgggaagctctgagatgaggctgtggcccagctgtagtcctgaccttcctcttctttaaccctttagccctaggatggctttggtgggagaggggatagaagcccatgacttcagacagactttctcttggcagatgcaggcgggcctcctcccaggctgctccagacatgggggttggggatggggggcaccttgcagccccttcctgctggggctccctccttgtagcaccccccttgcggctcagctctggtttcctctcccaggctcacccaggctctgctcaggctgggaggcagagggcacaaaccttataattttttaaatgaaaaaccgctgctgctggctgtggctagagccccctggggctgctggagctgctgcctctgttctggaggacgagccttctccttatctgctgcccatctttccaggaagtcaggatggagtcagaacaactacagtcatcccccgtggtgtctgcacatcactccagccccataaagagtgtcatgttagctgagtcaccatttggcttcggcctggaaatagtgtgattagaacactgatcgtgtgcgaggccaggagatcaagaccatcctgactaacaaacacagtgaaaccccgtctctactaaaaatacaaaaaaattagccaggcgtggtggtgggcgcctgtagtcccagctacttgggaggctgaggcaggagaatggtgtgaacccgggagatggcgcttgcagtgagctgagattgcactccagcctgggcgacaggctcaaaaaagaaaaaaaaaagaacaccgatcatgtgcttcttggatctggtgactgttctctccctgttttcctttctttttgggtgtttgaggagcatggcttagcttgagacacacacagacactgtgtacttcagtgaagggcttaatatacagtttccaaacctgacgactcttcttcttgtaatggctgcccttttcctacctgaggccgtcttagagaaaggggccagtctcctctaatgctcagatttcccatagttggcttttgctgtgtctcctgcctcaggcagtgtcatttctgggagcaggtggttgtagtccaggcccctccccagcagggtctgcccaggctccttcgagcccctttccccgcctcctctcagcctgtccggatgacagtgttcgcctcctgtttagactgtacactcttcaggggtaggggtgccgtcagttcttcaatcagctggcacacacttgtatagtgaaatgtttacatgtgggaaaactccgccttagacaaactaccaaagtacaatcgtgtctctctctagccggaatgctacagagagaaatggaaccttagatttgcaacaaaagtctgtaaactggtctgtttgccaaagtgaacactggatgactaaggagctgaagaaggcccccagaagcggatttgtggtgggttattttattttgcctgtggccaatcttctgtgaaatacaatgtgctgttggtgcaacagatgattcaataaatgtctacagc

SEQ ID NO: 274728 - DNA, 2984 bp, Artificial Sequence
  derived and/or modified sequence
gggggacagcacttctttcagtacattttcctgttagactcggggtattagagacccaaagatacccaaggaggagtgagagcgtccctgccttcgaggagcagacagggcaccgcgaggcgtttgcctcagcatggagggcggggccgcggcagccacccccacagcactgccttactacgtggccttctcccagctgctgggcctgaccttggtggccatgaccggcgcgtggctcgggctgtaccgaggcggcattgcctgggagagcgacctgcagttcaacgcgcaccccctctgcatggtcataggcctgatcttcctgcagggaaatgccctgctggtttaccgtgtcttcaggaacgaagctaaacgcaccaccaaggtcctgcacgggctgctgcacatctttgcgctcgtcatcgccctggttggcttggtggcggtgttcgactaccacaggaagaagggctacgctgacctgtacagcctacacagctggtgcgggatccttgtctttgtcctgtactttgtgcagtggctggtgggcttcagcttcttcctgttccccggagcttcattctccctgcggagccgctaccgcccacagcacatcttctttggtgctaccatcttcctcctttccgtgggcaccgccctgctgggcctgaaggaggcactgctgttcaacctcgggggcaagtatagcgcatttgagcccgagggtgtcctggccaacgtgctgggcctgctgctggcctgcttcggtggggcggtgctctacatcttgacccgggccgactggaagcggccttcccaggcggaagagcaggccctctccatggacttcaagacgctgacggagggagatagccccggctcccagtgatgcgcccggccggccctgggggttcgcggggtgtcttcttgcctgcccctgctgaggcgtcttcaggactgcaggctccggagagtggctctggcagcaggcgggcgcgtgggtgcagctgcatctgtttgagtgctgctttctggggtcaggtctccgcctcctctgcttctcctttctccgctgctatagaccagttcattgtgtgtggctcccgtgtctctgttgcccccttcagtgcagaaggctttgggtaggacttcgggtgttcggtcctggtcgcagagcacagatctttaaagaagcgagagaggaggccccaccctcctggcagcagatgcctggggcaaggccaggggaaactgggggggcctcagggacaggcctggaaaggccacgatggctgctgaattcaaacaaggagtccctccagcctgaataacacgtggcacaaatgggcccggcctttggcagaggagcaagtgatatgatgtgtaaagtatgttggtggtgaaagcaaggttccccaggagaggggagggactggcccctgggaagctctgagatgaggctgtggcccagctgtagtcctgaccttcctcttctttaaccctttagccctaggatggctttggtgggagaggggatagaagcccatgacttcagacagactttctcttggcagatgcaggcgggcctcctcccaggctgctccagacatgggggttggggatggggggcaccttgcagccccttcctgctggggctccctccttgtagcaccccccttgcggctcagctctggtttcctctcccaggctcacccaggctctgctcaggctgggaggcagagggcacaaaccttataattttttaaatgaaaaaccgctgctgctggctgtggctagagccccctggggctgctggagctgctgcctctgttctggaggacgagccttctccttatctgctgcccatctttccaggaagtcaggatggagtcagaacaactacagtcatcccccgtggtgtctgcacatcactccagccccataaagagtgtcatgttagctgagtcaccatttggcttcggcctggaaatagtgtgattagaacactgatcgtgtgcgaggccaggagatcaagaccatcctgactaacaaacacagtgaaaccccgtctctactaaaaatacaaaaaaattagccaggcgtggtggtgggcgcctgtagtcccagctacttgggaggctgaggcaggagaatggtgtgaacccgggagatggcgcttgcagtgagctgagattgcactccagcctgggcgacaggctcaaaaaagaaaaaaaaaagaacaccgatcatgtgcttcttggatctggtgactgttctctccctgttttcctttctttttgggtgtttgaggagcatggcttagcttgagacacacacagacactgtgtacttcagtgaagggcttaatatacagtttccaaacctgacgactcttcttcttgtaatggctgcccttttcctacctgaggccgtcttagagaaaggggccagtctcctctaatgctcagatttcccatagttggcttttgctgtgtctcctgcctcaggcagtgtcatttctgggagcaggtggttgtagtccaggcccctccccagcagggtctgcccaggctccttcgagcccctttccccgcctcctctcagcctgtccggatgacagtgttcgcctcctgtttagactgtacactcttcaggggtaggggtgccgtcagttcttcaatcagctggcacacacttgtatagtgaaatgtttacatgtgggaaaactccgccttagacaaactaccaaagtacaatcgtgtctctctctagccggaatgctacagagagaaatggaaccttagatttgcaacaaaagtctgtaaactggtctgtttgccaaagtgaacactggatgactaaggagctgaagaaggcccccagaagcggatttgtggtgggttattttattttgcctgtggccaatcttctgtgaaatacaatgtgctgttggtgcaacagatgattcaataaatgtctacagc

SEQ ID NO: 274729 - DNA, 3151 bp, Artificial Sequence
  derived and/or modified sequence
aggtgagccctgactgcgcagggagggacagcgcggggctcccgagtagcagccggcctcgcacctgccccttgcggccgcgcactggactgcggcgccgacccgcaccctgggcccgagggctgcagggctcgcccgccctctcggagccgagcctctcccggtccaggcggcccctgccctggcctgcccgggtgccgggtctctgctgaagttagaaccgagacccccgcttgctggtgaccccgagtttggatctttgctcctgcgccgcgttctagagcaagcgtttgcctcagcatggagggcggggccgcggcagccacccccacagcactgccttactacgtggccttctcccagctgctgggcctgaccttggtggccatgaccggcgcgtggctcgggctgtaccgaggcggcattgcctgggagagcgacctgcagttcaacgcgcaccccctctgcatggtcataggcctgatcttcctgcagggaaatgccctgctggtttaccgtgtcttcaggaacgaagctaaacgcaccaccaaggtcctgcacgggctgctgcacatctttgcgctcgtcatcgccctggttggcttggtggcggtgttcgactaccacaggaagaagggctacgctgacctgtacagcctacacagctggtgcgggatccttgtctttgtcctgtactttgtgcagtggctggtgggcttcagcttcttcctgttccccggagcttcattctccctgcggagccgctaccgcccacagcacatcttctttggtgctaccatcttcctcctttccgtgggcaccgccctgctgggcctgaaggaggcactgctgttcaacctcgggggcaagtatagcgcatttgagcccgagggtgtcctggccaacgtgctgggcctgctgctggcctgcttcggtggggcggtgctctacatcttgacccgggccgactggaagcggccttcccaggcggaagagcaggccctctccatggacttcaagacgctgacggagggagatagccccggctcccagtgatgcgcccggccggccctgggggttcgcggggtgtcttcttgcctgcccctgctgaggcgtcttcaggactgcaggctccggagagtggctctggcagcaggcgggcgcgtgggtgcagctgcatctgtttgagtgctgctttctggggtcaggtctccgcctcctctgcttctcctttctccgctgctatagaccagttcattgtgtgtggctcccgtgtctctgttgcccccttcagtgcagaaggctttgggtaggacttcgggtgttcggtcctggtcgcagagcacagatctttaaagaagcgagagaggaggccccaccctcctggcagcagatgcctggggcaaggccaggggaaactgggggggcctcagggacaggcctggaaaggccacgatggctgctgaattcaaacaaggagtccctccagcctgaataacacgtggcacaaatgggcccggcctttggcagaggagcaagtgatatgatgtgtaaagtatgttggtggtgaaagcaaggttccccaggagaggggagggactggcccctgggaagctctgagatgaggctgtggcccagctgtagtcctgaccttcctcttctttaaccctttagccctaggatggctttggtgggagaggggatagaagcccatgacttcagacagactttctcttggcagatgcaggcgggcctcctcccaggctgctccagacatgggggttggggatggggggcaccttgcagccccttcctgctggggctccctccttgtagcaccccccttgcggctcagctctggtttcctctcccaggctcacccaggctctgctcaggctgggaggcagagggcacaaaccttataattttttaaatgaaaaaccgctgctgctggctgtggctagagccccctggggctgctggagctgctgcctctgttctggaggacgagccttctccttatctgctgcccatctttccaggaagtcaggatggagtcagaacaactacagtcatcccccgtggtgtctgcacatcactccagccccataaagagtgtcatgttagctgagtcaccatttggcttcggcctggaaatagtgtgattagaacactgatcgtgtgcgaggccaggagatcaagaccatcctgactaacaaacacagtgaaaccccgtctctactaaaaatacaaaaaaattagccaggcgtggtggtgggcgcctgtagtcccagctacttgggaggctgaggcaggagaatggtgtgaacccgggagatggcgcttgcagtgagctgagattgcactccagcctgggcgacaggctcaaaaaagaaaaaaaaaagaacaccgatcatgtgcttcttggatctggtgactgttctctccctgttttcctttctttttgggtgtttgaggagcatggcttagcttgagacacacacagacactgtgtacttcagtgaagggcttaatatacagtttccaaacctgacgactcttcttcttgtaatggctgcccttttcctacctgaggccgtcttagagaaaggggccagtctcctctaatgctcagatttcccatagttggcttttgctgtgtctcctgcctcaggcagtgtcatttctgggagcaggtggttgtagtccaggcccctccccagcagggtctgcccaggctccttcgagcccctttccccgcctcctctcagcctgtccggatgacagtgttcgcctcctgtttagactgtacactcttcaggggtaggggtgccgtcagttcttcaatcagctggcacacacttgtatagtgaaatgtttacatgtgggaaaactccgccttagacaaactaccaaagtacaatcgtgtctctctctagccggaatgctacagagagaaatggaaccttagatttgcaacaaaagtctgtaaactggtctgtttgccaaagtgaacactggatgactaaggagctgaagaaggcccccagaagcggatttgtggtgggttattttattttgcctgtggccaatcttctgtgaaatacaatgtgctgttggtgcaacagatgattcaataaatgtctacagc

SEQ ID NO: 274730 - DNA, 1302 bp, Artificial Sequence
  derived and/or modified sequence
gaccagccccttccttcccgtcaaggagcgcgcttgcctgtgtaactcacctgtaaagcccacccagggaaggccagggcctcatgaaacagaaaacaaagccgggcactgggcccttgagctcactagaatttggggtatctttccttgcaccctcaccgcatatggaactcctggcgtcgtgtcccaggtcacgcctgtccccgtggggaggctgggcccctccccccagccactcccgagacttgagacctctgcctcaggacgatggcgtttgcctcagcatggagggcggggccgcggcagccacccccacagcactgccttactacgtggccttctcccagctgctgggcctgaccttggtggccatgaccggcgcgtggctcgggctgtaccgaggcggcattgcctgggagagcgacctgcagttcaacgcgcaccccctctgcatggtcataggcctgatcttcctgcagggaaatgccctgctggtttaccgtgtcttcaggaacgaagctaaacgcaccaccaaggtcctgcacgggctgctgcacatctttgcgctcgtcatcgccctggttggcttggtggcggtgttcgactaccacaggaagaagggctacgctgacctgtacagcctacacagctggtgcgggatccttgtctttgtcctgtactttgtgcagtggctggtgggcttcagcttcttcctgttccccggagcttcattctccctgcggagccgctaccgcccacagcacatcttctttggtgctaccatcttcctcctttccgtgggcaccgccctgctgggcctgaaggaggcactgctgttcaacctcgggggcaagtatagcgcatttgagcccgagggtgtcctggccaacgtgctgggcctgctgctggcctgcttcggtggggcggtgctctacatcttgacccgggccgactggaagcggccttcccaggcggaagagcaggccctctccatggacttcaagacgctgacggagggagatagccccggctcccagtgatgcgcccggccggccctgggggttcgcggggtgtcttcttgcctgcccctgctgaggcgtcttcaggactgcaggctccggagagtggctctggcagcaggcgggcgcgtgggtgcagctgcatctgtttgagtgctgctttctggggtcaggtctccgcctcctctgcttctcctttctccgctgctatagaccagttcattgtgtgtggctcccgtgtctctgttgcccccttcagtgcagaaggctttgggtaggactt

SEQ ID NO: 274731 - DNA, 756 bp, Artificial Sequence
  derived and/or modified sequence
atggagggcggcgccgccgccgccacccccaccgccctgccctactacgtggccttcagccagctgctgggcctgaccctggtggccatgaccggcgcctggctgggcctgtacagaggcggcatcgcctgggagagcgacctgcagttcaacgcccaccccctgtgcatggtgatcggcctgatcttcctgcagggcaacgccctgctggtgtacagagtgttcagaaacgaggccaagagaaccaccaaggtgctgcacggcctgctgcacatcttcgccctggtgatcgccctggtgggcctggtggccgtgttcgactaccacagaaagaagggctacgccgacctgtacagcctgcacagctggtgcggcatcctggtgttcgtgctgtacttcgtgcagtggctggtgggcttcagcttcttcctgttccccggcgccagcttcagcctgagaagcagatacagaccccagcacatcttcttcggcgccaccatcttcctgctgagcgtgggcaccgccctgctgggcctgaaggaggccctgctgttcaacctgggcggcaagtacagcgccttcgagcccgagggcgtgctggccaacgtgctgggcctgctgctggcctgcttcggcggcgccgtgctgtacatcctgaccagagccgactggaagagacccagccaggccgaggagcaggccctgagcatggacttcaagaccctgaccgagggcgacagccccggcagccagtag

SEQ ID NO: 274732 - DNA, 957 bp, Artificial Sequence
  derived and/or modified sequence
atgaagcagaagaccaagcccggcaccggccccctgagcagcctggagttcggcgtgagcttcctggcccccagcccccacatggagctgctggccagctgccccagaagcagactgagcccctggggcggctgggcccccccccccagccacagcagagacctgagacccctgccccaggacgacggcgtgtgcctgagcatggagggcggcgccgccgccgccacccccaccgccctgccctactacgtggccttcagccagctgctgggcctgaccctggtggccatgaccggcgcctggctgggcctgtacagaggcggcatcgcctgggagagcgacctgcagttcaacgcccaccccctgtgcatggtgatcggcctgatcttcctgcagggcaacgccctgctggtgtacagagtgttcagaaacgaggccaagagaaccaccaaggtgctgcacggcctgctgcacatcttcgccctggtgatcgccctggtgggcctggtggccgtgttcgactaccacagaaagaagggctacgccgacctgtacagcctgcacagctggtgcggcatcctggtgttcgtgctgtacttcgtgcagtggctggtgggcttcagcttcttcctgttccccggcgccagcttcagcctgagaagcagatacagaccccagcacatcttcttcggcgccaccatcttcctgctgagcgtgggcaccgccctgctgggcctgaaggaggccctgctgttcaacctgggcggcaagtacagcgccttcgagcccgagggcgtgctggccaacgtgctgggcctgctgctggcctgcttcggcggcgccgtgctgtacatcctgaccagagccgactggaagagacccagccaggccgaggagcaggccctgagcatggacttcaagaccctgaccgagggcgacagccccggcagccagtag

SEQ ID NO: 274733 - protein, 399 aa, Artificial Sequence
  derived and/or modified sequence
MVDIIAKVTRRQSRALPAQVDDPPEPVYANIERQPRATSPGAAAAPLPSPVWETHTDAGTGRPYYYNPDTGVTTWESPFEAAEGAASPATSPASVDSHVSLETEWGQYWDEESRRVFFYNPLTGETAWEDEAENEPEEELEMQPGLSPGSPGDPRPPTPETDYPESLTSYPEEDYSPVGSFGEPGPTSPLTTPPGWSCHVSQDKQMLYTNHFTQEQWVRLEDPHGKPYFYNPEDSSVRWELPQVPVPAPRSIHKSSQDGDTPAQASPPEEKTKTLDKAGVLHRTKTADKGKRLRKKHWSASWTVLEGGVLTFFKDSKTSAAGGLRQPSKFSTPEYTVELRGATLSWAPKDKSSRKNVLELRSRDGSEYLIQHDSEAIISTWHKAIAQGIQELVSRAQGL

SEQ ID NO: 274734 - DNA, 1200 bp, Artificial Sequence
  derived and/or modified sequence
atggtggacatcatcgccaaggtgaccagaagacagagcagagccctgcccgcccaggtggacgacccccccgagcccgtgtacgccaacatcgagagacagcccagagccaccagccccggcgccgccgccgcccccctgcccagccccgtgtgggagacccacaccgacgccggcaccggcagaccctactactacaaccccgacaccggcgtgaccacctgggagagccccttcgaggccgccgagggcgccgccagccccgccaccagccccgccagcgtggacagccacgtgagcctggagaccgagtggggccagtactgggacgaggagagcagaagagtgttcttctacaaccccctgaccggcgagaccgcctgggaggacgaggccgagaacgagcccgaggaggagctggagatgcagcccggcctgagccccggcagccccggcgaccccagaccccccacccccgagaccgactaccccgagagcctgaccagctaccccgaggaggactacagccccgtgggcagcttcggcgagcccggccccaccagccccctgaccaccccccccggctggagctgccacgtgagccaggacaagcagatgctgtacaccaaccacttcacccaggagcagtgggtgagactggaggacccccacggcaagccctacttctacaaccccgaggacagcagcgtgagatgggagctgccccaggtgcccgtgcccgcccccagaagcatccacaagagcagccaggacggcgacacccccgcccaggccagcccccccgaggagaagaccaagaccctggacaaggccggcgtgctgcacagaaccaagaccgccgacaagggcaagagactgagaaagaagcactggagcgccagctggaccgtgctggagggcggcgtgctgaccttcttcaaggacagcaagaccagcgccgccggcggcctgagacagcccagcaagttcagcacccccgagtacaccgtggagctgagaggcgccaccctgagctgggcccccaaggacaagagcagcagaaagaacgtgctggagctgagaagcagagacggcagcgagtacctgatccagcacgacagcgaggccatcatcagcacctggcacaaggccatcgcccagggcatccaggagctggtgagcagagcccagggcctgtag

SEQ ID NO: 274735 - DNA, 1200 bp, Artificial Sequence
  derived and/or modified sequence
atggtcgacattattgccaaggtgacacgcagacagtcccgggcactacccgcacaggtagacgacccgcctgagcccgtatatgccaacatcgaacgacagccccgtgccacttcgcccggggcagccgctgcaccgctacccagccctgtttgggagactcacaccgacgcgggaaccggacgcccctactactacaacccagacaccggagtgaccacgtgggagtcaccctttgaagcagccgagggtgcagcctcacccgcaacatcaccagcctccgtcgacagtcatgtctccttagagactgaatggggacagtattgggatgaagaatctcgcagagtcttcttctacaatccactgaccggtgaaacagcctgggaagacgaagcagagaacgaacccgaggaagagctagaaatgcagccgggccttagtccgggcagccccggcgatccacggccaccgacccccgagacagattacccagaaagcctcacctcgtatcccgaagaagattactcacccgttgggtcttttggagaacccggcccaacttccccactcactactccaccaggctggtcttgccacgtctcgcaagataaacagatgctgtatacaaatcacttcacgcaggagcaatgggtacgcctggaggacccgcatggcaagccctatttctacaacccagaggacagcagcgttcgatgggaactgcctcaggtgccagttccggctcctcgtagtatacataaaagctcccaggatggcgataccccggctcaggccagcccacccgaagagaaaactaaaacactggacaaggccggcgttctccaccgaaccaaaacagctgataaggggaaaagactgagaaagaagcactggtcggcatcctggaccgtgctcgagggtggcgtgctgaccttctttaaagatagcaagacttcagccgctggtggtctccggcaaccatccaagttctcgacccccgagtacacggtggaactgaggggggctacattgtcttgggcccccaaagataagagcagccgaaagaatgtgctggaactgcgcagcagggacgggtcggagtatttgattcaacatgattcggaggcaattatttccacatggcacaaagccatcgctcaaggaatccaggagctggtgagcagggcccagggactgtag

SEQ ID NO: 274736 - DNA, 1200 bp, Artificial Sequence
  derived and/or modified sequence
atggtggacatcatcgccaaggtgacccggcggcagagccgggccctgcctgcccaggtggatgatcctcctgagcctgtgtatgccaacatcgagcggcagccccgggccaccagccctggagctgctgctgcccccctgcccagccctgtgtgggagacccacacagatgctggcaccggccggccctactactacaacccagacaccggggtgaccacctgggagagcccctttgaagctgctgagggcgccgccagccctgccaccagccctgcctctgtggacagccacgtgtccctggagacagagtggggccagtactgggatgaggagagccggcgggtcttcttctacaaccccctgactggagaaacagcctgggaggatgaagcagaaaatgaacctgaggaggagctggagatgcagcccggcctgagccctggcagccctggggacccccggccccccaccccagagacagactacccagagagcctgaccagctacccagaggaggactacagccctgtgggcagctttggagagcccggccccaccagccccctgaccaccccacctggctggagctgccacgtgtcccaggacaagcagatgctgtacaccaaccacttcacccaggagcagtgggtgcggctggaggacccccacggcaagccctacttctacaaccctgaggacagctctgtgcgctgggagctgccccaggtgcctgtgcctgcccccaggagcatccacaagagcagccaggatggagacaccccagcccaggccagccccccagaggagaagaccaagaccctggacaaggccggcgtgctgcacaggaccaagacagctgacaagggcaagaggctgaggaagaagcactggagcgcctcctggacagtgctggagggcggcgtgctgaccttcttcaaggacagcaagaccagcgctgctgggggcctgcggcagcccagcaagttcagcaccccagagtacacagtggagctgcggggggccaccctgtcctgggcccccaaggacaagagcagcaggaagaatgtgctggagctgcggagcagagatggcagcgagtacctgatccagcacgacagcgaggccatcatcagcacctggcacaaggccatcgcccagggcatccaggagctggtgtcccgggcccagggcctgtag

SEQ ID NO: 274737 - DNA, 1200 bp, Artificial Sequence
  derived and/or modified sequence
atggtggacatcatcgccaaggtgacccggcggcagagccgggccctgccagcgcaggtggacgatcctccggaacccgtgtatgcaaacatcgaacgccaaccaagggccacgagccctggtgccgctgctgcccctctccccagcccagtctgggagactcataccgatgccgggacaggtcgcccctactactacaaccccgatacaggggtcacaacatgggaatcccctttcgaagccgcagagggggcggcttccccagcaacttcacctgcttcagtcgacagtcacgtaagcttggagaccgaatggggacagtattgggatgaggaaagcaggcgcgtatttttttataatccactgacaggagagacggcctgggaggacgaggctgaaaacgaaccggaagaggaactggagatgcagccgggcctgtctcctggtagtccaggggacccgcgcccacctacgcctgagaccgattaccctgagtcactgacctcttatccggaagaagattacagtccggtggggtcattcggagagcccggccccacatctcccttaacaacaccacctggctggtcttgtcatgtgtcccaggataagcagatgctgtacaccaaccacttcactcaggagcagtgggttcgactggaagatccacatggcaaaccctacttttacaatcccgaagattctagcgtccggtgggaactgccccaagtccctgtccccgctcctcgcagcattcataaatccagccaggacggggatacacccgcccaagcctctccaccagaggagaaaacaaaaactctggacaaagccggggtcctgcatcgcacaaagacagccgacaaaggcaagcgcctgcgcaaaaagcactggtccgcctcctggacagtgctggaaggcggagttcttacctttttcaaggactctaagacctccgctgcgggtgggttgcggcagccaagtaagttttcaacacccgaatacactgtggaattgcgcggcgccaccttgtcttgggcgccgaaggacaaaagttccaggaaaaatgtcctagagctccggagcagagatggctccgagtatttgatccagcacgattcagaggccatcatcagcacgtggcacaaggctatcgcacagggcatccaggaactagtgagcagagctcagggcctctag

SEQ ID NO: 274738 - DNA, 1200 bp, Artificial Sequence
  derived and/or modified sequence
atggtcgacattatcgccaaggtgactaggagacagagcagggcccttcctgcgcaggtggatgacccgcctgaaccagtctatgctaatatcgagcgacaaccacgagccaccagccccggagccgcagctgctcctttgccttcccctgtctgggaaacacacactgacgcgggaacaggaagaccctactactataatcccgacaccggcgtgactacatgggagagcccttttgaggcggcagagggagctgcttcgccggcaaccagcccagctagcgtagattctcacgtgtccctggaaacagaatggggccagtattgggatgaagagtcccggagagtgttcttttacaacccattaactggggagacagcctgggaggacgaagccgagaacgaacctgaggaggagctggagatgcaacctgggttgagtcctggatctcctggggatccaaggccgcctactccggagaccgactacccagagagtctgacctcctaccccgaggaagactactcgcccgttggctcgtttggcgagcctggacctacgtcaccccttactacgcctcccggttggagctgccatgtcagccaggataagcagatgctgtatactaaccactttactcaggaacagtgggtgcggctggaagaccctcatggtaagccgtacttttacaacccagaagattcttctgtgaggtgggagctgccacaggtccccgttcccgcacccagaagtatacataagtcgtctcaagacggtgatacacccgcacaagcatctcctcctgaagagaaaaccaagacgctggataaggccggtgtgctgcatcggacaaagacagcggataagggcaagcgccttaggaagaagcactggtctgcatcttggacagtgctggaagggggagtcctaacattcttcaaagattctaaaacttccgccgctggcggtctacgccagccatctaagttttctaccccagagtacacagtggaactgcgaggagcaacactctcctgggctcccaaggacaaaagtagcaggaagaacgtcctcgaactccggagcagggatggatcggaatacctcatccagcacgactccgaggcaataatctccacatggcataaggctatcgctcagggaattcaggaacttgtgagccgtgcccagggcttgtag

SEQ ID NO: 274739 - DNA, 1709 bp, Artificial Sequence
  derived and/or modified sequence
gtttccctgttgccctgtgccagcactggggtagtgcccctgggctctacccccaaaaccttcccagggctctgtcccggcagttcagaggggccaggatggtggacataatcgccaaagtgaccaggaggcagagtcgagccttgccggcacaggtggacgacccaccggagcccgtgtacgcgaacatagagaggcagccccgggccacttcaccgggcgccgctgcagccccccttcccagcccggtgtgggagacgcacacggacgcgggcaccgggcgcccctactactacaacccagacacgggagttaccacctgggagtcgccctttgaggctgccgagggtgccgccagcccagccacctcccctgcctcggtggacagccacgtgagccttgagaccgagtggggccagtactgggatgaggagagccgcagggtgttcttctacaacccgctgacgggcgagacggcctgggaggacgaggccgagaacgagcccgaggaggagttggagatgcagccgggcctgagccctggcagcccaggggacccgcggccccccactcccgagacggactaccccgagtcgctgaccagttaccccgaggaggactattctcccgtgggctctttcggtgagcccggccctacctctcccttgaccacaccccccggctggtcttgtcatgtcagccaggacaagcagatgctctacaccaaccacttcactcaggagcagtgggtgaggctggaggacccccacgggaagccatacttctacaatccagaggactcctctgttcgatgggagctgccccaggtccctgtccctgcccctcgaagcatccataaatccagccaggatggtgacaccccagcccaggccagccctccagaggagaagaccaagaccttggacaaggcaggggtgctccatcgcaccaagacggcagacaagggaaagcggctccggaagaagcactggagtgcctcctggactgtgctggagggtggcgtcctgacattcttcaaggactcaaagacctcggctgcaggcggcctgaggcagccttccaagttttccacccctgagtacacagtggagctgaggggggccactctctcctgggcccccaaagacaaatccagtaggaagaatgtgctggagctacggagccgagatggctctgagtacctgatccagcacgactcggaggccatcatcagcacctggcataaggccattgctcagggcatccaggagctggtaagcagagcccagggcctctaggggcagtggggagggggtggccattatgagtggggccctctgctcaggctcagggagctctaaggtaccagtgggtaatgcaaatgcagtccccactaatggctaggatggcagggtaggcggctgaagaaactgccttctgtaagtctgtgaatccagccctggggttggccctgcaggaagactctccaggtgagggtagggcacattctaaaggaagttcccatttcacgggaggcagaaggccaaataaatactctgcaagccaaccaatggcaggctgaaactagcagataaaattttaaaggattgatttcaatagtcgaccatttttttaaggctgaaaacaccaattgcataagtagagctaggacaggggccctctgacaactactgacctggaaatgacct

SEQ ID NO: 274740 - protein, 750 aa, Artificial Sequence
  derived and/or modified sequence
YSKMEIPNPPTSKCITYWKRKVKSEYMRLRQLKRLQANMGAKALYVANFAKVQEKTQILNEEWKKLRVQPVQSMKPVSGHPFLKKCTIESIFPGFASQHMLMRSLNTVALVPIMYSWSPLQQNFMVEDETVLCNIPYMGDEVKEEDETFIEELINNYDGKVHGEEEMIPGSVLISDAVFLELVDALNQYSDEEEEGHNDTSDGKQDDSKEDLPVTRKRKRHAIEGNKKSSKKQFPNDMIFSAIASMFPENGVPDDMKERYRELTEMSDPNALPPQCTPNIDGPNAKSVQREQSLHSFHTLFCRRCFKYDCFLHPFHATPNVYKRKNKEIKIEPEPCGTDCFLLLEGAKEYAMLHNPRSKCSGRRRRRHHIVSASCSNASASAVAETKEGDSDRDTGNDWASSSSEANSRCQTPTKQKASPAPPQLCVVEAPSEPVEWTGAEESLFRVFHGTYFNNFCSIARLLGTKTCKQVFQFAVKESLILKLPTDELMNPSQKKKRKHRLWAAHCRKIQLKKDNSSTQVYNYQPCDHPDRPCDSTCPCIMTQNFCEKFCQCNPDCQNRFPGCRCKTQCNTKQCPCYLAVRECDPDLCLTCGASEHWDCKVVSCKNCSIQRGLKKHLLLAPSDVAGWGTFIKESVQKNEFISEYCGELISQDEADRRGKVYDKYMSSFLFNLNNDFVVDATRKGNKIRFANHSVNPNCYAKVVMVNGDHRIGIFAKRAIQAGEELFFDYRYSQADALKYVGIERETDVL

SEQ ID NO: 274741 - protein, 747 aa, Artificial Sequence
  derived and/or modified sequence
MEIPNPPTSKCITYWKRKVKSEYMRLRQLKRLQANMGAKALYVANFAKVQEKTQILNEEWKKLRVQPVQSMKPVSGHPFLKKCTIESIFPGFASQHMLMRSLNTVALVPIMYSWSPLQQNFMVEDETVLCNIPYMGDEVKEEDETFIEELINNYDGKVHGEEEMIPGSVLISDAVFLELVDALNQYSDEEEEGHNDTSDGKQDDSKEDLPVTRKRKRHAIEGNKKSSKKQFPNDMIFSAIASMFPENGVPDDMKERYRELTEMSDPNALPPQCTPNIDGPNAKSVQREQSLHSFHTLFCRRCFKYDCFLHPFHATPNVYKRKNKEIKIEPEPCGTDCFLLLEGAKEYAMLHNPRSKCSGRRRRRHHIVSASCSNASASAVAETKEGDSDRDTGNDWASSSSEANSRCQTPTKQKASPAPPQLCVVEAPSEPVEWTGAEESLFRVFHGTYFNNFCSIARLLGTKTCKQVFQFAVKESLILKLPTDELMNPSQKKKRKHRLWAAHCRKIQLKKDNSSTQVYNYQPCDHPDRPCDSTCPCIMTQNFCEKFCQCNPDCQNRFPGCRCKTQCNTKQCPCYLAVRECDPDLCLTCGASEHWDCKVVSCKNCSIQRGLKKHLLLAPSDVAGWGTFIKESVQKNEFISEYCGELISQDEADRRGKVYDKYMSSFLFNLNNDFVVDATRKGNKIRFANHSVNPNCYAKVVMVNGDHRIGIFAKRAIQAGEELFFDYRYSQADALKYVGIERETDVL

SEQ ID NO: 274742 - protein, 608 aa, Artificial Sequence
  derived and/or modified sequence
MEEASCPTCSVNEACEWTPFSQKEMIPGSVLISDAVFLELVDALNQYSDEEEEGHNDTSDGKQDDSKEDLPVTRKRKRHAIEGNKKSSKKQFPNDMIFSAIASMFPENGVPDDMKERYRELTEMSDPNALPPQCTPNIDGPNAKSVQREQSLHSFHTLFCRRCFKYDCFLHPFHATPNVYKRKNKEIKIEPEPCGTDCFLLLEGAKEYAMLHNPRSKCSGRRRRRHHIVSASCSNASASAVAETKEGDSDRDTGNDWASSSSEANSRCQTPTKQKASPAPPQLCVVEAPSEPVEWTGAEESLFRVFHGTYFNNFCSIARLLGTKTCKQVFQFAVKESLILKLPTDELMNPSQKKKRKHRLWAAHCRKIQLKKDNSSTQVYNYQPCDHPDRPCDSTCPCIMTQNFCEKFCQCNPDCQNRFPGCRCKTQCNTKQCPCYLAVRECDPDLCLTCGASEHWDCKVVSCKNCSIQRGLKKHLLLAPSDVAGWGTFIKESVQKNEFISEYCGELISQDEADRRGKVYDKYMSSFLFNLNNDFVVDATRKGNKIRFANHSVNPNCYAKVVMVNGDHRIGIFAKRAIQAGEELFFDYRYSQADALKYVGIERETDVL

SEQ ID NO: 274743 - DNA, 2253 bp, Artificial Sequence
  derived and/or modified sequence
tatagcaagatggagataccaaacccgccaacaagcaaatgtatcacttattggaagagaaaggtaaagtcggaatatatgaggctgcgccaattgaaacgtttacaggcaaacatgggtgctaaagctctttacgtagcaaatttcgcaaaggtgcaggagaaaactcagatcctaaacgaggaatggaagaaattgcgtgttcagcccgttcagtctatgaagcccgtgagcggtcacccctttctgaagaagtgtaccatcgagtctatatttcccggatttgcatctcagcacatgttgatgcgctcgttaaacaccgtcgctcttgtccctatcatgtatagctggtctccactgcaacagaacttcatggtggaagacgagacagtgctatgtaatataccttacatgggggacgaagttaaggaagaggacgaaaccttcatagaagaactaatcaacaactatgatgggaaggtgcacggggaagaggagatgattcctggctccgtcctcatttcggacgctgtattcctcgagcttgtcgatgctttgaaccaatactctgacgaagaggaggagggacataatgatacaagcgacggtaaacaggacgactcaaaggaagatttgcctgtgacacgcaagagaaagaggcacgctattgaagggaacaagaaatctagtaaaaaacaattcccaaacgatatgatcttctcagccattgcctctatgttcccggagaacggggttcccgacgatatgaaagaaagatatagggagctcaccgagatgtccgaccctaacgcacttccgccccagtgcacccccaacattgatgggccaaatgcaaagtcagttcagcgcgagcaatccttgcactcttttcatacactgttttgcaggcgatgctttaagtacgattgctttctgcaccccttccacgctaccccaaacgtgtacaagagaaagaataaggagatcaaaattgagcccgaaccctgcggcaccgattgctttctgttactcgaaggggcaaaagagtacgctatgcttcataaccctagatctaaatgtagcggacggagacgccgaaggcaccacatcgtgtccgcgtcctgttccaatgccagtgcaagcgcagttgccgagaccaaggaaggcgattccgatcgtgacacaggaaatgattgggccagcagtagcagtgaagccaacagccgctgccagacccctacaaaacagaaagcatcacccgcacccccccagctgtgtgtcgtggaggccccttcagaacccgtagaatggacaggggctgaagaaagcctgtttagggtgtttcatggaacttatttcaacaatttctgttccatcgctcggctgcttgggacaaaaacctgtaaacaggtcttccagttcgccgtaaaggaaagcttaattttgaaattgccgacagacgaattgatgaacccaagccagaaaaaaaagcgcaagcaccgcctgtgggcggctcattgtcgcaagattcaactgaaaaaggataactcctccacacaggtgtataactaccaaccatgtgaccaccccgatagaccatgtgacagtacatgtccctgtattatgactcaaaatttctgtgagaagttctgccaatgcaatcctgactgccagaaccgcttccccgggtgtaggtgcaagacccagtgcaacacaaagcagtgcccttgctacttagctgttcgcgagtgcgacccagacctatgtctaacttgtggtgcctctgagcattgggactgtaaggtggtctcctgcaaaaattgtagtatccagaggggcctgaaaaaacatttgctgcttgccccctccgacgtggccggttgggggacattcataaaagagtcagtccagaaaaacgaattcatctccgaatattgcggcgaattaatcagtcaggatgaggcggaccgccgaggaaaggtgtacgacaaatatatgagttccttcctctttaacttgaacaacgattttgtcgtcgacgctactcggaaaggtaataaaatacggtttgcaaaccactctgtcaatcctaattgctacgcgaaagtcgtgatggtaaacggcgatcataggattgggatcttcgcaaaacgcgctattcaggcgggggaggagctgttctttgactatcgctacagccaggccgatgccctcaagtatgtgggcatcgaacgagaaacagacgtcctctag

SEQ ID NO: 274744 - DNA, 2253 bp, Artificial Sequence
  derived and/or modified sequence
tacagcaagatggagatccccaacccccccaccagcaagtgcatcacctactggaagaggaaggtgaagtctgagtacatgaggctgcggcagctgaagaggctgcaggccaacatgggcgccaaggccctgtatgtggccaactttgccaaggtgcaggagaagacccagatcctgaatgaggagtggaagaagctgcgggtgcagcctgtgcagagcatgaagcctgtgtctggccaccccttcctgaagaagtgcaccatcgagagcatcttccctggctttgccagccagcacatgctgatgaggagcctgaacacagtggccctggtgcccatcatgtacagctggagccccctgcagcagaacttcatggtggaggatgagaccgtgctgtgcaacatcccctacatgggagatgaggtgaaggaggaggatgagaccttcatcgaggagctgatcaacaactatgatggcaaggtgcacggggaggaggagatgatccctggctctgtgctgatcagtgatgctgtgttcctggagctggtggatgccctgaaccagtacagtgatgaggaggaggagggccacaatgacaccagtgatggcaagcaggatgacagcaaggaggacctgcctgtgaccaggaagaggaagagacatgccatcgagggcaacaagaagagcagcaagaagcagttccccaatgacatgatcttcagcgccatcgcctccatgtttcctgaaaatggagtgcctgatgacatgaaggagcgctaccgggagctgacagagatgtctgaccccaatgccctgcccccccagtgcacccccaacattgatggccccaatgccaagtctgtgcagcgggagcagagcctgcacagcttccacaccctcttctgccgccgctgcttcaagtatgactgcttcctgcaccccttccacgccacccccaacgtgtacaagaggaagaacaaggagatcaagattgagcctgagccctgtggcacagactgcttcctgctgctggagggcgccaaggagtatgccatgctgcacaaccccaggagcaaatgttctggaagaagaagaagaagacaccacatcgtgtctgccagctgcagcaatgccagcgccagcgctgtggccgagaccaaggagggggacagcgaccgggacacaggaaatgactgggccagcagcagcagcgaggccaacagccgctgccagacccccaccaagcagaaggccagccctgccccaccccagctgtgtgtggtggaggcccccagcgagcctgtggagtggacaggagctgaggagagcctcttccgggtcttccacggcacctacttcaacaacttctgcagcatcgcccggctgctgggcaccaagacctgcaagcaggtgttccagtttgctgtgaaggagagcctcatcctgaagctgcccacagatgagctgatgaaccccagccagaagaagaagaggaagcaccggctgtgggccgcccactgcaggaagatccagctgaagaaggacaacagcagcacccaggtgtacaactaccagccctgtgaccacccagaccggccctgtgacagcacctgcccctgcatcatgacccagaacttctgtgagaagttctgccagtgcaacccagactgccagaaccgcttccctggctgccgctgcaagacccagtgcaacaccaagcagtgcccctgctacctggccgtgagagaatgtgaccctgacctgtgcctgacctgtggggccagcgagcactgggactgcaaggtggtgtcctgcaagaactgcagcatccagaggggcctgaagaagcacctgctgctggcccccagtgatgtggccggctggggcaccttcatcaaggagagcgtgcagaagaatgagttcatcagcgagtactgtggggagctgatcagccaggatgaagctgacagaagaggcaaggtgtatgacaagtacatgagcagcttcctgttcaacctgaacaatgactttgtggtggatgccaccaggaagggcaacaagatccgctttgccaaccacagcgtgaaccccaactgctacgccaaggtggtgatggtgaatggagaccaccgcatcggcatctttgccaagagggccatccaggccggggaggagctgttctttgactaccgctacagccaggctgatgccctgaagtatgtgggcatcgagcgggagacagatgtgctgtag

SEQ ID NO: 274745 - DNA, 2253 bp, Artificial Sequence
  derived and/or modified sequence
tacagcaagatggagatccccaacccccccaccagcaagtgcatcacctattggaaaaggaaggtgaaaagcgaatacatgcggttgcgtcagctgaagagactgcaagctaatatgggcgcaaaagccctgtatgtagctaattttgcaaaggtgcaagagaagacccagattttgaatgaggagtggaagaagctgcgggtgcagcccgtgcaatcaatgaagcctgtctctggccatccctttctgaagaaatgcaccatcgaaagtatttttcctgggtttgcctcacaacatatgctgatgaggtccttgaacacggtggcactggttccaatcatgtactcatggagtcccctccagcagaacttcatggtggaggacgagacagttctctgtaatattccttatatgggagacgaagtcaaggaagaagacgagactttcatcgaagagttgattaacaactatgatgggaaggtccacggcgaagaggagatgatcccaggatccgtgctgatttcagacgctgtctttctggagttagtggacgccctcaatcagtatagcgatgaagaagaagagggacacaatgataccagcgacggcaagcaggacgattctaaggaagacctgcccgtgacgcggaaacggaagcggcacgctattgagggtaacaagaagagctccaaaaaacagtttccaaacgatatgattttttctgcgattgcctctatgttcccagagaacggtgtacccgacgatatgaaggaacgttacagagagctgaccgaaatgtcagatcccaatgccttgcctcctcagtgtaccccgaacatagacggacccaacgccaagagtgttcagcgagaacaaagtttacactccttccataccctgttctgtaggcgctgctttaagtacgactgctttctacacccattccatgcaaccccaaatgtgtataaaaggaagaacaaagaaataaaaatcgaacctgagccttgtggcacggattgctttctgctgttggagggcgctaaggagtatgcaatgctgcacaatcctcggtctaagtgctccgggcggagacgtagacggcaccatattgtctcagcttcctgttcaaacgcgtcagcatctgccgtggctgagacgaaagagggcgactctgacagagacacaggtaacgactgggcctcctcctcaagtgaggcaaacagcaggtgtcagactccgaccaagcagaaggcatctccagctcccccccagctttgtgtcgtggaagccccgtctgaaccggtggaatggacaggcgctgaagagtctttatttcgagtgtttcatggtacctatttcaataacttctgtagcatcgcccgccttctgggtaccaagacctgtaagcaggtgtttcagtttgcagtgaaagaaagtctgatccttaagctgccgactgatgagctgatgaaccccagtcagaagaagaaacgtaaacacagattgtgggcagctcattgcaggaaaatccagctgaagaaagacaattcttcgacacaagtctataactaccagccatgtgaccatcctgaccgaccctgtgacagcacatgtccctgcatcatgactcagaacttctgtgaaaagttttgtcagtgcaatccagactgccagaacagatttccaggttgccggtgcaagacccagtgcaacacgaaacagtgtccatgttatctcgcggttcgcgaatgcgatccggacctgtgtcttacgtgcggcgcaagtgagcactgggactgcaaagtcgtgtcatgtaagaactgtagcattcagcgaggtctgaagaagcatctactgctggctcctagtgacgttgctggatgggggacattcattaaggagagtgttcagaagaatgagttcataagcgagtattgcggtgagctcatttctcaggatgaggccgatcggcggggcaaggtgtacgacaaatatatgtcctcctttctttttaatttaaataacgattttgtggtggacgctacacggaagggaaacaagatcaggtttgccaatcatagtgttaaccctaactgttacgctaaagtcgtgatggtgaacggtgaccaccgcatcggcattttcgcaaagcgggccatccaggccggggaggagttgtttttcgattatagatattcacaggccgacgccctgaagtacgtggggattgagagagagaccgatgtgctatag

SEQ ID NO: 274746 - DNA, 2253 bp, Artificial Sequence
  derived and/or modified sequence
tactctaagatggagattcctaatccccctacctcaaagtgcattacatactggaagagaaaggtcaaatcagaatatatgaggctgcgtcaactcaaacgactacaggctaacatgggcgcaaaagcgctgtatgtcgccaacttcgcaaaggtgcaggaaaaaactcaaattcttaacgaggagtggaaaaagctcagggtccagcccgtgcagagcatgaaacctgtctcaggccatccatttttgaaaaaatgtactatcgagtcaatcttccctgggtttgcttcacagcacatgttgatgagaagtctcaatactgttgcgctcgtgcccattatgtattcatggtcacctttgcagcagaattttatggtggaggacgagactgtcctctgcaatataccatatatgggagacgaggtcaaggaggaagatgaaacctttattgaagagctgatcaataattacgatggtaaggtgcatggcgaggaagaaatgatccccggttctgtgttgatttccgacgctgtgtttttagagcttgtggatgctctgaatcagtactcagatgaggaagaagagggccacaacgacacgtccgacgggaagcaggatgattctaaggaagatctgcctgtgacccgcaaaagaaaacgtcatgccatagaggggaataagaagtcatctaagaagcagttcccaaatgacatgatcttctctgccattgccagcatgtttccagaaaacggggtgccagatgatatgaaggaacgctatcgggagctgaccgaaatgtcggacccaaatgctctgcccccacagtgcaccccaaacattgacggtcctaacgcaaagtcggtgcagagagagcaaagtctccattctttccacacactcttttgcagaaggtgttttaagtatgattgcttcttacacccgttccatgccacccccaacgtttacaagcgcaaaaataaagagatcaagatcgagcccgaaccatgtggtactgattgctttctgttgctcgagggtgctaaggagtacgccatgctacataaccccaggtccaaatgctctggccgtcgacggagacgccaccatattgtgtccgcttcatgctccaatgcctccgcctccgcggtggctgagacaaaggaaggagactccgaccgtgataccggtaatgattgggcaagctctagcagtgaagctaacagtcgctgccaaacccccacgaagcagaaggctagcccagcccctcctcagttgtgcgtagttgaggctccttcagagccagtagagtggacaggtgctgaggaatcactatttagggtttttcacggcacatactttaataacttctgctctatcgcgcgtctgctggggactaagacatgtaagcaggtgttccagtttgcagtgaaagagtccttgattctgaagcttcccacagatgagctcatgaatccctcccagaaaaagaagcgaaaacaccgactgtgggctgctcactgtaggaaaatccagcttaaaaaggacaacagtagcacgcaagtctacaactaccagccatgtgaccacccagaccggccttgcgactccacctgtccgtgtattatgactcagaatttttgtgagaaattctgtcagtgcaaccccgactgccaaaaccgtttcccaggctgccggtgcaaaacgcaatgcaatacaaaacagtgtccatgttatctggctgttagggagtgtgatcctgacctgtgcctgacatgtggagcctcagaacactgggactgtaaagtggtgtcctgcaaaaactgctcaatccaaagaggcttgaagaaacatcttcttttggcaccctcagatgtcgcaggatgggggaccttcattaaggaatccgtgcaaaagaacgagtttatctctgaatattgtggcgagctgatctcccaggacgaggcggaccgcaggggcaaggtttacgataagtacatgtctagtttcttgttcaacttaaacaacgactttgtggtggacgccacacgtaaggggaacaaaatccgcttcgccaatcatagtgtcaatcccaattgctacgctaaagtggtgatggtgaatggcgaccatagaattggcatctttgcgaagagggccatccaagcgggagaagagctgttctttgactaccgctatagtcaggccgacgcattgaagtatgtcggaattgaacgggaaactgatgtgctctag

SEQ ID NO: 274747 - DNA, 2253 bp, Artificial Sequence
  derived and/or modified sequence
tacagcaagatggagatccccaacccccccaccagcaagtgcatcacctactggaagagaaaggtgaagagcgagtacatgagactgagacagctgaagagactgcaggccaacatgggcgccaaggccctgtacgtggccaacttcgccaaggtgcaggagaagacccagatcctgaacgaggagtggaagaagctgagagtgcagcccgtgcagagcatgaagcccgtgagcggccaccccttcctgaagaagtgcaccatcgagagcatcttccccggcttcgccagccagcacatgctgatgagaagcctgaacaccgtggccctggtgcccatcatgtacagctggagccccctgcagcagaacttcatggtggaggacgagaccgtgctgtgcaacatcccctacatgggcgacgaggtgaaggaggaggacgagaccttcatcgaggagctgatcaacaactacgacggcaaggtgcacggcgaggaggagatgatccccggcagcgtgctgatcagcgacgccgtgttcctggagctggtggacgccctgaaccagtacagcgacgaggaggaggagggccacaacgacaccagcgacggcaagcaggacgacagcaaggaggacctgcccgtgaccagaaagagaaagagacacgccatcgagggcaacaagaagagcagcaagaagcagttccccaacgacatgatcttcagcgccatcgccagcatgttccccgagaacggcgtgcccgacgacatgaaggagagatacagagagctgaccgagatgagcgaccccaacgccctgcccccccagtgcacccccaacatcgacggccccaacgccaagagcgtgcagagagagcagagcctgcacagcttccacaccctgttctgcagaagatgcttcaagtacgactgcttcctgcaccccttccacgccacccccaacgtgtacaagagaaagaacaaggagatcaagatcgagcccgagccctgcggcaccgactgcttcctgctgctggagggcgccaaggagtacgccatgctgcacaaccccagaagcaagtgcagcggcagaagaagaagaagacaccacatcgtgagcgccagctgcagcaacgccagcgccagcgccgtggccgagaccaaggagggcgacagcgacagagacaccggcaacgactgggccagcagcagcagcgaggccaacagcagatgccagacccccaccaagcagaaggccagccccgcccccccccagctgtgcgtggtggaggcccccagcgagcccgtggagtggaccggcgccgaggagagcctgttcagagtgttccacggcacctacttcaacaacttctgcagcatcgccagactgctgggcaccaagacctgcaagcaggtgttccagttcgccgtgaaggagagcctgatcctgaagctgcccaccgacgagctgatgaaccccagccagaagaagaagagaaagcacagactgtgggccgcccactgcagaaagatccagctgaagaaggacaacagcagcacccaggtgtacaactaccagccctgcgaccaccccgacagaccctgcgacagcacctgcccctgcatcatgacccagaacttctgcgagaagttctgccagtgcaaccccgactgccagaacagattccccggctgcagatgcaagacccagtgcaacaccaagcagtgcccctgctacctggccgtgagagagtgcgaccccgacctgtgcctgacctgcggcgccagcgagcactgggactgcaaggtggtgagctgcaagaactgcagcatccagagaggcctgaagaagcacctgctgctggcccccagcgacgtggccggctggggcaccttcatcaaggagagcgtgcagaagaacgagttcatcagcgagtactgcggcgagctgatcagccaggacgaggccgacagaagaggcaaggtgtacgacaagtacatgagcagcttcctgttcaacctgaacaacgacttcgtggtggacgccaccagaaagggcaacaagatcagattcgccaaccacagcgtgaaccccaactgctacgccaaggtggtgatggtgaacggcgaccacagaatcggcatcttcgccaagagagccatccaggccggcgaggagctgttcttcgactacagatacagccaggccgacgccctgaagtacgtgggcatcgagagagagaccgacgtgctgtag

SEQ ID NO: 274748 - DNA, 4645 bp, Artificial Sequence
  derived and/or modified sequence
gcgcatgcgtcctagcagcgggacccgcggctcgggatggaggctggacacctgttctgctgttgtgtcctgccattctcctgaagaacagaggcacactgtaaaacccaacacttccccttgcattctataagattacagcaagatggaaataccaaatccccctacctccaaatgtatcacttactggaaaagaaaagtgaaatctgaatacatgcgacttcgacaacttaaacggcttcaggcaaatatgggtgcaaaggctttgtatgtggcaaattttgcaaaggttcaagaaaaaacccagatcctcaatgaagaatggaagaagcttcgtgtccaacctgttcagtcaatgaagcctgtgagtggacacccttttctcaaaaagtgtaccatagagagcattttcccgggatttgcaagccaacatatgttaatgaggtcactgaacacagttgcattggttcccatcatgtattcctggtcccctctccaacagaactttatggtagaagatgagacggttttgtgcaatattccctacatgggagatgaagtgaaagaagaagatgagacttttattgaggagctgatcaataactatgatgggaaagtccatggtgaagaagagatgatccctggatccgttctgattagtgatgctgtttttctggagttggtcgatgccctgaatcagtactcagatgaggaggaggaagggcacaatgacacctcagatggaaagcaggatgacagcaaagaagatctgccagtaacaagaaagagaaagcgacatgctattgaaggcaacaaaaagagttccaagaaacagttcccaaatgacatgatcttcagtgcaattgcctcaatgttccctgagaatggtgtcccagatgacatgaaggagaggtatcgagaactaacagagatgtcagaccccaatgcacttccccctcagtgcacacccaacatcgatggccccaatgccaagtctgtgcagcgggagcaatctctgcactccttccacacacttttttgccggcgctgctttaaatacgactgcttccttcacccttttcatgccacccctaatgtatataaacgcaagaataaagaaatcaagattgaaccagaaccatgtggcacagactgcttccttttgctggaaggagcaaaggagtatgccatgctccacaacccccgctccaagtgctctggtcgtcgccggagaaggcaccacatagtcagtgcttcctgctccaatgcctcagcctctgctgtggctgagactaaagaaggagacagtgacagggacacaggcaatgactgggcctccagttcttcagaggctaactctcgctgtcagactcccacaaaacagaaggctagtccagccccacctcaactctgcgtagtggaagcaccctcggagcctgtggaatggactggggctgaagaatctctttttcgagtcttccatggcacctacttcaacaacttctgttcaatagccaggcttctggggaccaagacgtgcaagcaggtctttcagtttgcagtcaaagaatcacttatcctgaagctgccaacagatgagctcatgaacccctcacagaagaagaaaagaaagcacagattgtgggctgcacactgcaggaagattcagctgaagaaagataactcttccacacaagtgtacaactaccaaccctgcgaccacccagaccgcccctgtgacagcacctgcccctgcatcatgactcagaatttctgtgagaagttctgccagtgcaacccagactgtcagaatcgtttccctggctgtcgctgtaagacccagtgcaataccaagcaatgtccttgctatctggcagtgcgagaatgtgaccctgacctgtgtctcacctgtggggcctcagagcactgggactgcaaggtggtttcctgtaaaaactgcagcatccagcgtggacttaagaagcacctgctgctggccccctctgatgtggccggatggggcaccttcataaaggagtctgtgcagaagaacgaattcatttctgaatactgtggtgagctcatctctcaggatgaggctgatcgacgcggaaaggtctatgacaaatacatgtccagcttcctcttcaacctcaataatgattttgtagtggatgctactcggaaaggaaacaaaattcgatttgcaaatcattcagtgaatcccaactgttatgccaaagtggtcatggtgaatggagaccatcggattgggatctttgccaagagggcaattcaagctggcgaagagctcttctttgattacaggtacagccaagctgatgctctcaagtacgtggggatcgagagggagaccgacgtcctttagccctcccaggccccacggcagcacttatggtagcggcactgtcttggctttcgtgctcacaccactgctgctcgagtctcctgcactgtgtctcccacactgagaaaccccccaacccactccctctgtagtgaggcctctgccatgtccagagggcacaaaactgtctcaatgagaggggagacagaggcagctagggcttggtctcccaggacagagagttacagaaatgggagactgtttctctggcctcagaagaagcgagcacaggctggggtggatgacttatgcgtgatttcgtgtcggctccccaggctgtggcctcaggaatcaacttaggcagttcccaacaagcgctagcctgtaattgtagctttccacatcaagagtccttatgttattgggatgcaggcaaacctctgtggtcctaagacctggagaggacaggctaagtgaagtgtggtccctggagcctacaagtggtctgggttagaggcgagcctggcaggcagcacagactgaactcagaggtagacaggtcaccttactacctcctccctcgtggcagggctcaaactgaaagagtgtgggttctaagtacaggcattcaaggctgggggaaggaaagctacgccatccttccttagccagagagggagaaccagccagatgatagtagttaaactgctaagcttgggcccaggaggctttgagaaagccttctctgtgtactctggagatagatggagaagtgttttcagattcctgggaacagacaccagtgctccagctcctccaaagttctggcttagcagctgcaggcaagcattatgctgctattgaagaagcattaggggtatgcctggcaggtgtgagcatcctggctcgctggatttgtgggtgttttcaggccttccattccccatagaggcaaggcccaatggccagtgttgcttatcgcttcagggtaggtgggcacaggcttggactagagaggagaaagattggtgtaatctgctttcctgtctgtagtgcctgctgtttggaaagggtgagttagaatatgttccaaggttggtgaggggctaaattgcacgcgtttaggctggcaccccgtgtgcagggcacactggcagagggtatctgaagtgggagaagaagcaggtagaccacctgtcccaggctgtggtgccaccctctctggcattcatgcagagcaaagcactttaaccatttcttttaaaaggtctatagattggggtagagtttggcctaaggtctctagggtccctgcctaaatcccactcctgagggagggggaagaagagagggtgggagattctcctccagtcctgtctcatctcctgggagaggcagacgagtgagtttcacacagaagaatttcatgtgaatggggccagcaagagctgccctgtgtccatggtgggtgtgccgggctggctgggaacaaggagcagtatgttgagtagaaagggtgtgggcgggtatagattggcctgggagtgttacagtagggagcaggcttctcccttctttctgggactcagagccccgcttcttcccactccacttgttgtcccatgaaggaagaagtggggttcctcctgacccagctgcctcttacggtttggtatgggacatgcacacacactcacatgctctcactcaccacactggagggcacacacgtaccccgcacccagcaactcctgacagaaagctcctcccacccaaatgggccaggccccagcatgatcctgaaatctgcatccgccgtggtttgtattcattgtgcatatcagggataccctcaagctggactgtgggttccaaattactcatagaggagaaaaccagagaaagatgaagaggaggagttaggtctatttgaaatgccaggggctcgctgtgaggaataggtgaaaaaaaacttttcaccagcctttgagagactagactgaccccacccttccttcagtgagcagaatcactgtggtcagtctcctgtcccagcttcagttcatgaatactcctgttcctccagtttcccatcctttgtccctgctgtcccccacttttaaagatgggtctcaacccctccccaccacgtcatgatggatggggcaaggtggtggggactaggggagcctggtatacatgcggcttcattgccaataaatttcatgcactttaaagtcctgtggcttgtgacctcttaataaagtgttagaatcc

SEQ ID NO: 274749 - protein, 707 aa, Artificial Sequence
  derived and/or modified sequence
MEIPNPPTSKCITYWKRKVKSEYMRLRQLKRLQANMGAKALYVANFAKVQEKTQILNEEWKKLRVQPVQSMKPVSGHPFLKKVEDETVLCNIPYMGDEVKEEDETFIEELINNYDGKVHGEEEMIPGSVLISDAVFLELVDALNQYSDEEEEGHNDTSDGKQDDSKEDLPVTRKRKRHAIEGNKKSSKKQFPNDMIFSAIASMFPENGVPDDMKERYRELTEMSDPNALPPQCTPNIDGPNAKSVQREQSLHSFHTLFCRRCFKYDCFLHPFHATPNVYKRKNKEIKIEPEPCGTDCFLLLEGAKEYAMLHNPRSKCSGRRRRRHHIVSASCSNASASAVAETKEGDSDRDTGNDWASSSSEANSRCQTPTKQKASPAPPQLCVVEAPSEPVEWTGAEESLFRVFHGTYFNNFCSIARLLGTKTCKQVFQFAVKESLILKLPTDELMNPSQKKKRKHRLWAAHCRKIQLKKDNSSTQVYNYQPCDHPDRPCDSTCPCIMTQNFCEKFCQCNPDCQNRFPGCRCKTQCNTKQCPCYLAVRECDPDLCLTCGASEHWDCKVVSCKNCSIQRGLKKHLLLAPSDVAGWGTFIKESVQKNEFISEYCGELISQDEADRRGKVYDKYMSSFLFNLNNDFVVDATRKGNKIRFANHSVNPNCYAKVVMVNGDHRIGIFAKRAIQAGEELFFDYRYSQADALKYVGIERETDVL

SEQ ID NO: 274750 - DNA, 4525 bp, Artificial Sequence
  derived and/or modified sequence
gcgcatgcgtcctagcagcgggacccgcggctcgggatggaggctggacacctgttctgctgttgtgtcctgccattctcctgaagaacagaggcacactgtaaaacccaacacttccccttgcattctataagattacagcaagatggaaataccaaatccccctacctccaaatgtatcacttactggaaaagaaaagtgaaatctgaatacatgcgacttcgacaacttaaacggcttcaggcaaatatgggtgcaaaggctttgtatgtggcaaattttgcaaaggttcaagaaaaaacccagatcctcaatgaagaatggaagaagcttcgtgtccaacctgttcagtcaatgaagcctgtgagtggacacccttttctcaaaaaggtagaagatgagacggttttgtgcaatattccctacatgggagatgaagtgaaagaagaagatgagacttttattgaggagctgatcaataactatgatgggaaagtccatggtgaagaagagatgatccctggatccgttctgattagtgatgctgtttttctggagttggtcgatgccctgaatcagtactcagatgaggaggaggaagggcacaatgacacctcagatggaaagcaggatgacagcaaagaagatctgccagtaacaagaaagagaaagcgacatgctattgaaggcaacaaaaagagttccaagaaacagttcccaaatgacatgatcttcagtgcaattgcctcaatgttccctgagaatggtgtcccagatgacatgaaggagaggtatcgagaactaacagagatgtcagaccccaatgcacttccccctcagtgcacacccaacatcgatggccccaatgccaagtctgtgcagcgggagcaatctctgcactccttccacacacttttttgccggcgctgctttaaatacgactgcttccttcacccttttcatgccacccctaatgtatataaacgcaagaataaagaaatcaagattgaaccagaaccatgtggcacagactgcttccttttgctggaaggagcaaaggagtatgccatgctccacaacccccgctccaagtgctctggtcgtcgccggagaaggcaccacatagtcagtgcttcctgctccaatgcctcagcctctgctgtggctgagactaaagaaggagacagtgacagggacacaggcaatgactgggcctccagttcttcagaggctaactctcgctgtcagactcccacaaaacagaaggctagtccagccccacctcaactctgcgtagtggaagcaccctcggagcctgtggaatggactggggctgaagaatctctttttcgagtcttccatggcacctacttcaacaacttctgttcaatagccaggcttctggggaccaagacgtgcaagcaggtctttcagtttgcagtcaaagaatcacttatcctgaagctgccaacagatgagctcatgaacccctcacagaagaagaaaagaaagcacagattgtgggctgcacactgcaggaagattcagctgaagaaagataactcttccacacaagtgtacaactaccaaccctgcgaccacccagaccgcccctgtgacagcacctgcccctgcatcatgactcagaatttctgtgagaagttctgccagtgcaacccagactgtcagaatcgtttccctggctgtcgctgtaagacccagtgcaataccaagcaatgtccttgctatctggcagtgcgagaatgtgaccctgacctgtgtctcacctgtggggcctcagagcactgggactgcaaggtggtttcctgtaaaaactgcagcatccagcgtggacttaagaagcacctgctgctggccccctctgatgtggccggatggggcaccttcataaaggagtctgtgcagaagaacgaattcatttctgaatactgtggtgagctcatctctcaggatgaggctgatcgacgcggaaaggtctatgacaaatacatgtccagcttcctcttcaacctcaataatgattttgtagtggatgctactcggaaaggaaacaaaattcgatttgcaaatcattcagtgaatcccaactgttatgccaaagtggtcatggtgaatggagaccatcggattgggatctttgccaagagggcaattcaagctggcgaagagctcttctttgattacaggtacagccaagctgatgctctcaagtacgtggggatcgagagggagaccgacgtcctttagccctcccaggccccacggcagcacttatggtagcggcactgtcttggctttcgtgctcacaccactgctgctcgagtctcctgcactgtgtctcccacactgagaaaccccccaacccactccctctgtagtgaggcctctgccatgtccagagggcacaaaactgtctcaatgagaggggagacagaggcagctagggcttggtctcccaggacagagagttacagaaatgggagactgtttctctggcctcagaagaagcgagcacaggctggggtggatgacttatgcgtgatttcgtgtcggctccccaggctgtggcctcaggaatcaacttaggcagttcccaacaagcgctagcctgtaattgtagctttccacatcaagagtccttatgttattgggatgcaggcaaacctctgtggtcctaagacctggagaggacaggctaagtgaagtgtggtccctggagcctacaagtggtctgggttagaggcgagcctggcaggcagcacagactgaactcagaggtagacaggtcaccttactacctcctccctcgtggcagggctcaaactgaaagagtgtgggttctaagtacaggcattcaaggctgggggaaggaaagctacgccatccttccttagccagagagggagaaccagccagatgatagtagttaaactgctaagcttgggcccaggaggctttgagaaagccttctctgtgtactctggagatagatggagaagtgttttcagattcctgggaacagacaccagtgctccagctcctccaaagttctggcttagcagctgcaggcaagcattatgctgctattgaagaagcattaggggtatgcctggcaggtgtgagcatcctggctcgctggatttgtgggtgttttcaggccttccattccccatagaggcaaggcccaatggccagtgttgcttatcgcttcagggtaggtgggcacaggcttggactagagaggagaaagattggtgtaatctgctttcctgtctgtagtgcctgctgtttggaaagggtgagttagaatatgttccaaggttggtgaggggctaaattgcacgcgtttaggctggcaccccgtgtgcagggcacactggcagagggtatctgaagtgggagaagaagcaggtagaccacctgtcccaggctgtggtgccaccctctctggcattcatgcagagcaaagcactttaaccatttcttttaaaaggtctatagattggggtagagtttggcctaaggtctctagggtccctgcctaaatcccactcctgagggagggggaagaagagagggtgggagattctcctccagtcctgtctcatctcctgggagaggcagacgagtgagtttcacacagaagaatttcatgtgaatggggccagcaagagctgccctgtgtccatggtgggtgtgccgggctggctgggaacaaggagcagtatgttgagtagaaagggtgtgggcgggtatagattggcctgggagtgttacagtagggagcaggcttctcccttctttctgggactcagagccccgcttcttcccactccacttgttgtcccatgaaggaagaagtggggttcctcctgacccagctgcctcttacggtttggtatgggacatgcacacacactcacatgctctcactcaccacactggagggcacacacgtaccccgcacccagcaactcctgacagaaagctcctcccacccaaatgggccaggccccagcatgatcctgaaatctgcatccgccgtggtttgtattcattgtgcatatcagggataccctcaagctggactgtgggttccaaattactcatagaggagaaaaccagagaaagatgaagaggaggagttaggtctatttgaaatgccaggggctcgctgtgaggaataggtgaaaaaaaacttttcaccagcctttgagagactagactgaccccacccttccttcagtgagcagaatcactgtggtcagtctcctgtcccagcttcagttcatgaatactcctgttcctccagtttcccatcctttgtccctgctgtcccccacttttaaagatgggtctcaacccctccccaccacgtcatgatggatggggcaaggtggtggggactaggggagcctggtatacatgcggcttcattgccaataaatttcatgcactttaaagtcctgtggcttgtgacctcttaataaagtgttagaatcc

SEQ ID NO: 274751 - DNA, 2124 bp, Artificial Sequence
  derived and/or modified sequence
atggagatccccaaccctccaaccagtaaatgtattacttattggaagagaaaggtgaagagtgagtacatgaggctccgccagttaaagagactgcaggcgaacatgggcgccaaagcactgtatgttgcaaactttgctaaggtacaggagaagacccagattctgaatgaagagtggaaaaaacttagggtgcagcccgtacaatcaatgaaaccggttagcggtcatccttttctgaagaaggttgaagacgagacagtgttatgcaacattccttatatgggcgatgaggtgaaggaggaagacgagacttttatcgaagaattgatcaataattacgacgggaaagtgcacggtgaggaagagatgatccccggcagcgttctgatcagcgacgccgtgtttctagagcttgttgacgccctgaatcagtatagcgatgaagaggaggaagggcacaatgacaccagcgacgggaaacaggacgacagtaaggaagacctgccggtcacacgtaagaggaaacgccacgcaattgagggcaataaaaaaagctcaaaaaaacagttcccaaatgacatgattttttcagctatagctagcatgttcccagagaatggcgtcccggacgatatgaaggagagataccgcgaattgacggagatgagcgacccaaatgcgcttcccccacaatgtaccccaaacatcgatggaccaaacgcaaaaagcgttcaacgagagcagagcctgcattcattccacacactcttttgtagaagatgctttaagtatgattgctttctgcacccattccacgcgacccctaacgtctataagcgaaaaaataaggaaattaaaatagagcccgaaccatgcgggacagactgcttcctgttgctcgagggggcgaaagaatacgctatgcttcacaacccacggtcaaagtgtagtggtaggcgaaggcgtaggcaccatattgtgtctgccagttgcagcaacgcctccgcctcagccgtggcggagactaaggaaggggattctgaccgcgacaccgggaacgattgggcatcctctagctccgaagctaattctagatgccaaactcccaccaaacaaaaggcaagtcccgcgccaccccagctgtgcgtggtggaggcgccatccgagccagtcgaatggacaggcgccgaggaatccttattcagggtctttcacggcacgtacttcaacaatttttgctccatcgctcgcctcttaggtacaaagacatgtaaacaggtcttccagttcgcagtcaaagagtcactcatactcaaactccccaccgatgaactgatgaacccttcacagaaaaagaagcgcaaacatcgtctatgggcagcccactgccgcaaaatacaattaaaaaaagataattcatcgacccaggtatacaattaccagccttgcgatcaccccgaccggccttgcgattcaacttgcccctgtatcatgacccagaatttctgcgagaagttttgtcaatgcaaccctgactgtcagaaccgatttccggggtgcagatgcaagactcagtgcaacacaaagcagtgtccatgttacctggccgtacgtgaatgcgatcccgacctgtgtttgacttgcggagcttccgagcactgggactgtaaggttgtaagttgcaagaattgctctatccaaagaggactgaagaaacatctcctgttggcacctagcgatgtggctggctggggtacttttatcaaagaaagtgtgcagaaaaacgagttcatctccgagtactgcggggaactaatcagccaagatgaagccgaccgcagaggcaaggtgtacgacaaatatatgtctagctttcttttcaacttgaacaatgatttcgtggtagatgcgaccagaaagggtaacaagatcaggttcgccaatcacagcgtgaatccaaattgctacgccaaagtggttatggtgaacggtgaccatcgcattggaatattcgcaaagagagccattcaagcgggtgaggagctcttctttgactatcgctacagccaagccgacgccctgaagtacgtgggcatagagcgcgaaaccgacgtgctttag

SEQ ID NO: 274752 - DNA, 2124 bp, Artificial Sequence
  derived and/or modified sequence
atggagatccccaacccccccaccagcaagtgcatcacctactggaagaggaaggtgaagtctgagtacatgaggctgcggcagctgaagaggctgcaggccaacatgggcgccaaggccctgtatgtggccaactttgccaaggtgcaggagaagacccagatcctgaatgaggagtggaagaagctgcgggtgcagcctgtgcagagcatgaagcctgtgtctggccaccccttcctgaagaaggtggaggatgaaacagtgctgtgcaacatcccctacatgggagatgaggtgaaggaggaggatgagaccttcatcgaggagctgatcaacaactatgatggcaaggtgcatggagaggaggagatgatccctggctctgtgctgatcagtgatgctgtgttcctggagctggtggatgccctgaaccagtacagtgatgaggaggaggagggccacaatgacaccagtgatggcaagcaggatgacagcaaagaagacctgcctgtgaccaggaagaggaagagacatgccatcgagggcaacaagaagagcagcaagaagcagttccccaatgacatgatcttcagcgccatcgcctccatgtttcctgaaaatggagtgcctgatgacatgaaggagcgctaccgggagctgacagagatgtctgaccccaatgccctgcccccccagtgcacccccaacattgatggccccaatgccaagtctgtgcagcgggagcagagcctgcacagcttccacaccctcttctgccgccgctgcttcaagtatgactgcttcctgcaccccttccacgccaccccaaatgtgtacaagaggaagaacaaggagatcaagattgagcctgagccctgtggcacagactgcttcctgctgctggagggcgccaaggagtatgccatgctgcacaaccccaggagcaagtgcagcggcagaagaagaagaagacaccacatcgtgtctgccagctgcagcaatgccagcgccagcgctgtggccgagaccaaggagggggacagcgaccgggacacaggaaatgactgggccagcagcagcagcgaggccaacagccgctgccagacccccaccaagcagaaggccagccctgccccaccccagctgtgtgtggtggaggcccccagcgagcctgtggagtggacaggagctgaggagagcctcttccgggtcttccacggcacctacttcaacaacttctgcagcatcgcccggctgctgggcaccaagacctgcaagcaggtgttccagtttgctgtgaaggagagcctcatcctgaagctgcccacagatgagctgatgaaccccagccagaagaagaagaggaagcaccggctgtgggccgcccactgcaggaagatccagctgaagaaggacaacagcagcacccaggtgtacaactaccagccctgtgaccacccagaccggccctgtgacagcacctgcccctgcatcatgacccagaacttctgtgagaagttctgccagtgcaacccagactgccagaaccgcttccctggctgccgctgcaagacccagtgcaacaccaagcagtgcccctgctacctggccgtgcgggagtgtgaccctgacctgtgcctgacctgtggggccagcgagcactgggactgcaaggtggtgtcctgcaagaactgcagcatccagaggggcctgaagaagcacctgctgctggcccccagtgatgtggccggctggggcaccttcatcaaggagagcgtgcagaagaatgagttcatcagcgagtactgtggggagctgatcagccaggatgaggccgaccggcggggcaaggtgtatgacaagtacatgagcagcttcctgttcaacctgaacaatgactttgtggtggatgccaccaggaaaggaaacaagatccgctttgccaaccacagcgtgaaccccaactgctacgccaaggtggtgatggtgaatggagaccacagaattggcatctttgccaagagggccatccaggccggggaggagctgttctttgactaccgctacagccaggctgatgccctgaagtatgtgggcatcgagcgggagacagatgtgctgtag

SEQ ID NO: 274753 - DNA, 2124 bp, Artificial Sequence
  derived and/or modified sequence
atggagatccccaacccccccaccagcaagtgcatcacctactggaaaaggaaggtgaagtcagagtacatgcgcctccgacaacttaaacggcttcaagcaaacatgggagcgaaagctctctatgtggcaaactttgccaaagtgcaggagaaaacccagattctcaacgaggagtggaagaaacttagagtccagcctgtgcagagcatgaagccagtatccggccaccccttcctcaagaaagtggaggacgagaccgtactttgcaacatcccatacatgggagacgaggtaaaagaggaagatgagacgttcatagaagagttgatcaataactatgatggtaaggtgcacggggaagaagaaatgattcccggctccgttctgattagcgacgcagttttcctggaattggtggacgcccttaatcaatatagcgacgaagaggaagaaggccataatgatacctcggacgggaaacaggacgacagcaaagaggacctgcccgtaactcggaagaggaagcggcacgctatagagggcaacaagaagtcttcaaagaagcagttccccaatgacatgatcttttcagccattgcttctatgtttccagagaatggcgtgccagatgacatgaaggaacggtatcgtgaacttaccgagatgtctgaccctaacgccctgccaccccagtgtaccccaaatattgacggacctaatgctaagtctgtccagagagagcagagcttgcatagctttcacaccctcttctgcagaagatgtttcaaatacgattgctttctccatccctttcacgcaactcccaatgtttataagagaaagaataaggaaattaaaatagaaccagagccctgcggaactgattgcttcctcctgcttgaaggcgccaaggaatacgcaatgctgcacaacccaaggtcaaagtgctctggacgtagaaggcgtcgtcaccacatagtcagcgcctcctgctctaatgctagcgcttccgctgtcgccgagacaaaagaaggtgacagtgaccgcgacacagggaacgactgggcttcatctagctcagaggccaattcaagatgtcagacacccactaaacagaaagcatcaccggcgccaccacaattgtgcgtagtggaggcaccttccgagcccgtggagtggacaggagcagaggaatccctgttccgggtatttcacggcacctactttaacaacttctgctccatcgcaaggttacttgggaccaagacgtgtaagcaggtctttcagttcgccgtaaaggagagcttaatcttaaagctgcccaccgacgaacttatgaacccttctcagaagaagaagcgtaagcacaggctgtgggcagcgcactgtcgtaaaatccagctgaagaaagataattcaagcacacaggtctataactatcagccatgcgaccatcccgacagaccatgcgactccacatgtccatgcatcatgacccagaacttttgcgaaaaattctgccaatgcaatcctgactgtcaaaatcggttccccggctgcagatgtaaaacacagtgcaataccaagcaatgcccatgttacctggcagtgagggagtgtgacccagacctctgtctgacctgcggagcctctgagcactgggattgtaaagtcgtctcctgcaagaattgtagcattcagcggggactcaagaagcatcttctgctagcaccgagcgacgttgccggatgggggacattcatcaaggaaagcgtgcagaagaacgagttcatctcggaatactgcggagagctaataagtcaggatgaagccgatcggaggggaaaagtatacgacaagtatatgagcagtttcttgttcaacctaaacaatgattttgtagtggacgcgaccagaaaaggaaacaaaatccggttcgcgaatcactccgtgaaccccaattgctatgctaaagtggttatggtcaacggggatcatcgaattggcatctttgccaagcgcgcaatacaggcaggagaagagttgttcttcgattacaggtactcacaggcggatgcgctgaagtacgtcgggatcgagcgcgaaacggatgtcctgtag

SEQ ID NO: 274754 - DNA, 2124 bp, Artificial Sequence
  derived and/or modified sequence
atggagattcctaaccccccaacttctaagtgcattacctattggaagcgaaaggttaagagtgagtacatgcggttaaggcagctgaaacggctccaggctaatatgggagccaaggcattgtatgttgctaacttcgctaaggtccaagagaagacccagatccttaacgaagaatggaagaagttacgagtgcagcctgtgcagtctatgaagccggtgagtggacacccgttcctcaagaaggtagaagacgaaactgtattgtgtaacataccttatatgggtgacgaagtgaaggaggaagacgagaccttcatcgaagagctgatcaacaattatgacggaaaggtgcatggggaggaagagatgatccctggctcagtgctcatcagcgacgcagtcttccttgagctcgtagatgccctgaatcagtatagtgacgaggaggaagaagggcataatgacactagtgatgggaaacaggacgacagtaaggaagatcttcctgtgacgagaaaaaggaaacggcatgcaatcgaggggaacaagaagagcagcaaaaagcaatttcccaacgacatgatttttagcgctattgcttccatgttccccgaaaacggcgtcccagatgacatgaaggagcggtaccgcgagctgactgagatgtcggatcccaatgcgttacctccacagtgcacccctaatatcgacggtccgaacgcgaagagtgtgcagagagaacagtctctccattccttccacactttgttttgtcggcgttgtttcaaatacgattgctttctgcacccttttcacgctacccccaacgtatacaagcgaaagaacaaagagattaaaatcgagccagaaccctgtggcaccgactgttttctgttgctggaaggagcaaaggagtacgctatgctgcataacccgagatccaagtgctccggcagacggcgacgcagacatcacatcgtgtctgcatcatgctccaatgcttctgcttctgccgtcgcagagaccaaggaaggtgactcagacagagacacgggtaatgactgggccagttcctccagcgaggcgaatagccggtgtcagacaccaaccaagcagaaggctagccctgcccctccacagctgtgcgtggtcgaagccccttccgaacccgtggaatggactggtgccgaggagtccctgtttcgggtgtttcacggcacctatttcaataatttctgttctatagcacgactcctcggcaccaagacctgcaagcaagtttttcagtttgccgttaaagaatccttaatcctcaagctgcctaccgatgagctcatgaacccttcccagaagaaaaaaaggaagcatagactgtgggcagcacactgccggaagattcagcttaagaaggataactcaagcactcaggtgtataattaccagccttgtgatcatccagatcgtccatgcgatagtacttgcccctgtattatgacacagaatttctgcgagaagttctgccagtgtaaccccgattgccagaatagattcccaggctgtcggtgcaagactcagtgtaatacaaagcagtgtccttgctacctcgccgtgagggagtgcgaccctgatctttgcctgacctgcggggcttcggaacactgggattgtaaggtggtcagctgcaagaattgttcgattcagagaggcctgaaaaaacacttgctccttgcaccaagtgatgtggcaggctgggggaccttcataaaagaaagtgtacagaagaatgagtttatttctgagtattgtggagagctcattagtcaagatgaggctgaccggaggggaaaagtttatgataaatacatgtcctcattcctgtttaatctgaacaacgactttgttgtggacgcaactagaaagggaaacaagattcgatttgcaaatcactcggttaatccaaactgctacgccaaagttgtcatggttaatggggatcatcgtatcggcatcttcgcaaagcgggctatccaagcaggagaggaactgttcttcgactaccggtatagtcaagccgatgccctgaaatatgttggtatcgaacgggagaccgatgtgctgtag

SEQ ID NO: 274755 - DNA, 2124 bp, Artificial Sequence
  derived and/or modified sequence
atggagatccccaacccccccaccagcaagtgcatcacctactggaagagaaaggtgaagagcgagtacatgagactgagacagctgaagagactgcaggccaacatgggcgccaaggccctgtacgtggccaacttcgccaaggtgcaggagaagacccagatcctgaacgaggagtggaagaagctgagagtgcagcccgtgcagagcatgaagcccgtgagcggccaccccttcctgaagaaggtggaggacgagaccgtgctgtgcaacatcccctacatgggcgacgaggtgaaggaggaggacgagaccttcatcgaggagctgatcaacaactacgacggcaaggtgcacggcgaggaggagatgatccccggcagcgtgctgatcagcgacgccgtgttcctggagctggtggacgccctgaaccagtacagcgacgaggaggaggagggccacaacgacaccagcgacggcaagcaggacgacagcaaggaggacctgcccgtgaccagaaagagaaagagacacgccatcgagggcaacaagaagagcagcaagaagcagttccccaacgacatgatcttcagcgccatcgccagcatgttccccgagaacggcgtgcccgacgacatgaaggagagatacagagagctgaccgagatgagcgaccccaacgccctgcccccccagtgcacccccaacatcgacggccccaacgccaagagcgtgcagagagagcagagcctgcacagcttccacaccctgttctgcagaagatgcttcaagtacgactgcttcctgcaccccttccacgccacccccaacgtgtacaagagaaagaacaaggagatcaagatcgagcccgagccctgcggcaccgactgcttcctgctgctggagggcgccaaggagtacgccatgctgcacaaccccagaagcaagtgcagcggcagaagaagaagaagacaccacatcgtgagcgccagctgcagcaacgccagcgccagcgccgtggccgagaccaaggagggcgacagcgacagagacaccggcaacgactgggccagcagcagcagcgaggccaacagcagatgccagacccccaccaagcagaaggccagccccgcccccccccagctgtgcgtggtggaggcccccagcgagcccgtggagtggaccggcgccgaggagagcctgttcagagtgttccacggcacctacttcaacaacttctgcagcatcgccagactgctgggcaccaagacctgcaagcaggtgttccagttcgccgtgaaggagagcctgatcctgaagctgcccaccgacgagctgatgaaccccagccagaagaagaagagaaagcacagactgtgggccgcccactgcagaaagatccagctgaagaaggacaacagcagcacccaggtgtacaactaccagccctgcgaccaccccgacagaccctgcgacagcacctgcccctgcatcatgacccagaacttctgcgagaagttctgccagtgcaaccccgactgccagaacagattccccggctgcagatgcaagacccagtgcaacaccaagcagtgcccctgctacctggccgtgagagagtgcgaccccgacctgtgcctgacctgcggcgccagcgagcactgggactgcaaggtggtgagctgcaagaactgcagcatccagagaggcctgaagaagcacctgctgctggcccccagcgacgtggccggctggggcaccttcatcaaggagagcgtgcagaagaacgagttcatcagcgagtactgcggcgagctgatcagccaggacgaggccgacagaagaggcaaggtgtacgacaagtacatgagcagcttcctgttcaacctgaacaacgacttcgtggtggacgccaccagaaagggcaacaagatcagattcgccaaccacagcgtgaaccccaactgctacgccaaggtggtgatggtgaacggcgaccacagaatcggcatcttcgccaagagagccatccaggccggcgaggagctgttcttcgactacagatacagccaggccgacgccctgaagtacgtgggcatcgagagagagaccgacgtgctgtag

SEQ ID NO: 274756 - DNA, 456 bp, Artificial Sequence
  derived and/or modified sequence
agattctacatcggctgcgacctgtgcaccaactgctactacggcgagtgcgtgggcatcgccgagaaggaggccaagaagatggacgtgtacatctgcaacgactgcaagtgggcccaggagggcagcagcgaggagctgtactgcatctgcagaacccccgccggcagctgcagattcttcatcggccacgacagatgccagaactggtaccacggctgctgcatcggcatcctgcagagcgaggccgagctgatcgacgagtacgtgtgcccccagtgccagagcaccgaggacgccatggccgtgctgacccccctgaccgagaaggacgacgaggagctgaagagagtgctgtgcagcctgcagacccacaagatggcccagcccttcctggagcccgtggaccccaacgacgcccccgactactacggcgtgatcaaggagcccatgtag

SEQ ID NO: 274757 - DNA, 459 bp, Artificial Sequence
  derived and/or modified sequence
agcagattctacatcggctgcgacctgtgcaccaactgctactacggcgagtgcgtgggcatcgccgagaaggaggccaagaagatggacgtgtacatctgcaacgactgcaagtgggcccaggagggcagcagcgaggagctgtactgcatctgcagaacccccgccggcagctgcagattcttcatcggccacgacagatgccagaactggtaccacggctgctgcatcggcatcctgcagagcgaggccgagctgatcgacgagtacgtgtgcccccagtgccagagcaccgaggacgtgatgaccgtgctgacccccctgaccgagaaggacgacgaggagctgaagagagtgctgagaagcctgcaggcccacaagatggccagacccttcctggagcccgtggaccccaacgacgcccccgactactacggcgtgatcaaggagcccgtgtag

SEQ ID NO: 274758 - DNA, 456 bp, Artificial Sequence
  derived and/or modified sequence
agattctacatcggttgtgatctttgcaccaattgttattatggggagtgcgtcggcatcgctgagaaggaagccaaaaagatggacgtctacatctgcaacgattgcaagtgggcccaggaggggtcatcggaggagctttattgcatttgtcgaacccccgcgggcagctgcagattttttataggccatgatcgctgccagaactggtaccacgggtgctgcatcgggatccttcaatctgaggccgaactcatcgacgaatacgtgtgccctcaatgccagagcaccgaggatgccatggccgtgcttacacccctgacagagaaagacgatgaagagttgaagcgcgtcttgtgttccctgcagactcacaaaatggcccaaccctttctggagcccgttgacccgaacgacgcccctgactactacggagtcatcaaggagcccatgtag

SEQ ID NO: 274759 - DNA, 459 bp, Artificial Sequence
  derived and/or modified sequence
tctcgcttttacatcgggtgtgacctgtgcacaaactgttattatggggagtgcgtcgggatcgctgagaaggaggccaagaagatggatgtatatatctgcaatgattgtaaatgggcacaggaaggttcctcagaagagctctactgtatatgcagaacgccggcaggtagctgtaggttctttatcgggcacgatcgatgccagaattggtaccacggatgttgcatcggcattctgcaatcagaagcggaattaatcgatgagtatgtgtgcccccagtgtcagagcaccgaggatgttatgactgtccttacaccattaactgaaaaagacgacgaggagttgaaaagggttctaagatctctgcaagcgcacaagatggcccgcccgtttctcgaaccggtggatcctaacgacgcccccgattactatggcgtaataaaggagcccgtctag

SEQ ID NO: 274760 - DNA, 456 bp, Artificial Sequence
  derived and/or modified sequence
cgcttctacatcggctgtgacctgtgcaccaactgctactacggggagtgtgtgggcattgctgagaaggaggccaagaagatggatgtgtacatctgcaatgactgcaagtgggcccaggagggcagcagcgaggagctgtactgcatctgcaggaccccagctggcagctgccgcttcttcatcggccatgaccgctgccagaactggtaccacggctgctgcatcggcatcctgcagagcgaggccgagctgattgatgaatatgtgtgcccccagtgccagagcacagaagatgccatggctgtgctgacccccctgacagagaaggatgatgaggagctgaagagggtgctgtgcagcctgcagacccacaagatggcccagcccttcctggagcctgtggaccccaatgatgccccagactactacggcgtcatcaaggagcccatgtag

SEQ ID NO: 274761 - DNA, 459 bp, Artificial Sequence
  derived and/or modified sequence
agccgcttctacatcggctgtgacctgtgcaccaactgctactatggagaatgtgtgggcattgctgagaaggaggccaagaagatggatgtgtacatctgcaatgactgcaagtgggcccaggagggcagcagcgaggagctgtactgcatctgcaggaccccagctggcagctgccgcttcttcatcggccatgaccgctgccagaactggtaccacggctgctgcatcggcatcctgcagagcgaggccgagctgattgatgaatatgtgtgcccccagtgccagagcacagaagatgtgatgacagtgctgacccccctgacagagaaggatgatgaggagctgaagagggtgctgcggagcctgcaggcccacaagatggcccggcccttcctggagcctgtggaccccaatgatgccccagactactatggagtcatcaaggagcctgtgtag

SEQ ID NO: 274762 - DNA, 456 bp, Artificial Sequence
  derived and/or modified sequence
cggttctacatcggctgcgacctgtgcaccaactgctactacggcgaatgcgttgggatcgccgagaaagaggccaaaaagatggacgtctacatctgtaatgattgcaaatgggctcaggaaggtagttctgaagaactgtactgtatctgtcgcacaccagctggctcctgtcgattctttataggccatgacaggtgtcagaattggtatcacggctgctgcattggtatcctacaaagcgaggctgagttgatagacgaatacgtttgtccacagtgtcaatcaacagaggatgcgatggcagtcctgacgcccctgaccgagaaagacgatgaggaactcaaaagagttctgtgtagtctccagactcataaaatggctcaacctttcctggaacctgtggatcctaacgacgccccagattactacggcgtgatcaaggagcccatgtag

SEQ ID NO: 274763 - DNA, 459 bp, Artificial Sequence
  derived and/or modified sequence
agccggttctacatcggctgcgacctgtgcaccaactgctactacggcgaatgtgtgggaatagccgaaaaggaagccaagaaaatggatgtttacatctgtaatgactgcaagtgggctcaagaagggtctagtgaagaactgtactgcatctgtcgcaccccagcaggcagttgcaggtttttcataggacacgatagatgccaaaattggtaccatggctgctgcatcggaattctgcagtccgaggccgaactgatcgacgaatatgtgtgccctcaatgtcaatctacagaggacgttatgacagttctgacccccctgacagagaaagatgacgaagagcttaaaagggtcctccgctcccttcaggcacataagatggccaggccgttcctggagccagtagatcctaacgatgcgccggactattatggtgtcataaaggaaccagtctag

SEQ ID NO: 274764 - DNA, 456 bp, Artificial Sequence
  derived and/or modified sequence
cggttctacatagggtgcgacctatgtacgaactgttactacggagagtgtgttggaattgccgaaaaggaggccaagaagatggatgtgtacatttgtaacgactgtaaatgggcgcaggaaggctcatcagaagaactatattgcatttgccgaactcccgctggctcttgcagattctttatcggccacgatcgatgtcaaaattggtatcatggttgttgtatcggaattctgcaaagtgaagcggagctcatcgacgaatatgtgtgcccacagtgtcagtcgacagaagacgcgatggctgtgttgacgcccttgacagagaaggacgatgaagagcttaagagagtactttgttccctacagacccataagatggcacagccttttcttgagcccgttgatcccaatgacgctccagattactatggcgtcatcaaggaacctatgtag

SEQ ID NO: 274765 - DNA, 459 bp, Artificial Sequence
  derived and/or modified sequence
tcacgtttttacataggatgcgacctatgcacaaactgctattacggcgagtgcgtggggatcgctgagaaggaggcaaaaaagatggatgtgtacatttgtaacgactgcaaatgggcacaggagggttccagcgaggagctgtattgcatctgtaggactccggcagggagctgtcggtttttcatcggccacgaccggtgccaaaattggtaccatggttgttgcatcggcattttgcagtctgaagctgagcttatagatgagtacgtatgccctcagtgccagtccaccgaggatgtcatgaccgtgcttactccactgaccgaaaaggatgacgaggaactgaaacgcgtgctgaggtcactgcaggctcataaaatggcgagacccttccttgagcccgtggacccaaatgatgccccagactattacggtgttatcaaagaacctgtgtag

SEQ ID NO: 274766 - DNA, 453 bp, Artificial Sequence
  derived and/or modified sequence
aggttctatattggctgtgatctttgtactaactgctattatggagaatgtgttggcatcgcagaaaaggaggctaagaaaatggatgtgtacatctgtaatgattgtaaatgggcacaagagggcagcagtgaggaattgtactgtatctgcagaacacctgcaggatcttgcagattttttattggccatgatcggtgtcagaattggtaccatgggtgctgcattggcatcttgcagagtgaggcagagctcattgatgagtatgtctgtccacagtgccagtcaacagaggatgccatggcagtgctcacaccactaacagagaaggatgatgaggagttgaagagggtgctctgttccttacagacccataagatggcccagcctttccttgaaccagtagaccctaatgatgcaccagattattatggtgttattaaggaacctatg

SEQ ID NO: 274767 - DNA, 456 bp, Artificial Sequence
  derived and/or modified sequence
tctaggttctatattggctgtgatctttgtactaactgctattatggagaatgtgttggcatcgcagaaaaggaggctaagaaaatggatgtgtacatctgtaatgattgtaaatgggcacaagagggcagcagtgaggaattgtactgtatctgcagaacacctgcaggatcttgcagattttttattggccatgatcggtgtcagaattggtaccatgggtgctgcattggcatcttgcagagtgaggcagagctcattgatgagtatgtctgtccacagtgccagtcaacagaggatgtcatgacagtgctcacaccactaacagagaaggatgatgaggagttgaagagggtgctccgttccttacaggcccataagatggcccggcctttccttgaaccagtagaccctaatgatgcaccagattattatggtgttattaaggaacctgtg

SEQ ID NO: 274768 - DNA, 9141 bp, Artificial Sequence
  derived and/or modified sequence
atgcgcggcagaagaggtaggccacccaagcagcccgccgcaccagcagcggagcgatgtgcacctgccccgcctcccccccccccaccccctacttccgggccgattgggggcttacgttctcgacatagaggaagctctcgtggaaggtgggctgctgctcaggctgaagtcgcacctaaaacacgcctgtcctcccctcgcggggggtcaagcagccggaggaaaccccctccccctcctcctgcaccccccagtacttctgccccaggacgcggcggtcggggcgggggaggaggacgcactggtggcggtgggggcgggggccatttggcccgcacaaccgctgctcggcgggctgtgaacaaagtcgtatacgacgaccatgagtccgaggaggaagaggaggaggaagacatggttagcgaggaagaggaggaggaagacggcgacgccgaggaaacccaggattctgaagatgacgaggaggacgagatggaagaggacgatgacgattctgactaccccgaagagatggaagatgatgacgacgacgccagttactgcaccgaatcatcatttcgttcacatagcacctattcttcaacccccggccgaagaaaaccaagggtgcacaggcctagatcccccattctggaagagaaagatattcctccattggaattccccaagtcctctgaggacttgatggtacccaatgagcacatcatgaatgtaatcgctatctacgaggtcctgagaaactttggtacagtgctcagactgagccccttccgcttcgaggacttctgtgctgccctcgtgtcccaggaacagtgcacattaatggctgaaatgcatgtagtgctcctgaaagcagtcctccgcgaagaagatacctcaaatacgacattcggccccgcagatctcaaggattctgttaatagcactctctattttatcgacggtatgacctggcccgaagtgttacgcgtgtattgcgagagcgataaggaatatcaccatgtgctcccctaccaggaggctgaggactatccctatggccctgtggagaataagatcaaggtgttgcagttcttggtcgaccagttcttgaccaccaacattgccagagaggaactgatgtccgaaggagtgattcagtacgatgaccactgtcgagtatgtcataaactgggtgaccttctgtgctgcgaaacatgctccgccgtttaccacctggaatgcgtcaagccccccttggaagaggttccggaagacgaatggcagtgcgaagtctgcgtcgcccacaaagtgcccggtgtaactgactgcgtcgctgagattcaaaagaacaagccctacatccgacacgagcccataggatacgaccgatccagacgcaagtattggtttctaaatagaagacttattatcgaagaagataccgagaacgagaatgagaaaaagatctggtactattccactaaggtgcagctagctgaactcattgattgcctcgacaaagactattgggaggccgagctctgtaaaatactggaagaaatgcgcgaggagatacaccgccacatggacataactgaagacttgaccaataaggccagaggttcaaacaagagctttctggccgccgcaaacgaagaaatcctggagagtatacgtgcgaagaaaggcgacatcgataacgtcaagagccccgaggaaacagaaaaagataaaaacgagacagagaatgactctaaagatgcagagaagaatagagaggagttcgaagaccagtccctggagaaagactccgacgataagactcctgatgatgatccagaacaaggtaagtctgaagaacccaccgaggtaggagacaaagggaacagtgtctccgcaaacctgggggacaacacaacaaatgctacatccgaggagaccagtcctagcgagggcagatcacccgtcgggtgtctgtcagaaaccccggattcttcaaacatggccgaaaagaaggtggcatcagaactgcctcaggatgtgcccgaagagccaaacaagacgtgcgaatccagtaatacgtcggctaccacgaccagtatccagccaaaccttgagaacagtaatagtagttcggaattgaatagctcacaatccgaaagcgccaaagcagctgatgatcctgaaaacggcgagcgcgagtctcacacgccagtgtctattcaggaggaaatagtaggagattttaagtcggagaaatcaaatggcgaactgagcgaatcaccaggggcaggcaagggagctagcggcagcacccgtattatcacacgactgcggaaccctgacagcaagctgtctcagttgaagagccaacaagtggccgctgcggctcacgaagctaacaaactgttcaaggagggtaaggaggtcctagtggtgaactcacagggagagattagccggctctcaaccaagaaggaagttattatgaagggcaacatcaacaactacttcaaactcggacaggaagggaagtatcgggtctatcataatcaatacagcacgaattcctttgctctgaacaagcaccagcatagagaagatcatgataaacgacgccatctggcgcataagttctgtctgactcccgcaggggagttcaaatggaacgggtcggtacatggtagtaaggtgctgacaatttctacactccgccttactattactcagctggagaataacatccccagttcctttcttcatcccaattgggctagccaccgggctaactggattaaggccgtccagatgtgcagtaagccccgtgaatttgcactagcactggccatcctggaatgcgccgtgaaaccagttgtgatgctgccgatctggagagagagcctcgggcacaccagactgcataggatgacttcaatcgaaagagaagaaaaagagaaggttaaaaagaaagagaaaaaacaggaggaggaagaaaccatgcagcaggctacctgggtgaagtatacattccctgttaaacaccaggtctggaaacaaaaaggcgaagagtatcgcgtaaccggctacggcggatggtcctggatttccaaaacacacgtgtataggtttgtcccaaaactgcccgggaacacaaacgtcaactatcggaaatctcttgaaggtaccaagaacaatatggatgagaacatggatgagtctgataagaggaagtgctcgcgtagcccgaagaagattaaaatcgaaccagactcggagaaggatgaggttaagggctctgacgcagcaaaaggggcagaccagaacgaaatggatatctccaagatcactgagaaaaaggaccaggacgttaaggagctcttggattcagacagcgacaagccatgcaaggaggaaccaatggaggttgatgacgacatgaagacagaaagtcacgtaaattgccaggagtcttcacaggtagatgtggtgaatgtctctgaggggtttcacctgcggacatcttataagaaaaagaccaagagctctaaattagatggcctgttggagcgccggattaaacaattcacattagaggagaaacagagactggagaaaattaagcttgagggagggataaaggggatcggcaaaacttctacgaattcctcaaagaatctatctgagtccccagtcattaccaaggctaaagaaggctgccagtcggacagcatgcggcaggaacagagtcccaacgccaacaacgatcaacctgaggacctgattcagggctgttcagaaagtgacagttccgtcctgaggatgtctgacccaagccataccacaaacaaactctatcccaaggatcgcgtgttggacgacgtcagcataaggtctccagaaacaaagtgtccgaagcagaattcaattgagaatgatatagaagaaaaagtatcagacctcgcctcacgggggcaggagccctcgaagagcaagacaaaaggaaatgatttttttattgatgatagcaagttggcctctgccgatgacatcgggacccttatatgcaaaaataagaagcccctgatccaggaggaatccgacactattgtcagctcttctaagagcgctctgcactcctctgtgcccaaatccacaaacgaccgtgacgcaactcccctgagtcgtgcaatggattttgagggcaagctgggctgcgatagcgagtccaattctactctcgagaactcttcagatactgtgtctatccaagactcgtctgaagaagacatgatagttcagaattccaacgaatcaatcagtgagcagttcaggaccagggagcaggacgtcgaggtgttagaaccgttgaaatgcgagctggtgtctggtgaaagtacaggtaattgcgaggaccgtcttcctgtgaagggcacggaagctaacggcaaaaagcctagtcaacagaagaagctggaagagcggcctgtgaacaagtgcagtgaccaaattaagctgaagaacacgaccgataagaaaaataatgaaaacagggaatccgaaaagaagggacagcgcacctctaccttccaaattaatggaaaggataacaagccgaagatatacctcaagggcgaatgcctcaaagagatctccgagagtcgggttgtctcagggaatgtagaacctaaggtgaacaacatcaacaagattattcccgagaacgacatcaaatccctaacagttaaagagagcgctattcgacccttcatcaatggcgacgtgatcatggaagatttcaatgagcggaactcctccgagaccaagagccacctgctctcgtcatccgacgccgagggaaattaccgtgacagtctcgagacactcccgagtaccaaggagagcgactccacccagacaacaacaccctccgccagttgtccagaatcaaatagtgtaaaccaggtggaggacatggagatagagaccagtgaggtaaaaaaggttacctcttcccccatcacctcagaggaggaaagcaatctgagcaacgactttatagacgaaaatggcttgccaataaacaaaaacgagaacgttaatggcgagtctaaacgtaagactgtaataacagaagtgactactatgacctcaaccgtcgccactgaaagcaaaacagttataaaagtggaaaagggagacaaacagaccgtagtgagctcaaccgagaactgcgcaaagtccaccgtgaccaccaccacaaccacagtgaccaagttgtctacaccaagcaccggtggatccgtggatataatctctgttaaagagcagagtaaaaccgtggttacaaccacagtgactgattccctgaccaccactggagggacgctcgtgactagtatgacggtgtccaaagaatactctacccgggacaaagttaaattaatgaaattctctagacccaaaaagacccgatcagggactgccctccccagttatcgcaagttcgttactaagagctctaagaaatctattttcgtcctacccaacgatgacctgaagaagctcgcccgcaaaggcggcatcagggaggtcccatactttaattataatgccaagccggcgctagacatctggccatacccgtccccgagacctacattcggaataacttggcgttatcgcttacagaccgttaaatccctggctggggttagtcttatgcttcgcttgctttgggcctccctccggtgggacgatatggcagccaaagccccaccagggggtggcaccaccaggacagagacttccgagaccgagattacaactaccgagatcattaaacgcagggacgtgggcccatacggcatacggtcagagtactgcattaggaaaataatctgtccaataggcgttcctgaaacccccaaggaaacgccaaccccacaaaggaagggccttcgttcctccgccttgcggcctaaacgaccagaaacaccaaagcagactggccctgtgataatcgagacttgggtcgctgaggaagagctcgagctgtgggaaatacgtgcctttgcagaacgggttgaaaaggaaaaagcccaagccgtggaacaacaggccaagaaacgcctggagcagcagaagccgaccgtaatcgccacatccaccactagtcccaccagcagcaccacgagcactatttcccccgcccagaaggtgatggtggcgcccatcagcgggtcagtcacaacgggcaccaagatggttctgactaccaaagtgggcagtcccgcaactgtgacctttcagcagaacaaaaatttccaccagacgtttgctacttgggtgaaacaggggcagtcgaattccggcgtggttcaagtgcagcagaaagtgttgggtataatcccctctagtactggtacgagccagcagacattcacctctttccagcctcgcacagccaccgttaccatacgtcccaatacctcgggcagcggaggaactacaagcaacagtcaggtcatcactggccctcagataagacccggaatgactgtgatcaggaccccgctccaacagtccactctgggcaaggctataatccggacccccgttatggtgcagccgggcgctccacagcaggttatgacgcagatcatacgcggtcagcctgtgtccactgcggtttcagctccaaacaccgtcagctccaccccaggccaaaagtcattaacctccgctacgtcgacttctaatattcagtcctcagcatcccagccacctcgcccacagcagggccaggtgaagttgaccatggcccagctcactcagttgacacaggggcatggaggcaatcagggactcacggttgtcatccaggggcaggggcagactacagggcaattgcaattgatcccccagggcgtaaccgtgctgcctggacccgggcagcagctcatgcaagctgctatgcctaacggcaccgtgcagagattcttgtttacacccctggctacaacagcaaccacggctagcacaacaaccacgactgtatccacaacggctgccggaaccggcgagcaacgccagtccaagttgagcccacagatgcaggtacatcaagacaagacactcccaccagcccagagttccagtgtggggccggccgaggcacagccccagactgcccagcccagtgcccagcctcagccgcagacccaaccgcagagccctgcacagcccgaggtacaaactcaacctgaggtgcagactcagaccaccgtgtccagccacgtcccctcagaggcgcagccaacacacgcccagagctctaaaccacaagtggcggcacagtcacagccacagtccaacgttcagggccagtccccagtcagggtgcagagcccttctcagactagaatcaggccaagtaccccaagccagctgagtcccggacagcagtctcaggtgcaaaccaccacaagtcagccaatccccatccaacctcacacaagccttcaaattcccagccagggtcaacctcagagccagccccaggtccagtctagtactcagaccctgagcagcggccagaccctcaaccaggtgacagtgagcagcccctcaagaccacaactgcagatccaacaaccacaaccacaggtgattgcagtcccgcagctacaacagcaggtgcaagttctctcacaaatccagagccaagtagtggcccaaatccaggcccaacagtccggggtcccacagcagattaaattgcaactgcctatccagatccagcaaagttctgcagtccagacgcatcaaatccagaacgtagtcactgttcaggccgcttcagtgcaggagcagcttcagcgggttcagcagttgcgcgatcaacagcagaagaagaagcaacagcagattgaaataaagcgcgagcacaccctgcaggctagcaatcaaagcgagatcattcaaaagcaagtcgtgatgaagcacaacgctgttattgagcatctgaaacagaagaaatctatgacgcccgctgaaagagaggaaaaccagcggatgatcgtttgtaatcaagtcatgaagtatatattagataagattgacaaagaggaaaaacaggcagctaaaaaacgcaaaagggaagaaagtgtggaacaaaaacggtctaaacaaaacgccaccaagcttagcgcactgctgttcaagcacaaagagcaactcagagctgagattctgaagaagcgcgcgttgctggataaggaccttcaaattgaggttcaggaggaactaaagagagatttaaagattaagaaagagaaggacctgatgcaactggcacaagctactgccgtggccgccccctgtcctccagtaacacctgcgccacccgcccctcctgcacctcctccctccccccctccgcccccggctgtgcagcatactggactgctgagtacaccaactctgcctgccgccagtcaaaaacggaagagggaggaagaaaaggatagcagcagcaaatcaaagaagaagaagatgatctctaccaccagcaaagagacaaaaaaagataccaagctttattgtatctgtaaaactccatacgacgagagtaagttttatattggatgcgatcggtgccagaactggtaccatggccggtgcgtggggattctgcagagcgaggcggaactaattgacgagtatgtctgcccccagtgccagagcaccgaggacgcaatgaccgtcctcacgcccttgaccgaaaaagactacgagggtctaaaacgggtgcttaggtcactacaggcgcataaaatggcctggccttttttggaaccagtcgacccaaatgatgcacctgactattatggcgtcattaaagagcccatggacctggccactatggaggagagggttcagcgccgatattacgagaagttaacggagttcgttgcggacatgaccaagattttcgacaattgtagatactacaatccaagtgattcccctttctaccaatgtgcagaggtgttagaatcattctttgtgcagaagctgaaaggatttaaggcctcccgatctcataataataagctgcaatcaaccgcgagctag

SEQ ID NO: 274769 - DNA, 9141 bp, Artificial Sequence
  derived and/or modified sequence
atgaggggccggcggggccggccccccaagcagcctgctgccccagctgctgagcgctgtgccccagcccctcctcctcctcctcctccacccaccagcggccccatcggcggcctgcggagccgccaccggggcagcagccggggccgctgggccgccgcccaggccgaggtggcccccaagacccggctgagcagcccccggggcggcagcagcagcaggaggaagcccccacctcctcctccagccccacccagcaccagcgcccctggccggggcggccggggcggcggcggcggccgcactggaggcggcggcggcggcggccacctggcccggaccacagctgcccggcgggctgtgaacaaggtggtgtatgatgaccatgaaagtgaggaggaggaggaggaggaggacatggtgtctgaggaggaggaggaggaggatggagatgctgaggagacccaggacagtgaagatgatgaagaagatgagatggaggaggatgatgatgacagcgactacccagaggagatggaggatgatgatgatgatgccagctactgcacagagagcagcttccgcagccacagcacctacagcagcaccccaggccgcaggaagccccgggtgcaccggcccaggagccccatcctggaggagaaggacatcccccccctggagttccccaagagcagcgaggacctgatggtgcccaatgagcacatcatgaatgtgattgccatctatgaggtgctgaggaactttggcaccgtgctgcggctgagccccttccgctttgaggacttctgtgccgccctggtgtcccaggagcagtgcaccctgatggccgagatgcacgtggtgctgctgaaggctgtgctgcgggaggaggacaccagcaacaccacctttggacctgctgacctgaaggacagcgtgaacagcaccctgtacttcattgatggcatgacctggccagaggtgctgcgggtgtactgtgagagtgacaaggagtaccaccacgtgctgccctaccaggaggccgaggactacccctacggccctgtggagaacaagatcaaggtgctgcagttcctggtggaccagttcctgaccaccaacatcgcccgggaggagctgatgtctgaaggagtcatccagtatgatgaccactgccgggtgtgccacaagctgggggacctgctgtgctgtgagacctgcagcgctgtgtaccacctggagtgtgtgaagccacccctggaggaggtgcctgaagatgagtggcagtgtgaggtgtgtgtggcccacaaggtgcctggggtgacagactgtgtggccgagatccagaagaacaagccctacatcagacatgagcccatcggctatgacaggagcaggaggaagtactggttcctgaacagaagactcatcatcgaggaggacacagaaaatgaaaatgagaagaagatctggtactacagcaccaaggtgcagctggccgagctgattgactgcctggacaaggactactgggaggccgagctgtgcaagatcctggaggagatgagggaggagatccaccgccacatggacatcacagaggacctgaccaacaaggcccggggcagcaacaagagcttcctggccgccgccaatgaggagatcctggagagcatccgggccaagaagggggacatcgacaacgtgaagagccctgaggagacagagaaggacaagaatgaaacagaaaatgacagcaaggatgctgagaagaaccgggaggagtttgaggaccagagcctggagaaggacagtgatgacaagaccccagatgatgatcctgagcagggcaagtctgaggagcccacagaggtgggggacaagggcaacagcgtgtctgccaacctgggggacaacaccaccaatgccaccagcgaggagaccagccccagcgagggccgcagccctgtgggctgcctgtctgagaccccagacagcagcaacatggccgagaagaaggtggccagcgagctgccccaggatgtgcctgaggagcccaacaagacctgtgagagcagcaacaccagcgccaccaccaccagcatccagcccaacctggagaacagcaacagcagcagcgagctgaacagcagccagagcgagagcgccaaggctgctgatgatcctgaaaatggagagcgggagagccacacccctgtgtccatccaggaggagatcgtgggggacttcaagtctgagaagagcaatggagagctgtctgagagccctggggccggcaagggggccagcggcagcacccgcatcatcacccggctgagaaatccagacagcaagctgagccagctgaagagccagcaggtggccgccgccgcccacgaggccaacaagctgttcaaggagggcaaggaggtgctggtggtgaacagccagggcgagatcagccggctgagcaccaagaaggaggtgatcatgaagggcaacatcaacaactacttcaagctgggccaggagggcaagtacagagtgtaccacaaccagtacagcaccaacagctttgccctgaacaagcaccagcacagagaagatcatgacaagaggaggcacctggcccacaagttctgcctgaccccagctggggagttcaagtggaatggatctgtgcacggcagcaaggtgctgaccatcagcaccctgcggctgaccatcacccagctggagaacaacatccccagcagcttcctgcaccccaactgggccagccaccgggccaactggatcaaggctgtgcagatgtgcagcaagccccgggagtttgccctggccctggccatcctggagtgtgctgtgaagcctgtggtgatgctgcccatctggagggagagcctgggccacacccggctgcacaggatgaccagcattgagcgggaggagaaggagaaggtgaagaagaaggagaagaagcaggaggaggaggagaccatgcagcaggccacctgggtgaagtacaccttccctgtgaagcaccaggtgtggaagcagaagggggaggagtacagagtgacaggctatggaggctggagctggatcagcaagacccacgtgtacagatttgtgcccaagctgcccggcaacaccaacgtgaactacaggaagagcctggagggcaccaagaacaacatggatgagaacatggatgaaagtgacaagaggaagtgcagccgcagccccaagaagatcaagattgaaccagattctgagaaggatgaggtgaagggcagtgatgctgccaagggagctgaccagaatgagatggacatcagcaagatcacagagaagaaggaccaggatgtgaaggagctgctggacagcgacagcgacaagccctgcaaggaggagcccatggaggtggatgatgacatgaagacagagagccacgtgaactgccaggagagcagccaggtggatgtggtgaatgtgtctgagggcttccacctgcggaccagctacaagaagaagaccaagagcagcaagctggatggcctgctggagcggcgcatcaagcagttcaccctggaggagaagcagaggctggagaagatcaagctggagggcggcatcaagggcatcggcaagaccagcaccaacagcagcaagaacctgtctgagagccctgtgatcaccaaggccaaggagggctgccagagcgacagcatgaggcaggagcagagccccaatgccaacaatgaccagcctgaggacctgatccagggctgcagcgagagtgacagctctgtgctgaggatgtctgaccccagccacaccaccaacaagctgtaccccaaggacagagtgctggatgatgtgtccatccgcagccctgagaccaagtgccccaagcagaacagcattgaaaatgacatcgaggagaaggtgtctgacctggccagccggggccaggagcccagcaagagcaagaccaagggaaatgacttcttcattgatgacagcaagctggccagcgcagatgacatcggcaccctcatctgcaagaacaagaagcccctcatccaggaggagagtgacaccatcgtgagcagcagcaagagcgccctgcacagctctgtgcccaagagcaccaatgacagagatgccacccccctgagccgggccatggactttgagggcaagctgggctgtgacagcgagagcaacagcaccctggagaacagcagtgacacagtgtccatccaggacagcagcgaggaggacatgattgtgcagaacagcaatgaaagcatcagcgagcagttccgcacccgggagcaggatgtggaggtgctggagcccctgaagtgtgagctggtgtctggagagagcacaggcaactgtgaggaccggctgcctgtgaagggcacagaggccaacgggaagaagcccagccagcagaagaagctggaggagaggcctgtgaacaagtgcagcgaccagatcaagctgaagaacaccacagacaagaagaacaatgaaaatcgggagagcgagaagaagggccagaggaccagcaccttccagatcaacgggaaggacaacaagcccaagatctacctgaagggagaatgtctgaaggagatcagcgagagccgggtggtgtctggaaatgtggagcccaaggtgaacaacatcaacaagatcatcccagaaaatgacatcaagagcctgactgtgaaggagagcgccatccggcccttcatcaatggagatgtgatcatggaggacttcaatgaaagaaacagcagcgagaccaagagccacctgctgagcagcagtgatgctgagggcaactacagagacagcctggagaccctgcccagcaccaaggagagtgacagcacccagaccaccaccccatctgccagctgcccagagagcaacagcgtgaaccaggtggaggacatggagattgagaccagcgaggtgaagaaggtgaccagcagccccatcaccagcgaggaggagagcaacctgagcaatgacttcattgatgaaaatggcctgcccatcaacaagaatgaaaatgtgaatggagagagcaagaggaagacagtcatcacagaggtgaccaccatgaccagcacagtggccacagagagcaagacagtcatcaaggtggagaagggggacaagcagacagtggtgagcagcacagagaactgtgccaagagcacagtgaccaccaccaccaccaccgtgaccaagctgagcacccccagcactggaggctctgtggacatcatctctgtgaaggagcagagcaagacagtggtgaccaccaccgtgacagacagcctgaccaccaccggcggcaccctggtgacctccatgacagtgtccaaggagtacagcacccgggacaaggtgaagctgatgaagttcagccggcccaagaagaccaggtctggaacagccctgcccagctacaggaagtttgtgaccaagagcagcaagaagagcatctttgtgctgcccaatgatgacctgaagaagctggccaggaagggcggcatccgggaggtgccctacttcaactacaatgccaagccagccctggacatctggccctaccccagcccccggcccaccttcggcatcacctggagataccgcctgcagacagtgaagagcctggccggcgtgtccctgatgctgcggctgctgtgggccagcctgcgctgggatgacatggccgccaaggcccctcctgggggcggcaccaccaggacagagaccagcgagacagagatcaccaccacagagatcatcaagagaagagatgtgggcccctacggcatccgctctgagtactgcatcaggaagatcatctgccccatcggcgtgcctgagacccccaaggagacccccaccccccagaggaagggcctgcggagcagcgccctgcggcccaagaggcctgagacccccaagcagacaggccctgtgatcatcgagacctgggtggccgaggaggagctggagctgtgggagatccgggcctttgctgagcgggtggagaaggagaaggcccaggccgtggagcagcaggccaagaagaggctggagcagcagaagcccaccgtcatcgccaccagcaccaccagccccaccagcagcaccaccagcaccatcagccctgcccagaaggtgatggtggcccccatcagcggctctgtgaccaccggcaccaagatggtgctgaccaccaaggtgggcagccctgccaccgtgaccttccagcagaacaagaacttccaccagacctttgccacctgggtgaagcagggccagagcaacagcggcgtggtgcaggtgcagcagaaggtgctgggcatcatccccagcagcacaggcaccagccagcagaccttcaccagcttccagcccaggacagccaccgtgaccatccggcccaacaccagcggcagcggcggcaccaccagcaacagccaggtgatcaccggcccccagatccggcccggcatgaccgtcatccgcacccccctgcagcagagcaccctgggcaaggccatcatccgcacccctgtgatggtgcagcccggggccccccagcaggtgatgacccagatcatccggggccagcctgtgtccacagctgtgtctgcccccaacacagtgagcagcaccccaggccagaagagcctgaccagcgccaccagcaccagcaacatccagagcagcgccagccagcccccccggccccagcagggccaggtgaagctgaccatggcccagctgacccagctgacccagggccatggaggcaaccagggcctgactgtggtgatccagggccagggccagaccaccggccagctgcagctgatcccccagggcgtgacagtgctgcccggccctggccagcagctgatgcaggccgccatgcccaatggaacagtgcagcgcttcctgttcacccccctggccaccacagccaccacagccagcaccaccaccaccaccgtgtccaccacagctgctggcactggagagcagaggcagagcaagctgagcccccagatgcaggtgcaccaggacaagaccctgcccccagcccagagcagctctgtgggccctgctgaggcccagccccagacagcccagcccagcgcccagccccagccccagacccagccccagagccctgcccagcctgaggtgcagacccagcctgaggtgcagacccagaccaccgtgagcagccacgtgcccagcgaggcccagcccacccacgcccagagcagcaagccccaggtggccgcccagagccagccccagagcaatgtgcagggccagagccctgtgcgggtgcagagccccagccagacccgcatccggcccagcacccccagccagctgagccctggccagcagagccaggtgcagaccaccaccagccagcccatccccatccagccccacaccagcctgcagatccccagccagggccagccccagagccagccccaggtgcagagcagcacccagaccctgagcagcggccagaccctgaaccaggtgacagtgagcagccccagccggccccagctgcagatccagcagccccagccccaggtgattgctgtgccccagctgcagcagcaggtgcaggtgctgagccagatccagagccaggtggtggcccagatccaggcccagcagagcggcgtgccccagcagatcaagctgcagctgcccatccagatccagcagagcagcgctgtgcagacccaccagatccagaatgtggtgacagtgcaggccgcctctgtgcaggagcagctgcagagggtgcagcagctgcgggaccagcagcagaagaagaagcagcagcagatcgagatcaagcgggagcacaccctgcaggccagcaaccagagcgagatcatccagaagcaggtggtgatgaagcacaatgctgtgattgagcacctgaagcagaagaagtccatgaccccagctgagcgggaggagaaccagaggatgattgtgtgcaaccaggtgatgaagtacatcctggacaagattgacaaggaggagaagcaggccgccaagaagaggaagcgggaggagagcgtggagcagaagaggagcaagcagaatgccaccaagctgagcgccctgctcttcaagcacaaggagcagctgcgggcagagatcctgaagaagagggccctgctggacaaggacctgcagatcgaggtgcaggaggagctgaagagggacctgaagatcaagaaggagaaggacctgatgcagctggcccaggccacagctgtggccgccccctgcccccctgtgaccccagcccccccagcccccccagcccccccacccagccccccacctcctcctgctgtgcagcacacaggcctgctgagcacccccaccctgcctgctgccagccagaagaggaagcgggaggaggagaaggacagcagcagcaagagcaagaagaagaagatgatcagcaccaccagcaaggagaccaagaaggacaccaagctgtactgcatctgcaagaccccctatgatgagagcaagttctacatcggctgtgaccgctgccagaactggtaccacggccgctgtgtgggcatcctgcagagcgaggccgagctgattgatgaatatgtgtgcccccagtgccagagcacagaagatgccatgacagtgctgacccccctgacagagaaggactatgagggcctgaagagggtgctgcggagcctgcaggcccacaagatggcctggcccttcctggagcctgtggaccccaatgatgccccagactactatggagtcatcaaggagcccatggacctggccaccatggaggagcgggtgcagaggcgctactatgagaagctgacagaatttgtggccgacatgaccaagatctttgacaactgccgctactacaaccccagcgacagccccttctaccagtgtgccgaggtgctggagagcttctttgtgcagaagctgaagggcttcaaggccagccgcagccacaacaacaagctgcagagcacagccagctag

SEQ ID NO: 274770 - DNA, 9141 bp, Artificial Sequence
  derived and/or modified sequence
atgcggggccggcggggccggccccccaagcagcccgccgcccccgccgccgagaggtgtgctccggccccacctcctcctccccctcctcccacttcgggccccattggcggattacgttctcgccatagggggtccagtaggggacgatgggccgccgcccaggcagaagtggcccccaagacaaggctgtccagccctcgagggggatcctctagccgcagaaagcctcccccgccaccacccgctccgccatctacatcagctccaggcaggggcgggcgtggcgggggcggtgggagaacaggggggggaggtgggggggggcatcttgccagaacaaccgcggcacgtagagccgtgaacaaggtcgtttacgatgaccacgagagtgaggaggaggaagaggaagaggatatggtatctgaggaggaagaggaagaagacggcgacgccgaagaaacacaagacagcgaggatgacgaggaggacgagatggaagaggatgacgacgactctgactacccagaggagatggaagatgacgacgatgatgcgtcttactgtacggagagtagttttcggagccactccacttacagttctacccctggcagaagaaaaccacgcgtccacaggccccggtcccctatccttgaggaaaaagacattcctcccttggagtttcctaagagctccgaggacctcatggtgcccaatgagcacatcatgaatgttattgcaatttacgaagtgctgcgaaattttggaacggtgcttcggttgtctccatttcgatttgaggatttttgcgctgcactagtttctcaagaacaatgcacgctgatggctgagatgcacgtagtactcctgaaagccgtgctgcgggaggaagacacctccaacactactttcggtcctgcagatcttaaagactctgtgaacagcaccctttatttcatcgatggaatgacctggcccgaagtgctaagagtgtattgcgagtcagacaaagaatatcaccatgtgctcccgtaccaagaggcagaggactatccatatggtcccgtcgagaacaagatcaaagtcctgcagtttctggttgatcaattcctgacgacaaatatcgcacgggaggaactcatgtctgagggggtgattcaatacgatgaccactgtagggtttgccataaactaggagatctgctgtgctgcgaaacttgcagcgcggtctatcacttggagtgcgtgaagcctcctttggaggaggtgccagaagacgagtggcagtgtgaagtatgcgtggcacataaggtgcctggcgtgacagattgtgtggctgaaatacagaaaaataagccatatatccgtcacgagcctataggctatgatagatcaaggcggaagtactggtttctgaatcgacggttgataattgaagaggacactgaaaatgagaatgaaaaaaaaatttggtactattctacgaaggtacagctggcggagctgatcgattgtctggataaggattactgggaggctgagctgtgcaaaatcctggaggagatgcgcgaagagattcaccggcatatggacatcacagaggacctcactaacaaagcaaggggcagcaataaaagttttcttgcagcggccaatgaggaaatcctggagtccatacgtgcaaaaaagggcgatatagataatgtgaagagccccgaggagactgagaaagacaagaacgaaaccgagaatgactcgaaggacgctgaaaagaaccgcgaggagtttgaggatcagtccctggagaaggactcagatgataaaacccccgacgatgaccctgaacagggcaagagtgaggagcctaccgaggtgggggacaagggcaactctgtttccgccaatcttggggacaacaccaccaatgccaccagcgaggaaacgtctcctagcgaaggccgctcacctgttggatgcctttctgagaccccggactccagcaatatggccgagaaaaaagtcgcttcagagctacctcaggatgtaccagaggagcctaacaaaacctgtgagtccagcaacactagtgctacgacaactagcatccagcctaatcttgagaatagcaatagttcctcggagctgaattcatctcaatccgagagcgcaaaagccgcggacgaccctgagaacggcgagagggaaagtcataccccagtgagtatccaggaagagatagtgggggattttaagagcgagaaatccaacggagaactttctgagtcacctggcgccggcaagggcgcatccgggtccacccgcatcattacccggctacggaatcccgattctaaacttagccagcttaaaagccagcaggtcgctgctgcagcccatgaagccaataagctgttcaaagaggggaaagaggtgctggtcgtgaacagccagggggagattagtcgactctcaacaaagaaagaagtgataatgaagggcaatatcaacaattattttaaactgggtcaagagggcaagtatagagtctatcataaccagtatagcaccaattctttcgccctaaataagcaccagcaccgtgaagaccatgacaagcggaggcatctggcacacaagttctgcctcacacctgctggggagttcaagtggaatgggtccgtacacggttccaaggtgctcacaatttcaacgcttcgccttactataactcagctggagaataatattccgtcatcattcctgcaccctaattgggcgagccatcgtgctaattggataaaagccgtccaaatgtgttctaagcctagagagtttgcactcgccctggccatcttagaatgcgcggtaaaacccgttgttatgcttccaatctggagagagagcctggggcacacgcgactccacaggatgacttctatcgagcgggaggagaaggaaaaagttaaaaaaaaggagaagaagcaggaggaggaggagaccatgcagcaggctacgtgggttaagtatacgtttccagtgaaacatcaggtatggaaacaaaagggggaagaatatagggtgacgggatacggtggttggtcgtggatcagtaagactcatgtatatagatttgtccctaagctgcccggaaatacaaatgtaaactataggaaatctctcgaggggaccaagaacaacatggatgaaaatatggatgaaagcgacaaacggaaatgctctaggtctcccaagaaaataaaaatagaacctgactcagaaaaagacgaggtcaagggctctgatgctgcgaaaggagcagaccagaacgaaatggatattagcaaaattactgaaaaaaaggaccaagatgttaaggagctgctagacagcgattccgataagccctgcaaggaagaaccgatggaggtggacgatgatatgaaaacagagtcacatgtgaactgtcaagaaagcagccaggtcgacgttgtgaacgtaagcgaagggttccacctacgaacgagctataagaagaaaaccaagagtagtaaactggacgggctcctcgagcggaggatcaagcagttcacactggaggaaaagcaaaggctggagaagattaagctcgaaggtggcataaagggcattgggaagacttctaccaactcttcgaaaaatctttcggaatcccccgtcatcacaaaggccaaagaaggatgccagtcagatagtatgaggcaggagcagagtcctaatgccaataacgaccagccagaagacctaattcagggatgttcagagagcgatagctcggtgctgcggatgtccgacccctcacataccaccaacaagctctaccctaaagacagagtcctagatgacgtaagcatcagaagccccgagaccaagtgtcctaaacagaactcaatagagaacgatatcgaggagaaggtatccgacttggcgagccgtggccaggaaccctcaaagtctaaaacgaaggggaatgactttttcatcgatgactcaaaattggcttctgccgatgatataggaacactgatctgcaagaataaaaaaccgttgattcaggaggagagtgacactatagtgtctagctccaagagcgcgctgcactcctcggtcccaaaatccactaacgaccgggatgcgaccccactttctagggcaatggacttcgagggtaaactcggttgcgacagtgaatctaattcaactttggaaaacagctcagataccgtttccattcaggactctagtgaagaagatatgattgtgcagaatagcaatgagtccattagcgaacaatttcggaccagggagcaggacgtggaggtcctagagccgctgaagtgcgagctcgtgtctggggagtcaacaggcaattgcgaagatcgtctgccagtgaagggtactgaggctaatggtaaaaagccatcacagcagaagaagttggaagagagacctgtcaacaaatgctcggaccaaattaaactaaaaaatacaaccgataaaaagaacaatgagaacagggagtccgaaaaaaagggacaacggaccagtacctttcaaatcaatggcaaagataataagccgaaaatttatttgaaaggggaatgcctcaaggagatcagcgagtccagggtcgtgtccggaaatgtcgaaccaaaggtcaataatataaacaagatcatccccgaaaatgatatcaagtccctaacggtcaaggaaagtgctataaggccatttataaacggagatgtcataatggaagactttaatgagcgaaatagtagtgaaacgaaatctcacctactgtcgagttccgacgcagagggtaattaccgcgactccctggagactctgccttctacaaaagaaagtgatagtactcagacgacaacaccttcggcgagttgccccgagtcaaactctgttaatcaggtagaggatatggaaatagagacatccgaagtcaaaaaggtaacgtctagtcctataacctcagaggaagaaagtaacttaagcaatgacttcatcgacgagaacggcctccctatcaacaagaacgaaaacgtgaacggggagagtaaacgaaagaccgtcatcacagaagtaaccactatgacttccacggtggctaccgagagtaaaacagtaatcaaagtggagaaaggcgacaagcagaccgtggtatcttcaacagagaactgtgccaaatcaactgttaccacgacaaccacgacggttaccaaactgtcgacgccttctaccgggggaagcgtcgacatcataagtgtgaaggagcagtctaagacagtcgtgactacaaccgttacggatagcctgactactaccggcgggaccctcgtgacatctatgaccgtctccaaagaatacagtactagggataaagtaaagctcatgaaatttagtcggcccaaaaagacccgttctggtacggctcttccttcttatcggaagtttgtgaccaagagctccaaaaagagcatttttgtcctgcccaatgacgacttaaaaaaactggcaagaaagggagggattagagaagtgccctacttcaactacaacgccaagccagcccttgacatttggccgtacccctctccgcggccaacgtttgggattacctggaggtaccgactacaaacagtaaagagcctggccggcgtcagtctaatgttacggctgctttgggccagcctcaggtgggacgacatggccgctaaggctccaccaggtgggggcactactcgcacagagaccagcgaaacagagattactactaccgagattataaaacgtcgagacgtgggtccttacggaatccggagtgagtattgtataaggaagataatttgtcctatcggagttcccgagaccccaaaagagaccccaacacctcagcgtaaaggcctgaggagctctgctttgagaccaaagcggcctgaaacccctaagcaaacaggccctgtgatcattgaaacgtgggttgcagaggaagagttagaactgtgggaaattcgcgcctttgcagagagggtcgagaaagagaaagcacaggcggtggaacagcaggctaagaagcggctagaacagcagaagcctacggtgatcgctacttccacaacttctccaacatcctcaaccactagtacgatctctcctgcccagaaagtgatggtggcccctataagtgggtctgttactaccggaacgaaaatggtcctgacaactaaggtcggatcaccggctaccgtgacatttcagcaaaataaaaattttcaccaaactttcgccacctgggtgaagcaggggcagtccaacagcggcgtcgtacaagtgcagcaaaaggtactcggcattatccctagctcaaccgggaccagccaacagacatttacgagctttcagcccagaactgcaaccgtgaccattcgcccgaacacaagcggtagtggcggcaccactagcaattctcaagtcatcaccggaccccagatcagacctggaatgacagtgataaggacccccttgcagcagagcactttaggtaaggcaatcatacggacccccgtgatggtccaaccaggggcccctcagcaagtaatgacccagatcatccgggggcaacccgtttcaactgcggtgagcgctcctaatacggtgtcgtccacaccagggcaaaagagtcttacttctgcaacctcaacctcaaacatccagagctccgcttcccaaccgccccgcccgcagcagggacaggtcaaactgacaatggctcaacttacacaacttacgcaggggcacgggggaaaccagggcctgacggtggtcatccaaggtcagggccagaccaccggccagctgcagctcattccccagggggtgaccgtccttccagggccggggcagcagctaatgcaggcggcaatgccaaacgggactgtgcagcggtttctctttacaccactcgccaccacagcaactacagcatcgacgacaaccaccacagtttctaccacagctgcgggcaccggagagcagagacaatcaaagctgtccccccagatgcaggtacaccaggacaaaactttgccgccagctcagtcttccagtgtgggaccggcggaggcccagcctcagacagcccagccatctgctcagccacagcctcagactcagccgcagtcccctgctcagcccgaagtgcagactcagccagaggtacaaacacagaccacagtgagttcccacgtacctagtgaggctcaacctacgcacgcccagagttccaaaccccaggtggccgcccagtcccagccccagtcgaacgtgcaaggacaaagcccagtccgcgtgcaatccccctcacagactcggatccggccatccacccctagtcagcttagccctggccagcagtcccaggttcagacaaccacctctcaaccaatcccaatccagccgcacacgtctctgcagatccccagccagggccaaccacaaagtcagccacaggtccagtcctccacccagaccctgagctccggtcagactctcaaccaggtgacggtatctagtcccagcagacctcagctgcaaatccaacagccccagccacaggttatcgccgtcccccagctgcagcagcaggtccaggtgctaagccagattcagtctcaggtagtcgcccaaatacaggcacaacaatccggcgtgccccagcagattaaacttcagttacctatccaaatccagcagtctagtgctgtccaaacccaccagattcaaaacgtagtcactgtccaggcggcctccgtgcaggagcagctgcagcgtgtgcagcagttaagggaccagcagcagaagaagaagcaacagcagatcgagatcaagcgggaacatacattacaggcttccaaccagagtgagatcatccagaagcaggtagtgatgaaacacaatgcagttatcgaacatctcaagcagaaaaaatcaatgacaccggccgagagggaagaaaatcaaaggatgattgtgtgcaaccaggtaatgaaatatattttggacaaaatagacaaggaggagaaacaggctgccaaaaagcggaagagagaggagagcgtcgagcaaaaacgctccaaacagaatgctaccaaactgagcgctctgttattcaagcataaagagcagctgagagccgagattctgaagaagcgtgccctactggataaggatctccaaatagaggtgcaggaagaacttaaacgagacttgaaaatcaagaaggagaaagatctgatgcagctggctcaggcaactgccgtggcagcaccctgcccacctgtcactcccgctcccccggcccctcccgcacctcccccttccccgcctcctccacccgcagtgcagcacactggcctgttgtccacaccaaccctgcccgcagcctcacaaaagagaaagagagaagaggaaaaagactcttcatctaagtcaaagaagaaaaaaatgattagtaccaccagcaaggagaccaaaaaggacacaaagttatactgcatatgcaaaactccatatgatgaaagcaagttctatataggatgtgatagatgccagaattggtaccacggaagatgcgttgggatcctccagagcgaggcagagttgatcgacgagtacgtgtgtcctcagtgccagagcaccgaggacgcaatgaccgttctgacaccattgacggaaaaagactatgagggcctcaaacgggtgctgagatctctgcaagctcataaaatggcatggccgtttctcgagcccgtggaccccaatgacgcccccgattactacggagtgattaaagaacctatggacctcgctaccatggaggaaagggtccaacgacgctactatgagaaactaacagaatttgtcgcagatatgaccaagatcttcgataactgtcgctactataatccatcagactcacctttctatcagtgtgcagaagtactagagagctttttcgtacagaagctcaaggggtttaaggcttcccgcagccataacaacaagctccagtcaactgcatcatag

SEQ ID NO: 274771 - DNA, 9140 bp, Artificial Sequence
  derived and/or modified sequence
atgcgcggacggcgaggcaggcctccaaaacaacctgcagcgcctgccgcagagagatgtgccccagctcctccaccccctcctcccccaccgaccagcggtcccattgggggactgcgctctcgacacagaggatcctccagagggagatgggcggctgcgcaagccgaggtggccccaaaaacccgcttatcttctccacgcggtggcagctcttccagacgtaagcctccccctccaccacctgctcccccttctaccagcgctccaggaagaggcggaagaggagggggaggcggtcgcaccgggggtggcggtgggggaggtcacctcgctaggaccacagccgctaggcgcgctgtcaacaaggtagtctacgatgaccacgagtctgaggaagaagaggaggaagaagatatggtctccgaggaagaagaagaggaggatggcgacgcagaggagacacaggatagcgaggacgatgaggaggatgagatggaggaggatgacgatgatagcgactatccggaagagatggaggatgacgatgacgatgcatcatattgcaccgagtctagctttaggagtcacagcacctattcctcaacacctggtaggcggaagccgcgagtgcaccgacccagatcacccatactagaagaaaaagacattcctccactcgagttcccgaagtcctccgaggacctgatggtgcccaacgaacacattatgaatgtgattgctatctacgaggtacttcgaaacttcggtacggtgctcaggctgtccccgttcagatttgaggacttttgtgcggcattagtgagccaagagcaatgtactttgatggcagagatgcacgtagtgctgttgaaggccgttctgagagaggaggatacaagcaataccacattcggcccagctgaccttaaagatagcgtaaacagtacattgtacttcatcgacggaatgacctggcctgaagtgctccgtgtatactgtgaatctgacaaggagtaccaccatgtgctgccatatcaggaggccgaggactatccctatggacccgtggaaaataaaattaaggttcttcagtttctggtcgaccagtttctgactaccaatatagcccgtgaggaactgatgagtgaaggggtgatccagtatgatgaccactgcagagtatgccacaaattgggggacttactatgctgtgaaacctgcagcgcagtctaccacctggagtgtgttaaaccgcctctcgaggaggtgcccgaggatgagtggcagtgtgaggtgtgcgtggcacataaagtgcccggagtaacagactgtgtcgctgaaattcagaagaacaagccatatattagacatgaacctattggctatgaccgttccaggcgcaagtactggttcctgaacagaaggttgattattgaggaggatacagagaatgagaatgagaaaaagatctggtattacagtactaaagtgcagctcgcagaactcattgactgcctggacaaagactactgggaagccgaactgtgcaagattcttgaagaaatgcgagaggaaattcaccgacacatggacatcaccgaggatttaacaaacaaagcaagggggtctaataaatcctttctggccgctgctaatgaggagatcctggagtctatcagggccaaaaagggagacattgataacgtgaaaagcccggaagagactgagaaagataagaatgagaccgagaatgatagcaaggatgctgaaaagaaccgggaagagtttgaagaccagtcccttgagaaggattccgatgataaaaccccagacgacgatcctgaacaggggaagtccgaggaacctacagaggtcggcgataaagggaacagtgtttccgcaaaccttggggacaatacaacaaatgctaccagcgaagagactagtccttccgaagggagatctccagtgggctgcctgagcgaaaccccagactcgagtaatatggcagagaagaaggttgcgtctgagctccctcaggatgtccccgaagaacccaataagacgtgcgagtcctcaaacacatcagctactacgacttcaattcaacccaatctggaaaattcaaactcttctagtgagttgaattccagtcagtcagagtcggctaaggcggcagacgaccctgagaacggagagcgggagagccatactccagtgtccattcaggaggagattgtcggcgattttaagagcgagaaatccaacggcgagctgagcgagagtcctggcgctggaaaaggcgcaagtggctccaccaggattatcactcgcctgcgaaacccggattcaaagctgtctcagctcaagtctcagcaggttgccgcagcagcccacgaagctaataaactgttcaaggaaggaaaggaagttttagtagtcaattcacagggagagataagcagattgagcaccaaaaaggaggttataatgaagggaaatattaataattattttaagcttggccaggaggggaagtaccgggtgtaccacaaccaatactccaccaattcattcgccctcaacaagcatcagcacagggaagaccacgataaacggagacatcttgctcataagttctgtctgacccccgctggggagttcaagtggaatggctctgtccacggtagtaaagtgctgacaatatctacattgagacttaccatcacacagttagagaacaacattccctcaagcttccttcatcctaactgggcaagccaccgggctaactggattaaggcagtgcagatgtgctctaagccacgcgaattcgccttggccctggctattttagagtgcgccgtcaaaccggtggtgatgctgccaatatggcgggagagccttgggcatacccgcctgcatagaatgaccagcatcgagagggaagagaaggaaaaggtgaagaagaaggagaagaaacaggaggaggaagagaccatgcagcaagccacttgggtgaaatataccttcccggtcaaacatcaggtgtggaagcagaaaggggaggagtatcgcgttaccggctacggcggatggtcttggatatctaaaacccacgtctatcgattcgtgccaaagcttcctggtaacactaatgtaaactatagaaaatctctggagggaaccaagaataacatggacgagaatatggacgaatccgacaagagaaagtgcagtcggtcccccaagaaaattaagatagaaccagactctgagaaggacgaagttaagggaagcgatgccgctaagggcgcagatcagaatgaaatggacatctcaaagataaccgaaaaaaaggatcaagatgtcaaagagctactggacagtgactccgacaaaccttgtaaggaggagcctatggaggtggacgatgatatgaaaactgaatcacatgtgaactgtcaggaatccagccaggtggacgtagttaatgtatctgagggcttccatctcagaactagctataagaaaaaaaccaagtccagtaagcttgacgggctgctggagagacgcatcaagcagttcacactcgaggagaagcagcggctcgaaaagatcaagttggagggcggaattaagggaatcggaaagaccagtacaaactcctcgaagaatttgagcgagtctcccgtgattaccaaggccaaggagggatgtcagtctgacagcatgaggcaggagcagtcacctaatgctaacaacgatcagcccgaggatctgattcaggggtgttccgaaagcgatagcagcgtcctccgaatgtcagatccctcccacaccacaaataagttgtaccccaaagaccgagtgcttgacgatgtgagcattaggagccctgaaaccaaatgtccaaaacagaattccatcgaaaatgatatcgaggaaaaagtgagcgacctggcctcccggggtcaagagcccagcaaaagcaaaactaaagggaatgatttctttatcgatgactccaaacttgcttctgcggacgacattggcaccctgatctgcaaaaacaagaaaccgctaatacaggaggaaagcgatacgatcgtgtcgtcttctaaatccgccctgcactcctcagtgcctaaatccacaaacgacagagatgcaacacccttgagtcgggcaatggactttgagggcaagcttgggtgtgattcagagtccaatagtactctcgaaaacagtagcgatacagtgagcattcaggactcatctgaggaggatatgatagttcaaaactctaatgaaagcatttctgagcagtttagaacacgggagcaggatgtcgaagtgttggaacctctaaagtgtgaattggtgtccggcgaatcaaccggaaactgtgaggaccggctgccggtgaagggaactgaggcaaacgggaagaagccttcccagcagaagaaacttgaggaacggcctgtgaacaaatgtagcgaccagatcaaattgaagaataccaccgacaagaagaacaacgaaaacagagaatccgaaaagaaaggccagcgcacatctacatttcagatcaacggcaaagataacaagccaaagatttatcttaagggagaatgcctgaaggagatatccgagtcgagagtcgtctccggtaatgttgaaccgaaggttaacaacatcaacaaaattattcctgaaaatgatattaagtctctcaccgtaaaagagagcgctatccggccattcatcaatggtgatgtcataatggaagattttaatgagcggaactcatccgagaccaagtcccatctgcttagttcctcggatgccgagggaaactaccgagattctctggaaaccctacccagtacgaaagagtctgattcaacccagacgaccactccatctgccagttgcccagagtccaatagtgtcaaccaagtggaagacatggaaatcgagacaagtgaggtgaagaaggttacctcctcccccatcacctccgaggaggagagtaacctttcaaacgactttatagatgaaaacgggttgccgatcaataaaaacgagaatgtgaatggcgaatccaaacggaaaactgtgattaccgaagtgacaactatgacatccaccgttgccacggagtcaaagacagtaattaaggtcgagaagggcgataaacagaccgtggtttcaagtaccgaaaactgcgccaagtcaactgttaccacaaccaccaccacagtgacaaagttgtctacacctagtactggagggtccgtcgatattatctcagtcaaggaacaatctaagaccgttgttactaccaccgtgactgatagcctgaccactactgggggtacccttgttacctcaatgaccgtgagtaaagagtattcaacccgcgataaagtcaaattgatgaagtttagtaggccaaaaaaaacacgatctggcactgcactgccaagttatcgcaagttcgtgactaagtccagtaaaaagtctatattcgtcctgccaaatgatgacctcaagaaattagctaggaaaggtggcatacgtgaagtcccttattttaattataacgcaaaacccgcactggacatttggccttatccctcccctaggcctacttttggcataacatggaggtaccgactccagactgtcaagagcctcgccggagtcagtttaatgctgagacttctttgggcatcccttcggtgggacgatatggccgctaaagctccgccaggcggaggtacaacccggaccgagactagtgagacggagatcaccactacagagattatcaaaagacgcgatgttggaccatacggcataaggtctgaatattgcataagaaagattatatgcccgatcggcgtccccgagacccccaaggagactcccaccccccagcgaaaaggcctgcgctcttcagctttgcggcctaagcggcctgagacccccaagcagacaggacccgtgattatcgagacctgggtggccgaagaggagttggagttgtgggagattcgagctttcgcagaaagagtagaaaaagaaaaggcgcaagcagtggagcagcaggccaagaagcggctcgagcagcaaaagcctaccgtcatcgctacttcgactactagccccaccagttctactacctctacgatctcccctgctcagaaggtcatggtggcacctattagcgggtccgtgacaacaggaaccaaaatggttctcactactaaagtggggtcaccagccacggttacctttcagcagaacaagaatttccaccagactttcgccacgtgggtcaagcagggacaatcgaattcaggtgtggtgcaagtgcagcagaaggtgctaggcatcatcccctccagcaccgggacctcacaacagactttcacctccttccagccacgaacagccacagtaaccatacgtccaaacacatcagggtcagggggaactacttctaattcacaagtgatcacagggccacagatcaggcctggtatgaccgtgattcggacaccactgcagcagtctacgctgggcaaagcaatcattagaaccccagtgatggtccaacccggagccccacaacaggtgatgacccaaatcatacgaggccagccagttagcacggccgtgtcggcccctaacacggtctcctctacacccggacagaagagcctcacctcggctactagtaccagcaacattcagtcctccgccagccagccccctaggccacaacagggccaggtcaagctcaccatggcacagctgacccaactcacccaaggacatgggggtaatcaggggctcactgtggttattcagggccagggtcagactacaggacaactgcagttgatcccccagggagtaacagtactccctggaccgggacagcagctgatgcaggctgctatgcccaacggtacggttcagaggtttctgtttacgcccctggccactaccgcgaccaccgcctcgaccacaacaacgacagtaagtacgactgcagccggtacaggcgaacaacggcagtcaaagctgagcccgcagatgcaagtacaccaagataaaacactaccacctgcgcaatccagtagcgtcggtccagcggaagctcaaccccagactgcacaacctagtgcacagccgcagccccagacacagcctcagtcgcccgctcaaccagaagtgcagacccaaccagaagtgcagactcagactaccgtgtcatcacatgtgccctcagaagcccagcctacccatgctcaaagcagcaagccccaagtggcagcccagtctcaaccccaatccaatgtgcaaggacagagtcccgtacgcgtgcagtctccctcacaaactcgaatcagacccagcacccccagccagctatctcctggacagcaaagccaagtgcaaacaacaactagccagcccattcctatccagccccacacgtcactgcagattccatcacaagggcagcctcagtctcagccccaggtacagtcctccacacaaaccttgtcaagcggtcagacccttaaccaggtcacagtctcttctccctcacgaccgcagcttcagattcaacagccccaacctcaggttattgccgtaccacagctccagcaacaagtccaggtgctcagtcagatacaatctcaagtggtggcccaaatacaggcccaacagtccggcgtaccacaacagatcaaactgcagctccctatccagatacagcagagttcggctgtgcagacgcaccagattcagaacgtcgtcaccgtacaggccgcatctgtgcaggagcagctgcagagagtacagcagttaagagatcaacagcagaagaagaagcagcaacagatcgagatcaagagagaacatacactgcaggcttccaatcaatctgagattatccagaagcaggttgtgatgaagcacaacgctgtcatagagcacttgaagcagaagaagagcatgacacccgctgaacgggaggagaaccagcgcatgattgtatgcaaccaggttatgaaatatattctggacaaaatcgacaaggaggagaaacaggccgcaaaaaagcggaagcgggaagagtccgttgagcagaagcgcagtaagcaaaacgcaacaaagctgtctgccctgttgttcaagcataaggagcagctgcgcgcagagatattgaaaaaacgggcattgctcgataaggaccttcagatcgaggtgcaggaagagttgaagagagatctcaaaataaagaaggaaaaagacctaatgcagctggcccaagctaccgccgtggcagccccatgccctcctgtgacaccggcacctccagctccgccagcccctcctccaagccccccaccgcctcccgcagtgcagcacaccggcctgttaagcaccccgacactcccggctgcaagccagaagcggaaaagagaagaagagaaggactcctcaagcaaaagtaaaaaaaaaaagatgatatctaccacatcaaaggaaaccaaaaaggatactaagttgtactgtatatgtaaaacaccttacgacgagagcaagttttatatcggttgcgatcgctgccagaattggtatcatggacggtgtgtcgggatcctgcagagcgaagcagagctaatagacgaatacgtttgtccgcaatgccagtcaactgaggacgccatgactgtgctgactccacttactgagaaggactatgaggggctgaagcgggtcctgcggtcactacaggcgcacaagatggcttggccgttcttagaaccagtggatccaaacgatgctcccgattattacggagtgatcaaagaacctatggatctcgctacaatggaggaaagggtgcaaaggaggtactacgaaaagctgactgaatttgtagcagacatgacaaagatctttgataattgtcggtactacaacccttctgactcccccttctatcaatgcgcagaggtcttggaaagctttttcgtccagaagttaaaagggtttaaagcttccagaagtcataacaataaactccagagcaccgcgtctta

SEQ ID NO: 274772 - DNA, 11292 bp, Artificial Sequence
  derived and/or modified sequence
cgccccccctgcgcccgcccctcccccttcgctttccttctccccccgcctcggctccgacatgaggggccggcggggcaggccgcccaagcagcccgcggctcccgctgcggagcgctgcgccccggccccgccgccaccgccgccgccgcccacgtccggacccatcggggggctccgctcgcggcaccgcggcagcagccggggcaggtgggccgccgcccaggctgaggtggcgcccaagacgcggctgagctcgcccagggggggcagcagtagccggaggaagccgccgccgccgccgccggccccccccagcaccagcgccccgggccggggggggcgaggaggcgggggcggcaggacggggggcgggggcggcggcggccacctggcccggaccaccgcggcccggagggccgtcaacaaagtggtgtacgatgaccacgagagcgaggaggaggaggaagaggaggacatggtctccgaggaggaggaggaggaggacggcgacgccgaggagacccaggattctgaggacgacgaggaggatgagatggaagaggacgacgatgactccgattatccggaggagatggaagacgacgacgacgacgccagttactgcacggaaagcagcttcaggagccatagtacctacagcagcactccaggtaggcgaaaaccaagagtacatcggcctcgttctcctatattggaagaaaaagacatcccgccccttgaatttcccaagtcctctgaggatttaatggtgcctaatgagcatataatgaatgtcattgccatttacgaggtactgcggaactttggcactgttttgagattatctccttttcgctttgaggacttttgtgcagctctggtgagccaagagcagtgcacactcatggcagagatgcatgttgtgcttttgaaagcagttctgcgtgaagaagacacttccaatactacctttggacctgctgatctgaaagatagcgttaattccacactgtatttcatagatgggatgacgtggccagaggtgctgcgggtgtactgtgagagtgataaggagtaccatcacgttcttccttaccaagaggcagaggactacccatatggaccagtagagaacaagatcaaagttctacagtttctagtcgatcagtttcttacaacaaatattgctcgagaggaattgatgtctgaaggggtgatacagtatgatgaccattgtagggtttgtcacaaacttggggatttgctttgctgtgagacatgttcagcagtataccatttggaatgtgtgaagccacctcttgaggaggtgccagaggacgagtggcagtgtgaagtctgtgtagcacacaaggtgcctggtgtgactgactgtgttgctgaaatccaaaaaaataaaccatatattcgacatgaacctattggatatgatagaagtcggaggaaatactggttcttgaaccgaagactcataatagaagaagatacagaaaatgaaaatgaaaagaaaatttggtattacagcacaaaggtccaacttgcagaattaattgactgtctagacaaagattattgggaagcagaactctgcaaaattctagaagaaatgcgtgaagaaatccaccgacacatggacataactgaagacctgaccaataaggctcggggcagtaacaaatcctttctggcggcagctaatgaagaaattttggaatccataagagccaaaaagggagacattgataatgttaaaagcccagaagaaacagaaaaagacaagaatgagactgagaatgactctaaagatgctgagaaaaacagagaagaatttgaagaccagtcccttgaaaaagacagtgacgacaaaacaccagatgatgaccctgagcaaggaaaatctgaggagccaacagaagttggggataaaggtaactctgtgtcagcaaatcttggcgacaacacaacaaatgcaacttcagaagagactagtccctctgaagggaggagccctgtggggtgtctctcagaaacccccgatagcagcaacatggcagagaagaaggtggcatctgagctcccccaggatgtgccagaagaacctaacaagacatgtgagagcagtaacactagtgctaccactacctccatccagcctaatctggaaaacagtaacagcagcagtgaactaaattcttcccagagtgaatctgctaaggcagctgatgatcctgaaaatggagaaagagaatctcatacacctgtctctattcaggaagagatagtaggtgatttcaaatcggagaagtccaacggggagctaagtgaatctcctggagctggaaaaggagcatctggctcaactcgaatcatcaccagattgcggaatccagatagcaaacttagtcagctgaagagccagcaggtggcagccgctgcacatgaagcaaataaattatttaaggagggcaaagaggtactggtagttaactctcaaggagaaatttcacggttgagcaccaaaaaggaagtgatcatgaaaggaaatatcaacaattattttaaattgggtcaagaagggaagtatcgcgtctaccacaatcaatactccaccaattcatttgctttgaataagcaccagcacagagaagaccatgataagagaaggcatcttgcacataagttctgtctgactccagcaggagagttcaaatggaacggttctgtccatgggtccaaagttcttaccatatctactctgagactgactatcacccaattagaaaacaacatcccttcatcctttcttcatcccaactgggcatcacatagggcaaattggatcaaggcagttcagatgtgtagcaaacccagagaatttgcattggctttagccattttggagtgtgcagttaaaccagttgtgatgctaccaatatggcgagaatctttaggacataccaggttacaccggatgacatcaattgaaagagaagaaaaggagaaagtcaaaaaaaaagagaagaaacaggaagaagaagaaacgatgcagcaagcgacatgggtaaaatacacatttccagttaagcatcaggtttggaaacaaaaaggtgaagagtacagagtgacaggatatggtggttggagctggattagtaaaactcatgtttataggtttgttcctaaattgccaggcaatactaatgtgaattacagaaagtcgttagaaggaaccaaaaataatatggatgaaaatatggatgagtcagataaaagaaaatgttcacgaagtccaaaaaaaataaaaatagagcctgattctgaaaaagatgaggtaaaaggttcagatgctgcaaaaggagcagaccaaaatgaaatggatatctcaaagattactgagaagaaggaccaagatgtgaaggagctcttagattctgacagtgataaaccctgcaaggaagaaccaatggaagtagacgatgacatgaaaacagagtcacatgtaaattgtcaggagagttctcaagtagatgtggtcaatgttagtgagggttttcatctaaggactagttacaaaaagaaaacaaaatcatccaaactagatggacttcttgaaaggagaattaaacagtttacactggaagaaaaacagcgactcgaaaaaatcaagttggagggtggaattaagggtataggaaagacttctacaaattcttcaaaaaatctctctgaatcaccagtaataacgaaagcaaaagaagggtgtcagagtgactcgatgagacaagaacagagcccaaatgcaaataatgatcaacctgaggacttgattcagggatgttcagaaagtgattcctcagttcttagaatgagtgatcctagtcataccacaaacaaactttatccaaaagatcgagtgttagatgatgtctccattcggagcccagaaacaaaatgtccgaaacaaaattccattgaaaatgacatagaagaaaaagtctctgaccttgccagtagaggccaggaacccagtaagagtaaaacaaaaggaaatgattttttcatcgatgactctaaactagccagtgcagatgatattggtactttgatctgtaagaacaaaaaaccgctcatacaggaggaaagtgacaccattgtttcttcttccaagagtgctttacattcatcagtgcctaaaagtaccaatgacagagatgccacacctctgtcaagagcaatggactttgaaggaaaactgggatgtgactctgaatctaatagcactttggaaaatagttctgataccgtgtctattcaggatagcagtgaagaagatatgattgttcagaatagcaatgaaagcatttctgaacagttcagaactcgagaacaagatgttgaagtcttggagccgttaaagtgtgagttggtttctggtgagtccactggaaactgtgaggacaggctgccggtcaaggggactgaagcaaatggtaaaaaaccaagtcagcagaagaaattagaggagagaccagttaataaatgtagtgatcaaataaagctaaaaaataccactgacaaaaagaataatgaaaatcgagagtctgaaaagaaaggacagagaacaagtacatttcaaataaatggaaaagataataaacccaaaatatatttgaaaggtgaatgcttgaaagaaatttctgagagtagagtagtaagtggtaatgttgaaccaaaggttaataatataaataaaataatccctgagaatgatattaaatcattgactgttaaagaatctgctataaggccattcattaatggtgatgtcatcatggaagattttaatgaaagaaacagctccgaaacaaaatcgcatttgctgagttcttcagatgctgaaggtaactaccgagatagccttgagaccctgccatcaaccaaagagtctgacagtacacagacgaccacaccctcagcatcttgtccagaaagcaattcagttaatcaggtagaagatatggaaatagaaacctcagaagttaagaaagttacttcatcacctattacttctgaagaggaatctaatctcagtaatgactttattgatgaaaatggtctgcccatcaacaaaaatgaaaatgtcaatggagaatctaaaagaaaaaccgtcatcacagaagtcaccacgatgacctccacagtggccacagaatcaaaaactgtgatcaaggtagaaaaaggcgataagcaaactgtggtttcttccacagaaaattgtgcaaaatccactgtcacaaccaccactacaacagtgaccaagctttccacaccctccacaggcggcagtgtggacatcatctctgtaaaggagcagagcaaaaccgtggtcaccacgacagtgacagactccctgaccaccacgggaggcacactggttacatctatgactgtgagcaaagagtattccacacgagacaaagtgaaactgatgaaattttcaagaccaaagaagactcgttcaggtacagctctgccatcctatagaaaatttgttaccaagagcagcaagaagagcatttttgttttgcctaatgatgacttaaaaaagttggcccgaaaaggaggaatccgagaggtcccttattttaattacaatgcaaaacctgctttggatatatggccatatccttctcctagaccgacctttggcatcacttggaggtatagacttcagacagtaaagtccttagctggagtgagcctgatgttacggttactgtgggcaagtttgagatgggatgatatggcggccaaggctcctccaggaggagggactacacggacagaaacatccgaaactgaaatcacaacaacagaaataattaagaggagagatgttggtccttatggcattcgatctgaatattgtatcaggaaaatcatttgtcccattggagttccagaaacaccaaaagaaacgcctacacctcagaggaaaggccttcgatcaagtgcactgcggccaaagagaccagaaacgcccaagcaaactggccctgttattattgaaacctgggtagcagaagaagaactggaattgtgggagatcagggcatttgctgagagagtggagaaagaaaaggcacaagcagttgagcaacaggctaagaaacgactggagcagcagaagccgacagtgattgcaacttccactacttccccaacaagcagtacaaccagcaccatctctccagcacagaaggttatggtggcccccataagtggctcagttacaactggaaccaaaatggtactaactactaaagttggatctccagctacagtaacattccaacaaaacaagaactttcatcaaacctttgctacatgggttaagcaaggccagtcaaattcaggcgttgttcaagtacagcagaaagtcctgggtatcattccatcaagtacaggtaccagtcagcaaacctttacttcattccagcccaggacagcaacagtcacaattaggcccaatacctcaggctctggaggaaccacaagcaattcacaagtaatcacagggcctcagattcgccctggtatgaccgtgattagaacaccactccaacagtcaacactaggaaaggcaattattcgaacacctgtgatggtacagccaggtgctcctcagcaagtgatgactcaaatcatcagggggcagcctgtctccactgcagtctccgcccctaacacggtttcctcaacacctgggcagaaaagcttaacttcagcaacgtccacttcaaatatacagtcttcagcctcacaaccccctcgcccccaacaaggacaagtgaagctcaccatggctcaacttactcagttaacacagggccacggtggcaatcaaggtttgacagtagtaattcaaggacaaggtcaaactactggacagttgcagttgatacctcaaggggtgactgtactcccaggcccaggccagcagctaatgcaagctgcaatgccaaatggtactgttcagcgattcctctttaccccattggcaacaacagccaccacagccagcaccaccaccaccactgtttccacgacagcagcaggtacaggtgaacaaaggcagagtaaactgtcaccccagatgcaggtacatcaagacaaaaccctgccaccagctcagtcatcaagtgtgggtccagcagaagcccagccacagactgctcagccttcagctcagccccagccccaaacccagccccagtccccagctcagcctgaagttcagactcagcctgaagttcagacccaaacaactgtttcatcccatgtcccttctgaagcacaacccacccacgcacagtcatccaagccccaagttgcagcacagtctcagcctcaaagtaatgtccaaggacagtctcctgttcgtgtccaaagtccatcacagactcgaatacgtccatcaactccatcccaactgtctcctggacaacaatcccaggttcagactacaacctcacaaccgattccaattcaaccacatacatctcttcagataccttcccaaggccagccacagtcacaaccccaggtacagtcttcaactcaaactctttcatcaggacaaactttaaatcaagttactgtttcatccccatcccgtcctcagctacaaatacagcagccacagccccaagtcattgctgtgcctcagctgcaacaacaagtccaggttctctctcagatccagtcacaggttgtggctcagatacaggctcagcaaagtggtgtgccccagcaaatcaaactccagttacctatccaaattcagcaaagcagtgctgtgcagactcaccagattcagaatgtggttacagtgcaggcagccagtgtgcaagagcagttgcaaagggttcagcaactcagggatcagcagcaaaagaagaaacagcaacagatagaaattaagcgtgaacacaccctccaagcttctaatcaaagtgaaatcattcagaaacaggtggtgatgaagcataatgctgtaatagaacatttaaaacagaaaaagagcatgactccagctgaaagagaagagaatcaaagaatgattgtctgtaaccaggtgatgaagtatattttggataagatagataaagaagaaaaacaggcagcaaaaaaacggaagcgtgaagagagtgtggagcagaaacgtagcaagcagaatgccactaagctgtcagctctgctcttcaagcacaaagagcagctcagagccgagatcctgaagaagagagcactcctggacaaggatctgcaaattgaagtgcaggaagagctgaagagagacctgaaaattaagaaagaaaaagacctgatgcagttggctcaggccacagcagtagctgcaccctgccccccagtgacaccagctcctccagcccctccagcccctccaccttcacctccccctccacctgctgtgcaacacacaggccttctgtccacgcccaccttacctgctgcttcccagaagaggaagcgggaagaggaaaaagactccagctcaaagtccaagaaaaagaaaatgatctctactacctcaaaggaaactaagaaggacacaaagctttactgtatctgtaaaacgccttatgatgaatctaaattttatattggctgtgatcggtgtcagaattggtaccatgggcgctgcgttggcatcttgcaaagtgaggcagagctcattgatgagtatgtctgtccacagtgccagtcaacagaggatgccatgacagtgctcacgccactaacagagaaggattatgaggggttgaagagggtgctccgttccttacaggcccataagatggcctggcctttccttgaaccagtagaccctaatgatgcaccagattattatggtgttattaaggaacctatggaccttgccaccatggaagaaagagtacaaagacgatattatgaaaagctgacggaatttgtggcagatatgaccaaaatttttgataactgtcgttactacaatccaagtgactccccattttaccagtgtgcagaagttctcgaatcattctttgtacagaaattgaaaggcttcaaagctagcaggtctcataacaacaaactgcagtctacagcttcttaaagttcagcgtgttaacctaacataaaacacagcaagaatctggttgtctgaactattttaaattaaggagccagatgtttttagtcaggctatcctgacaagacttgacctaaacttcgtttttattggtcataacagtccaattatattcttggccaattttgtccaacggacaagaaaaaagcaaagtcaacgacaccattatcttgtcaagatcagatggttttactattgtggcagaagcgagaaaactttgtttattgaaaaaaaaagaaaaagaaagcaagaaaaaaagatactatggggtcaagtgtaactccatggaaatgccacgtctgctcttcagtgaagaagctggtttagagtctcacagaaaacttttgactgtatttatttattgttgcaaaaaagacgcttttttattgctgccctcatttgtcagctaattattttttcttataaaatccagccccggttacatataatcatctgtatcttatcatgattcctgtaggtaaaagtacaagacgacctctagatgtcttttctttctatgaaaggagctgctatgtacacatgtgcacacacacacaactgggaatcaacaatgagtttattgttcatggtagattaaaattaagcttgcataaaggttgggctaagtggtcctggactacagactctgttgccttgaatataacagtacaatttgtcaattactctgcaccaggctaaaatgagtaaaatctatttgaaggtatcttgtttgtaaacatttgtcagattctaatttttttcttttgtattaaaattcaactatggatgtatatgaaacaaaataaatggagataatttttctcccacagacagaggtgtctttgaatgtgcgctaatgattatctgtaagcctttgtggggagggaggcctgcaaggtcatgaaaggcagaagagtctaattgtgcctggatttctccaggacagcagtggcccctcgttttatcattcccagtccattgtcatcacgtcagagaaaaatcttcaggggtgctaatcctgttgcatcagttgatcatactaacgagaacggtaatgcgacaagatacacattgccttcatctgtacattctgtgataccaggcaaattaccaattacacacagctacttatattttatgaagggcattttttagatgacctcatcctctgtgttatttgttgattgggtttgttttctgtttgttggtttgtttgtttcttccacgtaaggaaaagtagtgtaaacagtagcgagaaaatggaaaccacagaggaagatgtattttgcatgtttttcctttcagtgttcttacacgttgtatcactgcattgtggtaatagcttctataaaatctgccatagttggattatgcagctttgcaaaaatttttactagattttgcactaactcatattagctttgtcctaccaacttctggaatttatctaattattgtttttcaaagtttctttccttttaatgtttccctgctatgcaaaacctttcccagacctcagtttcttaaaagaaagatgttgctacagttcccgattctttcttattacaggctcaggtgtacaggttattctgggttaattttatctaatgaagcccattcctttttgtacataaagatgtcacttaaacttatgcttacaaactaaagactaatcgctcaatatgaaaacatgaaaaaatttttgcttaaagtattaagatggaagtagttaaatatgggttattttgtccttttacttttttaaaaaatgttacatattgtatgcactgtgctgatgcaagaattctacattttaatgagttataaaattattctgcatctcatcacgtcacagtatttctgtactatttattcatatatataaatatatatgggcttaatcatttaaaatttgttgcagcaagaactttcctacctgtaggcaatagattgctatgtttttaacaaattgtggcaaattctaaacagcaattcttttgtacgtaataggacatttcatcctagaaaaataaagtaatgtttttgacattgga

SEQ ID NO: 274773 - DNA, 9141 bp, Artificial Sequence
  derived and/or modified sequence
atgagaggcagaagaggcagaccccccaagcagcccgccgcccccgccgccgagagatgcgcccccgccccccccccccccccccccccccccaccagcggccccatcggcggcctgagaagcagacacagaggcagcagcagaggcagatgggccgccgcccaggccgaggtggcccccaagaccagactgagcagccccagaggcggcagcagcagcagaagaaagccccccccccccccccccgccccccccagcaccagcgcccccggcagaggcggcagaggcggcggcggcggcagaaccggcggcggcggcggcggcggccacctggccagaaccaccgccgccagaagagccgtgaacaaggtggtgtacgacgaccacgagagcgaggaggaggaggaggaggaggacatggtgagcgaggaggaggaggaggaggacggcgacgccgaggagacccaggacagcgaggacgacgaggaggacgagatggaggaggacgacgacgacagcgactaccccgaggagatggaggacgacgacgacgacgccagctactgcaccgagagcagcttcagaagccacagcacctacagcagcacccccggcagaagaaagcccagagtgcacagacccagaagccccatcctggaggagaaggacatcccccccctggagttccccaagagcagcgaggacctgatggtgcccaacgagcacatcatgaacgtgatcgccatctacgaggtgctgagaaacttcggcaccgtgctgagactgagccccttcagattcgaggacttctgcgccgccctggtgagccaggagcagtgcaccctgatggccgagatgcacgtggtgctgctgaaggccgtgctgagagaggaggacaccagcaacaccaccttcggccccgccgacctgaaggacagcgtgaacagcaccctgtacttcatcgacggcatgacctggcccgaggtgctgagagtgtactgcgagagcgacaaggagtaccaccacgtgctgccctaccaggaggccgaggactacccctacggccccgtggagaacaagatcaaggtgctgcagttcctggtggaccagttcctgaccaccaacatcgccagagaggagctgatgagcgagggcgtgatccagtacgacgaccactgcagagtgtgccacaagctgggcgacctgctgtgctgcgagacctgcagcgccgtgtaccacctggagtgcgtgaagccccccctggaggaggtgcccgaggacgagtggcagtgcgaggtgtgcgtggcccacaaggtgcccggcgtgaccgactgcgtggccgagatccagaagaacaagccctacatcagacacgagcccatcggctacgacagaagcagaagaaagtactggttcctgaacagaagactgatcatcgaggaggacaccgagaacgagaacgagaagaagatctggtactacagcaccaaggtgcagctggccgagctgatcgactgcctggacaaggactactgggaggccgagctgtgcaagatcctggaggagatgagagaggagatccacagacacatggacatcaccgaggacctgaccaacaaggccagaggcagcaacaagagcttcctggccgccgccaacgaggagatcctggagagcatcagagccaagaagggcgacatcgacaacgtgaagagccccgaggagaccgagaaggacaagaacgagaccgagaacgacagcaaggacgccgagaagaacagagaggagttcgaggaccagagcctggagaaggacagcgacgacaagacccccgacgacgaccccgagcagggcaagagcgaggagcccaccgaggtgggcgacaagggcaacagcgtgagcgccaacctgggcgacaacaccaccaacgccaccagcgaggagaccagccccagcgagggcagaagccccgtgggctgcctgagcgagacccccgacagcagcaacatggccgagaagaaggtggccagcgagctgccccaggacgtgcccgaggagcccaacaagacctgcgagagcagcaacaccagcgccaccaccaccagcatccagcccaacctggagaacagcaacagcagcagcgagctgaacagcagccagagcgagagcgccaaggccgccgacgaccccgagaacggcgagagagagagccacacccccgtgagcatccaggaggagatcgtgggcgacttcaagagcgagaagagcaacggcgagctgagcgagagccccggcgccggcaagggcgccagcggcagcaccagaatcatcaccagactgagaaaccccgacagcaagctgagccagctgaagagccagcaggtggccgccgccgcccacgaggccaacaagctgttcaaggagggcaaggaggtgctggtggtgaacagccagggcgagatcagcagactgagcaccaagaaggaggtgatcatgaagggcaacatcaacaactacttcaagctgggccaggagggcaagtacagagtgtaccacaaccagtacagcaccaacagcttcgccctgaacaagcaccagcacagagaggaccacgacaagagaagacacctggcccacaagttctgcctgacccccgccggcgagttcaagtggaacggcagcgtgcacggcagcaaggtgctgaccatcagcaccctgagactgaccatcacccagctggagaacaacatccccagcagcttcctgcaccccaactgggccagccacagagccaactggatcaaggccgtgcagatgtgcagcaagcccagagagttcgccctggccctggccatcctggagtgcgccgtgaagcccgtggtgatgctgcccatctggagagagagcctgggccacaccagactgcacagaatgaccagcatcgagagagaggagaaggagaaggtgaagaagaaggagaagaagcaggaggaggaggagaccatgcagcaggccacctgggtgaagtacaccttccccgtgaagcaccaggtgtggaagcagaagggcgaggagtacagagtgaccggctacggcggctggagctggatcagcaagacccacgtgtacagattcgtgcccaagctgcccggcaacaccaacgtgaactacagaaagagcctggagggcaccaagaacaacatggacgagaacatggacgagagcgacaagagaaagtgcagcagaagccccaagaagatcaagatcgagcccgacagcgagaaggacgaggtgaagggcagcgacgccgccaagggcgccgaccagaacgagatggacatcagcaagatcaccgagaagaaggaccaggacgtgaaggagctgctggacagcgacagcgacaagccctgcaaggaggagcccatggaggtggacgacgacatgaagaccgagagccacgtgaactgccaggagagcagccaggtggacgtggtgaacgtgagcgagggcttccacctgagaaccagctacaagaagaagaccaagagcagcaagctggacggcctgctggagagaagaatcaagcagttcaccctggaggagaagcagagactggagaagatcaagctggagggcggcatcaagggcatcggcaagaccagcaccaacagcagcaagaacctgagcgagagccccgtgatcaccaaggccaaggagggctgccagagcgacagcatgagacaggagcagagccccaacgccaacaacgaccagcccgaggacctgatccagggctgcagcgagagcgacagcagcgtgctgagaatgagcgaccccagccacaccaccaacaagctgtaccccaaggacagagtgctggacgacgtgagcatcagaagccccgagaccaagtgccccaagcagaacagcatcgagaacgacatcgaggagaaggtgagcgacctggccagcagaggccaggagcccagcaagagcaagaccaagggcaacgacttcttcatcgacgacagcaagctggccagcgccgacgacatcggcaccctgatctgcaagaacaagaagcccctgatccaggaggagagcgacaccatcgtgagcagcagcaagagcgccctgcacagcagcgtgcccaagagcaccaacgacagagacgccacccccctgagcagagccatggacttcgagggcaagctgggctgcgacagcgagagcaacagcaccctggagaacagcagcgacaccgtgagcatccaggacagcagcgaggaggacatgatcgtgcagaacagcaacgagagcatcagcgagcagttcagaaccagagagcaggacgtggaggtgctggagcccctgaagtgcgagctggtgagcggcgagagcaccggcaactgcgaggacagactgcccgtgaagggcaccgaggccaacggcaagaagcccagccagcagaagaagctggaggagagacccgtgaacaagtgcagcgaccagatcaagctgaagaacaccaccgacaagaagaacaacgagaacagagagagcgagaagaagggccagagaaccagcaccttccagatcaacggcaaggacaacaagcccaagatctacctgaagggcgagtgcctgaaggagatcagcgagagcagagtggtgagcggcaacgtggagcccaaggtgaacaacatcaacaagatcatccccgagaacgacatcaagagcctgaccgtgaaggagagcgccatcagacccttcatcaacggcgacgtgatcatggaggacttcaacgagagaaacagcagcgagaccaagagccacctgctgagcagcagcgacgccgagggcaactacagagacagcctggagaccctgcccagcaccaaggagagcgacagcacccagaccaccacccccagcgccagctgccccgagagcaacagcgtgaaccaggtggaggacatggagatcgagaccagcgaggtgaagaaggtgaccagcagccccatcaccagcgaggaggagagcaacctgagcaacgacttcatcgacgagaacggcctgcccatcaacaagaacgagaacgtgaacggcgagagcaagagaaagaccgtgatcaccgaggtgaccaccatgaccagcaccgtggccaccgagagcaagaccgtgatcaaggtggagaagggcgacaagcagaccgtggtgagcagcaccgagaactgcgccaagagcaccgtgaccaccaccaccaccaccgtgaccaagctgagcacccccagcaccggcggcagcgtggacatcatcagcgtgaaggagcagagcaagaccgtggtgaccaccaccgtgaccgacagcctgaccaccaccggcggcaccctggtgaccagcatgaccgtgagcaaggagtacagcaccagagacaaggtgaagctgatgaagttcagcagacccaagaagaccagaagcggcaccgccctgcccagctacagaaagttcgtgaccaagagcagcaagaagagcatcttcgtgctgcccaacgacgacctgaagaagctggccagaaagggcggcatcagagaggtgccctacttcaactacaacgccaagcccgccctggacatctggccctaccccagccccagacccaccttcggcatcacctggagatacagactgcagaccgtgaagagcctggccggcgtgagcctgatgctgagactgctgtgggccagcctgagatgggacgacatggccgccaaggccccccccggcggcggcaccaccagaaccgagaccagcgagaccgagatcaccaccaccgagatcatcaagagaagagacgtgggcccctacggcatcagaagcgagtactgcatcagaaagatcatctgccccatcggcgtgcccgagacccccaaggagacccccaccccccagagaaagggcctgagaagcagcgccctgagacccaagagacccgagacccccaagcagaccggccccgtgatcatcgagacctgggtggccgaggaggagctggagctgtgggagatcagagccttcgccgagagagtggagaaggagaaggcccaggccgtggagcagcaggccaagaagagactggagcagcagaagcccaccgtgatcgccaccagcaccaccagccccaccagcagcaccaccagcaccatcagccccgcccagaaggtgatggtggcccccatcagcggcagcgtgaccaccggcaccaagatggtgctgaccaccaaggtgggcagccccgccaccgtgaccttccagcagaacaagaacttccaccagaccttcgccacctgggtgaagcagggccagagcaacagcggcgtggtgcaggtgcagcagaaggtgctgggcatcatccccagcagcaccggcaccagccagcagaccttcaccagcttccagcccagaaccgccaccgtgaccatcagacccaacaccagcggcagcggcggcaccaccagcaacagccaggtgatcaccggcccccagatcagacccggcatgaccgtgatcagaacccccctgcagcagagcaccctgggcaaggccatcatcagaacccccgtgatggtgcagcccggcgccccccagcaggtgatgacccagatcatcagaggccagcccgtgagcaccgccgtgagcgcccccaacaccgtgagcagcacccccggccagaagagcctgaccagcgccaccagcaccagcaacatccagagcagcgccagccagccccccagaccccagcagggccaggtgaagctgaccatggcccagctgacccagctgacccagggccacggcggcaaccagggcctgaccgtggtgatccagggccagggccagaccaccggccagctgcagctgatcccccagggcgtgaccgtgctgcccggccccggccagcagctgatgcaggccgccatgcccaacggcaccgtgcagagattcctgttcacccccctggccaccaccgccaccaccgccagcaccaccaccaccaccgtgagcaccaccgccgccggcaccggcgagcagagacagagcaagctgagcccccagatgcaggtgcaccaggacaagaccctgccccccgcccagagcagcagcgtgggccccgccgaggcccagccccagaccgcccagcccagcgcccagccccagccccagacccagccccagagccccgcccagcccgaggtgcagacccagcccgaggtgcagacccagaccaccgtgagcagccacgtgcccagcgaggcccagcccacccacgcccagagcagcaagccccaggtggccgcccagagccagccccagagcaacgtgcagggccagagccccgtgagagtgcagagccccagccagaccagaatcagacccagcacccccagccagctgagccccggccagcagagccaggtgcagaccaccaccagccagcccatccccatccagccccacaccagcctgcagatccccagccagggccagccccagagccagccccaggtgcagagcagcacccagaccctgagcagcggccagaccctgaaccaggtgaccgtgagcagccccagcagaccccagctgcagatccagcagccccagccccaggtgatcgccgtgccccagctgcagcagcaggtgcaggtgctgagccagatccagagccaggtggtggcccagatccaggcccagcagagcggcgtgccccagcagatcaagctgcagctgcccatccagatccagcagagcagcgccgtgcagacccaccagatccagaacgtggtgaccgtgcaggccgccagcgtgcaggagcagctgcagagagtgcagcagctgagagaccagcagcagaagaagaagcagcagcagatcgagatcaagagagagcacaccctgcaggccagcaaccagagcgagatcatccagaagcaggtggtgatgaagcacaacgccgtgatcgagcacctgaagcagaagaagagcatgacccccgccgagagagaggagaaccagagaatgatcgtgtgcaaccaggtgatgaagtacatcctggacaagatcgacaaggaggagaagcaggccgccaagaagagaaagagagaggagagcgtggagcagaagagaagcaagcagaacgccaccaagctgagcgccctgctgttcaagcacaaggagcagctgagagccgagatcctgaagaagagagccctgctggacaaggacctgcagatcgaggtgcaggaggagctgaagagagacctgaagatcaagaaggagaaggacctgatgcagctggcccaggccaccgccgtggccgccccctgcccccccgtgacccccgccccccccgccccccccgcccccccccccagccccccccccccccccgccgtgcagcacaccggcctgctgagcacccccaccctgcccgccgccagccagaagagaaagagagaggaggagaaggacagcagcagcaagagcaagaagaagaagatgatcagcaccaccagcaaggagaccaagaaggacaccaagctgtactgcatctgcaagaccccctacgacgagagcaagttctacatcggctgcgacagatgccagaactggtaccacggcagatgcgtgggcatcctgcagagcgaggccgagctgatcgacgagtacgtgtgcccccagtgccagagcaccgaggacgccatgaccgtgctgacccccctgaccgagaaggactacgagggcctgaagagagtgctgagaagcctgcaggcccacaagatggcctggcccttcctggagcccgtggaccccaacgacgcccccgactactacggcgtgatcaaggagcccatggacctggccaccatggaggagagagtgcagagaagatactacgagaagctgaccgagttcgtggccgacatgaccaagatcttcgacaactgcagatactacaaccccagcgacagccccttctaccagtgcgccgaggtgctggagagcttcttcgtgcagaagctgaagggcttcaaggccagcagaagccacaacaacaagctgcagagcaccgccagctag

SEQ ID NO: 274774 - protein, 3046 aa, Artificial Sequence
  derived and/or modified sequence
MRGRRGRPPKQPAAPAAERCAPAPPPPPPPPTSGPIGGLRSRHRGSSRGRWAAAQAEVAPKTRLSSPRGGSSSRRKPPPPPPAPPSTSAPGRGGRGGGGGRTGGGGGGGHLARTTAARRAVNKVVYDDHESEEEEEEEDMVSEEEEEEDGDAEETQDSEDDEEDEMEEDDDDSDYPEEMEDDDDDASYCTESSFRSHSTYSSTPGRRKPRVHRPRSPILEEKDIPPLEFPKSSEDLMVPNEHIMNVIAIYEVLRNFGTVLRLSPFRFEDFCAALVSQEQCTLMAEMHVVLLKAVLREEDTSNTTFGPADLKDSVNSTLYFIDGMTWPEVLRVYCESDKEYHHVLPYQEAEDYPYGPVENKIKVLQFLVDQFLTTNIAREELMSEGVIQYDDHCRVCHKLGDLLCCETCSAVYHLECVKPPLEEVPEDEWQCEVCVAHKVPGVTDCVAEIQKNKPYIRHEPIGYDRSRRKYWFLNRRLIIEEDTENENEKKIWYYSTKVQLAELIDCLDKDYWEAELCKILEEMREEIHRHMDITEDLTNKARGSNKSFLAAANEEILESIRAKKGDIDNVKSPEETEKDKNETENDSKDAEKNREEFEDQSLEKDSDDKTPDDDPEQGKSEEPTEVGDKGNSVSANLGDNTTNATSEETSPSEGRSPVGCLSETPDSSNMAEKKVASELPQDVPEEPNKTCESSNTSATTTSIQPNLENSNSSSELNSSQSESAKAADDPENGERESHTPVSIQEEIVGDFKSEKSNGELSESPGAGKGASGSTRIITRLRNPDSKLSQLKSQQVAAAAHEANKLFKEGKEVLVVNSQGEISRLSTKKEVIMKGNINNYFKLGQEGKYRVYHNQYSTNSFALNKHQHREDHDKRRHLAHKFCLTPAGEFKWNGSVHGSKVLTISTLRLTITQLENNIPSSFLHPNWASHRANWIKAVQMCSKPREFALALAILECAVKPVVMLPIWRESLGHTRLHRMTSIEREEKEKVKKKEKKQEEEETMQQATWVKYTFPVKHQVWKQKGEEYRVTGYGGWSWISKTHVYRFVPKLPGNTNVNYRKSLEGTKNNMDENMDESDKRKCSRSPKKIKIEPDSEKDEVKGSDAAKGADQNEMDISKITEKKDQDVKELLDSDSDKPCKEEPMEVDDDMKTESHVNCQESSQVDVVNVSEGFHLRTSYKKKTKSSKLDGLLERRIKQFTLEEKQRLEKIKLEGGIKGIGKTSTNSSKNLSESPVITKAKEGCQSDSMRQEQSPNANNDQPEDLIQGCSESDSSVLRMSDPSHTTNKLYPKDRVLDDVSIRSPETKCPKQNSIENDIEEKVSDLASRGQEPSKSKTKGNDFFIDDSKLASADDIGTLICKNKKPLIQEESDTIVSSSKSALHSSVPKSTNDRDATPLSRAMDFEGKLGCDSESNSTLENSSDTVSIQDSSEEDMIVQNSNESISEQFRTREQDVEVLEPLKCELVSGESTGNCEDRLPVKGTEANGKKPSQQKKLEERPVNKCSDQIKLKNTTDKKNNENRESEKKGQRTSTFQINGKDNKPKIYLKGECLKEISESRVVSGNVEPKVNNINKIIPENDIKSLTVKESAIRPFINGDVIMEDFNERNSSETKSHLLSSSDAEGNYRDSLETLPSTKESDSTQTTTPSASCPESNSVNQVEDMEIETSEVKKVTSSPITSEEESNLSNDFIDENGLPINKNENVNGESKRKTVITEVTTMTSTVATESKTVIKVEKGDKQTVVSSTENCAKSTVTTTTTTVTKLSTPSTGGSVDIISVKEQSKTVVTTTVTDSLTTTGGTLVTSMTVSKEYSTRDKVKLMKFSRPKKTRSGTALPSYRKFVTKSSKKSIFVLPNDDLKKLARKGGIREVPYFNYNAKPALDIWPYPSPRPTFGITWRYRLQTVKSLAGVSLMLRLLWASLRWDDMAAKAPPGGGTTRTETSETEITTTEIIKRRDVGPYGIRSEYCIRKIICPIGVPETPKETPTPQRKGLRSSALRPKRPETPKQTGPVIIETWVAEEELELWEIRAFAERVEKEKAQAVEQQAKKRLEQQKPTVIATSTTSPTSSTTSTISPAQKVMVAPISGSVTTGTKMVLTTKVGSPATVTFQQNKNFHQTFATWVKQGQSNSGVVQVQQKVLGIIPSSTGTSQQTFTSFQPRTATVTIRPNTSGSGGTTSNSQVITGPQIRPGMTVIRTPLQQSTLGKAIIRTPVMVQPGAPQQVMTQIIRGQPVSTAVSAPNTVSSTPGQKSLTSATSTSNIQSSASQPPRPQQGQVKLTMAQLTQLTQGHGGNQGLTVVIQGQGQTTGQLQLIPQGVTVLPGPGQQLMQAAMPNGTVQRFLFTPLATTATTASTTTTTVSTTAAGTGEQRQSKLSPQMQVHQDKTLPPAQSSSVGPAEAQPQTAQPSAQPQPQTQPQSPAQPEVQTQPEVQTQTTVSSHVPSEAQPTHAQSSKPQVAAQSQPQSNVQGQSPVRVQSPSQTRIRPSTPSQLSPGQQSQVQTTTSQPIPIQPHTSLQIPSQGQPQSQPQVQSSTQTLSSGQTLNQVTVSSPSRPQLQIQQPQPQVIAVPQLQQQVQVLSQIQSQVVAQIQAQQSGVPQQIKLQLPIQIQQSSAVQTHQIQNVVTVQAASVQEQLQRVQQLRDQQQKKKQQQIEIKREHTLQASNQSEIIQKQVVMKHNAVIEHLKQKKSMTPAEREENQRMIVCNQVMKYILDKIDKEEKQAAKKRKREESVEQKRSKQNATKLSALLFKHKEQLRAEILKKRALLDKDLQIEVQEELKRDLKIKKEKDLMQLAQATAVAAPCPPVTPAPPAPPAPPPSPPPPPAVQHTGLLSTPTLPAASQKRKREEEKDSSSKSKKKKMISTTSKETKKDTKLYCICKTPYDESKFYIGCDRCQNWYHGRCVGILQSEAELIDEYVCPQCQSTEDAMTVLTPLTEKDYEGLKRVLRSLQAHKMAWPFLEPVDPNDAPDYYGVIKEPMDLATMEERVQRRYYEKLTEFVADMTKIFDNCRYYNPSDSPFYQCAEVLESFFVQKLKGFKASRSHNNKLQSTAS

SEQ ID NO: 274775 - protein, 822 aa, Artificial Sequence
  derived and/or modified sequence
MAAEGDPEWGPTPPSTSATTAARRAVNKVVYDDHESEEEEEEEDMVSEEEEEEDGDAEETQDSEDDEEDEMEEDDDDSDYPEEMEDDDDDASYCTESSFRSHSTYSSTPGRRKPRVHRPRSPILEEKDIPPLEFPKSSEDLMVPNEHIMNVIAIYEVLRNFGTVLRLSPFRFEDFCAALVSQEQCTLMAEMHVVLLKAVLREEDTSNTTFGPADLKDSVNSTLYFIDGMTWPEVLRVYCESDKEYHHVLPYQEAEDYPYGPVENKIKVLQFLVDQFLTTNIAREELMSEGVIQYDDHCRVCHKLGDLLCCETCSAVYHLECVKPPLEEVPEDEWQCEVCVAHKVPGVTDCVAEIQKNKPYIRHEPIGYDRSRRKYWFLNRRLIIEEDTENENEKKIWYYSTKVQLAELIDCLDKDYWEAELCKILEEMREEIHRHMDITEDLTNKARGSNKSFLAAANEEILESIRAKKGDIDNVKSPEETEKDKNETENDSKDAEKNREEFEDQSLEKDSDDKTPDDDPEQGKSEEPTEVGDKGNSVSANLGDNTTNATSEETSPSEGRSPVGCLSETPDSSNMAEKKVASELPQDVPEEPNKTCESSNTSATTTSIQPNLENSNSSSELNSSQSESAKAADDPENGERESHTPVSIQEEIVGDFKSEKSNGELSESPGAGKGASGSTRIITRLRNPDSKLSQLKSQQVAAAAHEANKLFKEGKEVLVVNSQGEISRLSTKKEVIMKGNINNYFKLGQEGKYRVYHNQYSTNSFALNKHQHREDHDKRRHLAHKFCLTPAGEFKWNGSVHGSKVLTISTLRLTITQYGENL

SEQ ID NO: 274776 - protein, 811 aa, Artificial Sequence
  derived and/or modified sequence
MVSEEEEEEDGDAEETQDSEDDEEDEMEEDDDDSDYPEEMEDDDDDASYCTESSFRSHSTYSSTPGRRKPRVHRPRSPILEEKDIPPLEFPKSSEDLMVPNEHIMNVIAIYEVLRNFGTVLRLSPFRFEDFCAALVSQEQCTLMAEMHVVLLKAVLREEDTSNTTFGPADLKDSVNSTLYFIDGMTWPEVLRVYCESDKEYHHVLPYQEAEDYPYGPVENKIKVLQFLVDQFLTTNIAREELMSEGVIQYDDHCRVCHKLGDLLCCETCSAVYHLECVKPPLEEVPEDEWQCEVCVAHKVPGVTDCVAEIQKNKPYIRHEPIGYDRSRRKYWFLNRRLIIEEDTENENEKKIWYYSTKVQLAELIDCLDKDYWEAELCKILEEMREEIHRHMDITEDLTNKARGSNKSFLAAANEEILESIRAKKGDIDNVKSPEETEKDKNETENDSKDAEKNREEFEDQSLEKDSDDKTPDDDPEQGKSEEPTEVGDKGNSVSANLGDNTTNATSEETSPSEGRSPVGCLSETPDSSNMAEKKVASELPQDVPVGDFKSEKSNGELSESPGAGKGASGSTRIITRLRNPDSKLSQLKSQQVAAAAHEANKLFKEGKEVLVVNSQGEISRLSTKKEVIMKGNINNYFKLGQEGKYRVYHNQYSTNSFALNKHQHREDHDKRRHLAHKFCLTPAGEFKWNGSVHGSKVLTISTLRLTITQLENNIPSSFLHPNWASHRANWIKAVQMCSKPREFALALAILECAVKPVVMLPIWRESLGHTRLHRMTSIEREEKEKVKKREETGRRRNDAASDMGKIHISS

SEQ ID NO: 274777 - DNA, 2436 bp, Artificial Sequence
  derived and/or modified sequence
atggtgagcgaggaggaggaggaggaggacggcgacgccgaggagacccaggacagcgaggacgacgaggaggacgagatggaggaggacgacgacgacagcgactaccccgaggagatggaggacgacgacgacgacgccagctactgcaccgagagcagcttcagaagccacagcacctacagcagcacccccggcagaagaaagcccagagtgcacagacccagaagccccatcctggaggagaaggacatcccccccctggagttccccaagagcagcgaggacctgatggtgcccaacgagcacatcatgaacgtgatcgccatctacgaggtgctgagaaacttcggcaccgtgctgagactgagccccttcagattcgaggacttctgcgccgccctggtgagccaggagcagtgcaccctgatggccgagatgcacgtggtgctgctgaaggccgtgctgagagaggaggacaccagcaacaccaccttcggccccgccgacctgaaggacagcgtgaacagcaccctgtacttcatcgacggcatgacctggcccgaggtgctgagagtgtactgcgagagcgacaaggagtaccaccacgtgctgccctaccaggaggccgaggactacccctacggccccgtggagaacaagatcaaggtgctgcagttcctggtggaccagttcctgaccaccaacatcgccagagaggagctgatgagcgagggcgtgatccagtacgacgaccactgcagagtgtgccacaagctgggcgacctgctgtgctgcgagacctgcagcgccgtgtaccacctggagtgcgtgaagccccccctggaggaggtgcccgaggacgagtggcagtgcgaggtgtgcgtggcccacaaggtgcccggcgtgaccgactgcgtggccgagatccagaagaacaagccctacatcagacacgagcccatcggctacgacagaagcagaagaaagtactggttcctgaacagaagactgatcatcgaggaggacaccgagaacgagaacgagaagaagatctggtactacagcaccaaggtgcagctggccgagctgatcgactgcctggacaaggactactgggaggccgagctgtgcaagatcctggaggagatgagagaggagatccacagacacatggacatcaccgaggacctgaccaacaaggccagaggcagcaacaagagcttcctggccgccgccaacgaggagatcctggagagcatcagagccaagaagggcgacatcgacaacgtgaagagccccgaggagaccgagaaggacaagaacgagaccgagaacgacagcaaggacgccgagaagaacagagaggagttcgaggaccagagcctggagaaggacagcgacgacaagacccccgacgacgaccccgagcagggcaagagcgaggagcccaccgaggtgggcgacaagggcaacagcgtgagcgccaacctgggcgacaacaccaccaacgccaccagcgaggagaccagccccagcgagggcagaagccccgtgggctgcctgagcgagacccccgacagcagcaacatggccgagaagaaggtggccagcgagctgccccaggacgtgcccgtgggcgacttcaagagcgagaagagcaacggcgagctgagcgagagccccggcgccggcaagggcgccagcggcagcaccagaatcatcaccagactgagaaaccccgacagcaagctgagccagctgaagagccagcaggtggccgccgccgcccacgaggccaacaagctgttcaaggagggcaaggaggtgctggtggtgaacagccagggcgagatcagcagactgagcaccaagaaggaggtgatcatgaagggcaacatcaacaactacttcaagctgggccaggagggcaagtacagagtgtaccacaaccagtacagcaccaacagcttcgccctgaacaagcaccagcacagagaggaccacgacaagagaagacacctggcccacaagttctgcctgacccccgccggcgagttcaagtggaacggcagcgtgcacggcagcaaggtgctgaccatcagcaccctgagactgaccatcacccagctggagaacaacatccccagcagcttcctgcaccccaactgggccagccacagagccaactggatcaaggccgtgcagatgtgcagcaagcccagagagttcgccctggccctggccatcctggagtgcgccgtgaagcccgtggtgatgctgcccatctggagagagagcctgggccacaccagactgcacagaatgaccagcatcgagagagaggagaaggagaaggtgaagaagagagaggagaccggcagaagaagaaacgacgccgccagcgacatgggcaagatccacatcagcagctag

SEQ ID NO: 274778 - DNA, 2436 bp, Artificial Sequence
  derived and/or modified sequence
atggtatctgaggaagaggaagaggaagacggcgacgctgaggagacccaggatagcgaggatgatgaggaagacgaaatggaggaagacgacgatgacagtgactaccctgaggaaatggaggatgacgacgatgatgcctcatactgtaccgagtctagtttccggtcccacagcacctactcgtctacccctggccgaagaaagccccgcgtgcatagacctcggtcacccattttggaggaaaaggacatccccccccttgaatttccaaagagcagtgaggacctcatggtgcccaacgagcatatcatgaatgtgattgctatttacgaggtcctcagaaactttggaaccgtgctgcggctgagccctttccgcttcgaggacttttgcgccgcgcttgtttctcaggaacagtgtacattaatggctgagatgcatgtggtgcttctgaaagccgtgctccgggaggaggatacatccaatactacctttgggcccgcggacctcaaggatagtgtgaactctactctgtattttatcgatggcatgacatggcctgaagtactgcgagtgtattgcgaaagtgataaggagtatcaccatgtcctgccctaccaggaggccgaggattatccctacggacctgtggagaataaaattaaggtgttacagttcttggtggaccagttccttacaaccaatatcgccagggaggagctgatgagtgagggtgtgattcagtatgatgatcattgcagggtctgccacaagttaggtgacctcctgtgttgtgagacttgctctgcagtttaccacttagagtgtgtgaaaccccctcttgaagaagttccagaagatgagtggcagtgcgaagtctgtgtggcgcataaggtccctggcgtaactgattgcgtcgctgagatacagaaaaataagccatacatccggcacgagcctataggttacgaccgcagtcgtcgtaagtattggttcctcaaccgcagactgataatcgaagaggataccgaaaacgagaatgagaagaagatttggtactactccacaaaggtgcagctggccgaactaatcgattgcctggataaggactactgggaggccgaactgtgtaaaatacttgaagaaatgcgtgaggaaatccatcgtcatatggatataacggaagacctgacaaataaagcgaggggttcaaataagagcttccttgccgccgccaatgaggaaatcctggaatctattcgcgccaagaagggtgacatcgacaatgttaagtcccctgaggaaacagaaaaagataagaacgaaaccgagaacgactctaaagacgctgagaaaaatcgggaggaattcgaggatcaatctttagagaaagacagcgacgataagacacccgacgacgaccctgagcagggcaagagtgaggagcctaccgaggttggcgacaaggggaactctgtatctgccaacctgggcgataatacaaccaatgcaacaagcgaggagactagcccctccgaagggcggtccccagtgggttgtctgtcggaaactcctgattcatcaaatatggctgaaaagaaggtagcctccgagcttcctcaggacgtgcccgtgggggatttcaagagcgagaagtccaatggggaactgtcagaatcgccaggtgcaggaaaaggggctagcgggtccacgcgtatcatcacccgactgaggaatccggattcaaaactctcccaactcaagtctcagcaggtcgctgcagccgctcatgaggccaacaagctgttcaaagaaggaaaggaggtcctcgtggtgaactcccagggtgaaataagtcgcctgtcaaccaaaaaggaggttatcatgaaaggcaatatcaacaattattttaagctcggtcaagagggcaaataccgggtctatcacaatcagtacagcactaactccttcgccctgaacaagcaccagcacagggaggaccatgataagagacgacacctggctcacaagttttgtttgactcccgctggggagttcaagtggaatggttccgtgcacggctctaaagtgctgacgatatcaaccttgaggctcactattacacagctagagaataatattcccagtagtttcttacacccgaattgggcatcccaccgggcaaactggattaaggccgtgcagatgtgtagtaaaccgagggagtttgccttagccctcgccatcctggaatgcgcagtgaagcccgtcgtgatgctgcccatatggcgcgagtcactcggccatacgcgcttgcaccgtatgaccagtatcgaacgtgaggaaaaggagaaagtgaagaaaagggaagagacgggccggcgccgcaatgatgccgcttcagacatgggcaagattcacatttccagctag

SEQ ID NO: 274779 - DNA, 2436 bp, Artificial Sequence
  derived and/or modified sequence
atggtgtctgaggaggaggaggaggaggatggagatgctgaggagacccaggacagtgaagatgatgaggaggatgagatggaggaggatgatgatgacagcgactacccagaggagatggaggatgatgatgatgatgccagctactgcacagagagcagcttccgcagccacagcacctacagcagcaccccaggaagaaggaagccccgggtgcaccggcccaggagccccatcctggaggagaaggacatcccccccctggagttccccaagagcagcgaggacctgatggtgcccaatgagcacatcatgaatgtcatcgccatctatgaggtgctgaggaactttggaacagtgctgcggctgagccccttccgctttgaggacttctgtgccgccctggtgtcccaggagcagtgcaccctgatggccgagatgcacgtggtgctgctgaaggctgtgctgcgggaggaggacaccagcaacaccaccttcggccctgctgacctgaaggacagcgtgaacagcaccctgtacttcattgatggcatgacctggccagaggtgctgcgggtgtactgtgagagtgacaaggagtaccaccacgtgctgccctaccaggaggccgaggactacccctacggccctgtggagaacaagatcaaggtgctgcagttcctggtggaccagttcctgaccaccaacatcgcccgggaggagctgatgtctgagggcgtcatccagtatgatgaccactgccgggtgtgccacaagctgggggacctgctgtgctgtgagacctgcagcgctgtgtaccacctggagtgtgtgaagccacccctggaggaggtgcctgaagatgagtggcagtgtgaggtgtgtgtggcccacaaggtgcctggggtgacagactgtgtggccgagatccagaagaacaagccctacatcagacatgagcccatcggctatgacaggagcaggaggaagtactggttcctgaacagaagactcatcatcgaggaggacacagaaaatgaaaatgagaagaagatctggtactacagcaccaaggtgcagctggccgagctgattgactgcctggacaaggactactgggaggccgagctgtgcaagatcctggaggagatgagggaggagatccaccgccacatggacatcacagaggacctgaccaacaaggcccggggcagcaacaagagcttcctggccgccgccaatgaggagatcctggagagcatccgggccaagaagggggacatcgacaacgtgaagagccctgaggagacagagaaggacaagaatgaaacagaaaatgacagcaaggatgctgagaagaaccgggaggagtttgaggaccagagcctggagaaggacagtgatgacaagaccccagatgatgatcctgagcagggcaagtctgaggagcccacagaggtgggggacaagggcaacagcgtgtctgccaacctgggggacaacaccaccaatgccaccagcgaggagaccagccccagcgagggccgcagccctgtgggctgcctgtctgagaccccagacagcagcaacatggccgagaagaaggtggccagcgagctgccccaggatgtgcctgtgggggacttcaagtctgagaagagcaatggagagctgtctgagagccctggggccggcaagggggccagcggcagcacccgcatcatcacccggctgagaaatccagacagcaagctgagccagctgaagagccagcaggtggccgccgccgcccacgaggccaacaagctgttcaaggagggcaaggaggtgctggtggtgaacagccagggcgagatcagccggctgagcaccaagaaggaggtgatcatgaagggcaacatcaacaactacttcaagctgggccaggagggcaagtacagagtgtaccacaaccagtacagcaccaacagctttgccctgaacaagcaccagcacagagaagatcatgacaagaggaggcacctggcccacaagttctgcctgaccccagctggggagttcaagtggaatggatctgtgcacggcagcaaggtgctgaccatcagcaccctgcggctgaccatcacccagctggagaacaacatccccagcagcttcctgcaccccaactgggccagccaccgggccaactggatcaaggctgtgcagatgtgcagcaagccccgggagtttgccctggccctggccatcctggagtgtgctgtgaagcctgtggtgatgctgcccatctggagggagagcctgggccacacccggctgcacaggatgaccagcattgagcgggaggagaaggagaaggtgaagaagcgggaggagactggaagaagaagaaatgatgctgccagtgacatgggcaagatccacatcagcagctag

SEQ ID NO: 274780 - DNA, 2436 bp, Artificial Sequence
  derived and/or modified sequence
atggtgagcgaggaggaggaggaggaggacggcgacgccgaggagactcaagactctgaggacgacgaggaggacgagatggaggaagacgatgatgatagcgactatcctgaagagatggaggacgacgatgatgacgcttcctattgtacagagagcagtttcagatctcactcaacctactcatccacccccggccggcgcaagccaagggtacatcggcctcgctctccgatactggaggagaaggacatccccccgttggaattccctaaatcatcagaggacctgatggtaccgaacgagcatatcatgaatgtgatcgccatctacgaggttttaagaaacttcggtaccgtgctgcggctgtccccattcagatttgaggatttctgtgcggccctcgtgtcgcaagaacagtgcaccctcatggctgagatgcatgtggtgctactcaaggccgttctgcgagaggaagacacctcaaatactacctttggtcccgcggacttaaaggactctgttaattcaactctgtactttatcgacggcatgacctggccagaggtgctgagggtgtactgcgaatccgataaggagtatcaccacgtcctaccataccaggaggcggaggattatccttacggtcctgtggagaacaaaatcaaggtgctccagttcctcgttgaccagtttttgaccacaaatatcgcccgggaggaactgatgagcgagggcgtcatacaatacgacgatcactgtcgcgtttgtcataaactcggggacctcctttgttgcgaaacctgttccgctgtgtaccatctggagtgcgtgaaacctcccctggaggaggtgccagaggacgagtggcaatgtgaagtgtgcgtggcccacaaggtccctggggtgaccgactgtgtcgcggaaatccagaaaaataagccatacatcagacatgaacctattggatacgacagatccagacgcaaatactggttcttgaataggcgcctgatcatcgaagaggatacagaaaatgagaacgaaaagaagatatggtactactctaccaaggtacaactcgcagagctgatcgactgccttgacaaagactactgggaggcagaactgtgtaagattctggaagaaatgcgcgaggagatacaccgccacatggatataacagaggatttgactaataaggcgcggggctccaataagagcttcctagcggctgctaacgaggagatcctggaaagcattcgtgctaaaaagggggatattgacaacgtcaaaagtccagaagaaacggaaaaggataaaaatgagacagagaacgatagtaaggatgcggaaaagaatcgggaagagttcgaggaccaatccctcgaaaaggactctgacgacaagacccctgacgatgacccagaacaaggcaaaagcgaagagccaactgaagttggggacaaaggcaatagtgtgtcagctaacctgggagacaataccacaaacgccactagcgaagagactagcccaagtgagggccggagtcccgtgggctgcctgtctgagacaccggactcaagcaatatggccgaaaaaaaggtggcttccgaactcccccaagacgtacctgtaggcgacttcaaatcagagaagagtaatggcgaactcagcgagagtccgggggccggcaaaggggcctccggatctactaggattattaccagactgcgcaatcccgacagcaaactgagtcaactgaagtcccaacaggtggccgctgcggcccatgaggccaataagctgtttaaggaagggaaagaagtgcttgtggtaaactcacaaggagagatcagtcggcttagtacaaagaaggaggttattatgaaaggcaacattaacaattacttcaaactggggcaggagggtaaatatagggtttatcataatcagtactccaccaacagcttcgccctgaacaaacaccaacacagagaagaccatgataaacgccggcatctagcccataagttctgtctgaccccggctggggaattcaaatggaacggatcggtgcacggcagcaaggtgttaaccatttccacactgaggttaaccattactcaattagaaaacaacatcccgtcaagttttttgcacccaaattgggcaagccaccgggcaaactggattaaagccgtgcagatgtgctccaaaccacgggagtttgcactggccttggccattttggagtgtgctgtgaagcccgtcgtcatgctccctatctggcgcgagtccctgggccacaccaggctgcatcggatgaccagcatcgagcgtgaggaaaaagaaaaggtgaagaagagagaagagacaggtaggcgcagaaatgatgctgccagtgatatggggaagatccacatcagctcatag

SEQ ID NO: 274781 - DNA, 2436 bp, Artificial Sequence
  derived and/or modified sequence
atggtatcagaggaagaggaggaggaggacggagacgcagaggagacgcaagactctgaggacgacgaagaagatgaaatggaggaagacgacgatgacagcgactacccagaagaaatggaggacgacgacgatgacgctagctattgcaccgagtcgtcattccgctcgcacagcacatactccagtactcccggacggcgtaaacctagggtccataggccacgaagccccattttagaagagaaggacatcccacccctggagttccccaaatcaagcgaagatctgatggtacctaatgagcatatcatgaacgtcatcgccatctacgaagtattgaggaatttcgggaccgtgctgcgattgagcccattcagatttgaggatttctgcgccgctctagtgagtcaggagcagtgcaccctaatggccgaaatgcacgtggtcctgctcaaggcagttcttcgcgaggaggacacttctaacacaacgtttgggccagccgacctaaaggactccgtgaacagcacgctgtacttcattgacggtatgacgtggcctgaagtgcttcgcgtgtactgtgagtctgataaggagtaccatcacgtcctaccataccaggaggcggaggattacccttacggccctgttgagaacaagattaaagtactgcaatttcttgtagatcagttccttaccacgaatattgcccgagaggagcttatgtccgagggcgtgatacagtatgacgatcattgtcgcgtctgccataagttgggcgatttgttatgttgtgagacttgcagtgcagtgtaccatttagagtgcgtgaaaccccctttggaggaagtccctgaagatgaatggcaatgcgaggtttgcgtggcacacaaagttcctggcgtgactgattgtgtggctgagatccagaaaaataagccatatatacgccacgagcccattggatacgacagatctcgtaggaagtactggtttctgaaccgccgacttataattgaagaagacacggagaatgaaaacgaaaaaaagatatggtactatagcactaaggtgcagttagcagagcttattgattgtctcgacaaagactactgggaagctgaactttgcaaaattctggaagagatgcgagaggagatacatagacacatggacatcactgaggatctgactaataaagcaagagggtccaataagagcttccttgccgcagccaacgaagagatcctcgaatcaatacgagcaaagaaaggagatattgataatgtcaagtcacccgaggagaccgagaaggataagaatgaaactgaaaacgacagcaaagacgccgagaagaatagggaagaattcgaggatcagtcactcgagaaagatagcgatgacaaaactcctgacgacgaccccgagcaggggaagtcagaggagcccactgaggtcggggataaaggcaactccgtttctgccaatctgggcgataacaccaccaatgccacatcagaagagactagtccgtccgagggcagaagccctgtcggctgcctttctgagacacccgattctagtaacatggccgaaaaaaaagtggccagcgaactgccacaggatgtgccagttggagacttcaagagtgagaaatccaacggagagctctccgaaagcccaggggcaggcaagggagcatctggttccaccaggataatcactcgcctgcgcaacccagacagcaagctaagccaactgaagagccagcaagtggcggctgccgcacatgaggccaacaagttgttcaaagagggcaaagaagtgctggtcgtgaactcccagggggaaatttctcggctgtccacaaaaaaagaggtgataatgaaaggtaacataaataattattttaaacttggccaagaaggcaagtatagggtgtatcataaccagtactctaccaactcttttgccctgaacaagcatcagcaccgcgaggaccacgacaagcggaggcaccttgctcacaaattctgcttgacccctgctggcgaatttaagtggaacgggtccgttcatggatctaaagtgctcaccattagcactctccgcttgacgatcacacagctagagaataacattccctcctctttcctgcatccaaattgggcctctcaccgggctaattggatcaaagcagtgcaaatgtgcagcaaaccccgagagttcgctcttgcccttgctattctggaatgcgctgtcaagccagtagtcatgttgccaatttggagagagagccttggccacaccagattacaccgtatgacgagcatcgagcgagaggaaaaggaaaaagtgaaaaagagggaagagacagggagaaggcgtaatgacgccgcatccgatatgggtaagatccatatttctagttag

SEQ ID NO: 274782 - DNA, 2633 bp, Artificial Sequence
  derived and/or modified sequence
aaagtggtgtacgatgaccacgagagcgaggaggaggaggaagaggaggacatggtctccgaggaggaggaggaggaggacggcgacgccgaggagacccaggattctgaggacgacgaggaggatgagatggaagaggacgacgatgactccgattatccggaggagatggaagacgacgacgacgacgccagttactgcacggaaagcagcttcaggagccatagtacctacagcagcactccaggtaggcgaaaaccaagagtacatcggcctcgttctcctatattggaagaaaaagacatcccgccccttgaatttcccaagtcctctgaggatttaatggtgcctaatgagcatataatgaatgtcattgccatttacgaggtactgcggaactttggcactgttttgagattatctccttttcgctttgaggacttttgtgcagctctggtgagccaagagcagtgcacactcatggcagagatgcatgttgtgcttttgaaagcagttctgcgtgaagaagacacttccaatactacctttggacctgctgatctgaaagatagcgttaattccacactgtatttcatagatgggatgacgtggccagaggtgctgcgggtgtactgtgagagtgataaggagtaccatcacgttcttccttaccaagaggcagaggactacccatatggaccagtagagaacaagatcaaagttctacagtttctagtcgatcagtttcttacaacaaatattgctcgagaggaattgatgtctgaaggggtgatacagtatgatgaccattgtagggtttgtcacaaacttggggatttgctttgctgtgagacatgttcagcagtataccatttggaatgtgtgaagccacctcttgaggaggtgccagaggacgagtggcagtgtgaagtctgtgtagcacacaaggtgcctggtgtgactgactgtgttgctgaaatccaaaaaaataaaccatatattcgacatgaacctattggatatgatagaagtcggaggaaatactggttcttgaaccgaagactcataatagaagaagatacagaaaatgaaaatgaaaagaaaatttggtattacagcacaaaggtccaacttgcagaattaattgactgtctagacaaagattattgggaagcagaactctgcaaaattctagaagaaatgcgtgaagaaatccaccgacacatggacataactgaagacctgaccaataaggctcggggcagtaacaaatcctttctggcggcagctaatgaagaaattttggaatccataagagccaaaaagggagacattgataatgttaaaagcccagaagaaacagaaaaagacaagaatgagactgagaatgactctaaagatgctgagaaaaacagagaagaatttgaagaccagtcccttgaaaaagacagtgacgacaaaacaccagatgatgaccctgagcaaggaaaatctgaggagccaacagaagttggggataaaggtaactctgtgtcagcaaatcttggcgacaacacaacaaatgcaacttcagaagagactagtccctctgaagggaggagccctgtggggtgtctctcagaaacccccgatagcagcaacatggcagagaagaaggtggcatctgagctcccccaggatgtgccagtaggtgatttcaaatcggagaagtccaacggggagctaagtgaatctcctggagctggaaaaggagcatctggctcaactcgaatcatcaccagattgcggaatccagatagcaaacttagtcagctgaagagccagcaggtggcagccgctgcacatgaagcaaataaattatttaaggagggcaaagaggtactggtagttaactctcaaggagaaatttcacggttgagcaccaaaaaggaagtgatcatgaaaggaaatatcaacaattattttaaattgggtcaagaagggaagtatcgcgtctaccacaatcaatactccaccaattcatttgctttgaataagcaccagcacagagaagaccatgataagagaaggcatcttgcacataagttctgtctgactccagcaggagagttcaaatggaacggttctgtccatgggtccaaagttcttaccatatctactctgagactgactatcacccaattagaaaacaacatcccttcatcctttcttcatcccaactgggcatcacatagggcaaattggatcaaggcagttcagatgtgtagcaaacccagagaatttgcattggctttagccattttggagtgtgcagttaaaccagttgtgatgctaccaatatggcgagaatctttaggacataccaggttacaccggatgacatcaattgaaagagaagaaaaggagaaagtcaaaaaaagagaagaaacaggaagaagaagaaacgatgcagcaagcgacatgggtaaaatacacatttccagttaagcatcaggtttggaaacaaaaaggtgaagagtacagagtgacaggatatggtggttggagctggattagtaaaactcatgtttataggtttgttcctaaattgccaggcaatactaatgtgaattacagaaagtcgttagaaggaa

SEQ ID NO: 274783 - DNA, 4039 bp, Artificial Sequence
  derived and/or modified sequence
gactgtactcccaggcccaggccagcagctaatgcaagctgcaatgccaaatggtactgttcagcgattcctctttaccccattggcaacaacagccaccacagccagcaccaccaccaccactgtttccacgacagcagcaggtacaggtgaacaaaggcagagtaaactgtcaccccagatgcaggtacatcaagacaaaaccctgccaccagctcagtcatcaagtgtgggtccagcagaagcccagccacagactgctcagccttcagctcagccccagccccaaacccagccccagtccccagctcagcctgaagttcagactcagcctgaagttcagacccaaacaactgtttcatcccatgtcccttctgaagcacaacccacccacgcacagtcatccaagccccaagttgcagcacagtctcagcctcaaagtaatgtccaaggacagtctcctgttcgtgtccaaagtccatcacagactcgaatacgtccatcaactccatcccaactgtctcctggacaacaatcccaggttcagactacaacctcacaaccgattccaattcaaccacatacatctcttcagataccttcccaaggccagccacagtcacaaccccaggtggtgatgaagcataatgctgtaatagaacatttaaaacagaaaaagagcatgactccagctgaaagagaagagaatcaaagaatgattgtctgtaaccaggtgatgaagtatattttggataagatagataaagaagaaaaacaggcagcaaaaaaacggaagcgtgaagagagtgtggagcagaaacgtagcaagcagaatgccactaagctgtcagctctgctcttcaagcacaaagagcagctcagagccgagatcctgaagaagagagcactcctggacaaggatctgcaaattgaagtgcaggaagagctgaagagagacctgaaaattaagaaagaaaaagacctgatgcagttggctcaggccacagcagtagctgcaccctgccccccagtgacaccagctcctccagcccctccagcccctccaccttcacctccccctccacctgctgtgcaacacacaggccttctgtccacgcccaccttacctgctgcttcccagaagaggaagcgggaagaggaaaaagactccagctcaaagtccaagaaaaagaaaatgatctctactacctcaaaggaaactaagaaggacacaaagctttactgtatctgtaaaacgccttatgatgaatctaagttctatattggctgtgatctttgtactaactggtatcatggagaatgtgttggcatcacagaaaaggaggctaagaaaatggatgtgtacatctgtaatgattgtaaacgggcacaagagggcagcagtgaggaattgtactgtatctgcagaacaccttatgatgagtcacaattttatattggctgtgatcggtgtcagaattggtaccatgggcgctgcgttggcatcttgcaaagtgaggcagagctcattgatgagtatgtctgtccacagtgccagtcaacagaggatgccatgacagtgctcacgccactaacagagaaggattatgaggggttgaagagggtgctccgttccttacaggcccataagatggcctggcctttccttgaaccagtagaccctaatgatgcaccagattattatggtgttattaaggaacctatggaccttgccaccatggaagaaagagtacaaagacgatattatgaaaagctgacggaatttgtggcagatatgaccaaaatttttgataactgtcgttactacaatccaagtgactccccattttaccagtgtgcagaagttctcgaatcattctttgtacagaaattgaaaggcttcaaagctagcaggtctcataacaacaaactgcagtctacagcttcttaaagttcagcgtgttaacctaacataaaacacagcaagaatctggttgtctgaactattttaaattaaggagccagatgtttttagtcaggctatcctgacaagacttgacctaaacttcgtttttattggtcataacagtccaattatattcttggccaattttgtccaacggacaagaaaaaagcaaagtcaacgacaccattatcttgtcaagatcagatggttttactattgtggcagaagcgagaaaactttgtttattgaaaaaaaaagaaaaagaaagcaagaaaaaaagatactatggggtcaagtgtaactccatggaaatgccacgtctgctcttcagtgaagaagctggtttagagtctcacagaaaacttttgactgtatttatttattgttgcaaaaaagacgcttttttattgctgccctcatttgtcagctaattattttttcttataaaatccagccccggttacatataatcatctgtatcttatcatgattcctgtaggtaaaagtacaagacgacctctagatgtcttttctttctatgaaaggagctgctatgtacacatgtgcacacacacacaactgggaatcaacaatgagtttattgttcatggtagattaaaattaagcttgcataaaggttgggctaagtggtcctggactacagactctgttgccttgaatataacagtacaatttgtcaattactctgcaccaggctaaaatgagtaaaatctatttgaaggtatcttgtttgtaaacatttgtcagattctaatttttttcttttgtattaaaattcaactatggatgtatatgaaacaaaataaatggagataatttttctcccacagacagaggtgtctttgaatgtgcgctaatgattatctgtaagcctttgtggggagggaggcctgcaaggtcatgaaaggcagaagagtctaattgtgcctggatttctccaggacagcagtggcccctcgttttatcattcccagtccattgtcatcacgtcagagaaaaatcttcaggggtgctaatcctgttgcatcagttgatcatactaacgagaacggtaatgcgacaagatacacattgccttcatctgtacattctgtgataccaggcaaattaccaattacacacagctacttatattttatgaagggcattttttagatgacctcatcctctgtgttatttgttgattgggtttgttttctgtttgttggtttgtttgtttcttccacgtaaggaaaagtagtgtaaacagtagcgagaaaatggaaaccacagaggaagatgtattttgcatgtttttcctttcagtgttcttacacgttgtatcactgcattgtggtaatagcttctataaaatctgccatagttggattatgcagctttgcaaaaatttttactagattttgcactaactcatattagctttgtcctaccaacttctggaatttatctaattattgtttttcaaagtttctttccttttaatgtttccctgctatgcaaaacctttcccagacctcagtttcttaaaagaaagatgttgctacagttcccgattctttcttattacaggctcaggtgtacaggttattctgggttaattttatctaatgaagcccattcctttttgtacataaagatgtcacttaaacttatgcttacaaactaaagactaatcgctcaatatgaaaacatgaaaaaatttttgcttaaagtattaagatggaagtagttaaatatgggttattttgtccttttacttttttaaaaaatgttacatattgtatgcactgtgctgatgcaagaattctacattttaatgagttataaaattattctgcatctcatcacgtcacagtatttctgtactatttattcatatatataaatatatatgggcttaatcatttaaaatttgttgcagcaagaactttcctacctgtaggcaatagattgctatgtttttaacaaattgtggcaaattctaaacagcaattcttttgtacgtaataggacatttcatcctagaaaaataaagtaatgtttttgacattg

SEQ ID NO: 274784 - protein, 407 aa, Artificial Sequence
  derived and/or modified sequence
MVLFSDSSLPHWQQQPPQPAPPPPLFPRQQQVQVNKGRVNCHPRCRYIKTKPCHQLSHQVWVQQKPSHRLLSLQLSPSPKPSPSPQLSLKFRLSLKFRPKQLFHPMSLLKHNPPTHSHPSPKLQQSQPQSNVQGQSPVRVQSPSQTRIRPSTPSQLSPGQQSQVQTTTSQPIPIQPHTSLQIPSQGQPQSQPQVVMKHNAVIEHLKQKKSMTPAEREENQRMIVCNQVMKYILDKIDKEEKQAAKKRKREESVEQKRSKQNATKLSALLFKHKEQLRAEILKKRALLDKDLQIEVQEELKRDLKIKKEKDLMQLAQATAVAAPCPPVTPAPPAPPAPPPSPPPPPAVQHTGLLSTPTLPAASQKRKREEEKDSSSKSKKKKMISTTSKETKKDTKLYCICKTPYDES

SEQ ID NO: 274785 - DNA, 567 bp, Artificial Sequence
  derived and/or modified sequence
aggtcgcgccaggcagggcccccttcgcggcgggcccgcgcgggtcccttccacagcaaggccacgcggtccccctagcctctcccgagtcccagctgcggcgtgggcgcgttcccatcgggactcgtggacgcgtcctgctcccagctgcctttcgtctagagaaaggcaaccagatgtttgaggagggcttggtggacaaaggtgacattcatgctccactatatgcaaaactggccaaaggagaggaaatggaaaaatatcttggctctgacaattggttcagatgcagtaaataaaaggaaaatgaacttaagaaatgcttaatggatgcctaaagcagcttgtgatcactggaagatcaattcttttatcatccatactttagaggcagcaaaatcgaagctttcttcaccagtaaaagggaatgcgaagtaaatcacaacaaaattccatttcaccttcatcacactagaatagccaaacttaaaagtctgaattgggtaaaaataagtgactaaagaagcagacctgggaatcacctaacatgtcgaggaggagatttga

SEQ ID NO: 274786 - DNA, 2861 bp, Artificial Sequence
  derived and/or modified sequence
agagaggcagataattcccaaacagaagacccccaaggcggagggccctggggctggactcctggcccccaggaggcgcgggcctggcccagaggcgacaggaagccaggacgccggggattgtctctcgcaaccgcagcccagccccagtccgggaggaagttctgccgggcgctctccgccggtgcctcactggttatagtgctatacaggaaacctggcagcgccggagccgcgcggtcgaggagggagcgcgggacgccgagcccacgcgcgcctgccgggacaagtggagacgaggccggcgagcggacgccccgaggttggcgaaggagctgtggccgggtccccttcttatccagcccgagacactgcgctccggtgggcgtccctgcgctgggaatccctctcggagtttttccaggcccggccgggttgctccgggaaaggccctgttgggggaggtgggcccggagctggcaggtctacaatccggttggaagggctcgcagtgggtgattcagggtgccaatgacctccccgcgaacgggaacgcccgcactagacaaccagccccagaccggcattcccagagccgcaggcgggagggacgcagggactccgggacagcaaatccccgggggagaagggaagggggaaggcgggacaggggaggcccaccctccttgggctccgctagcgaccagccagcgccccttcagacgcagccttcctggctccggaccccggctttctgctccggtcctcgtcccaatgccccccaaggtccccagcagaggcattcaggttcctcctcgccccgcccagacgcagcttctttgggtatgggtgacagcactcctgagcgtcgctgtccctattcgctgccgttgccagctccgattccgcgaaacctctccggcaccacctcggaagccccgcccagggcgatggtccgggcctaacctgccggccccgcccacccggcccttgggctccctgaggcccgcccagcagacaccggagagcaatggtgtgatctccgcacactgcaacctctgcctccagggttcaagtggttctcctgcctcagcctcccaagcagatgggactacaggtactggtagttaactctcaaggagaaatttcacggttgagcaccgaaaagaaagtggtcatgaaaggaagtatcaacaattatcttaaattgggtcaagaagggaagtatcgcgtctaccacaatcaatactccactaattcatttgctttgaataagcaccagcacagagaagaccatgataagagaaggcatcttgcacataagttctgtctgactccagcaggagagttcaaatggaacggttctgtccatgggtccaaagttcttaccatatctactctgagactgactatcacccaattagaaaacaacatcccttcatcctttcttcatcccaaccgggcatcacatagggcaaactggatcaaggcagttcagatgtgtagcaaactcagagaatttgcattggctttagccattttggagtgtgcagttaaaccagttgtgatgctaccaatatggcgagaatctttaggacataccagctttctccctttgtctcataaccatgtccaccaatgagaatgctaatacacaagctgcccatcttcacagatctaagaacaagggaaaggacagtacagaaacgaggcgtcacagaatagaggtcaatgtggagctgaggaaagctaagaaggatgaccagatgctgaagaggagaaatgtaagctcatttcctgatgatgctacttctccgctgcaggaaaactgcaacaaccagactcctgccctaagagccatagggaatatcgtcactggtacagatgaacagactcaggttgtgattgatgcaggagcactcgccgtctttcccagcctgctcaccaaccccaaaactaacattcagaaggaagctacgtggacaatgtcaaacatcacagccagccgccaggaccagatacagcaagttgtgaatcatggattagtcccattccttgtcagcgatctctctaagattttgagacacaaaaggaagctgtatgggccgtggaacagttgaacagattgtgtaccttgttcactgtggcataatagaaccgttgatgaacctcttacctgcaaaagataccaagattattctggttatcctggatgccatttcaaatatctttcaggctgctgagaaactaggtgaaactgagaaacttagtataatgattgaagaatgtggaggcgtagacaaaattgaagctctacaaaaccatgaaaatgagtctgtatataaggcttcattaagcttaactgagaagtatttctctgtagagctgccagagcagagctgagccacccattgctggagaggacatccacgcaggcctggacgagccggactgccttactaaggatttcctccgtatctgactgcaactcagcactcagctgcatgcgggacaggaagaggaagatcaaaacgttgtgccagaaactacctctgaaggctacactttccaagttcaggatggggctcctgggacctttaacttttagatcatgtagctgaggcataaatttgttgtgtactatgtttggtattttgtcttattgtttctctactaagaactctttcttaaatgtggtttgttattgtagcactttttacactgaaactatacttgaacagttccaactgtacatactgtatgaagcttgtcctctgactaggtttctaatttctatgtggaatttcctatcttgcagcatcctgtaaataaacattcaagtccacccttttcttgacttc

SEQ ID NO: 274787 - protein, 703 aa, Artificial Sequence
  derived and/or modified sequence
MADRRRQRASQDTEDEESGASGSDSGGSPLRGGGSCSGSAGGGGSGSLPSQRGGRTGALHLRRVESGGAKSAEESECESEDGIEGDAVLSDYESAEDSEGEEGEYSEEENSKVELKSEANDAVNSSTKEEKGEEKPDTKSTVTGERQSGDGQESTEPVENKVGKKGPKHLDDDEDRKNPAYIPRKGLFFEHDLRGQTQEEEVRPKGRQRKLWKDEGRWEHDKFREDEQAPKSRQELIALYGYDIRSAHNPDDIKPRRIRKPRYGSPPQRDPNWNGERLNKSHRHQGLGGTLPPRTFINRNAAGTGRMSAPRNYSRSGGFKEGRAGFRPVEAGGQHGGRSGETVKHEISYRSRRLEQTSVRDPSPEADAPVLGSPEKEEAASEPPAAAPDAAPPPPDRPIEKKSYSRARRTRTKVGDAVKLAEEVPPPPEGLIPAPPVPETTPTPPTKTGTWEAPVDSSTSGLEQDVAQLNIAEQNWSPGQPSFLQPRELRGMPNHIHMGAGPPPQFNRMEEMGVQGGRAKRYSSQRQRPVPEPPAPPVHISIMEGHYYDPLQFQGPIYTHGDSPAPLPPQGMLVQPGMNLPHPGLHPHQTPAPLPNPGLYPPPVSMSPGQPPPQQLLAPTYFSAPGVMNFGNPSYPYAPGALPPPPPPHLYPNTQAPSQVYGGVTYYNPAQQQVQPKPSPPRRTPQPVTIKPPPPEVVSRGSS

SEQ ID NO: 274788 - protein, 641 aa, Artificial Sequence
  derived and/or modified sequence
MADRRRQRASQDTEDEESGASGSDSGGSPLRGGGSCSGSAGGGGSGSLPSQRGGRTGALHLRRVESGGAKSAEESECESEDGIEGDAVLSDYESAEDSEGEEGEYSEEENSKVELKSEANDAVNSSTKEEKGEEKPDTKSTVTGERQSGDGQESTEPVENKVGKKGPKHLDDDEDRKNPAYIPRKGLFFEHDLRGQTQEEEVRPKGRQRKLWKDEGRWEHDKFREDEQAPKSRQELIALYGYDIRSAHNPDDIKPRRIRKPRYGSPPQRDPNWNGERLNKSHRHQGLGGTLPPRTFINRNAAGTGRMSAPRNYSRSGGFKEGRAGFRPVEAGGQHGGRSGETVKHEISYRSRRLEQTSVRDPSPEADAPVLGSPEKEEAASEPPAAAPDAAPPPPDRPIEKKSYSRARRTRTKVGDAVKLAEEVPPPPEGLIPAPPVPETTPTPPTKTGTWEAPVDSSTSGLEQDVAQLNIAEQNWSPGQPSFLQPRELRGMPNHIHMGAGPPPQFNRMEEMGVQGGRAKRYSSQRQRPVPEPPAPPVHISIMEGHYYDPLQFQGPIYTHGDSPAPLPPQGMLVQPGMNLPHPGLHPHQTPACPDSQTLRHCESCLCWSTVFSCKDFSMCGGVFCYCFKGCPFVISIVTWR

SEQ ID NO: 274789 - DNA, 108 bp, Artificial Sequence
  derived and/or modified sequence
agccctaataagctcctgtttgaccctagggtaggtgggcgggtgagtcacgtgtttttcctcttccctccatttgtcctgctaccaggcccccctgggctgccatag

SEQ ID NO: 274790 - DNA, 2112 bp, Artificial Sequence
  derived and/or modified sequence
atggcggatcgaagaagacagcgagctagccaggacacagaagacgaggagtctggcgcatcaggctctgattccggtggcagcccactgagggggggggggagttgctccggctccgcgggtggaggtgggtcagggagcctgccatctcagcggggggggagaaccggcgcactccacctccggagagtggagtcggggggggctaagagtgctgaagaatctgagtgcgagtctgaggatgggattgaaggagatgcggtcctttcggattatgagtccgctgaagacagtgagggagaggaaggcgaatattcagaggaagagaactctaaggtcgagctgaaatctgaggctaacgacgcggttaacagcagcactaaggaagagaagggcgaagaaaagccagacactaaatcaacagtgaccggggaacgccagtcgggcgatggccaggagagcacagagccggttgaaaacaaggtcgggaagaagggaccgaaacatttggacgatgatgaggaccggaaaaaccccgcttatattcctaggaaaggcctgtttttcgagcatgacctcagaggacagacccaggaagaggaagtgagacccaaaggacgtcagcgaaagctgtggaaggacgaaggcaggtgggagcacgacaaattcagggaggatgaacaagccccaaaaagtagacaggagctcatcgctctgtatggctacgatatacggtccgcacataatcctgatgatatcaagccgcgccgtattcgcaaaccccgttacgggtcaccgccgcagcgggatcccaactggaacggtgagaggttgaataaatctcacaggcaccaggggctgggtggcactctccccccacgcacctttatcaataggaatgccgctggcacaggtcgaatgtccgcccctcgcaactactcaaggtctggaggatttaaggaggggagagccggattccggcccgtggaagccgggggccaacacggggggagatctggagagacagttaaacacgagatctcctaccgctcacgacgactcgagcagaccagtgtccgggatccatctccagaggcagacgcacctgtattggggagcccagagaaagaagaggccgcttctgaacccccagctgccgctccagacgccgctcctcctccccccgacagaccaatcgagaaaaagtcttactccagagcccgccgcacaaggacgaaagtgggagatgccgtgaagttggccgaggaagttccacctccccctgaggggctgatcccagctccacccgtgcccgaaacaactcctacgcctcccactaaaaccggtacttgggaagctcccgtcgattcgagcacttctggcctggaacaggacgttgctcagcttaatattgcagagcagaactggtccccaggccagccaagcttcttgcagcccagagagctgaggggcatgcccaaccacatacacatgggtgccggccctcctccacaattcaaccggatggaggaaatgggagtgcagggcgggcgagccaagagatacagcagtcagcggcaaaggccggtgccagagccacccgctccccccgtccatatctcgattatggaaggccattactatgatcccctgcagtttcaggggcccatctacacacacggcgattcacctgccccccttccgccccaggggatgctggttcagcctgggatgaacctacctcatcctggcctgcacccacaccagaccccggcacccctccctaacccaggactctatccccccccggtgtcaatgtcgcctggtcagccccctcctcaacagttgctggctccaacatacttttcagcccccggggtgatgaatttcggaaatccttcctacccttacgcaccaggagctctgccccccccacccccacctcatctatacccaaacacccaggccccgagtcaggtctatggcggcgtcacttactataaccccgcccagcagcaagtgcagcctaagcctagccctccacggcgcactccgcagccggtgacaatcaagccgcctccgccagaggtggtcagcaggggaagtagctag

SEQ ID NO: 274791 - DNA, 2112 bp, Artificial Sequence
  derived and/or modified sequence
atggcagacaggaggagacagagggcatcgcaggacaccgaggatgaagagagcggggcatccgggtcagacagcggtggatccccactcaggggcggcggctcatgctcaggttccgcgggtggcggggggtcgggaagtctgccaagccaaagaggagggcgaaccggtgccttgcaccttcgaagggtggaaagtggtggtgcgaaatctgcggaagagagcgaatgcgaatctgaggacggcattgagggtgatgcggtgctgtcagactatgaaagtgccgaagactctgaaggagaggagggagagtacagcgaggaggaaaattctaaggtggaactcaagtccgaagcaaatgacgctgtgaatagctcgactaaggaggaaaagggagaggaaaagcccgacactaaatctaccgtgaccggcgaacggcagagcggagacggccaggaatcgaccgagcctgtcgaaaacaaagtgggcaagaaagggcctaagcacttagatgatgacgaggatcgtaaaaatcctgcctacattccacggaaagggttgtttttcgaacacgatctgcgcggccaaacacaggaagaagaagtccggcccaagggccgacagcgcaagttgtggaaggacgagggtcggtgggagcacgacaagtttagagaggatgagcaagctcctaagtctaggcaggagttgatagcactctatgggtatgatatacgaagcgcccataatccagacgatattaaaccacgtaggatacggaaacctagatatgggtctcccccgcagagagatccaaactggaatggtgagcgcctaaacaagtcacaccgccaccagggcctcggtggaactctcccgccacgaactttcatcaaccgtaacgctgccggaacagggagaatgtcagcgccccgaaattattctaggtccggtggtttcaaggaaggacgcgctggttttagaccagttgaggctggtggtcagcacggtggacgaagtggcgaaaccgtgaagcacgaaatcagttatcgctctcgacggctagagcaaacatccgtgcgggaccccagtccggaggccgacgccccggtcctgggctcgccggaaaaggaagaggctgcttcagaaccccctgctgctgctcctgacgcagctcccccaccaccagacaggcccatcgagaagaagtcgtacagtcgggccagacgtaccagaactaaagtcggcgacgcggtgaagcttgccgaggaggtgccaccacccccagagggtctcatccccgcccctcctgtcccagagacaacaccgactcctcctacaaagacgggtacctgggaggcccctgttgatagcagcactagcgggctggagcaggatgtggcccagctgaacattgctgagcaaaactggtcacccggacagccgtcatttttgcaaccacgggaactgcggggaatgcccaaccatatccacatgggcgccgggccgccaccccaattcaaccgcatggaagaaatgggagttcagggcggccgggccaaacgctacagcagccagcgtcagcggcctgtcccagaaccccctgccccacccgtgcatatttcaatcatggagggccactactacgatcctttacagttccaggggcccatttatacccacggagatagccctgctccgctaccccctcaggggatgctcgttcagcctgggatgaatctgcctcaccccggactgcacccccatcagactcccgcgccgttaccaaaccccgggttatatccccctccggtaagtatgtctccaggccaaccgccacctcagcagctgctcgcccctacatacttttcggctccgggggtgatgaattttgggaaccccagctacccttatgctcctggggccctgcctccgcctccacccccacacctgtatccgaatacgcaggctccgagccaggtgtatgggggtgtcacgtactacaacccagcccagcagcaggtgcaacccaaacctagtccccctaggagaactccacagcccgttactataaagccccccccgccggaggtcgtgagccgtgggtcgagctag

SEQ ID NO: 274792 - DNA, 1926 bp, Artificial Sequence
  derived and/or modified sequence
atggcggataggcgaaggcagcgggcttctcaggataccgaagatgaggagagtggtgcaagtgggtcggactccgggggcagtcccctgcgcggagggggctcttgcagtggctcagctggagggggcggatccggctccctgccaagccagcgcgggggacgtaccggggcgctgcatctgcgccgggttgaatccggaggcgctaagtccgcagaggaaagcgagtgtgagtccgaggacgggattgagggcgacgctgtgctgagcgattatgagtccgcggaggactccgagggcgaagaaggtgagtattccgaagaagagaactcaaaggtggaactaaagtctgaagccaacgacgccgttaatagtagtaccaaggaagagaagggagaagagaagcccgacacaaagtccaccgtgactggtgagaggcagtctggcgacggtcaggaatcgacagaaccagtggaaaataaagttggcaaaaaagggcccaagcatctagatgatgacgaggaccgcaagaatccagcctatatccctcgcaaaggcctgtttttcgagcacgacttgcggggccagacacaggaggaggaagtgagaccaaaaggcaggcaaaggaaactctggaaggacgagggccgctgggaacacgacaagtttcgggaagacgagcaagcccctaaatctcgacaggaactgattgcattgtatgggtatgacatccgaagtgcgcataaccccgacgacattaagcccaggcggattagaaagcctcgctatggttcaccacctcagagggatcctaattggaatggggagcgactcaacaaatcccaccggcaccagggcctgggaggtactctgcccccgcggacgttcattaaccgaaatgccgccggtaccggtcgcatgtcagcccccagaaactacagtcgatccggagggtttaaagaaggccgtgctggattcagacccgtcgaagctggaggccaacacgggggaagaagcggagagaccgttaaacacgagatctcttaccggtcaaggaggctggaacagactagtgtgagagaccccagccccgaggccgacgcgcccgtgctgggctctcctgaaaaggaagaggcggcctccgagcctccagcagccgcaccagacgccgcaccccccccaccggatcgcccaatcgagaaaaaatcgtattctcgtgcccgtagaaccaggacaaaggtgggcgacgccgtaaagctggccgaggaagtccctccccctcccgaggggttaattcccgcacctccagtgcccgaaaccactccgaccccaccaacaaaaaccgggacgtgggaggctcccgtcgattcctccactagcggactggagcaggacgtagcccaactgaacattgcagaacagaattggtctccgggccaaccatcattcctccagccccgtgaactgcgggggatgcctaatcacatccatatgggggcaggcccaccgccccagttcaacaggatggaagagatgggcgtgcaagggggcagggccaagcgctattccagccaacgacaacgccctgtccctgagcctcccgcccccccggtgcacatctccattatggaggggcattactatgatcccctgcagtttcagggaccaatctatactcacggcgattcccctgcgcctttgccgccccaaggaatgctggtgcagcctggaatgaacttgccacaccctggcctgcacccacaccagactcctgcatgtccagactcccagacactgaggcactgtgagtcttgcctgtgttggtctacagtcttctcctgcaaagatttctcgatgtgcggaggtgtgttttgctattgttttaaaggatgcccattcgtgataagcattgtgacatggagatag

SEQ ID NO: 274793 - DNA, 2112 bp, Artificial Sequence
  derived and/or modified sequence
atggctgacagaagacggcagagggccagccaggacacagaagatgaggagagcggggccagcggcagtgacagcggcggcagccccctgcggggcggcggcagctgcagcggcagcgctgggggcggcggcagcggcagcctgcccagccagagaggaggccgcactggagccctgcacctgcggcgggtggagagcggcggggccaagtctgctgaggagagtgaatgtgagagtgaagatggcattgaaggagatgctgtgctgagtgactatgagagcgctgaggacagcgagggggaggagggggagtacagcgaggaggagaacagcaaggtggagctgaagtctgaggccaatgatgctgtgaacagcagcaccaaggaggagaagggggaggagaagccagacaccaagagcacagtgactggagagcggcagagcggagatggccaggagagcacagagcctgtggagaacaaggtgggcaagaagggccccaagcacctggatgatgatgaggacaggaagaacccagcctacatccccaggaagggcctcttctttgaacatgacctgcggggccagacccaggaggaggaggtgcggcccaagggccggcagaggaagctgtggaaggatgagggccgctgggagcatgacaagttcagagaagatgagcaggcccccaagagccggcaggagctgattgccctgtatggctatgacatccgcagcgcccacaacccagatgacatcaagccccggcgcatcaggaagcccaggtatggcagccccccccagagggaccccaactggaatggagagcggctgaacaagagccaccgccaccagggcctgggcggcaccctgccccccaggaccttcatcaacagaaatgctgctggcaccggccgcatgtctgcccccaggaactacagccgcagcggcggcttcaaggagggccgggccggcttccggcctgtggaggccggcggccagcacggcggccgctctggagagaccgtgaagcatgagatctcctaccgcagccggcggctggagcagacctctgtgcgggaccccagccctgaggctgatgcccctgtgctgggcagccctgagaaggaggaggccgccagcgagcccccagctgctgccccagatgctgcccctcctcctccagaccggcccatcgagaagaagagctacagccgggcccggaggaccaggaccaaggtgggagatgctgtgaagctggccgaggaggtgcccccacctcctgagggcctcatcccagcccctcctgtgcctgagaccacccccaccccacccaccaagacaggcacctgggaggcccctgtggacagcagcaccagcggcctggagcaggatgtggcccagctgaacattgctgagcagaactggagccctggccagcccagcttcctgcagccccgggagctgcggggcatgcccaaccacatccacatgggcgccggccccccaccccagttcaacaggatggaggagatgggcgtgcagggcggccgggccaagcgctacagcagccagaggcagaggcctgtgcctgagcccccagcccctcctgtgcacatcagcatcatggagggccactactatgaccccctgcagttccagggccccatctacacccacggggacagccctgcccccctgcccccccagggcatgctggtgcagcccggcatgaacctgccccaccctggcctgcacccccaccagaccccagcccccctgcccaaccctggcctgtacccacctcctgtgtccatgagccctggccagcccccaccccagcagctgctggcccccacctacttcagcgcccctggggtgatgaactttggaaaccccagctacccctatgcccctggggccctgcccccacctcctccaccccacctgtaccccaacacccaggcccccagccaggtgtatggaggagtgacctactacaacccagcccagcagcaggtgcagcccaagcccagcccccccaggaggaccccccagcctgtgaccatcaagcccccacctcctgaggtggtgtcccggggcagcagctag

SEQ ID NO: 274794 - DNA, 1926 bp, Artificial Sequence
  derived and/or modified sequence
atggctgacagaagacggcagagggccagccaggacacagaagatgaggagagcggggccagcggcagtgacagcggcggcagccccctgcggggcggcggcagctgcagcggcagcgctgggggcggcggcagcggcagcctgcccagccagagaggaggccgcactggagccctgcacctgcggcgggtggagagcggcggggccaagtctgctgaggagagtgaatgtgagagtgaagatggcattgaaggagatgctgtgctgagtgactatgagagcgctgaggacagcgagggggaggagggggagtacagcgaggaggagaacagcaaggtggagctgaagtctgaggccaatgatgctgtgaacagcagcaccaaggaggagaagggggaggagaagccagacaccaagagcacagtgactggagagcggcagagcggagatggccaggagagcacagagcctgtggagaacaaggtgggcaagaagggccccaagcacctggatgatgatgaggacaggaagaacccagcctacatccccaggaagggcctcttctttgaacatgacctgcggggccagacccaggaggaggaggtgcggcccaagggccggcagaggaagctgtggaaggatgagggccgctgggagcatgacaagttcagagaagatgagcaggcccccaagagccggcaggagctgattgccctgtatggctatgacatccgcagcgcccacaacccagatgacatcaagccccggcgcatcaggaagcccaggtatggcagccccccccagagggaccccaactggaatggagagcggctgaacaagagccaccgccaccagggcctgggcggcaccctgccccccaggaccttcatcaacagaaatgctgctggcaccggccgcatgtctgcccccaggaactacagccgcagcggcggcttcaaggagggccgggccggcttccggcctgtggaggccggcggccagcacggcggccgctctggagagaccgtgaagcatgagatctcctaccgcagccggcggctggagcagacctctgtgcgggaccccagccctgaggctgatgcccctgtgctgggcagccctgagaaggaggaggccgccagcgagcccccagctgctgccccagatgctgcccctcctcctccagaccggcccatcgagaagaagagctacagccgggcccggaggaccaggaccaaggtgggagatgctgtgaagctggccgaggaggtgcccccacctcctgagggcctcatcccagcccctcctgtgcctgagaccacccccaccccacccaccaagacaggcacctgggaggcccctgtggacagcagcaccagcggcctggagcaggatgtggcccagctgaacattgctgagcagaactggagccctggccagcccagcttcctgcagccccgggagctgcggggcatgcccaaccacatccacatgggcgccggccccccaccccagttcaacaggatggaggagatgggcgtgcagggcggccgggccaagcgctacagcagccagaggcagaggcctgtgcctgagcccccagcccctcctgtgcacatcagcatcatggagggccactactatgaccccctgcagttccagggccccatctacacccacggggacagccctgcccccctgcccccccagggcatgctggtgcagcccggcatgaacctgccccaccctggcctgcacccccaccagaccccagcctgcccagacagccagaccctgcggcactgtgagagctgcctgtgctggagcaccgtcttcagctgcaaggacttctccatgtgtggcggcgtcttctgctactgcttcaagggctgcccctttgtgatcagcatcgtgacctggaggtag

SEQ ID NO: 274795 - DNA, 2112 bp, Artificial Sequence
  derived and/or modified sequence
atggccgaccggcggcggcagcgggccagccaggacaccgaggacgaggagagtggagccagtggaagtgactcgggcggctcccccctccggggaggtggcagttgcagtggatcagcgggtggtgggggcagcggaagcctcccaagccagcgtggaggccggactggagccttgcatctccggcgcgtcgaatccggcggagcaaaaagtgctgaggagtctgaatgcgaatcagaggacgggatcgagggtgatgccgtgttatccgactacgaaagcgccgaagacagcgagggtgaggagggggaatatagtgaagaagagaacagcaaggtggaattaaaaagcgaagcaaacgacgccgtaaatagcagcaccaaggaggagaaaggagaggagaagcctgatacaaaatccaccgtgaccggagaacgacagtcaggcgacggccaggaatcaacagagcccgttgaaaataaggtcggcaaaaaaggccctaagcacctggacgatgacgaggacagaaaaaacccagcatacatcccgcggaaagggctgttcttcgagcacgatctgagaggtcaaacccaggaggaagaagtccggccgaaaggccgacagagaaagctctggaaagatgagggacgatgggagcacgataaatttcgtgaagacgagcaagcccccaaaagtcgacaggagctgatcgccctctacggctacgatattcgctcagctcacaatccagacgacatcaagccacgtagaatccgtaagccgcgctacggctcccccccacaacgggaccccaattggaatggagaaaggttgaataagtctcaccgccatcaggggctgggtgggacactgccaccccgtaccttcattaaccgtaatgctgccgggaccggccgcatgtcagctccaaggaactattcccggtcaggagggttcaaggaaggcagagcggggtttcgcccagttgaggcagggggccagcatgggggacgcagcggcgaaaccgttaaacacgagatcagctacagaagccgtaggttagagcagacgtccgtcagagatccatcgcccgaggcagacgctcccgtgttaggttcccccgaaaaagaggaagcggcctccgaaccacctgccgccgctccagatgccgcccctccacctcctgaccggcctatagaaaagaaaagttactctcgcgcccggcgcactaggaccaaggtcggtgacgccgttaagctggcagaggaagtgcccccccctcctgagggcttgatccctgcgcctccggtcccagagacaactccaaccccgcctaccaaaacaggtacttgggaggctcctgtcgattctagtacatccggactggagcaagatgtggcccagttgaatatcgctgagcagaactggtctcccggtcagcccagctttttacagcccagagagcttcgaggcatgccaaatcacattcacatgggggcgggcccacctccacagttcaaccgaatggaagagatgggggtgcagggtggcagagcgaagaggtacagctcgcagaggcaaaggccggtgcctgaaccccccgcgccccctgtccacatcagcattatggaaggacactattacgacccgctgcagtttcaggggccaatctacacgcatggtgactcccctgcccctctgcctccacaggggatgttggtgcagccagggatgaatctgccacacccggggctgcaccctcaccaaacaccagcccccctgcccaatccaggcttgtaccccccccccgtgagcatgagccctgggcagcccccaccccagcaactgctcgctcccacatatttctcagctcctggtgtcatgaacttcggaaatcccagttatccatatgctccaggagctctccccccgcccccccctccccatctctatcctaatacccaggctccttcccaggtgtacggcggggtaacttactataatcccgctcagcaacaggtacaaccgaagcccagcccacccaggcgtacaccccagcccgtcacaattaaacccccacctccagaggtcgtgtcgcgggggagttcctag

SEQ ID NO: 274796 - DNA, 2112 bp, Artificial Sequence
  derived and/or modified sequence
atggccgaccggcggcggcagcgggccagccaggacaccgaggacgaagagagcggcgcctctggatcggatagcggagggtcccccctgcggggaggcggtagctgctctgggtcagccggcggaggtggttctgggagcttaccgtctcaaaggggcggccgaacaggcgccctccacttgaggcgtgttgaatccggaggcgctaagtccgccgaggaatcagaatgtgagtcagaagacggcatagagggtgacgccgtcctgagtgactacgagagcgcggaggatagcgaaggggaggagggcgaatactctgaggaagagaatagtaaggtggagctgaaatcggaagcgaacgacgctgtcaacagctccacaaaagaggagaagggagaggagaagcccgataccaagagcacagtgacaggagaacgacagagcggggacggacaagaatccacggagccggtggaaaataaggtcggcaagaagggacctaagcacctcgacgacgatgaggataggaaaaaccctgcctatatcccaagaaaagggttgtttttcgaacatgacctgcgaggacagacccaggaagaggaggtgcgtcccaagggaagacaaagaaagctctggaaggacgagggaaggtgggagcacgataagttccgggaagacgagcaggcgccaaagtctcgccaggagttaatcgcactgtacggatacgatatccggagcgcacacaacccggacgacatcaagcctagaagaatccgtaaaccacgctacgggtcccctccccagagggacccaaattggaacggcgagaggctgaacaagagccacaggcaccagggcctgggaggtactctaccccctcgcacgtttattaaccgaaacgcggcaggcaccggcagaatgtctgccccacgtaactactcccgaagtggtggctttaaagaggggcgcgctggctttcgccccgtagaagcaggcgggcaacacggcggaaggagtggcgaaacagttaagcacgagatttcctacaggtcacgccgactggagcagacctccgttcgggatccctcacctgaggccgatgcgcccgtgctgggcagccctgagaaagaggaggcagcctcagaaccccccgcagctgctccagacgccgccccgccccctccggacagaccaattgagaagaagagctactcaagagcgcgcagaacacggaccaaggtgggagacgctgttaaacttgcagaagaagtcccccctccacctgaaggcttaatcccggctcctcctgtacccgaaaccactcctacaccacctactaagaccgggacatgggaagcacctgtggattcttcaaccagtggtctcgagcaggatgtggcacagctaaatatcgccgaacagaactggtccccagggcaaccctcctttctgcagccgagagaactgcggggtatgccaaaccacatccatatgggggccgggccaccccctcaatttaaccgcatggaggagatgggtgttcagggcggacgtgccaagagatactcatcccagcgacagaggcctgtacctgaaccacctgcaccccccgtccatatctcaattatggaaggacattactacgatcctctccaattccagggcccaatttacacgcacggcgactcgcctgccccactaccgccacagggaatgctggtgcagcccgggatgaatctccctcaccccggtctccatccccaccagacgccagctccacttcctaacccaggcctgtaccctccaccagtaagcatgtcacccggccaaccaccacctcagcaactgctcgccccaacctacttcagtgcgccaggagtgatgaatttcgggaacccctcctatccgtacgcccccggggccttgccgcctccgccacctcctcacctgtacccaaacacacaggcacctagccaggtgtacggaggtgtgacgtactataaccccgcccagcagcaggtgcagcctaagccttcccccccccgacggacgccccagcctgtgacaattaagcccccaccacctgaagtggtgtcacggggctcctcctag

SEQ ID NO: 274797 - DNA, 1926 bp, Artificial Sequence
  derived and/or modified sequence
atggccgaccggcggcggcagcgggccagccaggacaccgaggacgaagagagtggcgcgtctggcagcgatagtggaggatcccctctccgaggtggcgggtcttgttccggttcagctggaggcggcgggtctggaagcctgcctagccaacgaggagggaggaccggggccttacacctcagacgcgtggagtctgggggagccaagtcagcggaagaatctgagtgcgagtctgaagatgggatagagggcgacgcagtgttgagcgactatgagtcagccgaggacagcgagggcgaggaaggagagtatagtgaagaagaaaactccaaagttgagttgaaatctgaagctaacgacgctgtgaactccagcacaaaggaggagaaaggtgaagagaagccagacacgaagagcaccgtcacaggagaacggcagagcggggacgggcaggaatcaacagagcccgttgagaataaagtgggcaagaaagggcccaaacatttggacgatgacgaagataggaagaatcctgcatacattcctcgcaaggggttgttctttgagcacgatcttcgtggccagacgcaggaggaagaggtccgccccaagggacgtcaaaggaaactttggaaggatgaaggaagatgggaacatgataaattcagggaagacgaacaggcgccgaagagtcgccaggagctgatcgccttgtacggttacgacattaggtctgcacacaatcctgacgacatcaagcctagaaggatccgtaaaccaaggtacggatccccgccgcagagggacccaaattggaacggagagcggctgaataaaagccaccgccaccaagggctgggtggcaccttacctccccggacttttataaacagaaacgccgccgggactggtcgcatgtctgcccctagaaattacagtcgtagcggtggattcaaagagggccgagcagggttcagaccagtggaggcaggcggccagcacgggggacgctccggcgaaacagtcaagcacgaaatttcgtaccgctccaggagactggaacagaccagcgtcagagacccatccccagaggctgacgcacccgtacttggctcccctgaaaaggaagaggctgcctctgagcctccggctgccgccccggatgctgctccaccccctcctgatcgccccatagagaaaaagtcctacagtagggctcgccgtactcggaccaaggttggagacgcggtaaagttggctgaggaagtgcctcctcctcctgagggcctgattccagccccacctgttcccgaaaccactcctactccccctacaaagacaggcacgtgggaggctcctgtggattccagcacgagtggcctagaacaagatgtggcccaacttaacattgcagaacagaattggtctcccggccagcccagtttcctgcagccacgcgaattacggggcatgcccaaccacattcacatgggcgcagggccccctccccaattcaaccgcatggaagaaatgggggtccagggaggaagggcgaagaggtacagcagccagcggcaaagaccagtcccagagccccctgccccaccggtgcatatttctattatggagggccactactatgacccacttcaattccagggacccatttatactcacggagactctccagccccgctgccacctcaaggtatgttggtgcaacccggcatgaatctgccccaccccggcctacatccacaccagacacctgcgtgccccgacagccagactctccgtcattgcgagagttgcctttgctggtctacagtctttagttgcaaggacttcagcatgtgtgggggagtgttttgctactgcttcaaggggtgtcccttcgtcatatctatcgtcacctggcgatag

SEQ ID NO: 274798 - DNA, 2112 bp, Artificial Sequence
  derived and/or modified sequence
atggcagatcgacgcaggcagagagcctcccaggatacggaggatgaagagtcaggagcctctggctcagatagcggcggatctcctctgcggggaggtgggtcttgctctgggtctgccggaggcggaggctcaggctctctgccatcccagaggggtggacggactggcgctctccatctcaggagagttgagtctggcggagcgaaaagcgctgaggagtccgagtgcgagagcgaagatggcattgaaggcgatgctgtcctttccgactatgagtccgcagaggattccgaaggggaggagggcgagtacagcgaggaggagaatagcaaagtcgagctgaagagtgaggctaatgacgccgttaattcatccactaaagaggaaaagggcgaggagaaacccgatactaagtccaccgttaccggtgagcgtcagtcaggggacggccaagagagcacagagcccgttgaaaataaggtaggcaaaaaagggccaaagcacctggacgacgatgaggaccgcaagaaccccgcatacattccccgtaagggtctgtttttcgagcacgacctgcgcggtcaaacacaagaagaggaggtcagacctaaggggaggcagcggaaactgtggaaagatgaaggccgatgggaacacgacaaattccgagaggatgagcaagccccaaaaagcaggcaggagctgattgccttgtatgggtacgatatccggagcgctcacaaccccgacgatattaagccccgtaggattcgaaagccaaggtatggttcaccccctcagagggacccaaattggaatggtgagagacttaataagtcgcatcgccaccagggccttggcggaaccctgccacctcgtacattcatcaaccgcaatgctgccggtaccggacgcatgtccgcccctcggaactatagtcgcagtgggggttttaaggagggacgtgccggtttcaggccggtggaagctgggggacagcacggcggtaggtccggcgaaacagtgaagcatgagatctcgtatcggagtcgcagactggagcaaaccagcgtgcgcgaccccagccccgaggcggacgctccagtgcttgggtccccggagaaagaagaggccgcttccgaacctcccgcagccgctcccgatgcagcccctccacctcctgaccggccaatcgaaaagaagtcctatagtcgtgctcgtcgcactaggacgaaggtgggcgacgcagtgaaactcgctgaagaagtgccaccccctcctgaaggtcttatcccagcccctccggtgcctgaaactacacccactcctcccactaagacgggtacttgggaagcccctgtggatagcagtacaagcggcttggagcaggacgtggcacagcttaatatcgcggagcagaattggtctccgggacagccttctttcttgcagccacgagaactaaggggcatgcccaatcatattcacatgggggctggcccaccgccacagttcaaccggatggaagaaatgggtgtgcagggcggtagagcgaagcggtattctagccagcggcagcggcctgttccagaacctcctgctccccctgtacacataagcatcatggagggtcattattatgacccactccagtttcagggtcctatctatacccacggagactcccctgccccattgcccccacagggaatgctcgtgcagcccggaatgaacttgccacacccaggcctacatccccatcaaacccctgcccctcttcccaacccagggttgtatccacctcctgtgtccatgtctccaggccagcccccaccccagcagctactcgctcctacgtattttagcgcccctggcgtgatgaacttcggaaacccatcctatccttatgcaccgggagctttgcccccacctcctcctccccatctgtatcccaatacccaggcgcctagccaagtttatggtggggtgacgtactacaatcccgctcaacagcaagtccagcccaaaccgtctcccccaaggcgaactccccagcctgtaactatcaagcctccgcctccggaagtcgtttctagagggagttcgtag

SEQ ID NO: 274799 - DNA, 2112 bp, Artificial Sequence
  derived and/or modified sequence
atggcagaccgacgaagacagagagccagtcaggatacagaggacgaggagagtggtgctagcggaagcgattccggcggaagccctcttcgtggaggtggcagctgttccggaagtgctggagggggaggctctgggtctttgcccagccaacggggaggcagaacaggggctctccacctccgccgtgtggagtctgggggagccaaatcagctgaggagagtgagtgcgagagtgaggacggaattgagggagatgcggttctgagtgactacgagtcagcagaagacagtgagggagaggaaggcgagtatagtgaagaggaaaacagtaaagtcgagctgaagagtgaagctaatgacgccgtcaactcctctacgaaagaggagaagggcgaggagaagcccgacactaaaagcacagtgaccggagagagacagagcggcgatggacaggaatcgaccgaacctgtggagaataaggtcgggaaaaaagggccaaagcatttagacgacgacgaagaccggaagaatcccgcttacatccctcgtaaggggctgtttttcgagcacgatctgcggggacagacacaagaagaagaggttaggcccaagggcagacagaggaaactgtggaaagatgaaggaagatgggaacatgacaagtttcgggaagatgaacaggctcccaagtctcggcaggaactcatcgctctttacggctacgacatcaggagtgcacacaaccccgacgacattaaacctcgaaggatccgcaagcccaggtacggctcgcctccacagcgcgatcctaattggaacggcgaacggcttaacaaatcacacagacaccaggggctggggggaacattaccaccacggaccttcataaacaggaatgccgcaggcacaggcaggatgtcagcccctcgcaattactctagatccggcggattcaaggagggacgagccggattccgccctgtggaggctggagggcaacatggcggacgatcaggtgagaccgttaaacacgagatcagttataggagtcgacggctggagcagacttctgtgcgagacccaagtccagaggctgacgccccagtcctgggatcgccggaaaaagaagaggcagcttctgagccacctgctgccgcaccagacgcggctccacccccaccagatcggccaatcgaaaaaaagtcttacagccgcgcaagacgcacacggaccaaggtcggagatgcggtcaagctggcggaggaagtgcccccaccccctgaggggctaattccggcaccccctgtacctgaaactacccctaccccacccacaaagacagggacttgggaggccccagtcgatagttccaccagcggcctggagcaggatgtggctcagctcaacattgctgagcagaactggagtccgggacaaccaagtttcttgcaacccagagaactgagagggatgccgaaccacatccatatgggtgcagggccaccccctcaattcaacagaatggaggaaatgggcgtgcagggcggtagagcgaagcggtactcttcgcagcgccaacgccctgtgcctgagcctcccgctccacccgtccacatcagcattatggaaggacattattatgacccgttacaatttcagggccctatctacacccacggagattcaccggctcctctaccccctcagggaatgctggtgcagccaggtatgaacttgccacatcccggtcttcacccacatcagacaccagcaccattacctaatccagggctgtacccccctcctgtctccatgagtcccggtcagccgcctccccagcagctgctggcacccacctatttctcagccccaggcgttatgaactttgggaatccaagctatccttatgccccaggagccttgccccctccaccccctcctcacttgtatcctaacacgcaggcgccatcacaggtctatgggggagtgacgtactataacccagcccagcagcaggttcaacctaagccatcccccccacggagaactcctcagcccgtgacaatcaagccaccaccccctgaggtggtgtccaggggcagctcttag

SEQ ID NO: 274800 - DNA, 1926 bp, Artificial Sequence
  derived and/or modified sequence
atggccgaccgtcgaagacagagggcttcccaggataccgaagatgaagagagcggcgcatctggttccgactctggtgggtctccattgagggggggtggttcatgtagcgggtctgcagggggagggggatccggctctttgccttcccagcgaggagggcgtaccggcgctcttcacctgcgccgagttgagtccggaggcgcaaagagtgccgaggaaagtgaatgcgaaagtgaagatggtatagagggggatgccgtcctttccgattatgaaagcgccgaggacagcgagggggaagagggcgaatactctgaagaggagaatagcaaggtggagcttaaaagtgaggcgaacgatgcagtgaatagctctaccaaggaggaaaaaggcgaagaaaaaccggacaccaaatctactgttactggggaacggcaaagcggggacggccaggagagcaccgagccagttgagaataaagtcggcaagaaaggccctaaacacctggatgacgatgaagatcgcaagaacccagcgtatattccgcgaaaaggactgttttttgaacatgatcttcggggacaaacacaggaagaagaggtacgacctaagggcaggcaacgcaagctctggaaagacgaaggcagatgggagcacgacaaatttcgggaggacgaacaagccccaaagtcacgccaggagcttatcgcactttacggctatgacatccggtccgcccacaacccggacgacatcaagccgaggcgaattagaaaacccaggtacgggtcacctccgcagagagaccccaattggaatggagagagactcaataagtcccaccgtcatcagggtctcgggggtacattgcccccaagaacattcataaaccgaaatgccgctggcacaggtcgcatgtctgctcctcgcaactattctagatccggaggctttaaggagggccgagcagggtttcgaccggtggaagccggtggacagcacggcggacgctcaggcgagacagtcaaacatgagatttcttaccgctctcgccgattggaacagacttccgtgcgagatccatcacctgaagcagacgccccagtgctgggtagcccggagaaagaagaggcggcaagcgagccgccagctgctgcgccagatgctgcaccccctcctcctgaccggccaatcgaaaagaaatcctactctcgtgctaggagaacaagaacaaaagtgggggacgctgtaaaactggccgaagaagtgccccctccccctgagggcttgatcccggctccccctgtacctgaaacaacccctacacccccaaccaagactggtacctgggaggccccagtcgattcctcaacaagcgggctcgagcaagacgtggcacagctgaatattgccgagcagaactggtccccagggcagccctcctttcttcagccacgcgaactccgcggaatgcctaatcatattcatatgggtgccggacctcctcctcaatttaatagaatggaggagatgggggtgcaagggggacgggctaagcgttattcttcccagaggcaaaggccagtgcctgagccccctgcccctcctgtgcatatcagtataatggaaggccactactacgatcccctgcaatttcaaggcccaatttacacgcacggagatagccctgcccctctgccaccacaaggcatgcttgtgcaaccagggatgaatctcccacaccctgggctgcacccccatcagacccctgcatgtcctgatagtcagaccctgcgacattgtgaatcatgtctctgctggagcacagtgttctcttgtaaagatttttccatgtgtgggggtgtcttctgttactgttttaagggatgccctttcgtgattagtattgttacttggcgttag

SEQ ID NO: 274801 - DNA, 4180 bp, Artificial Sequence
  derived and/or modified sequence
aatccgggtcggccgcaaacgtgccgcaggcctaggccccgcccagtgccccgcccctcccccaacacacacacacacacacacacacacacacaccccaacacacacacacacaccccaacacacacacacacacacacacacacacacacacacacacacacacacacacacacagcgggatggccgagcgccgcacgcgtagcacgccgggactagctatccagcctcccagcagcctctgcgacgggcgcggtgcgtaagtacctcgccggtggtggccgttctccgtaagatggcggaccggcggcggcagcgcgcttcgcaagacaccgaggacgaggaatctggtgcttcgggctccgacagcggcggctccccgttgcggggaggcgggagctgcagcggtagcgccggaggcggcggcagcggctctctgccttcacagcgcggaggccgaaccggggcccttcatctgcggcgggtggagagcgggggcgccaagagtgctgaggagtcggagtgtgagagtgaagatggcattgaaggtgatgctgttctctcggattatgaaagtgcagaagactcggaaggtgaagaaggtgaatacagtgaagaggaaaactccaaagtggagctgaaatcagaagctaatgatgctgttaattcttcaacaaaagaagagaagggagaagaaaagcctgacaccaaaagcactgtgactggagagaggcaaagtggggacggacaggagagcacagagcctgtggagaacaaagtgggtaaaaagggccctaagcatttggatgatgatgaagatcggaagaatccagcatacatacctcggaaagggctcttctttgagcatgatcttcgagggcaaactcaggaggaggaagtcagacccaaggggcgtcagcgaaagctatggaaggatgagggtcgctgggagcatgacaagttccgggaagatgagcaggccccaaagtcccgacaggagctcattgctctttatggttatgacattcgctcagctcataatcctgatgacatcaaacctcgaagaatccggaaaccccgatatgggagtcctccacaaagagatccaaactggaacggtgagcggctaaacaagtctcatcgccaccagggtcttgggggcaccctaccaccaaggacatttattaacaggaatgctgcaggtaccggccgtatgtctgcacccaggaattattctcgatctgggggcttcaaggaaggtcgtgctggttttaggcctgtggaagctggtgggcagcatggtggccggtctggtgagactgttaagcatgagattagttaccggtcacggcgcctagagcagacttctgtgagggatccatctccagaagcagatgctccagtgcttggcagtcctgagaaggaagaggcagcctcagagccaccagctgctgctcctgatgctgcaccaccaccccctgataggcccattgagaagaaatcctattcccgggcaagaagaactcgaaccaaagttggagatgcagtcaagcttgcagaggaggtgccccctcctcctgaaggactgattccagcacctccagtcccagaaaccaccccaactccacctactaagactgggacctgggaagctccggtggattctagtacaagtggacttgagcaagatgtggcacaactaaatatagcagaacagaattggagtccggggcagccttctttcctgcaaccacgggaacttcgaggtatgcccaaccatatacacatgggagcaggacctccacctcagtttaaccggatggaagaaatgggtgtccagggtggtcgagccaaacgctattcatcccagcggcaaagacctgtgccagagccccccgcccctccagtgcatatcagtatcatggagggacattactatgatccactgcagttccagggaccaatctatacccatggtgacagccctgccccgctgcctccacagggcatgcttgtgcagccaggaatgaaccttccccacccaggtttacatccccaccagacaccagctcctctgcccaatccaggcctctatcccccaccagtgtccatgtctccaggacagccaccacctcagcagttgcttgctcctacttacttttctgctccaggcgtcatgaactttggtaatcccagttacccttatgctccaggggcactgcctcccccaccaccgcctcatctgtatcctaatacacaggccccatcacaggtatatggaggagtgacctactataaccccgcccagcagcaggtgcagccaaagccctccccaccccggaggactccccagccagtcaccatcaagccccctccacctgaggttgtaagcaggggttccagttaatacaagtttctgaatattttaaatcttaacatcatataaaaagcagcagaggtgagaactcagaagagaaatacagctggctatctactaccagaagggcttcaaagatatagggtgtggctcctaccagcaaacagctgaaagaggaggacccctgccttcctctgaggacaggctctagagagagggagaaacaagtggacctcgtcccatcttcactcttcacttgagttggctgtgttcgggggagcagagagagccagacagccccaagcttctgagtctagatacagaagcccatgtcttctgctgttcttcacttctgggaaattgaagtgtcttctgttcccaaggaagctccttcctgtttgttttgttttctaagatgttcatttttaaagcctggcttcttatccttaatattattttaattttttctctttgtttctgtttcttgctctctctccctgcctttaaatgaaacaagtctagtcttctggttttctagcccctctggattcccttttgactcttccgtgcatcccagataatggagaatgtatcagccagccttccccaccaagtctaaaaagacctggcctttcacttttagttggcatttgttatcctcttgtatacttgtattcccttaactctaaccctgtggaagcatggctgtctgcacagagggtcccattgtgcagaaaagctcagagtaggtgggtaggagcccttctctttgacttaggtttttaggagtctgagcatccatcaatacctgtactatgatgggcttctgttctctgctgagggccaataccctactgtggggagagatggcacaccagatgcttttgtgagaaagggatggtggagtgagagcctttgcctttaggggtgtgtattcacatagtcctcagggctcagtcttttgaggtaagtggaattagagggccttgcttctcttctttccattcttcttgctacaccccttttccagttgctgtggaccaatgcatctctttaaaggcaaatattatccagcaagcagtctaccctgtcctttgcaattgctcttctccacgtctttcctgctacaagtgttttagatgttactaccttattttccccgaattctatttttgtccttgcagacagaatataaaaactcctgggcttaaggcctaaggaagccagtcaccttctgggcaagggctcctatctttcctccctatccatggcactaaaccacttctctgctgcctctgtggaagagattcctattactgcagtacatacgtctgccaggggtaacctggccactgtccctgtccttctacagaacctgagggcaaagatggtggctgtgtctctccccggtaatgtcactgtttttattccttccatctagcagctggcctaatcactctgagtcacaggtgtgggatggagagtggggagaggcacttaatctgtaacccccaaggaggaaataactaagagattcttctaggggtagctggtggttgtgccttttgtaggctgttccctttgccttaaacctgaagatgtctcctcaagcctgtgggcagcatgcccagattcccagaccttaagacactgtgagagttgtctctgttggtccactgtgtttagttgcaaggatttttccatgtgtggtggtgttttttgttactgttttaaagggtgcccatttgtgatcagcattgtgacttggagataataaaatttagactataaacttggctccct

SEQ ID NO: 274802 - DNA, 4895 bp, Artificial Sequence
  derived and/or modified sequence
cacacacacacacacacacacacacaccccaacacacacacacacaccccaacacacacacacacacacacacacacacacacacacacacacacacacacacacacagcgggatggccgagcgccgcacgcgtagcacgccgggactagctatccagcctcccagcagcctctgcgacgggcgcggtgcgtaagtacctcgccggtggtggccgttctccgtaagatggcggaccggcggcggcagcgcgcttcgcaagacaccgaggacgaggaatctggtgcttcgggctccgacagcggcggctccccgttgcggggaggcgggagctgcagcggtagcgccggaggcggcggcagcggctctctgccttcacagcgcggaggccgaaccggggcccttcatctgcggcgggtggagagcgggggcgccaagagtgctgaggagtcggagtgtgagagtgaagatggcattgaaggtgatgctgttctctcggattatgaaagtgcagaagactcggaaggtgaagaaggtgaatacagtgaagaggaaaactccaaagtggagctgaaatcagaagctaatgatgctgttaattcttcaacaaaagaagagaagggagaagaaaagcctgacaccaaaagcactgtgactggagagaggcaaagtggggacggacaggagagcacagagcctgtggagaacaaagtgggtaaaaagggccctaagcatttggatgatgatgaagatcggaagaatccagcatacatacctcggaaagggctcttctttgagcatgatcttcgagggcaaactcaggaggaggaagtcagacccaaggggcgtcagcgaaagctatggaaggatgagggtcgctgggagcatgacaagttccgggaagatgagcaggccccaaagtcccgacaggagctcattgctctttatggttatgacattcgctcagctcataatcctgatgacatcaaacctcgaagaatccggaaaccccgatatgggagtcctccacaaagagatccaaactggaacggtgagcggctaaacaagtctcatcgccaccagggtcttgggggcaccctaccaccaaggacatttattaacaggaatgctgcaggtaccggccgtatgtctgcacccaggaattattctcgatctgggggcttcaaggaaggtcgtgctggttttaggcctgtggaagctggtgggcagcatggtggccggtctggtgagactgttaagcatgagattagttaccggtcacggcgcctagagcagacttctgtgagggatccatctccagaagcagatgctccagtgcttggcagtcctgagaaggaagaggcagcctcagagccaccagctgctgctcctgatgctgcaccaccaccccctgataggcccattgagaagaaatcctattcccgggcaagaagaactcgaaccaaagttggagatgcagtcaagcttgcagaggaggtgccccctcctcctgaaggactgattccagcacctccagtcccagaaaccaccccaactccacctactaagactgggacctgggaagctccggtggattctagtacaagtggacttgagcaagatgtggcacaactaaatatagcagaacagaattggagtccggggcagccttctttcctgcaaccacgggaacttcgaggtatgcccaaccatatacacatgggagcaggacctccacctcagtttaaccggatggaagaaatgggtgtccagggtggtcgagccaaacgctattcatcccagcggcaaagacctgtgccagagccccccgcccctccagtgcatatcagtatcatggagggacattactatgatccactgcagttccagggaccaatctatacccatggtgacagccctgccccgctgcctccacagggcatgcttgtgcagccaggaatgaaccttccccacccaggtttacatccccaccagacaccagctcctctgcccaatccaggcctctatcccccaccagtgtccatgtctccaggacagccaccacctcagcagttgcttgctcctacttacttttctgctccaggcgtcatgaactttggtaatcccagttacccttatgctccaggggcactgcctcccccaccaccgcctcatctgtatcctaatacacaggccccatcacaggtatatggaggagtgacctactataaccccgcccagcagcaggtgcagccaaagccctccccaccccggaggactccccagccagtcaccatcaagccccctccacctgaggttgtaagcaggggttccagttaatacaagtttctgaatattttaaatcttaacatcatataaaagtaagtgcacaacttactgtgaatattgttaaaactaatgctcacacttgcttaataaacaaaaatcacttaattaatgctttttttttttttttttttttttttttttttgagacggcgtctcagtctgttatccaggctggagtgcagtggtgcaatctcggctcactgcaacctccatctcctgagttcaagcgattctcttgcctcagcctcctaagtagctaggattacaggcacgcaccaccacacctggctaatttttgtatttttagtgggaatggggtttcaccatattggccaggctggtcttgaactcctgacctcaggtgatccacctgccttggcctcccaaagtgttgggattacaggtgtgagccaccccacccagcctctgattaatgctttaagttataataatcatgggatatctcaggaggcttaaaggagtcctgaaatttgccagtttgtttgtttggcaagtgtattgggcagggttgaagtagaaacgattgttaacatgacagttttcaattgggaagctacaaggaaaaaatacaggaaggcagtcaaggaaaagggaaatctaaatttgagatgttatagcagaaaaaaccagttctaaagatcatagaggagaaggactgggggttttgttgcttttgtttaaggacattacttaaaacacattatttagaagtgtggctttttgaaaacagcttgtgaatgcccagaaggcccactaacactttggtggttcttccctttttccaacccctgtcagagcagcagaggtgagaactcagaagagaaatacagctggctatctactaccagaagggcttcaaagatatagggtgtggctcctaccagcaaacagctgaaagaggaggacccctgccttcctctgaggacaggctctagagagagggagaaacaagtggacctcgtcccatcttcactcttcacttgagttggctgtgttcgggggagcagagagagccagacagccccaagcttctgagtctagatacagaagcccatgtcttctgctgttcttcacttctgggaaattgaagtgtcttctgttcccaaggaagctccttcctgtttgttttgttttctaagatgttcatttttaaagcctggcttcttatccttaatattattttaattttttctctttgtttctgtttcttgctctctctccctgcctttaaatgaaacaagtctagtcttctggttttctagcccctctggattcccttttgactcttccgtgcatcccagataatggagaatgtatcagccagccttccccaccaagtctaaaaagacctggcctttcacttttagttggcatttgttatcctcttgtatacttgtattcccttaactctaaccctgtggaagcatggctgtctgcacagagggtcccattgtgcagaaaagctcagagtaggtgggtaggagcccttctctttgacttaggtttttaggagtctgagcatccatcaatacctgtactatgatgggcttctgttctctgctgagggccaataccctactgtggggagagatggcacaccagatgcttttgtgagaaagggatggtggagtgagagcctttgcctttaggggtgtgtattcacatagtcctcagggctcagtcttttgaggtaagtggaattagagggccttgcttctcttctttccattcttcttgctacaccccttttccagttgctgtggaccaatgcatctctttaaaggcaaatattatccagcaagcagtctaccctgtcctttgcaattgctcttctccacgtctttcctgctacaagtgttttagatgttactaccttattttccccgaattctatttttgtccttgcagacagaatataaaaactcctgggcttaaggcctaaggaagccagtcaccttctgggcaagggctcctatctttcctccctatccatggcactaaaccacttctctgctgcctctgtggaagagattcctattactgcagtacatacgtctgccaggggtaacctggccactgtccctgtccttctacagaacctgagggcaaagatggtggctgtgtctctccccggtaatgtcactgtttttattccttccatctagcagctggcctaatcactctgagtcacaggtgtgggatggagagtggggagaggcacttaatctgtaacccccaaggaggaaataactaagagattcttctaggggtagctggtggttgtgccttttgtaggctgttccctttgccttaaacctgaagatgtctcctcaagcctgtgggcagcatgcccagattcccagaccttaagacactgtgagagttgtctctgttggtccactgtgtttagttgcaaggatttttccatgtgtggtggtgttttttgttactgttttaaagggtgcccatttgtgatcagcattgtgacttggagataataaaatttagactataaacttggctccct

SEQ ID NO: 274803 - DNA, 2173 bp, Artificial Sequence
  derived and/or modified sequence
aacacacacacacacacacacacacacacacaccccaacacacacacacacaccccaacacacacacacacacacacacacacacacacacacacacacacacacacacacacagcgggatggccgagcgccgcacgcgtagcacgccgggactagctatccagcctcccagcagcctctgcgacgggcgcggtgcgtaagtacctcgccggtggtggccgttctccgtaagatggcggaccggcggcggcagcgcgcttcgcaagacaccgaggacgaggaatctggtgcttcgggctccgacagcggcggctccccgttgcggggaggcgggagctgcagcggtagcgccggaggcggcggcagcggctctctgccttcacagcgcggaggccgaaccggggcccttcatctgcggcgggtggagagcgggggcgccaagagtgctgaggagtcggagtgtgagagtgaagatggcattgaaggtgatgctgttctctcggattatgaaagtgcagaagactcggaaggtgaagaaggtgaatacagtgaagaggaaaactccaaagtggagctgaaatcagaagctaatgatgctgttaattcttcaacaaaagaagagaagggagaagaaaagcctgacaccaaaagcactgtgactggagagaggcaaagtggggacggacaggagagcacagagcctgtggagaacaaagtgggtaaaaagggccctaagcatttggatgatgatgaagatcggaagaatccagcatacatacctcggaaagggctcttctttgagcatgatcttcgagggcaaactcaggaggaggaagtcagacccaaggggcgtcagcgaaagctatggaaggatgagggtcgctgggagcatgacaagttccgggaagatgagcaggccccaaagtcccgacaggagctcattgctctttatggttatgacattcgctcagctcataatcctgatgacatcaaacctcgaagaatccggaaaccccgatatgggagtcctccacaaagagatccaaactggaacggtgagcggctaaacaagtctcatcgccaccagggtcttgggggcaccctaccaccaaggacatttattaacaggaatgctgcaggtaccggccgtatgtctgcacccaggaattattctcgatctgggggcttcaaggaaggtcgtgctggttttaggcctgtggaagctggtgggcagcatggtggccggtctggtgagactgttaagcatgagattagttaccggtcacggcgcctagagcagacttctgtgagggatccatctccagaagcagatgctccagtgcttggcagtcctgagaaggaagaggcagcctcagagccaccagctgctgctcctgatgctgcaccaccaccccctgataggcccattgagaagaaatcctattcccgggcaagaagaactcgaaccaaagttggagatgcagtcaagcttgcagaggaggtgccccctcctcctgaaggactgattccagcacctccagtcccagaaaccaccccaactccacctactaagactgggacctgggaagctccggtggattctagtacaagtggacttgagcaagatgtggcacaactaaatatagcagaacagaattggagtccggggcagccttctttcctgcaaccacgggaacttcgaggtatgcccaaccatatacacatgggagcaggacctccacctcagtttaaccggatggaagaaatgggtgtccagggtggtcgagccaaacgctattcatcccagcggcaaagacctgtgccagagccccccgcccctccagtgcatatcagtatcatggagggacattactatgatccactgcagttccagggaccaatctatacccatggtgacagccctgccccgctgcctccacagggcatgcttgtgcagccaggaatgaaccttccccacccaggtttacatccccaccagacaccagcatgcccagattcccagaccttaagacactgtgagagttgtctctgttggtccactgtgtttagttgcaaggatttttccatgtgtggtggtgttttttgttactgttttaaagggtgcccatttgtgatcagcattgtgacttggagataataaaatttagactat

SEQ ID NO: 274804 - DNA, 2112 bp, Artificial Sequence
  derived and/or modified sequence
atggccgacagaagaagacagagagccagccaggacaccgaggacgaggagagcggcgccagcggcagcgacagcggcggcagccccctgagaggcggcggcagctgcagcggcagcgccggcggcggcggcagcggcagcctgcccagccagagaggcggcagaaccggcgccctgcacctgagaagagtggagagcggcggcgccaagagcgccgaggagagcgagtgcgagagcgaggacggcatcgagggcgacgccgtgctgagcgactacgagagcgccgaggacagcgagggcgaggagggcgagtacagcgaggaggagaacagcaaggtggagctgaagagcgaggccaacgacgccgtgaacagcagcaccaaggaggagaagggcgaggagaagcccgacaccaagagcaccgtgaccggcgagagacagagcggcgacggccaggagagcaccgagcccgtggagaacaaggtgggcaagaagggccccaagcacctggacgacgacgaggacagaaagaaccccgcctacatccccagaaagggcctgttcttcgagcacgacctgagaggccagacccaggaggaggaggtgagacccaagggcagacagagaaagctgtggaaggacgagggcagatgggagcacgacaagttcagagaggacgagcaggcccccaagagcagacaggagctgatcgccctgtacggctacgacatcagaagcgcccacaaccccgacgacatcaagcccagaagaatcagaaagcccagatacggcagccccccccagagagaccccaactggaacggcgagagactgaacaagagccacagacaccagggcctgggcggcaccctgccccccagaaccttcatcaacagaaacgccgccggcaccggcagaatgagcgcccccagaaactacagcagaagcggcggcttcaaggagggcagagccggcttcagacccgtggaggccggcggccagcacggcggcagaagcggcgagaccgtgaagcacgagatcagctacagaagcagaagactggagcagaccagcgtgagagaccccagccccgaggccgacgcccccgtgctgggcagccccgagaaggaggaggccgccagcgagccccccgccgccgcccccgacgccgccccccccccccccgacagacccatcgagaagaagagctacagcagagccagaagaaccagaaccaaggtgggcgacgccgtgaagctggccgaggaggtgccccccccccccgagggcctgatccccgccccccccgtgcccgagaccacccccaccccccccaccaagaccggcacctgggaggcccccgtggacagcagcaccagcggcctggagcaggacgtggcccagctgaacatcgccgagcagaactggagccccggccagcccagcttcctgcagcccagagagctgagaggcatgcccaaccacatccacatgggcgccggcccccccccccagttcaacagaatggaggagatgggcgtgcagggcggcagagccaagagatacagcagccagagacagagacccgtgcccgagccccccgccccccccgtgcacatcagcatcatggagggccactactacgaccccctgcagttccagggccccatctacacccacggcgacagccccgcccccctgcccccccagggcatgctggtgcagcccggcatgaacctgccccaccccggcctgcacccccaccagacccccgcccccctgcccaaccccggcctgtaccccccccccgtgagcatgagccccggccagccccccccccagcagctgctggcccccacctacttcagcgcccccggcgtgatgaacttcggcaaccccagctacccctacgcccccggcgccctgcccccccccccccccccccacctgtaccccaacacccaggcccccagccaggtgtacggcggcgtgacctactacaaccccgcccagcagcaggtgcagcccaagcccagcccccccagaagaaccccccagcccgtgaccatcaagccccccccccccgaggtggtgagcagaggcagcagctag

SEQ ID NO: 274805 - DNA, 1926 bp, Artificial Sequence
  derived and/or modified sequence
atggccgacagaagaagacagagagccagccaggacaccgaggacgaggagagcggcgccagcggcagcgacagcggcggcagccccctgagaggcggcggcagctgcagcggcagcgccggcggcggcggcagcggcagcctgcccagccagagaggcggcagaaccggcgccctgcacctgagaagagtggagagcggcggcgccaagagcgccgaggagagcgagtgcgagagcgaggacggcatcgagggcgacgccgtgctgagcgactacgagagcgccgaggacagcgagggcgaggagggcgagtacagcgaggaggagaacagcaaggtggagctgaagagcgaggccaacgacgccgtgaacagcagcaccaaggaggagaagggcgaggagaagcccgacaccaagagcaccgtgaccggcgagagacagagcggcgacggccaggagagcaccgagcccgtggagaacaaggtgggcaagaagggccccaagcacctggacgacgacgaggacagaaagaaccccgcctacatccccagaaagggcctgttcttcgagcacgacctgagaggccagacccaggaggaggaggtgagacccaagggcagacagagaaagctgtggaaggacgagggcagatgggagcacgacaagttcagagaggacgagcaggcccccaagagcagacaggagctgatcgccctgtacggctacgacatcagaagcgcccacaaccccgacgacatcaagcccagaagaatcagaaagcccagatacggcagccccccccagagagaccccaactggaacggcgagagactgaacaagagccacagacaccagggcctgggcggcaccctgccccccagaaccttcatcaacagaaacgccgccggcaccggcagaatgagcgcccccagaaactacagcagaagcggcggcttcaaggagggcagagccggcttcagacccgtggaggccggcggccagcacggcggcagaagcggcgagaccgtgaagcacgagatcagctacagaagcagaagactggagcagaccagcgtgagagaccccagccccgaggccgacgcccccgtgctgggcagccccgagaaggaggaggccgccagcgagccccccgccgccgcccccgacgccgccccccccccccccgacagacccatcgagaagaagagctacagcagagccagaagaaccagaaccaaggtgggcgacgccgtgaagctggccgaggaggtgccccccccccccgagggcctgatccccgccccccccgtgcccgagaccacccccaccccccccaccaagaccggcacctgggaggcccccgtggacagcagcaccagcggcctggagcaggacgtggcccagctgaacatcgccgagcagaactggagccccggccagcccagcttcctgcagcccagagagctgagaggcatgcccaaccacatccacatgggcgccggcccccccccccagttcaacagaatggaggagatgggcgtgcagggcggcagagccaagagatacagcagccagagacagagacccgtgcccgagccccccgccccccccgtgcacatcagcatcatggagggccactactacgaccccctgcagttccagggccccatctacacccacggcgacagccccgcccccctgcccccccagggcatgctggtgcagcccggcatgaacctgccccaccccggcctgcacccccaccagacccccgcctgccccgacagccagaccctgagacactgcgagagctgcctgtgctggagcaccgtgttcagctgcaaggacttcagcatgtgcggcggcgtgttctgctactgcttcaagggctgccccttcgtgatcagcatcgtgacctggagatag

SEQ ID NO: 274806 - protein, 426 aa, Artificial Sequence
  derived and/or modified sequence
MSHTASSCQELVENCAVHVAGMAQEDSRRGQVPSSFYHGANQELDLSTKVYKRESGSPYSVLVDTKMSKPHLHETEEQPYFRETRAVSDVHAVKEDRENSDDTEEEEEEVSYKREQIIVECVSCNKSFKKLWSLHEHIKIVHGYAEKKFSCEICEKKFYTMAHVRKHMVAHTKDMPFTCETCGKSFKRSMSLKVHSLQHSGEKPFRCENCDERFQYKYQLRSHMSIHIGHKQFMCQWCGKDFNMKQYFDEHMKTHTGEKPFICEICGKSFTSRPNMKRHRRTHTGEKPYPCDVCGQRFRFSNMLKAHKEKCFRVTSPVNVPPAVQIPLTTSPATPVPSVVNTATTPTPPINMNPVSTLPPRPIPHPFSHLHIHPHPHHPHHLPIPPVPHLPPPPALFKSEPLNHRGQSEDNFLRHLAEKNSSAQHH

SEQ ID NO: 274807 - DNA, 1281 bp, Artificial Sequence
  derived and/or modified sequence
atgagccacaccgccagcagctgccaggagctggtggagaactgcgccgtgcacgtggccggcatggcccaggaggacagcagaagaggccaggtgcccagcagcttctaccacggcgccaaccaggagctggacctgagcaccaaggtgtacaagagagagagcggcagcccctacagcgtgctggtggacaccaagatgagcaagccccacctgcacgagaccgaggagcagccctacttcagagagaccagagccgtgagcgacgtgcacgccgtgaaggaggacagagagaacagcgacgacaccgaggaggaggaggaggaggtgagctacaagagagagcagatcatcgtggagtgcgtgagctgcaacaagagcttcaagaagctgtggagcctgcacgagcacatcaagatcgtgcacggctacgccgagaagaagttcagctgcgagatctgcgagaagaagttctacaccatggcccacgtgagaaagcacatggtggcccacaccaaggacatgcccttcacctgcgagacctgcggcaagagcttcaagagaagcatgagcctgaaggtgcacagcctgcagcacagcggcgagaagcccttcagatgcgagaactgcgacgagagattccagtacaagtaccagctgagaagccacatgagcatccacatcggccacaagcagttcatgtgccagtggtgcggcaaggacttcaacatgaagcagtacttcgacgagcacatgaagacccacaccggcgagaagcccttcatctgcgagatctgcggcaagagcttcaccagcagacccaacatgaagagacacagaagaacccacaccggcgagaagccctacccctgcgacgtgtgcggccagagattcagattcagcaacatgctgaaggcccacaaggagaagtgcttcagagtgaccagccccgtgaacgtgccccccgccgtgcagatccccctgaccaccagccccgccacccccgtgcccagcgtggtgaacaccgccaccacccccaccccccccatcaacatgaaccccgtgagcaccctgccccccagacccatcccccaccccttcagccacctgcacatccacccccacccccaccacccccaccacctgcccatcccccccgtgccccacctgccccccccccccgccctgttcaagagcgagcccctgaaccacagaggccagagcgaggacaacttcctgagacacctggccgagaagaacagcagcgcccagcaccactag

SEQ ID NO: 274808 - DNA, 1281 bp, Artificial Sequence
  derived and/or modified sequence
atgagccataccgcctcttcttgtcaggagctggtggagaactgtgctgttcacgtggccggaatggcccaagaggacagcaggcggggccaggtccctagcagcttctaccatggagcgaatcaggaactggatctcagtaccaaagtttacaagagagaatccggatccccctatagcgtccttgtcgataccaagatgtccaaacctcatctgcacgagacggaagaacagccatactttcgggaaacaagagcagtgagcgacgtgcacgcagtgaaagaggacagagaaaacagtgacgacaccgaggaggaggaagaagaggtgtcctataaaagagaacagattatagtggagtgcgtctcttgtaataaaagcttcaagaagctgtggagcctccacgagcatatcaagatcgttcacggctacgctgaaaaaaagttcagttgtgaaatttgtgaaaaaaaattctacacaatggctcacgtaagaaaacacatggtcgctcataccaaggatatgccattcacctgcgaaacctgcggaaaatctttcaaaaggtccatgagtttaaaggtgcacagtttacagcactctggggagaaaccatttcgatgcgagaattgtgacgagcgattccaatacaagtaccagctgcgctcccatatgtctattcacatcggacataaacagtttatgtgtcagtggtgtggaaaggactttaatatgaagcagtattttgatgagcacatgaagactcacacaggcgagaaacctttcatttgcgagatctgcggaaagtcatttacttcacggcccaatatgaagcgacacaggaggacgcacaccggcgaaaaaccctacccgtgtgatgtctgtgggcaacgcttccggttctccaacatgctgaaagcccacaaggaaaaatgcttccgagtgactagcccagtcaatgttcctcctgcggtacagattcctctgacaacatccccggctactcccgttcctagtgtcgtgaacaccgccaccacccctactcccccaattaacatgaaccctgtgtctacactgccccccagaccaattccgcatcccttctcccacctgcacattcacccacaccctcaccacccacaccatctccccatacctccggttccgcaccttccccctcctcccgccctgtttaaaagtgagcccttgaatcacagagggcagtccgaggacaatttcctccggcatctggcagagaagaacagttcagctcagcaccattag

SEQ ID NO: 274809 - DNA, 1281 bp, Artificial Sequence
  derived and/or modified sequence
atgagccacacagccagcagctgccaggagctggtggagaactgtgctgtgcacgtggccggcatggcccaggaggacagccggcggggccaggtgcccagcagcttctaccacggggccaaccaggagctggacctgagcaccaaggtgtacaagcgggagagcggcagcccctacagcgtgctggtggacaccaagatgagcaagccccacctgcatgaaacagaggagcagccctacttccgggagaccagggctgtgtctgatgtgcatgctgtgaaggaggaccgggagaacagtgatgacacagaggaggaggaggaggaggtgtcctacaagcgggagcagatcatcgtggagtgtgtgtcctgcaacaagagcttcaagaagctgtggagcctgcacgagcacatcaagatcgtgcacggctatgcagagaagaagttcagctgtgagatctgtgagaagaagttctacaccatggcccacgtgaggaagcacatggtggcccacaccaaggacatgcccttcacctgtgagacctgtgggaagagcttcaagaggtccatgagcctgaaggtgcacagcctgcagcacagcggggagaagcccttccgctgtgagaactgtgatgagcgcttccagtacaagtaccagctgcggagccacatgagcatccacatcggccacaagcagttcatgtgccagtggtgtgggaaggacttcaacatgaagcagtactttgatgagcacatgaagacccacactggagagaagcccttcatctgtgagatctgtgggaagagcttcaccagccggcccaacatgaagaggcacaggaggacccacactggagagaagccctacccctgtgatgtgtgtggccagcgcttccgcttcagcaacatgctgaaggcccacaaggagaagtgcttccgggtgaccagccctgtgaatgtgcccccagctgtgcagatccccctgaccaccagccctgccacccctgtgcccagcgtggtgaacacagccaccacccccaccccacccatcaacatgaaccctgtgtccaccctgcccccccggcccatcccccaccccttcagccacctgcacatccacccccacccccaccacccccaccacctgcccatcccccctgtgccccacctgcccccacctccagccctcttcaagtctgagcccctgaaccaccggggccagagcgaggacaacttcctgcggcacctggccgagaagaacagcagcgcccagcaccactag

SEQ ID NO: 274810 - DNA, 1281 bp, Artificial Sequence
  derived and/or modified sequence
atgagccacaccgccagcagctgccaggagctggtggagaactgcgctgttcatgtagctggtatggcgcaagaggacagtaggaggggacaggtgccttcatccttctatcacggcgctaaccaagagcttgatctcagtacaaaagtgtataaaagggaaagtggctctccctattccgtcctggttgacaccaaaatgtcaaagcctcatcttcacgagaccgaagagcaaccttatttcagagagacccgggcagtcagcgacgtgcatgccgtcaaggaggatagagagaatagcgatgacacagaagaggaggaagaagaggtcagctataagcgtgaacagattatagtagagtgcgttagttgtaacaagagcttcaagaagctttggagtctccacgagcacatcaagatagtacacggttatgccgagaaaaagttctcttgtgagatttgtgagaaaaagttttacaccatggcccacgtaagaaagcacatggttgcccacacaaaggatatgccattcacctgtgaaacttgtgggaaatcctttaagcgctccatgagtcttaaggtgcactccctccagcactctggggaaaaacctttccgatgtgaaaattgcgacgagcgatttcaatataagtatcagttgcgaagtcacatgtccattcatattggccacaagcagtttatgtgtcagtggtgtgggaaagacttcaacatgaaacagtattttgacgagcatatgaagactcatacaggggagaagccttttatttgtgagatctgtggcaagagctttactagtcgacctaatatgaaacgacaccggaggactcatacaggggaaaaaccctatccttgtgatgtttgcggacaaagatttcgctttagtaacatgttgaaagcccacaaggaaaaatgtttccgcgtgactagccccgttaacgtgccccctgcagtgcagattcctctcacgacctcccctgcgactcccgtcccaagtgtggtgaacaccgcaaccactcccacgccgcctatcaacatgaaccccgtgagcacactcccccctagacccatcccccacccattttctcacctgcatatccacccacacccacaccacccgcatcacctccctattccccctgtcccacatctgccgccacctccagctctctttaagtcggaacccctcaaccacagaggacagtccgaagataatttcctccgccacttagccgaaaaaaactccagtgcccagcaccattag

SEQ ID NO: 274811 - DNA, 1281 bp, Artificial Sequence
  derived and/or modified sequence
atgtctcacacagcttcttcatgtcaggagttggtggagaattgtgcggtgcatgtggctgggatggcgcaggaggacagtagaagaggacaggtccccagcagcttttatcatggagctaaccaggaactggacctgtcgaccaaggtgtacaaaagagaatctggatccccttactctgtgctggtggatactaaaatgtctaagcctcacctccatgaaacagaagagcagccctacttcagagagacacgcgctgttagcgacgtccatgccgtcaaagaagatagagaaaactccgacgatacagaagaggaggaagaagaggtttcctataagcgtgaacaaattattgtcgaatgtgtaagttgtaataaatcatttaaaaagctgtggagccttcacgaacatatcaaaatagtccacggctacgcagaaaagaaattctcctgcgagatctgcgagaagaagttctatactatggcccatgtgagaaaacatatggtcgcacacaccaaggatatgccatttacctgcgaaacgtgcggcaaatcttttaagagatccatgtcactaaaagtccactccctgcagcattccggagaaaagcccttcagatgtgagaactgcgacgaacgcttccagtacaagtatcagctacggtcacacatgtcgatccacatcgggcacaagcaatttatgtgtcagtggtgtggaaaagacttcaatatgaagcagtacttcgacgagcacatgaaaacccataccggtgaaaagcctttcatctgtgaaatctgcggcaaatcctttacatcgaggcctaatatgaagagacatcgccgtacacacacaggagagaaaccatatccctgcgacgtttgtggacaacgatttagattttcaaacatgttgaaagcccacaaggagaagtgttttcgcgttacaagtcccgtcaatgtaccgcctgctgtgcaaattccactaacgacctccccagctactcccgtgccctctgtagttaatactgctaccacgcctaccccccctattaacatgaacccagtgtccacattaccaccccgtcccatcccacatccattcagtcacttgcatatccacccacacccccatcacccccaccatctccctatcccacctgtcccgcatctgccacccccaccagccctttttaagagcgagccgctcaatcatagagggcagtccgaggataatttcttgcggcacctcgccgaaaaaaactcctccgcgcagcatcactag

SEQ ID NO: 274812 - DNA, 4543 bp, Artificial Sequence
  derived and/or modified sequence
gagcgccgcggctgcaggcccccgccgcagggatggaccgccgaggcggcggccggggcggcggaggcggaggcggccggcccggtggtctggagccgaaccggcaatatctctgaggtgtgactgttctctcagcttcatcaaatataaagtggaaagagttttgttcatgaagccactgaatgaaccattgcttgccttaaaggaagataagatgctcccaagtcccttgcagctctcttcagaagaaaaatcactagtgctctgctcttgccataataccaaacctttttgactcatgctttggtgctgcaacactggaagaattgcacacagtttccaggaatatctttttttcatttgagtgattctttgtggatgagaaaagatttgagtcttaataattaccttgttttaaagctatttctttatagtctgaactgtttaataaattgggccacttaccaatgagccacacagccagttcttgtcaggagctggttgaaaactgtgctgtgcatgtagcaggaatggcacaagaagatagccgtcgtggtcaagtgccatcttccttttatcatggtgccaaccaagaacttgacctgtccaccaaagtgtacaaaagggaatcaggaagtccttattctgtgttagtggacaccaagatgagcaaaccgcatctccatgaaacagaagaacagccatatttcagggagacaagagcagtgtctgacgtgcatgctgttaaggaagaccgggagaattctgatgacacagaggaggaagaggaagaagtctcttacaaaagggagcagatcatagtggagtgtgtttcctgtaacaaatcgttcaagaaactctggtcccttcatgaacatatcaagatcgtccatggatatgcagaaaagaaattttcctgtgaaatttgtgagaagaaattctataccatggctcatgtgcggaaacacatggttgcacacacaaaagacatgccatttacatgcgaaacctgtggaaaatcattcaaacgcagtatgtcactcaaggtgcactccttgcagcattctggagagaagccctttagatgcgagaactgtgacgaaaggtttcagtacaagtaccagctacgctcccacatgagcattcatattgggcacaaacagttcatgtgccagtggtgtggcaaggatttcaacatgaagcagtacttcgacgaacacatgaaaacacacactggagagaaaccctttatctgtgaaatctgtggcaaaagcttcaccagccgccccaacatgaagagacaccgcagaactcacacaggcgagaagccctatccatgtgatgtgtgtggccagcggttccgcttctcgaacatgcttaaggcccacaaggagaagtgctttcgggtgaccagccccgtgaatgtgccacctgctgtccagatcccacttacaacttccccagccaccccagttccttctgtggtgaacacagccacaaccccaacccctccaatcaatatgaatcctgtaagcactcttccccctcggcccatcccccaccccttctcacacctgcacatccacccacaccctcaccacccacaccaccttcccatccctccagtccctcacctcccgccacctccagctctctttaagagtgagcctttaaatcatagaggccagagtgaggacaactttctgcggcacctggcagagaagaacagttcagcacagcatcattaacatccgtctccttagtgtgttctccaggagacacgtccccatgtgtgagcgtgcacagagggagtcggtgagcatttccttagttctcagactctcctccgcctctaccaagagcttcgccagtgtcactgaatcaacagatccaagggaatgaacaagaagactaccttgagctcacagagggactgtcatctaaaccaggggaaccactgaactaaagcccaatttgcttgcattttctgatgacttttataagtttcaaatactcagacttgtggaattttataatttcatatcagctgatgagggtcccaggccataaaacaacggagagctgtacttgcttgtcacttggaggaaccacatccttgagacagcctgctgtcttgtatgtcttcagtaggaaacttctgacacacacattcaagggagttcctgcccctgagaagtgttcccatagctttccagtcgcaggttactttcacactacgtcagcttctctggtgagatcagggatgttacatattacttgaaaatgatttcataggaagtgaggatggggcaagaaaggaggtagaagctgaattttgcttaacttcagaaggaaatctgatacttgccttggctagttctgatcaactaaagagcctgtgtctgtactggatgtgccaaagagtcaagttgtttctggaatatccagctcctctgaatgaacacagcttcctccctacctgtcttttatgggtgaaaagggaccgtctgatgagcatgatagacatcctgtacaggactcaagactgtttcattgcatttgaaagttggtgggaagtattttattctgctagagctcctaaccctcctagaaatatcttttcatgctctattaattcaattcattagtttaaaaagaaacagtgtgacataattttggtgtttacttcttaagttgtctccccaagggcatatatgtagcctctgaaaatgggatgatttcttctcaatcttccataaatttgaatatgcattttattcatttcttgacatgggctgtgtgactgttttccatcagcagttctggctttgtccacaagggagcaataaagtacgttagctttattctcaaccttctaaagaaagatcccacttttaaatctcttctggaatagcctcttagctcaaagcttattcatgtattttgattatttaagaaattttcccttattacaaagtccagtcgtcgttcatccctcatgatgccaagcaatgattgatgtgtgggtgtggagtccttgtgggtcaggcatcttaattaattagactttttacatattgatgatccccagattgaaagccaggaccttcccataggggcgcctttgtgtgctaaaggcagagcaggcaggcttctccactcctatctcctccgcaggccaccaccatcacatctataggaggaacaagagcactgggggaactctggagtatgagtaaggaaatgcttctcaccttctctgctccaaagagatatctgttacatcagggaacaagtcctctaggtcaggcacttcctcctgaccagtgcaacgggcactccaggttagaaactgtgtgtgctccctctctgtcagttacttgtctaagggctcctatccgtggtcatcagctctctggccatgagttctgtttgtgcttattgcagcagcatcttcacaacaaacaggtcagtaatcaacctgggaagggaaaagacgacagtaaatattaccccctgtagagccgggaggcatttacacctggaatggccttcttaactgatttctgcctggccacctcacccccagccaagtctgaacctgagcaataccaggcacagagaggtgtctacttgtaactccaacacttgacaaaaaacaaaactgaagctgtgattggtttaggcagcaagtggccaggtgcaacttgtttgtttttatttttgttttccccaacagtactgagatcacttgcacttttcctcatttcttaagaaaatccagtttgcttgccatgacttgtttagcgttaggtttacaaagcttgttgttgaatgttgaatatttgtccaaaggagtttgacaaaatagaagctgcttggtccctgttctgcctgctaggtcataaggatgaaggccatgtggctggggtacttatgtcaagtccagaatggggcagtgtccctctcctacctctctgcggagacgcaattgaaggtcaagtagactcagtgtagggcaggcagctgtcatgctgcaaagaagtttagaggagtctttgggttggggaggtgacaggtaggtaggacaggatctcttaagatgggaaagatactggggagaggagggctgcttggccccagggaactgcagtgaggtggaactgagctccgctcctgaatctccaaaggagcccatgctgcccggcttccctgagtcattttttccagcatcctgtcagatccctcaatgtactgatttcccccttgtgttaactataccgatattatttttttagcaattgaaatgcacttttttatttcaactcaatcatgattttaagtataaaaaatttatagattgttaaaactacttttttgtgtatttttaaccactcaatgtagcattgtatattttattcttgtgagactctggtacaggtgtgccgcctaatgatttttctgagatgctgggcctttggatgtgtacggtaaccaacttaatgctaatgttcaaagtaaaaaaaaaaaaaaaaagcagcca

SEQ ID NO: 274813 - protein, 952 aa, Artificial Sequence
  derived and/or modified sequence
MGVRHPPCSHRLLAVCALVSLATAALLGHILLHDFLLVPRELSGSSPVLEETHPAHQQGASRPGPRDAQAHPGRPRAVPTQCDVPPNSRFDCAPDKAITQEQCEARGCCYIPAKQGLQGAQMGQPWCFFPPSYPSYKLENLSSSEMGYTATLTRTTPTFFPKDILTLRLDVMMETENRLHFTIKDPANRRYEVPLETPHVHSRAPSPLYSVEFSEEPFGVIVRRQLDGRVLLNTTVAPLFFADQFLQLSTSLPSQYITGLAEHLSPLMLSTSWTRITLWNRDLAPTPGANLYGSHPFYLALEDGGSAHGVFLLNSNAMDVVLQPSPALSWRSTGGILDVYIFLGPEPKSVVQQYLDVVGYPFMPPYWGLGFHLCRWGYSSTAITRQVVENMTRAHFPLDVQWNDLDYMDSRRDFTFNKDGFRDFPAMVQELHQGGRRYMMIVDPAISSSGPAGSYRPYDEGLRRGVFITNETGQPLIGKVWPGSTAFPDFTNPTALAWWEDMVAEFHDQVPFDGMWIDMNEPSNFIRGSEDGCPNNELENPPYVPGVVGGTLQAATICASSHQFLSTHYNLHNLYGLTEAIASHRALVKARGTRPFVISRSTFAGHGRYAGHWTGDVWSSWEQLASSVPEILQFNLLGVPLVGADVCGFLGNTSEELCVRWTQLGAFYPFMRNHNSLLSLPQEPYSFSEPAQQAMRKALTLRYALLPHLYTLFHQAHVAGETVARPLFLEFPKDSSTWTVDHQLLWGEALLITPVLQAGKAEVTGYFPLGTWYDLQTVPVEALGSLPPPPAAPREPAIHSEGQWVTLPAPLDTINVHLRAGYIIPLQGPGLTTTESRQQPMALAVALTKGGEARGELFWDDGESLEVLERGAYTQVIFLARNNTIVNELVRVTSEGAGLQLQKVTVLGVATAPQQVLSNGVPVSNFTYSPDTKVLDICVSLLMGEQFLVSWC

SEQ ID NO: 274814 - DNA, 3597 bp, Artificial Sequence
  derived and/or modified sequence
acccgcctctgcgcgcccccgggcacgaccccggagtctccgcgggcggccagggcgcgcgtgcgcggaggttctcctcgtccgcccgttgttcagcgagggaggctctgcgcgtgccgcagctgacggggaaactgaggcacggagcgggcctgtaggagctgtccaggccatctccaaccatgggagtgaggcacccgccctgctcccaccggctcctggccgtctgcgccctcgtgtccttggcaaccgctgcactcctggggcacatcctactccatgatttcctgctggttccccgagagctgagtggctcctccccagtcctggaggagactcacccagctcaccagcagggagccagcagaccagggccccgggatgcccaggcacaccccggccgtcccagagcagtgcccacacagtgcgacgtcccccccaacagccgcttcgattgcgcccctgacaaggccatcacccaggaacagtgcgaggcccgcggctgttgctacatccctgcaaagcaggggctgcagggagcccagatggggcagccctggtgcttcttcccacccagctaccccagctacaagctggagaacctgagctcctctgaaatgggctacacggccaccctgacccgtaccacccccaccttcttccccaaggacatcctgaccctgcggctggacgtgatgatggagactgagaaccgcctccacttcacgatcaaagatccagctaacaggcgctacgaggtgcccttggagaccccgcatgtccacagccgggcaccgtccccactctacagcgtggagttctccgaggagcccttcggggtgatcgtgcgccggcagctggacggccgcgtgctgctgaacacgacggtggcgcccctgttctttgcggaccagttccttcagctgtccacctcgctgccctcgcagtatatcacaggcctcgccgagcacctcagtcccctgatgctcagcaccagctggaccaggatcaccctgtggaaccgggaccttgcgcccacgcccggtgcgaacctctacgggtctcaccctttctacctggcgctggaggacggcgggtcggcacacggggtgttcctgctaaacagcaatgccatggatgtggtcctgcagccgagccctgcccttagctggaggtcgacaggtgggatcctggatgtctacatcttcctgggcccagagcccaagagcgtggtgcagcagtacctggacgttgtgggatacccgttcatgccgccatactggggcctgggcttccacctgtgccgctggggctactcctccaccgctatcacccgccaggtggtggagaacatgaccagggcccacttccccctggacgtccagtggaacgacctggactacatggactcccggagggacttcacgttcaacaaggatggcttccgggacttcccggccatggtgcaggagctgcaccagggcggccggcgctacatgatgatcgtggatcctgccatcagcagctcgggccctgccgggagctacaggccctacgacgagggtctgcggaggggggttttcatcaccaacgagaccggccagccgctgattgggaaggtatggcccgggtccactgccttccccgacttcaccaaccccacagccctggcctggtgggaggacatggtggctgagttccatgaccaggtgcccttcgacggcatgtggattgacatgaacgagccttccaacttcatcaggggctctgaggacggctgccccaacaatgagctggagaacccaccctacgtgcctggggtggttggggggaccctccaggcggccaccatctgtgcctccagccaccagtttctctccacacactacaacctgcacaacctctacggcctgaccgaagccatcgcctcccacagggcgctggtgaaggctcgggggacacgcccatttgtgatctcccgctcgacctttgctggccacggccgatacgccggccactggacgggggacgtgtggagctcctgggagcagctcgcctcctccgtgccagaaatcctgcagtttaacctgctgggggtgcctctggtcggggccgacgtctgcggcttcctgggcaacacctcagaggagctgtgtgtgcgctggacccagctgggggccttctaccccttcatgcggaaccacaacagcctgctcagtctgccccaggagccgtacagcttcagcgagccggcccagcaggccatgaggaaggccctcaccctgcgctacgcactcctcccccacctctacacactgttccaccaggcccacgtcgcgggggagaccgtggcccggcccctcttcctggagttccccaaggactctagcacctggactgtggaccaccagctcctgtggggggaggccctgctcatcaccccagtgctccaggccgggaaggccgaagtgactggctacttccccttgggcacatggtacgacctgcagacggtgccagtagaggcccttggcagcctcccacccccacctgcagctccccgtgagccagccatccacagcgaggggcagtgggtgacgctgccggcccccctggacaccatcaacgtccacctccgggctgggtacatcatccccctgcagggccctggcctcacaaccacagagtcccgccagcagcccatggccctggctgtggccctgaccaagggtggggaggcccgaggggagctgttctgggacgatggagagagcctggaagtgctggagcgaggggcctacacacaggtcatcttcctggccaggaataacacgatcgtgaatgagctggtacgtgtgaccagtgagggagctggcctgcagctgcagaaggtgactgtcctgggcgtggccacggcgccccagcaggtcctctccaacggtgtccctgtctccaacttcacctacagccccgacaccaaggtcctggacatctgtgtctcgctgttgatgggagagcagtttctcgtcagctggtgttagccgggcggagtgtgttagtctctccagagggaggctggttccccagggaagcagagcctgtgtgcgggcagcagctgtgtgcgggcctgggggttgcatgtgtcacctggagctgggcactaaccattccaagccgccgcatcgcttgtttccacctcctgggccggggctctggcccccaacgtgtctaggagagctttctccctagatcgcactgtgggccggggccctggagggctgctctgtgttaataagattgtaaggtttgccctcctcacctgttgccggcatgcgggtagtattagccacccccctccatctgttcccagcaccggagaagggggtgctcaggtggaggtgtggggtatgcacctgagctcctgcttcgcgcctgctgctctgccccaacgcgaccgctgcccggctgcccagagggctggatgcctgccggtccccgagcaagcctgggaactcaggaaaattcacaggacttgggagattctaaatcttaagtgcaattatttttaataaaaggggcatttggaatcaaaaaaaa

SEQ ID NO: 274815 - DNA, 3517 bp, Artificial Sequence
  derived and/or modified sequence
acccgcctctgcgcgcccccgggcacgaccccggagtctccgcgggcggccagggcgcgcgtgcgcggaggcctgtaggagctgtccaggccatctccaaccatgggagtgaggcacccgccctgctcccaccggctcctggccgtctgcgccctcgtgtccttggcaaccgctgcactcctggggcacatcctactccatgatttcctgctggttccccgagagctgagtggctcctccccagtcctggaggagactcacccagctcaccagcagggagccagcagaccagggccccgggatgcccaggcacaccccggccgtcccagagcagtgcccacacagtgcgacgtcccccccaacagccgcttcgattgcgcccctgacaaggccatcacccaggaacagtgcgaggcccgcggctgttgctacatccctgcaaagcaggggctgcagggagcccagatggggcagccctggtgcttcttcccacccagctaccccagctacaagctggagaacctgagctcctctgaaatgggctacacggccaccctgacccgtaccacccccaccttcttccccaaggacatcctgaccctgcggctggacgtgatgatggagactgagaaccgcctccacttcacgatcaaagatccagctaacaggcgctacgaggtgcccttggagaccccgcatgtccacagccgggcaccgtccccactctacagcgtggagttctccgaggagcccttcggggtgatcgtgcgccggcagctggacggccgcgtgctgctgaacacgacggtggcgcccctgttctttgcggaccagttccttcagctgtccacctcgctgccctcgcagtatatcacaggcctcgccgagcacctcagtcccctgatgctcagcaccagctggaccaggatcaccctgtggaaccgggaccttgcgcccacgcccggtgcgaacctctacgggtctcaccctttctacctggcgctggaggacggcgggtcggcacacggggtgttcctgctaaacagcaatgccatggatgtggtcctgcagccgagccctgcccttagctggaggtcgacaggtgggatcctggatgtctacatcttcctgggcccagagcccaagagcgtggtgcagcagtacctggacgttgtgggatacccgttcatgccgccatactggggcctgggcttccacctgtgccgctggggctactcctccaccgctatcacccgccaggtggtggagaacatgaccagggcccacttccccctggacgtccagtggaacgacctggactacatggactcccggagggacttcacgttcaacaaggatggcttccgggacttcccggccatggtgcaggagctgcaccagggcggccggcgctacatgatgatcgtggatcctgccatcagcagctcgggccctgccgggagctacaggccctacgacgagggtctgcggaggggggttttcatcaccaacgagaccggccagccgctgattgggaaggtatggcccgggtccactgccttccccgacttcaccaaccccacagccctggcctggtgggaggacatggtggctgagttccatgaccaggtgcccttcgacggcatgtggattgacatgaacgagccttccaacttcatcaggggctctgaggacggctgccccaacaatgagctggagaacccaccctacgtgcctggggtggttggggggaccctccaggcggccaccatctgtgcctccagccaccagtttctctccacacactacaacctgcacaacctctacggcctgaccgaagccatcgcctcccacagggcgctggtgaaggctcgggggacacgcccatttgtgatctcccgctcgacctttgctggccacggccgatacgccggccactggacgggggacgtgtggagctcctgggagcagctcgcctcctccgtgccagaaatcctgcagtttaacctgctgggggtgcctctggtcggggccgacgtctgcggcttcctgggcaacacctcagaggagctgtgtgtgcgctggacccagctgggggccttctaccccttcatgcggaaccacaacagcctgctcagtctgccccaggagccgtacagcttcagcgagccggcccagcaggccatgaggaaggccctcaccctgcgctacgcactcctcccccacctctacacactgttccaccaggcccacgtcgcgggggagaccgtggcccggcccctcttcctggagttccccaaggactctagcacctggactgtggaccaccagctcctgtggggggaggccctgctcatcaccccagtgctccaggccgggaaggccgaagtgactggctacttccccttgggcacatggtacgacctgcagacggtgccagtagaggcccttggcagcctcccacccccacctgcagctccccgtgagccagccatccacagcgaggggcagtgggtgacgctgccggcccccctggacaccatcaacgtccacctccgggctgggtacatcatccccctgcagggccctggcctcacaaccacagagtcccgccagcagcccatggccctggctgtggccctgaccaagggtggggaggcccgaggggagctgttctgggacgatggagagagcctggaagtgctggagcgaggggcctacacacaggtcatcttcctggccaggaataacacgatcgtgaatgagctggtacgtgtgaccagtgagggagctggcctgcagctgcagaaggtgactgtcctgggcgtggccacggcgccccagcaggtcctctccaacggtgtccctgtctccaacttcacctacagccccgacaccaaggtcctggacatctgtgtctcgctgttgatgggagagcagtttctcgtcagctggtgttagccgggcggagtgtgttagtctctccagagggaggctggttccccagggaagcagagcctgtgtgcgggcagcagctgtgtgcgggcctgggggttgcatgtgtcacctggagctgggcactaaccattccaagccgccgcatcgcttgtttccacctcctgggccggggctctggcccccaacgtgtctaggagagctttctccctagatcgcactgtgggccggggccctggagggctgctctgtgttaataagattgtaaggtttgccctcctcacctgttgccggcatgcgggtagtattagccacccccctccatctgttcccagcaccggagaagggggtgctcaggtggaggtgtggggtatgcacctgagctcctgcttcgcgcctgctgctctgccccaacgcgaccgctgcccggctgcccagagggctggatgcctgccggtccccgagcaagcctgggaactcaggaaaattcacaggacttgggagattctaaatcttaagtgcaattatttttaataaaaggggcatttggaatcaaaaaaaa

SEQ ID NO: 274816 - DNA, 3782 bp, Artificial Sequence
  derived and/or modified sequence
acccgcctctgcgcgcccccgggcacgaccccggagtctccgcgggcggccagggcgcgcgtgcgcggaggtgagccgggccggggctgcggggcttccctgagcgcgggccgggtcggtggggcggtcggctgcccgcgcggcctctcagttgggaaagctgaggttgtcgccggggccgcgggtggaggtcggggatgaggcagcaggtaggacagtgacctcggtgacgcgaaggaccccggccacctctaggttctcctcgtccgcccgttgttcagcgagggaggctctgcgcgtgccgcagctgacggggaaactgaggcacggagcgggcctgtaggagctgtccaggccatctccaaccatgggagtgaggcacccgccctgctcccaccggctcctggccgtctgcgccctcgtgtccttggcaaccgctgcactcctggggcacatcctactccatgatttcctgctggttccccgagagctgagtggctcctccccagtcctggaggagactcacccagctcaccagcagggagccagcagaccagggccccgggatgcccaggcacaccccggccgtcccagagcagtgcccacacagtgcgacgtcccccccaacagccgcttcgattgcgcccctgacaaggccatcacccaggaacagtgcgaggcccgcggctgttgctacatccctgcaaagcaggggctgcagggagcccagatggggcagccctggtgcttcttcccacccagctaccccagctacaagctggagaacctgagctcctctgaaatgggctacacggccaccctgacccgtaccacccccaccttcttccccaaggacatcctgaccctgcggctggacgtgatgatggagactgagaaccgcctccacttcacgatcaaagatccagctaacaggcgctacgaggtgcccttggagaccccgcatgtccacagccgggcaccgtccccactctacagcgtggagttctccgaggagcccttcggggtgatcgtgcgccggcagctggacggccgcgtgctgctgaacacgacggtggcgcccctgttctttgcggaccagttccttcagctgtccacctcgctgccctcgcagtatatcacaggcctcgccgagcacctcagtcccctgatgctcagcaccagctggaccaggatcaccctgtggaaccgggaccttgcgcccacgcccggtgcgaacctctacgggtctcaccctttctacctggcgctggaggacggcgggtcggcacacggggtgttcctgctaaacagcaatgccatggatgtggtcctgcagccgagccctgcccttagctggaggtcgacaggtgggatcctggatgtctacatcttcctgggcccagagcccaagagcgtggtgcagcagtacctggacgttgtgggatacccgttcatgccgccatactggggcctgggcttccacctgtgccgctggggctactcctccaccgctatcacccgccaggtggtggagaacatgaccagggcccacttccccctggacgtccagtggaacgacctggactacatggactcccggagggacttcacgttcaacaaggatggcttccgggacttcccggccatggtgcaggagctgcaccagggcggccggcgctacatgatgatcgtggatcctgccatcagcagctcgggccctgccgggagctacaggccctacgacgagggtctgcggaggggggttttcatcaccaacgagaccggccagccgctgattgggaaggtatggcccgggtccactgccttccccgacttcaccaaccccacagccctggcctggtgggaggacatggtggctgagttccatgaccaggtgcccttcgacggcatgtggattgacatgaacgagccttccaacttcatcaggggctctgaggacggctgccccaacaatgagctggagaacccaccctacgtgcctggggtggttggggggaccctccaggcggccaccatctgtgcctccagccaccagtttctctccacacactacaacctgcacaacctctacggcctgaccgaagccatcgcctcccacagggcgctggtgaaggctcgggggacacgcccatttgtgatctcccgctcgacctttgctggccacggccgatacgccggccactggacgggggacgtgtggagctcctgggagcagctcgcctcctccgtgccagaaatcctgcagtttaacctgctgggggtgcctctggtcggggccgacgtctgcggcttcctgggcaacacctcagaggagctgtgtgtgcgctggacccagctgggggccttctaccccttcatgcggaaccacaacagcctgctcagtctgccccaggagccgtacagcttcagcgagccggcccagcaggccatgaggaaggccctcaccctgcgctacgcactcctcccccacctctacacactgttccaccaggcccacgtcgcgggggagaccgtggcccggcccctcttcctggagttccccaaggactctagcacctggactgtggaccaccagctcctgtggggggaggccctgctcatcaccccagtgctccaggccgggaaggccgaagtgactggctacttccccttgggcacatggtacgacctgcagacggtgccagtagaggcccttggcagcctcccacccccacctgcagctccccgtgagccagccatccacagcgaggggcagtgggtgacgctgccggcccccctggacaccatcaacgtccacctccgggctgggtacatcatccccctgcagggccctggcctcacaaccacagagtcccgccagcagcccatggccctggctgtggccctgaccaagggtggggaggcccgaggggagctgttctgggacgatggagagagcctggaagtgctggagcgaggggcctacacacaggtcatcttcctggccaggaataacacgatcgtgaatgagctggtacgtgtgaccagtgagggagctggcctgcagctgcagaaggtgactgtcctgggcgtggccacggcgccccagcaggtcctctccaacggtgtccctgtctccaacttcacctacagccccgacaccaaggtcctggacatctgtgtctcgctgttgatgggagagcagtttctcgtcagctggtgttagccgggcggagtgtgttagtctctccagagggaggctggttccccagggaagcagagcctgtgtgcgggcagcagctgtgtgcgggcctgggggttgcatgtgtcacctggagctgggcactaaccattccaagccgccgcatcgcttgtttccacctcctgggccggggctctggcccccaacgtgtctaggagagctttctccctagatcgcactgtgggccggggccctggagggctgctctgtgttaataagattgtaaggtttgccctcctcacctgttgccggcatgcgggtagtattagccacccccctccatctgttcccagcaccggagaagggggtgctcaggtggaggtgtggggtatgcacctgagctcctgcttcgcgcctgctgctctgccccaacgcgaccgctgcccggctgcccagagggctggatgcctgccggtccccgagcaagcctgggaactcaggaaaattcacaggacttgggagattctaaatcttaagtgcaattatttttaataaaaggggcatttggaatcaaaaaaaa

SEQ ID NO: 274817 - DNA, 126 bp, Artificial Sequence
  derived and/or modified sequence
atgggagttagacacccaccttgtagccatcgcctgctggccgtctgcgccctggtgagtctggcaaccgcggccttattgcctcagaattctaagatcccaggccctacatttctcgatccccac

SEQ ID NO: 274818 - DNA, 126 bp, Artificial Sequence
  derived and/or modified sequence
atgggcgttagacatccgccatgttctcatcgcttgcttgccgtctgtgcgctcgtgagcttagctacagcggcactgctgccacagaacagtaaaattcccggaccgaccttcctggatccccat

SEQ ID NO: 274819 - DNA, 126 bp, Artificial Sequence
  derived and/or modified sequence
atgggtgtgcggcacccaccctgcagtcatcggttgctggctgtttgtgccttggtctcactcgccacggccgcattgctgccgcagaatagtaaaatacccggcccaacattcctagatccgcat

SEQ ID NO: 274820 - DNA, 126 bp, Artificial Sequence
  derived and/or modified sequence
atgggcgtgaggcaccccccgtgttcccatcgcctgcttgcagtgtgcgcgctcgtaagcctggctaccgcagcccttctgcctcagaatagcaaaatccccgggcccacattcctggatccacac

SEQ ID NO: 274821 - DNA, 126 bp, Artificial Sequence
  derived and/or modified sequence
atgggagtacgtcaccctccatgttctcatagactattagcagtatgtgctctggtaagtcttgctaccgctgcattgctcccacaaaattcgaaaataccaggaccaactttccttgatccgcat

SEQ ID NO: 274822 - DNA, 126 bp, Artificial Sequence
  derived and/or modified sequence
atgggtgtgcgccatccgccgtgttcgcacagactgctggcggtgtgcgcactcgtgtcgctcgcaaccgcggctttgctccctcagaactccaaaatcccgggacctactttcctcgatcctcac

SEQ ID NO: 274823 - DNA, 126 bp, Artificial Sequence
  derived and/or modified sequence
atgggagtaagacatcctccttgctcccatagacttcttgccgtgtgcgcactagtatccttagctactgccgcactgttgccacagaacagcaagatccccgggcctacctttctcgacccccat

SEQ ID NO: 274824 - DNA, 126 bp, Artificial Sequence
  derived and/or modified sequence
atgggcgttcgccaccccccctgtagccacaggctccttgcagtgtgcgccctggtatcactggccaccgcagcgttgctccctcagaactctaaaattcccggtcccacattcttggaccctcat

SEQ ID NO: 274825 - DNA, 126 bp, Artificial Sequence
  derived and/or modified sequence
atgggtgtgaggcaccctccctgcagccatagacttctggcagtgtgtgcccttgtgtccctggcgaccgctgcccttctgccccagaatagcaagatccccgggccaacttttctggatccacac

SEQ ID NO: 274826 - DNA, 126 bp, Artificial Sequence
  derived and/or modified sequence
atgggagtgcgtcacccaccttgttcccatcggctgctcgccgtgtgtgcgctcgtgtcactcgccaccgcggcattgcttccacagaatagcaagattccaggccccacctttctggatccgcat

SEQ ID NO: 274827 - DNA, 126 bp, Artificial Sequence
  derived and/or modified sequence
atgggcgttcgccaccctccatgcagccatcggcttcttgcagtctgtgccctcgtgtcactggcaaccgccgctctgttgcctcaaaactccaagattcccggtcctacttttctggatccacat

SEQ ID NO: 274828 - DNA, 126 bp, Artificial Sequence
  derived and/or modified sequence
atgggagttcgtcaccctccatgctcacacagattgttggctgtgtgcgccttggtttctttggctacagctgccctgctccctcaaaactcaaaaattccaggaccaacattccttgatcctcac

SEQ ID NO: 274829 - DNA, 126 bp, Artificial Sequence
  derived and/or modified sequence
atgggcgtccggcacccgccttgctcgcatcgcctgctggccgtgtgcgccctcgtgagcctggcgaccgctgccctgttgccacagaattccaagatacctggccctacgtttctcgatccacac

SEQ ID NO: 274830 - DNA, 126 bp, Artificial Sequence
  derived and/or modified sequence
atgggagtgcgacatccgccatgctcccaccgtctgcttgcagtctgtgccctcgtgtcgcttgcgacggctgcacttctgccccaaaactcaaagatccctggccctacctttttggatccgcat

SEQ ID NO: 274831 - DNA, 126 bp, Artificial Sequence
  derived and/or modified sequence
atgggcgtgagacatcctccttgttcgcataggctcctggcagtgtgtgctctcgtgtcacttgccactgcggcactgctcccacaaaattccaagattcctggacctacctttctcgatcctcat

SEQ ID NO: 274832 - DNA, 126 bp, Artificial Sequence
  derived and/or modified sequence
atgggagtccgccatccgccgtgcagccaccggctcctggccgtgtgcgcacttgtgtcgttggccactgctgcacttctgccgcagaactccaaaatccctgggccaaccttccttgatcctcac

SEQ ID NO: 274833 - DNA, 126 bp, Artificial Sequence
  derived and/or modified sequence
atgggtgttcgccaccccccctgttctcatcggttattggctgtatgcgcccttgtgtccctggcaactgcagcgctgttgccgcaaaatagcaagatccccggtccaacatttttagaccctcac

SEQ ID NO: 274834 - DNA, 126 bp, Artificial Sequence
  derived and/or modified sequence
atgggggtccgccatcctccttgcagccaccggttacttgccgtatgtgccctcgtctcactcgctacggcagctttgcttcctcaaaacagtaagatcccaggaccaacgttcctggacccgcac

SEQ ID NO: 274835 - DNA, 126 bp, Artificial Sequence
  derived and/or modified sequence
atgggcgtcagacacccgccctgcagtcaccgactcctcgccgtgtgcgcactggtctcgctcgccacagctgcgctgctgccccagaatagcaaaattcccggccctacatttctggatccgcac

SEQ ID NO: 274836 - DNA, 126 bp, Artificial Sequence
  derived and/or modified sequence
atgggggtgagacacccgccatgttctcataggcttcttgcagtctgcgctcttgtgagccttgcaactgcggcattgcttccgcaaaattcgaagattcctggacctacgtttttggatccgcat

SEQ ID NO: 274837 - DNA, 126 bp, Artificial Sequence
  derived and/or modified sequence
atgggtgtgagacacccaccatgttcgcacagactcctagctgtctgcgctctggtatcactggcaaccgccgctctgctacctcagaatagtaagattcctgggccgactttccttgatccccat

SEQ ID NO: 274838 - DNA, 126 bp, Artificial Sequence
  derived and/or modified sequence
atgggtgtacgtcatccgccgtgttcgcatcgactactagcggtatgtgcgttagtttcgctagcgacggcggcgttactaccgcaaaattcgaaaataccgggtccgacgtttttagatccgcat

SEQ ID NO: 274839 - DNA, 126 bp, Artificial Sequence
  derived and/or modified sequence
atgggagtgaggcacccgccttgcagccatagactcttggcagtctgtgccctggtgtccttggcgaccgctgccttgctgcctcaaaactcgaagatcccaggcccgacctttctcgacccgcat

SEQ ID NO: 274840 - DNA, 126 bp, Artificial Sequence
  derived and/or modified sequence
atgggagtgcgacatcccccatgctcacacagactgctcgccgtgtgcgctttggtctccctggctacagccgccttgcttccgcagaacagcaaaattcccggccccacctttcttgacccccac

SEQ ID NO: 274841 - DNA, 126 bp, Artificial Sequence
  derived and/or modified sequence
atgggagtgcggcaccctccttgttcacatcggttgctggcagtatgtgcactggtgtctctcgcaaccgcagccctgcttcctcagaatagtaaaatacccggaccgacttttctcgatccccac

SEQ ID NO: 274842 - DNA, 126 bp, Artificial Sequence
  derived and/or modified sequence
atgggagtccgacaccctccgtgttctcaccgactgctagccgtgtgcgccctggtcagtttagcaaccgccgccctgctaccacagaactcaaagatccctggaccaactttcctggatccacac

SEQ ID NO: 274843 - DNA, 126 bp, Artificial Sequence
  derived and/or modified sequence
atgggtgtcagacatcccccatgttcgcataggctgcttgcagtgtgtgcacttgtctccctggccactgctgcccttcttcctcagaactcgaaaatcccagggccaacctttctggaccctcac

SEQ ID NO: 274844 - DNA, 126 bp, Artificial Sequence
  derived and/or modified sequence
atgggagtgcgccacccaccgtgttcgcatcgattgctcgcagtctgcgcgctcgtgtccctcgccactgctgcattgctgccccagaactccaagatcccgggcccgaccttccttgaccctcac

SEQ ID NO: 274845 - DNA, 126 bp, Artificial Sequence
  derived and/or modified sequence
atgggagtacggcacccaccttgctcacataggctactagccgtatgtgccttagtctcattagctacagcggccctccttcctcagaactctaaaattcccggacctactttccttgacccccac

SEQ ID NO: 274846 - DNA, 126 bp, Artificial Sequence
  derived and/or modified sequence
atgggggtgcgccaccccccatgctctcaccgcctgttagccgtatgtgcactagtgagcttggcgaccgcggctctgctgccgcaaaactcaaagatccccggaccaacgttcctggatccgcat

SEQ ID NO: 274847 - DNA, 126 bp, Artificial Sequence
  derived and/or modified sequence
atgggagttcggcaccccccatgtagccatagactcctcgcagtgtgcgcgcttgtgtcgcttgccaccgctgcactgttgcctcaaaactccaagattccggggccgacttttctggatcctcat

SEQ ID NO: 274848 - DNA, 126 bp, Artificial Sequence
  derived and/or modified sequence
atgggcgtgcgccacccgccatgttctcaccgcctcctcgctgtttgtgccctggtgtccctggccactgcagctctgcttccccagaacagtaagattcctggtcccactttccttgacccacac

SEQ ID NO: 274849 - DNA, 126 bp, Artificial Sequence
  derived and/or modified sequence
atgggggtgaggcacccgccctgcagccacaggcttctcgcagtgtgtgccctggtcagcttagcaacagccgccctgctgcctcagaactctaaaattccagggccaacattcctagatccccac

SEQ ID NO: 274850 - DNA, 126 bp, Artificial Sequence
  derived and/or modified sequence
atgggcgtgcgacatccaccgtgctcgcatcgtctgctggcagtttgtgcattggtcagtcttgccactgcagcactgttaccacaaaattcaaagatcccaggccctacattcctggatcctcac

SEQ ID NO: 274851 - DNA, 126 bp, Artificial Sequence
  derived and/or modified sequence
atgggcgtgcgtcatccaccttgcagccacagacttttggcagtctgcgccttggtgagtctggcaaccgccgcattgcttcctcaaaactcaaagattccaggacctacctttctagacccacat

SEQ ID NO: 274852 - DNA, 126 bp, Artificial Sequence
  derived and/or modified sequence
atgggcgtgcggcatcctccttgttcacaccgcctgctggcggtgtgtgcgctggtgtcccttgccacggcagcactgcttccccaaaactcgaaaattcctggtcctactttcctcgatccccac

SEQ ID NO: 274853 - DNA, 126 bp, Artificial Sequence
  derived and/or modified sequence
atgggggtgcgtcatcccccttgtagccatagactgcttgcagtgtgcgcactggttagccttgccaccgcggcactccttcctcaaaactcaaaaatccccggtcctacctttctggacccacac

SEQ ID NO: 274854 - DNA, 126 bp, Artificial Sequence
  derived and/or modified sequence
atgggcgtgcgccacccaccgtgctcgcaccggctgctggcggtgtgtgccctcgtctccctcgcaactgccgctttgcttccgcagaacagcaagatccccggacctaccttcctggacccgcat

SEQ ID NO: 274855 - DNA, 126 bp, Artificial Sequence
  derived and/or modified sequence
atgggggtccgtcatcctccctgttcccaccgattgttggctgtgtgcgccctagttagcctggcaaccgcggccctgctgccacagaatagtaagatacccggcccgaccttcctggacccacat

SEQ ID NO: 274856 - DNA, 126 bp, Artificial Sequence
  derived and/or modified sequence
atgggagtcagacatccgccctgtagccatcggctgctcgcagtctgcgccctggtgagcctcgccactgcagccttgctccctcaaaactcaaagatcccggggccgactttcctggacccacac

SEQ ID NO: 274857 - DNA, 126 bp, Artificial Sequence
  derived and/or modified sequence
atgggtgtgcggcaccccccatgtagtcacagacttctggcagtatgtgctctggtgtctttagcaaccgcggccttgctccctcaaaactccaagatccctggacccacctttttagatcctcac

SEQ ID NO: 274858 - DNA, 126 bp, Artificial Sequence
  derived and/or modified sequence
atgggagtgcgccatccgccatgttcccacagacttcttgctgtgtgtgcactggttagccttgcgacagctgcactgttgccacagaatagtaagatccctggacccaccttccttgacccccat

SEQ ID NO: 274859 - DNA, 126 bp, Artificial Sequence
  derived and/or modified sequence
atgggagttaggcatcccccctgcagtcaccgactattggccgtgtgcgcattggtcagtctcgccaccgctgcactcctgccacaaaacagtaagatacctggccctactttcctggacccgcac

SEQ ID NO: 274860 - DNA, 126 bp, Artificial Sequence
  derived and/or modified sequence
atgggggtcagacacccaccgtgctcacataggctgctggctgtctgtgctcttgtgtcgctcgccaccgcggctcttctgccccagaactcgaagatcccaggaccgactttcctggatccgcat

SEQ ID NO: 274861 - DNA, 126 bp, Artificial Sequence
  derived and/or modified sequence
atgggagtcaggcatcccccatgcagccatagactcttagctgtttgcgctttagttagcttggctacagctgccttattgcctcaaaatagtaagatcccaggtcctaccttccttgaccctcat

SEQ ID NO: 274862 - DNA, 126 bp, Artificial Sequence
  derived and/or modified sequence
atgggggtgagacatccgccatgttcgcatcgcctactggctgtatgcgccctcgtgtcattggcgaccgccgcccttctgcctcaaaacagcaaaatacccggaccaacctttcttgacccccac

SEQ ID NO: 274863 - DNA, 126 bp, Artificial Sequence
  derived and/or modified sequence
atgggagtgaggcatcctccgtgctctcacaggctgctcgcggtttgtgcgcttgtgagtcttgctaccgctgcactccttcctcagaactctaaaatcccgggtcccacctttctggacccccac

SEQ ID NO: 274864 - DNA, 126 bp, Artificial Sequence
  derived and/or modified sequence
atgggagttaggcacccgccgtgttcccaccgtttactggccgtatgtgcattggtctctttggctactgccgcccttctgccccagaatagcaaaatccctgggcctacattcctggacccccat

SEQ ID NO: 274865 - DNA, 126 bp, Artificial Sequence
  derived and/or modified sequence
atgggagttcgacatccaccttgtagtcatcgattattagcagtttgcgcacttgtatcattagcaacagcagctttgttaccacaaaattctaagattcctggaccaacattcttagatccacat

SEQ ID NO: 274866 - DNA, 126 bp, Artificial Sequence
  derived and/or modified sequence
atgggagttagacatccgccatgttcacatcggctccttgcggtgtgtgcccttgtctcgctggccaccgccgcactgcttccacagaacagcaaaattcccggtcccacttttctggacccacac

SEQ ID NO: 274867 - DNA, 126 bp, Artificial Sequence
  derived and/or modified sequence
atgggagtcaggcatcctccttgctcgcatcggctgctggcggtgtgtgcccttgtttcactggcgactgctgctctcctcccacagaacagcaagattccggggccgaccttcctggacccacac

SEQ ID NO: 274868 - DNA, 126 bp, Artificial Sequence
  derived and/or modified sequence
atgggggtgaggcaccctccatgctctcaccggctgctggctgtgtgcgccctggtgagcttagcaactgctgcacttctgccacagaatagcaagattcccggccccacattcctggaccctcac

SEQ ID NO: 274869 - DNA, 126 bp, Artificial Sequence
  derived and/or modified sequence
atgggcgtccggcatccgccgtgcagccaccgcttgctggctgtgtgtgcattggtgtcgctcgccactgcggcccttctgcctcagaactcgaagatcccaggaccgacgttcctcgacccgcac

SEQ ID NO: 274870 - DNA, 126 bp, Artificial Sequence
  derived and/or modified sequence
atgggagtgcgtcacccgccttgttcccatcgcctgttggccgtgtgcgcgcttgtctcattggcaaccgcggctttgcttccacagaacagcaagatcccgggccccactttcctggacccccac

SEQ ID NO: 274871 - DNA, 126 bp, Artificial Sequence
  derived and/or modified sequence
atgggggtgcggcatccgccttgttcgcacaggctcctggcagtgtgtgcactcgtgtcccttgcaaccgcggccctgctgcctcaaaattctaagattccgggaccaacttttctggatccccac

SEQ ID NO: 274872 - DNA, 126 bp, Artificial Sequence
  derived and/or modified sequence
atgggcgttagacacccaccatgcagtcaccgcctgctggccgtctgtgctctggtatccctagctaccgccgctctgctgccccagaacagtaagatcccaggccctaccttcctggaccctcac

SEQ ID NO: 274873 - DNA, 126 bp, Artificial Sequence
  derived and/or modified sequence
atgggcgttcggcaccctccctgctcccatcggctgcttgccgtatgtgcgctagttagcctggctactgccgctttattgccacaaaacagcaagatccctggtcccaccttcttagacccacac

SEQ ID NO: 274874 - DNA, 126 bp, Artificial Sequence
  derived and/or modified sequence
atgggagttaggcaccctccttgtagccatagattgctcgcggtctgcgctttggttagcctcgccacagcggctctgctgccacaaaactcgaagatcccaggacctaccttcctcgaccctcac

SEQ ID NO: 274875 - DNA, 126 bp, Artificial Sequence
  derived and/or modified sequence
atgggcgtcagacaccctccgtgctctcataggctgctggcggtgtgtgcccttgtgagccttgctactgcggccctgctgcctcagaattccaagatcccaggaccgacgttcctcgatccgcat

SEQ ID NO: 274876 - DNA, 126 bp, Artificial Sequence
  derived and/or modified sequence
atgggagtcagacacccaccctgttcccatcgcctgctggcagtgtgtgcattggtcagcctcgccactgcagcgttgctcccacaaaactcgaaaataccgggacctaccttcctggatccacat

SEQ ID NO: 274877 - DNA, 126 bp, Artificial Sequence
  derived and/or modified sequence
atgggagtcaggcacccaccatgctcacaccgcttgctcgctgtgtgtgcactcgtgtcgttggcaactgccgctctgcttccgcagaacagcaagattccgggccctacgttcctggacccgcat

SEQ ID NO: 274878 - DNA, 126 bp, Artificial Sequence
  derived and/or modified sequence
atgggcgtgcgccacccgccgtgtagccatcgactgctagccgtatgcgcgctcgttagccttgcgacagccgccctcctgccgcagaactcaaagattcccggcccgacgtttctggatccccac

SEQ ID NO: 274879 - DNA, 126 bp, Artificial Sequence
  derived and/or modified sequence
atgggcgtccgacacccgccctgtagccaccgcctgcttgctgtctgtgcacttgtgtcgttggccaccgctgctctcctgccccagaactccaagattcctggccccacctttttggatcctcac

SEQ ID NO: 274880 - DNA, 126 bp, Artificial Sequence
  derived and/or modified sequence
atgggcgtgcgacatccgccatgctcacacagactcctggcagtctgcgcgctggtgtccctggcgaccgccgcgctgctgccccagaattcgaagatcccgggaccgactttcctggatccgcat

SEQ ID NO: 274881 - DNA, 126 bp, Artificial Sequence
  derived and/or modified sequence
atgggagtccggcacccgccttgcagccaccgactcttggcggtgtgcgctctcgtgtccctggcaactgcggcactgttgcctcagaactcaaagatcccaggaccgactttcctggacccacat

SEQ ID NO: 274882 - DNA, 126 bp, Artificial Sequence
  derived and/or modified sequence
atgggtgtgagacatcccccctgctcccatcgcctgttggccgtgtgtgcactggtcagccttgccactgcagccctgctgccgcagaactccaagattcctgggccaactttcctggatcctcat

SEQ ID NO: 274883 - DNA, 126 bp, Artificial Sequence
  derived and/or modified sequence
atgggtgtcagacatccaccgtgctctcatcgccttctcgcggtttgcgccctcgtatcccttgccacagccgcattgctgccccagaactcaaaaatccccggcccaacttttttggatccgcat

SEQ ID NO: 274884 - DNA, 126 bp, Artificial Sequence
  derived and/or modified sequence
atgggagtgagacaccctccctgttcccatcgattgctggcagtgtgcgcgctggtgagtctggccaccgccgcactccttcctcagaatagcaaaatcccaggcccaacattcctcgatccacac

SEQ ID NO: 274885 - DNA, 126 bp, Artificial Sequence
  derived and/or modified sequence
atgggtgtccgtcatcccccctgctcacacaggctactggctgtgtgcgcgcttgtgagtttggccaccgcagcactcctgccacaaaattctaagatacccggacccacttttcttgatccacac

SEQ ID NO: 274886 - DNA, 126 bp, Artificial Sequence
  derived and/or modified sequence
atgggcgtgagacacccaccatgttctcatagactgctggcagtgtgtgctcttgtctctctagccacggccgcactgctgccacagaactccaaaatcccgggaccgacttttctggacccccat

SEQ ID NO: 274887 - DNA, 126 bp, Artificial Sequence
  derived and/or modified sequence
atgggagtgagacaccccccttgctcgcatagactgcttgcagtgtgtgcactggtcagcctggcaactgcagcactcctcccccaaaattcgaaaatccctggccctacctttcttgatcctcac

SEQ ID NO: 274888 - DNA, 126 bp, Artificial Sequence
  derived and/or modified sequence
atgggagtgaggcaccctccgtgcagccatcgactgctggccgtctgcgccctggtgtcgttggcgactgccgctctgttgccacagaactcgaaaatccccggaccgaccttcctggacccgcac

SEQ ID NO: 274889 - DNA, 126 bp, Artificial Sequence
  derived and/or modified sequence
atgggagtgcgtcatcctccttgctctcacaggctgcttgccgtgtgtgccctcgtatccctggccaccgcagcgttgttgccacagaatagcaagattcccggacccactttccttgaccctcac

SEQ ID NO: 274890 - DNA, 126 bp, Artificial Sequence
  derived and/or modified sequence
atgggggttcgccatcccccttgttcccaccgtctgcttgcggtgtgcgcgttggtatctctagctaccgctgctcttttacctcagaactctaagattcccggaccaacctttctggacccacat

SEQ ID NO: 274891 - DNA, 126 bp, Artificial Sequence
  derived and/or modified sequence
atgggagttcgccatcctccatgttcccaccggctgctggccgtatgtgccctagtgtccttggctacagccgctctgttgcctcagaatagcaaaatcccggggcctactttcctcgatccacat

SEQ ID NO: 274892 - DNA, 126 bp, Artificial Sequence
  derived and/or modified sequence
atgggtgtaaggcatcccccatgcagccaccgtctgctggcggtttgtgcgctggtgagcttagccaccgccgccctgttaccgcagaacagcaaaattcctgggccaacctttctggacccgcat

SEQ ID NO: 274893 - DNA, 126 bp, Artificial Sequence
  derived and/or modified sequence
atgggggtgaggcaccccccgtgctcccaccggcttctcgccgtgtgtgcacttgtctcgctggccactgcagcgctcctcccgcagaattccaagatcccaggaccgacttttctggacccgcac

SEQ ID NO: 274894 - DNA, 126 bp, Artificial Sequence
  derived and/or modified sequence
atgggagtgcgacatcctccgtgctctcatcgcctgctcgcggtctgtgctttggtgtctctagccacggctgccctcctgccccagaattcgaaaattcctgggccgacgttcctcgaccctcat

SEQ ID NO: 274895 - DNA, 126 bp, Artificial Sequence
  derived and/or modified sequence
atgggcgtgcggcaccctccttgctcgcatcgactgttggctgtttgcgcccttgtctcactcgcgaccgcagcacttcttcctcaaaacagcaaaattccaggacccaccttcctggatccgcac

SEQ ID NO: 274896 - DNA, 126 bp, Artificial Sequence
  derived and/or modified sequence
atgggtgtgagacatccaccatgctcccaccgcctgctggcagtgtgcgcgttggtgagcctcgcgaccgctgcccttcttcctcagaactctaagatcccgggccccacgttcttggacccgcat

SEQ ID NO: 274897 - DNA, 126 bp, Artificial Sequence
  derived and/or modified sequence
atgggtgtgaggcatcccccatgctcgcacagactcctcgccgtttgtgcactggtgtccttggctaccgcggcactccttcctcaaaattcaaagattcccggaccaacgtttttggatcctcac

SEQ ID NO: 274898 - DNA, 126 bp, Artificial Sequence
  derived and/or modified sequence
atgggagtcagacatccaccatgttctcatcgattgcttgccgtgtgcgcacttgtctcgcttgcgactgctgcgctccttccccaaaactccaagattccagggcctacctttcttgatccacac

SEQ ID NO: 274899 - DNA, 126 bp, Artificial Sequence
  derived and/or modified sequence
atgggagtgcgccacccaccatgctcgcaccgcttactcgcagtatgtgctctggtaagtctagccacagccgccttactaccccagaactcaaaaatacccgggcctacattcctggatccccac

SEQ ID NO: 274900 - DNA, 126 bp, Artificial Sequence
  derived and/or modified sequence
atgggagtcagacacccgccttgcagccatcgcctgctcgcagtgtgcgccctcgtgagcctggcaactgctgccttgctccctcagaattccaagatcccggggcctactttcctggacccgcac

SEQ ID NO: 274901 - DNA, 126 bp, Artificial Sequence
  derived and/or modified sequence
atgggggtgcggcacccgccttgctcccaccgcctccttgcggtctgtgcccttgtgtctctggcaaccgctgccctcttgccacagaactcaaaaatcccaggacccactttcctggacccacat

SEQ ID NO: 274902 - DNA, 126 bp, Artificial Sequence
  derived and/or modified sequence
atgggcgtccgacacccgccttgctcccacaggctgctggctgtttgcgctctggtctccttggcaacagctgccctgcttccacagaatagcaagatccccgggcctaccttcctcgaccctcac

SEQ ID NO: 274903 - DNA, 129 bp, Artificial Sequence
  derived and/or modified sequence
atgggcgtgcgccatccaccctgctcgcatcggctgctggctgtgtgcgctttggtcagccttgcaaccgccgcactgctggcaaataccccttgtggaccttacacgcatgattgtccagtgaaaagg

SEQ ID NO: 274904 - DNA, 129 bp, Artificial Sequence
  derived and/or modified sequence
atgggcgtacgacatcctccatgctctcaccggctgctcgcagtgtgtgcgctcgtgtcccttgcgacagctgcgctactggccaacaccccctgcggtccgtacacacacgactgtcccgtgaaacga

SEQ ID NO: 274905 - DNA, 129 bp, Artificial Sequence
  derived and/or modified sequence
atgggagtgcggcatccgccttgctctcaccgactgctcgctgtgtgtgccttggtttctttggctaccgcggcactcctggcaaacaccccatgcgggccctatactcatgactgccctgtcaaacgg

SEQ ID NO: 274906 - DNA, 129 bp, Artificial Sequence
  derived and/or modified sequence
atgggagtgcggcacccaccttgctcgcaccggttgctcgctgtgtgtgccttggtgtcgctggcaaccgctgccctcctggcgaacactccatgcggtccgtacacccatgactgccccgtgaagaga

SEQ ID NO: 274907 - DNA, 129 bp, Artificial Sequence
  derived and/or modified sequence
atgggagttagacatccgccgtgctcgcacagactgctggccgtgtgcgcgctcgtgagcctcgctaccgcggccttgctggcgaacactccgtgcggaccgtacactcacgactgtccagtgaagagg

SEQ ID NO: 274908 - DNA, 129 bp, Artificial Sequence
  derived and/or modified sequence
atgggggtcagacacccaccgtgtagtcacaggctgctggcggtttgtgccctggtgtctttggccacggccgcactgttggccaacaccccctgcggcccatatacacacgactgtcctgttaaaagg

SEQ ID NO: 274909 - DNA, 129 bp, Artificial Sequence
  derived and/or modified sequence
atgggggttaggcaccccccctgctcccaccgtctcctggccgtgtgcgctctcgtgtctctcgcaacagcagccctgctggctaacacgccatgcggcccatatacccatgactgtcctgtgaagcgg

SEQ ID NO: 274910 - DNA, 129 bp, Artificial Sequence
  derived and/or modified sequence
atgggtgtgagacatccgccttgctcccatagattattagctgtatgtgcgttggtatccctggctacagctgctttacttgcgaataccccttgcggtccatatacgcatgattgccctgtaaagcgc

SEQ ID NO: 274911 - DNA, 129 bp, Artificial Sequence
  derived and/or modified sequence
atgggagtcagacatcctccatgctcgcatcggctgttggccgtgtgcgcacttgtgtcgctcgccaccgcggccctgttggcgaacaccccatgcggcccatacacgcacgactgcccggtgaagcgc

SEQ ID NO: 274912 - DNA, 129 bp, Artificial Sequence
  derived and/or modified sequence
atgggtgttcgccatccaccttgttcgcatcgtctgctggcagtctgtgcacttgtcagcctcgctaccgcagcacttctggcgaatactccgtgcgggccttacacgcacgattgtcctgtgaagcgc

SEQ ID NO: 274913 - DNA, 129 bp, Artificial Sequence
  derived and/or modified sequence
atgggcgtccgccacccaccttgcagccatcggctgctcgcagtgtgcgcactcgtgagcctggccactgcagcattgctcgccaatacaccttgcggtccgtacacccacgactgcccagttaaacgg

SEQ ID NO: 274914 - DNA, 129 bp, Artificial Sequence
  derived and/or modified sequence
atgggtgtacgtcatccgccgtgttcgcatcgtctattagcggtatgtgcgctagtatcgttagcgacggcggcgttattagcgaatacgccgtgtggtccgtatacgcatgattgtccggttaaacgt

SEQ ID NO: 274915 - DNA, 129 bp, Artificial Sequence
  derived and/or modified sequence
atgggcgtccggcatcccccgtgtagccaccgcttgctggccgtgtgcgcactggtctccctggccacagcagcactgcttgcaaatactccgtgtggcccttacacacacgattgtcccgtgaagaga

SEQ ID NO: 274916 - DNA, 129 bp, Artificial Sequence
  derived and/or modified sequence
atgggtgtcaggcaccctccatgttcccatcggcttctcgcggtttgcgccctggtgtcgctcgccactgctgcattgctggcaaacaccccttgtggaccatacacccacgattgtccggtgaagaga

SEQ ID NO: 274917 - DNA, 129 bp, Artificial Sequence
  derived and/or modified sequence
atgggggtacgacatcctccgtgcagccaccgacttctggccgtgtgtgctctggtgtctttggcgacagccgctttgctggctaatacaccctgcggaccttacacgcatgactgccctgtgaaacgc

SEQ ID NO: 274918 - DNA, 129 bp, Artificial Sequence
  derived and/or modified sequence
atgggggtgaggcatcccccttgctctcatcgcctgttggccgtgtgcgcccttgtgagcctggccaccgccgcattgctagccaacacaccctgcggcccctatacacatgactgccctgttaagagg

SEQ ID NO: 274919 - DNA, 129 bp, Artificial Sequence
  derived and/or modified sequence
atgggcgttcggcatccaccatgtagtcatagacttttggctgtgtgtgctcttgtctcccttgcgactgcagctctgttagcaaatactccttgcggcccatacacacatgattgcccggttaaacga

SEQ ID NO: 274920 - DNA, 129 bp, Artificial Sequence
  derived and/or modified sequence
atgggcgtccgacatcctccctgctcacatagactgcttgcagtctgtgcgcttgtgtcgctcgcaactgcagccctgcttgccaacaccccatgtgggccatacactcatgattgtccggtcaagcgc

SEQ ID NO: 274921 - DNA, 129 bp, Artificial Sequence
  derived and/or modified sequence
atgggggttcggcatccaccttgctcccatcggctgctggccgtgtgcgccttggtgtcgctagctacggcagctttgctggccaatacaccctgcggcccgtacacacacgactgtccagtcaagaga

SEQ ID NO: 274922 - DNA, 129 bp, Artificial Sequence
  derived and/or modified sequence
atgggcgtaagacaccccccatgctctcaccgactgctggctgtttgcgctctggtgagtctcgcaacagctgccctgctggcaaacacaccttgcggcccttatacccatgactgccctgtcaagcgc

SEQ ID NO: 274923 - DNA, 129 bp, Artificial Sequence
  derived and/or modified sequence
atgggcgttcgccatccgccctgcagccaccgcctgctggctgtgtgtgcgttggtgtcacttgccactgcggctttgctggccaacactccgtgcggaccctacacccacgattgcccagtcaagcgg

SEQ ID NO: 274924 - DNA, 129 bp, Artificial Sequence
  derived and/or modified sequence
atgggggtgcggcaccctccctgtagccataggctcttagctgtttgcgccctcgtttctcttgccacagcggccctgctggccaacactccctgtgggccttatacacacgactgcccagtgaagaga

SEQ ID NO: 274925 - DNA, 129 bp, Artificial Sequence
  derived and/or modified sequence
atgggcgtgagacaccctccttgcagccacagactcctggctgtttgcgcactggtgagcctggccacagccgctcttctcgcaaacacaccttgcggtccctacacccatgattgcccagtgaagaga

SEQ ID NO: 274926 - DNA, 129 bp, Artificial Sequence
  derived and/or modified sequence
atgggggttagacaccctccatgttcccatcggttgcttgcagtatgcgcactcgtcagcctggcgacggctgccttgcttgcaaataccccatgcggaccatacactcatgattgtcccgtgaagaga

SEQ ID NO: 274927 - DNA, 129 bp, Artificial Sequence
  derived and/or modified sequence
atgggcgtccgtcacccgccgtgttcccatcgcctgctggcggtctgcgccctggtgtcgctcgccactgccgcactgttggcgaacacgccatgcgggccttacacccatgactgccccgtgaagaga

SEQ ID NO: 274928 - DNA, 129 bp, Artificial Sequence
  derived and/or modified sequence
atgggtgtgaggcatcccccatgcagccaccggctcctggctgtatgtgccttggtgtccctggcaacagctgcccttcttgccaacacgccttgtggaccatatacccacgattgcccggtgaagagg

SEQ ID NO: 274929 - DNA, 129 bp, Artificial Sequence
  derived and/or modified sequence
atgggagttagacatccgccctgcagccaccggctgctggcagtctgcgcgctggtgtcgctggccaccgccgccctgcttgctaacactccgtgtggtccttacacccacgactgtccagtgaagagg

SEQ ID NO: 274930 - DNA, 129 bp, Artificial Sequence
  derived and/or modified sequence
atgggcgtccgtcatcctccttgctctcatcggctactagccgtgtgtgctttggtatctcttgccaccgctgcgctccttgccaataccccgtgtggaccgtatactcacgattgtcccgttaaacgc

SEQ ID NO: 274931 - DNA, 129 bp, Artificial Sequence
  derived and/or modified sequence
atgggggtgcgccaccctccttgctcccacagattactggctgtatgcgcgttggtatcgctggctaccgcagcactgctggcaaacaccccctgtggaccctacactcacgattgccccgtgaaacga

SEQ ID NO: 274932 - DNA, 129 bp, Artificial Sequence
  derived and/or modified sequence
atgggagtgagacatcctccctgctcgcaccgccttctcgcagtgtgcgcgctggtgtcgctcgccactgccgctcttctcgctaatactccatgcggaccgtacactcacgactgcccggtcaagcgc

SEQ ID NO: 274933 - DNA, 129 bp, Artificial Sequence
  derived and/or modified sequence
atgggcgtccgtcacccaccatgttcccacagacttctcgcagtctgtgctttggtcagtctcgccacagccgccttactggcaaatactccctgcgggccgtatacccacgactgtcccgtgaagcgg

SEQ ID NO: 274934 - DNA, 129 bp, Artificial Sequence
  derived and/or modified sequence
atgggcgtaaggcacccaccgtgctctcacaggttgctggcagtatgcgcactggtgagcctggcgacagctgctctcctcgcaaatacgccttgcggcccctatacccacgattgccccgtcaaacgg

SEQ ID NO: 274935 - DNA, 129 bp, Artificial Sequence
  derived and/or modified sequence
atgggggttaggcaccctccctgttcacataggcttctagcagtgtgcgctttggtcagtctagccacagcagcccttctagctaacactccatgtgggccctatacacacgattgccctgtgaaaaga

SEQ ID NO: 274936 - DNA, 129 bp, Artificial Sequence
  derived and/or modified sequence
atgggagtgcggcatcccccgtgctcgcacagactgctcgccgtgtgtgcattggtgtccctggccaccgcggctctcctggcgaacactccgtgcggcccttacacccacgactgcccagtcaagcgc

SEQ ID NO: 274937 - DNA, 129 bp, Artificial Sequence
  derived and/or modified sequence
atgggcgtcagacaccccccttgtagccatcgtctgttggccgtctgcgctctggtgtccctggccactgcagcgcttctggcaaataccccgtgtgggccatacactcatgactgtcctgtcaagaga

SEQ ID NO: 274938 - DNA, 129 bp, Artificial Sequence
  derived and/or modified sequence
atgggggttaggcacccaccttgttctcatcgactgcttgccgtgtgcgcacttgtgtctttagccactgctgctctactagctaatacaccctgtgggccttatacacatgactgtcccgtaaaacgg

SEQ ID NO: 274939 - DNA, 129 bp, Artificial Sequence
  derived and/or modified sequence
atgggagtccggcaccctccttgcagccacaggctccttgccgtctgtgcgttggtttctttagcaaccgctgccttacttgccaacactccctgtggtccatacacacatgactgtccagtgaaaaga

SEQ ID NO: 274940 - DNA, 129 bp, Artificial Sequence
  derived and/or modified sequence
atgggggtcaggcacccgccctgctcccatcggttgctggcggtgtgcgctctggtgtctctggccaccgccgcgctgttggccaacactccatgtggtccatacactcacgattgcccagtaaagcgc

SEQ ID NO: 274941 - DNA, 129 bp, Artificial Sequence
  derived and/or modified sequence
atgggagtgaggcacccgccgtgcagccaccgcctgctggccgtctgtgccctggtctcactggccacagccgctctgctggccaacactccttgcggcccttatacacacgattgccctgtgaagaga

SEQ ID NO: 274942 - DNA, 129 bp, Artificial Sequence
  derived and/or modified sequence
atgggagtgaggcatcccccttgttcccaccgcctgttggccgtgtgtgccctcgtctcgcttgccaccgctgcactgctcgccaacaccccatgtggtccttacacccatgactgtccagtgaaaaga

SEQ ID NO: 274943 - DNA, 129 bp, Artificial Sequence
  derived and/or modified sequence
atgggagtgcggcaccctccgtgctcgcataggctcctcgctgtttgcgccctggtgtcgctggcaactgccgcgctgttggcgaataccccgtgcggtccttacactcacgactgtccagtcaagcgg

SEQ ID NO: 274944 - DNA, 129 bp, Artificial Sequence
  derived and/or modified sequence
atgggagtaaggcacccgccgtgctcccaccggcttttggcggtttgtgctctcgtgtcgctcgccactgccgcgctgctggccaacacgccttgcgggccatacacccatgactgcccggtgaagcgc

SEQ ID NO: 274945 - DNA, 129 bp, Artificial Sequence
  derived and/or modified sequence
atgggagtgagacatccgccatgctcccatcgacttcttgcagtttgtgccttagttagcttggcaacggctgctctactcgcaaacacgccatgcggaccgtatacccatgattgccctgtgaagaga

SEQ ID NO: 274946 - DNA, 129 bp, Artificial Sequence
  derived and/or modified sequence
atgggtgtgcgccatcctccttgcagtcacaggctgcttgctgtctgcgctctcgtaagtctcgcaaccgccgcacttctcgcaaacactccttgtggtccctatacacacgactgccccgtgaagagg

SEQ ID NO: 274947 - DNA, 129 bp, Artificial Sequence
  derived and/or modified sequence
atgggagtgcgccacccgccctgttcgcatcgtttgcttgccgtttgcgccctggttagcctggctaccgctgcgctcctggctaacactccgtgtggcccctacacccacgattgcccggttaagcgc

SEQ ID NO: 274948 - DNA, 129 bp, Artificial Sequence
  derived and/or modified sequence
atgggcgtcagacaccctccatgttctcaccgccttctggcagtgtgcgccctggtaagcctcgcgacagcggccttgctagcaaacactccctgcgggccatatacccacgattgtcctgtaaagcgt

SEQ ID NO: 274949 - DNA, 129 bp, Artificial Sequence
  derived and/or modified sequence
atgggtgtccggcatccaccttgcagtcatcgtctgctagctgtgtgcgccctggtgtctctggcaaccgctgctctgcttgccaacaccccatgcggcccatacacacacgattgccctgtgaagcgg

SEQ ID NO: 274950 - DNA, 129 bp, Artificial Sequence
  derived and/or modified sequence
atgggggtgcggcatccaccgtgctcacataggctgcttgcagtgtgtgcactcgtctcgctcgcgacggcggcacttctcgccaacactccctgtggtccatacactcacgattgtcctgtgaagcgc

SEQ ID NO: 274951 - DNA, 129 bp, Artificial Sequence
  derived and/or modified sequence
atgggagtgagacatccaccctgctcacacaggctccttgcagtctgtgcccttgtgtcccttgcaaccgctgccctgttggcaaacactccttgtgggccgtacacccatgattgtcctgttaagcgt

SEQ ID NO: 274952 - DNA, 129 bp, Artificial Sequence
  derived and/or modified sequence
atgggcgtgcgccaccctccctgttctcatcggctgttggcggtctgcgcactggtcagtctggccaccgctgccctgttagccaacactccttgcggtccctatacacacgactgccctgtgaagagg

SEQ ID NO: 274953 - DNA, 129 bp, Artificial Sequence
  derived and/or modified sequence
atgggcgtgagacatcctccatgcagccacagactcctagccgtgtgcgccctggtgagcttagcaactgccgcactattggccaacacaccctgcgggccttacactcacgactgcccagtgaaaaga

SEQ ID NO: 274954 - DNA, 129 bp, Artificial Sequence
  derived and/or modified sequence
atgggtgtgcggcaccctccatgttcgcacaggctcttggccgtctgcgcactcgtgtctctcgcaaccgcagccctgcttgctaacaccccatgtggcccatacactcatgattgccctgttaagcgc

SEQ ID NO: 274955 - DNA, 129 bp, Artificial Sequence
  derived and/or modified sequence
atgggcgtgaggcaccctccgtgtagccataggcttctggcagtttgcgcactcgtttccctggctacagccgcactgttggcaaacaccccttgcggaccgtacacgcatgactgtcccgttaaaagg

SEQ ID NO: 274956 - DNA, 129 bp, Artificial Sequence
  derived and/or modified sequence
atgggagtgaggcacccaccctgctcgcatcgcctgctggcagtatgcgctctagtgagccttgcgaccgcggccctgctggcaaacactccatgtgggccatatacacacgactgcccggtgaaacgg

SEQ ID NO: 274957 - DNA, 129 bp, Artificial Sequence
  derived and/or modified sequence
atgggcgtccgtcacccaccctgtagtcataggttactggctgtgtgcgctttggtatcactggccacagctgcactgcttgcaaacacaccctgcggcccatacacgcacgattgtccagtgaagagg

SEQ ID NO: 274958 - DNA, 129 bp, Artificial Sequence
  derived and/or modified sequence
atgggcgtgcgtcatcccccctgtagccataggcttcttgccgtctgtgcactggtgtcgctggcaactgctgcactcctcgcgaacaccccttgtgggccgtacactcacgactgtccggtgaagaga

SEQ ID NO: 274959 - DNA, 129 bp, Artificial Sequence
  derived and/or modified sequence
atgggagtacgccaccccccctgctcccatagactgttggcagtgtgtgcactcgtgtcactggccacagctgcgctgctggcgaacaccccttgcggaccctacactcacgattgtcccgtgaagcgc

SEQ ID NO: 274960 - DNA, 129 bp, Artificial Sequence
  derived and/or modified sequence
atgggagtgcggcacccgccttgttcgcatcgcctgctggcagtgtgcgcgctcgtctcactcgcgaccgcagctctgctggccaacactccttgcggcccctacacccacgactgccccgttaaaaga

SEQ ID NO: 274961 - DNA, 129 bp, Artificial Sequence
  derived and/or modified sequence
atgggagtgcgccatcctccatgttcccaccgactgctcgctgtgtgcgcacttgtgtctctggccactgcagccctgctcgcaaacactccttgcggcccctacacacatgattgcccggtgaaaaga

SEQ ID NO: 274962 - DNA, 129 bp, Artificial Sequence
  derived and/or modified sequence
atgggcgttaggcatccaccttgtagccaccgcttgctcgccgtctgcgcacttgtgagtctggcaactgccgcactccttgcaaatactccatgtggtccctatacccacgattgtccggtgaagcga

SEQ ID NO: 274963 - DNA, 129 bp, Artificial Sequence
  derived and/or modified sequence
atgggcgtccgacaccccccgtgctcccaccgcctgcttgcggtgtgtgcactcgtgagtctggccacagcggccctgctggccaacactccttgtggtccttatacccacgactgccccgtgaaacgc

SEQ ID NO: 274964 - DNA, 129 bp, Artificial Sequence
  derived and/or modified sequence
atgggcgtccgccatcccccctgctcacaccggctgctcgcggtctgcgctctggtgagccttgccactgcagcgctgctggccaacaccccgtgtggcccttacacccatgattgcccagtgaaacga

SEQ ID NO: 274965 - DNA, 129 bp, Artificial Sequence
  derived and/or modified sequence
atgggagtgcggcacccaccctgttcgcatcggcttctcgcagtttgtgcactggtcagcctggccaccgcggctctcctggcgaataccccctgtggtccttacactcacgactgcccagtgaaacgc

SEQ ID NO: 274966 - DNA, 129 bp, Artificial Sequence
  derived and/or modified sequence
atgggcgtgaggcaccccccttgtagccatagactcctggccgtgtgtgctctcgtgtctttagccacagctgctcttttggctaacacaccatgtggaccatatactcacgactgccctgtcaagcgg

SEQ ID NO: 274967 - DNA, 129 bp, Artificial Sequence
  derived and/or modified sequence
atgggagtgagacatcctccgtgttcgcatcggctcctggcggtgtgcgccttggtgtcactggccactgcagcccttcttgctaacaccccctgcggtccgtacacgcacgattgccccgttaagcgg

SEQ ID NO: 274968 - DNA, 129 bp, Artificial Sequence
  derived and/or modified sequence
atgggagtgcggcatcctccttgcagccataggctgctggctgtgtgtgccctagtgagtctggctactgcagcactgctggccaacaccccttgtggcccctacacacacgactgcccagtcaaacgc

SEQ ID NO: 274969 - DNA, 129 bp, Artificial Sequence
  derived and/or modified sequence
atgggcgtgagacacccgccgtgttcacataggctcctggcggtctgtgccctggtgagccttgcgaccgccgctttgctcgcaaacaccccatgcggaccgtacacccacgattgcccagtgaagcgg

SEQ ID NO: 274970 - DNA, 129 bp, Artificial Sequence
  derived and/or modified sequence
atgggcgtgcgccacccaccatgcagccatcggctcctcgcggtgtgcgcactcgtctcactggccaccgccgccctgctggcaaatacgccgtgcggaccgtacactcacgactgtccagttaaaagg

SEQ ID NO: 274971 - DNA, 129 bp, Artificial Sequence
  derived and/or modified sequence
atgggagtcagacatcctccatgttcccaccgccttctcgcagtgtgtgcactcgtgagtcttgcaactgcggcccttcttgctaacaccccgtgcggcccatacacgcatgattgtccagtgaagagg

SEQ ID NO: 274972 - DNA, 129 bp, Artificial Sequence
  derived and/or modified sequence
atgggagttcggcaccccccatgctcacatcgtttgctcgctgtatgtgccctcgtgagcctggccacggctgctctattggcaaatactccctgtggtccttacacccacgattgcccggttaaaagg

SEQ ID NO: 274973 - DNA, 129 bp, Artificial Sequence
  derived and/or modified sequence
atgggggtgcgccaccccccttgtagtcatcggctgttggctgtatgcgcactggtcagcctagcaaccgctgctctgttggccaataccccttgcggaccctatactcatgattgtcctgtgaaaagg

SEQ ID NO: 274974 - DNA, 129 bp, Artificial Sequence
  derived and/or modified sequence
atgggtgtgcgccaccccccttgctcgcatcgtctgctcgcagtgtgcgccctggtatccttggcaactgcggccctgctcgccaacaccccatgtgggccgtacacgcacgactgcccggtcaagaga

SEQ ID NO: 274975 - DNA, 129 bp, Artificial Sequence
  derived and/or modified sequence
atgggagtcaggcaccctccttgttcccaccgcttgttggcggtgtgcgcccttgtgagcctggccactgccgcactcctggccaacactccgtgtggcccctacactcacgattgcccggtgaagcgg

SEQ ID NO: 274976 - DNA, 129 bp, Artificial Sequence
  derived and/or modified sequence
atgggcgtgcgacacccaccttgctcacatagactcctggcagtgtgtgcattggtgtccttggctactgccgctcttctggcgaacacgccttgtggaccatacacccatgattgccctgtgaagcgg

SEQ ID NO: 274977 - DNA, 129 bp, Artificial Sequence
  derived and/or modified sequence
atgggagtgcgccaccccccttgttcccatcggctgttggctgtgtgcgcgctggtgtcactggccactgccgccctgcttgccaacacaccctgtggcccttacacacacgattgccctgtgaagcgc

SEQ ID NO: 274978 - DNA, 129 bp, Artificial Sequence
  derived and/or modified sequence
atgggagtcagacacccaccgtgctcccatcgcctccttgcggtgtgtgcccttgtgtcactggctactgcggccttgctcgcaaacacgccgtgtggaccatacactcacgactgtcccgtgaagcgc

SEQ ID NO: 274979 - DNA, 129 bp, Artificial Sequence
  derived and/or modified sequence
atgggagtccgtcatccgccctgctcccacagactgctagccgtatgcgccctagtgagtttggctacggccgctttgctagcaaatactccttgcggaccatacacgcacgattgcccggtaaagcga

SEQ ID NO: 274980 - DNA, 129 bp, Artificial Sequence
  derived and/or modified sequence
atgggtgtcagacaccccccatgcagccatcgcctgttggccgtctgcgcccttgtgtctctggccacggcagccctcctcgcgaacaccccttgtggaccgtacacacacgactgcccagtgaaaaga

SEQ ID NO: 274981 - DNA, 129 bp, Artificial Sequence
  derived and/or modified sequence
atgggagttagacatccaccatgctcacatagactacttgcagtttgtgctcttgtttcattagcaactgcagctttattagcaaacacaccatgtgggccttatactcatgattgtccagttaaaaga

SEQ ID NO: 274982 - DNA, 129 bp, Artificial Sequence
  derived and/or modified sequence
atgggtgtccgccatccaccctgctcgcatcgtttgctggcagtgtgtgcgctggtgtcccttgcaaccgcagcacttctggcaaacactccttgcggcccatatactcatgattgtccagtgaagcgg

SEQ ID NO: 274983 - DNA, 129 bp, Artificial Sequence
  derived and/or modified sequence
atgggagtgcgccatcccccctgctcacatcggctccttgctgtgtgtgcgcttgtcagccttgcaaccgcagcacttctggccaacaccccttgcggaccttacactcacgattgcccggtgaaacgc

SEQ ID NO: 274984 - DNA, 129 bp, Artificial Sequence
  derived and/or modified sequence
atgggggtgaggcaccctccctgtagccatcgacttctggccgtgtgtgctctggtatcactggcgacggcagctctgttggccaacacaccttgtgggccgtacacgcatgattgccccgtgaagaga

SEQ ID NO: 274985 - DNA, 272 bp, Artificial Sequence
  derived and/or modified sequence
gggaaataagagagaaaagaagagtaagaagaaatataagagccaccatgggggtccggcatcccccatgctcccacagactgctggctgtatgtgcactcgtgtcgctcgcgacagccgcgcttttgccgcagaactcaaagatccccggacctacgttcttggacccgcactgataagctgccttctgcggggcttgccttctggccatgcccttcttctctcccttgcacctgtacctcttggtctttgaataaagcctgagtaggaag

SEQ ID NO: 274986 - DNA, 3002 bp, Artificial Sequence
  derived and/or modified sequence
gggaaataagagagaaaagaagagtaagaagaaatataagagccaccatgggggtgcggcacccgccttgttcgcatcggctcctcgctgtgtgtgcattggtgtcgctggcgacagcggcgctccttggtcacattttgttgcacgactttctcctggtgcccagagagttgtccggatcgtcccccgtgttggaggaaactcatcccgcacaccagcagggggcctcgcgccctgggccacgcgacgcccaagcccaccccggtagaccaagggcagtacccacacagtgtgatgtgccaccaaactcgagattcgattgtgcgccggacaaagctattacccaagaacagtgcgaagcgagagggtgctgttacatccccgcaaaacaaggactccagggtgctcagatgggacagccctggtgcttctttcctccctcgtatccaagctataagttggaaaatctgtcctcatcggaaatgggatatacagcaacactgacaaggacgactccgacattcttcccgaaggacattcttacattgaggttggacgtcatgatggaaacggaaaaccggctccacttcacgatcaaggacccggcgaaccgcagatacgaggtcccactcgagacaccccatgtgcacagcagggctccctcgccgttgtattcggtcgaattttcggaagagcccttcggagtgatcgtccggaggcagctggatggtagggtgctcttgaatacgaccgtcgcaccgttgttctttgcggatcagtttctccaactttcaacttcgttgccgtcgcagtacatcacgggactcgcagagcatctctcaccgctcatgctgagcacttcgtggacgaggatcacgctgtggaacagagacttggcgccaacgcctggggcgaacctttacgggagccaccctttctatcttgcgctcgaggatgggggatcggcacacggggtctttctgctcaactcaaacgctatggacgtcgtcttgcagccgtcgccggctctgtcatggcggagcacgggtggtattctggacgtgtacatcttcctcggccctgaaccaaagtcggtggtgcagcagtaccttgacgtcgtcgggtacccattcatgcccccgtattggggactgggttttcatctctgccgctgggggtactcctcgaccgctatcacccgccaagtggtggagaacatgacgcgggcacatttccccttggatgtgcaatggaatgaccttgactacatggattcaaggagggatttcaccttcaacaaagacgggtttcgggacttccccgcgatggtgcaagaactgcaccagggaggaagaagatacatgatgatcgtagatcccgcgatcagctcctccggaccggcaggatcgtacagaccctatgacgaaggcttgcgacgcggagtgttcatcaccaacgaaacagggcagcctctcattgggaaggtgtggcccggtagcactgcctttcctgacttcaccaatccgactgccttggcgtggtgggaagatatggtggcggagttccatgaccaggtgccctttgatggtatgtggatcgatatgaacgagccctcaaatttcatccggggatcggaagatggctgcccaaacaacgaactcgaaaacccgccttacgtaccaggggtcgtaggaggaacgctccaggccgcgacaatctgcgcgtcgtcgcaccaattcctgtcaacccactacaatttgcataatctctatggactgacggaggccattgcatcacatcgagctttggtgaaggcgagaggaacacggccgtttgtgatctcgcgctccacgttcgcgggacacgggaggtacgcagggcactggacgggagatgtctggagcagctgggaacaattggcgtcgtcggtaccggaaattctgcagttcaacctcttgggagtccctctggtaggtgccgacgtctgtggatttctcgggaacacctccgaggaactgtgcgtccgatggacgcagttgggagcgttttacccgttcatgcgaaaccacaactcactgttgtcactccctcaagagccatattcgttctcggagccggcacaacaagcgatgcgcaaagcgctcacacttcgctacgcccttttgccgcatctgtacaccctttttcaccaggcgcacgtagccggggaaactgtggcgaggcccttgttcctcgaatttccgaaggactcatcgacttggacagtcgatcaccaacttttgtggggagaggcgttgttgattacaccggtgctgcaggccggaaaagccgaggtaacagggtattttcctttgggtacgtggtacgacctccagacggtccccgtggaggcgcttgggtcgcttcctccacccccagcagcccctcgcgagcccgcgatccattcggagggacaatgggtgactcttcccgctccgcttgacacaattaacgtgcatcttagagccggatatatcattccgttgcagggaccgggcctcacaacaacggagtcgcgccagcagccgatggcactcgctgtagcgttgactaaagggggagaagctcggggagagctcttttgggatgacggcgagagcctcgaagtacttgagcgcggtgcctatacacaagtcatttttctcgcacgcaataacacaatcgtgaacgagctcgtaagagtcacaagcgaaggagccgggcttcaactccagaaggtaacagtcttgggcgtagccaccgctccccagcaggtcctgtcaaacggagtaccggtcagcaatttcacgtactcgccggacacgaaggtgttggatatttgcgtcagcctgcttatgggagaacagtttcttgtaagctggtgctgaagcgctgccttctgcggggcttgccttctggccatgcccttcttctctcccttgcacctgtacctcttggtctttgaataaagcctgagtaggaag

SEQ ID NO: 274987 - DNA, 2859 bp, Artificial Sequence
  derived and/or modified sequence
atgggcgtgagacaccccccctgcagccacagactgctggccgtgtgcgccctggtgagcctggccaccgccgccctgctgggccacatcctgctgcacgacttcctgctggtgcccagagagctgagcggcagcagccccgtgctggaggagacccaccccgcccaccagcagggcgccagcagacccggccccagagacgcccaggcccaccccggcagacccagagccgtgcccacccagtgcgacgtgccccccaacagcagattcgactgcgcccccgacaaggccatcacccaggagcagtgcgaggccagaggctgctgctacatccccgccaagcagggcctgcagggcgcccagatgggccagccctggtgcttcttcccccccagctaccccagctacaagctggagaacctgagcagcagcgagatgggctacaccgccaccctgaccagaaccacccccaccttcttccccaaggacatcctgaccctgagactggacgtgatgatggagaccgagaacagactgcacttcaccatcaaggaccccgccaacagaagatacgaggtgcccctggagaccccccacgtgcacagcagagcccccagccccctgtacagcgtggagttcagcgaggagcccttcggcgtgatcgtgagaagacagctggacggcagagtgctgctgaacaccaccgtggcccccctgttcttcgccgaccagttcctgcagctgagcaccagcctgcccagccagtacatcaccggcctggccgagcacctgagccccctgatgctgagcaccagctggaccagaatcaccctgtggaacagagacctggcccccacccccggcgccaacctgtacggcagccaccccttctacctggccctggaggacggcggcagcgcccacggcgtgttcctgctgaacagcaacgccatggacgtggtgctgcagcccagccccgccctgagctggagaagcaccggcggcatcctggacgtgtacatcttcctgggccccgagcccaagagcgtggtgcagcagtacctggacgtggtgggctaccccttcatgcccccctactggggcctgggcttccacctgtgcagatggggctacagcagcaccgccatcaccagacaggtggtggagaacatgaccagagcccacttccccctggacgtgcagtggaacgacctggactacatggacagcagaagagacttcaccttcaacaaggacggcttcagagacttccccgccatggtgcaggagctgcaccagggcggcagaagatacatgatgatcgtggaccccgccatcagcagcagcggccccgccggcagctacagaccctacgacgagggcctgagaagaggcgtgttcatcaccaacgagaccggccagcccctgatcggcaaggtgtggcccggcagcaccgccttccccgacttcaccaaccccaccgccctggcctggtgggaggacatggtggccgagttccacgaccaggtgcccttcgacggcatgtggatcgacatgaacgagcccagcaacttcatcagaggcagcgaggacggctgccccaacaacgagctggagaaccccccctacgtgcccggcgtggtgggcggcaccctgcaggccgccaccatctgcgccagcagccaccagttcctgagcacccactacaacctgcacaacctgtacggcctgaccgaggccatcgccagccacagagccctggtgaaggccagaggcaccagacccttcgtgatcagcagaagcaccttcgccggccacggcagatacgccggccactggaccggcgacgtgtggagcagctgggagcagctggccagcagcgtgcccgagatcctgcagttcaacctgctgggcgtgcccctggtgggcgccgacgtgtgcggcttcctgggcaacaccagcgaggagctgtgcgtgagatggacccagctgggcgccttctaccccttcatgagaaaccacaacagcctgctgagcctgccccaggagccctacagcttcagcgagcccgcccagcaggccatgagaaaggccctgaccctgagatacgccctgctgccccacctgtacaccctgttccaccaggcccacgtggccggcgagaccgtggccagacccctgttcctggagttccccaaggacagcagcacctggaccgtggaccaccagctgctgtggggcgaggccctgctgatcacccccgtgctgcaggccggcaaggccgaggtgaccggctacttccccctgggcacctggtacgacctgcagaccgtgcccgtggaggccctgggcagcctgccccccccccccgccgcccccagagagcccgccatccacagcgagggccagtgggtgaccctgcccgcccccctggacaccatcaacgtgcacctgagagccggctacatcatccccctgcagggccccggcctgaccaccaccgagagcagacagcagcccatggccctggccgtggccctgaccaagggcggcgaggccagaggcgagctgttctgggacgacggcgagagcctggaggtgctggagagaggcgcctacacccaggtgatcttcctggccagaaacaacaccatcgtgaacgagctggtgagagtgaccagcgagggcgccggcctgcagctgcagaaggtgaccgtgctgggcgtggccaccgccccccagcaggtgctgagcaacggcgtgcccgtgagcaacttcacctacagccccgacaccaaggtgctggacatctgcgtgagcctgctgatgggcgagcagttcctggtgagctggtgctag

SEQ ID NO: 274988 - DNA, 2859 bp, Artificial Sequence
  derived and/or modified sequence
atgggagtgcggcacccaccatgctcacaccggctactcgcggtttgcgccctcgtcagcttggctacggccgcgctgctcggacatatcctcctgcatgattttctgctggtcccccgggaacttagcggcagttccccagttctggaggaaacccaccctgctcaccagcagggggcatctcgcccagggccaagagatgcacaggcccaccccggccggccacgcgctgtgccaacccagtgcgacgtgccgcccaatagcaggtttgattgcgcccctgataaggctatcactcaagagcagtgcgaagcgaggggttgctgctatatcccagccaaacagggtctacagggcgcacagatgggacagccgtggtgcttttttccgcccagttacccatcttataaattagagaatctgtcctcatcagaaatgggctataccgccaccttgactcggaccacccctacattcttcccaaaagacattctgaccttgagattggacgtgatgatggagaccgaaaatagactgcatttcaccatcaaggaccctgcgaatagacgctacgaggtccctctggaaactcctcatgtccatagccgcgcccctagccccctctatagcgtggaattctctgaggagccttttggtgtaattgttaggcggcagttagacggccgtgtgctcctgaacactacagtggcgcctctgttctttgccgatcagtttctgcagttaagtacaagcttaccttcccagtatatcacaggactcgcagagcatctgtcaccgcttatgctgagcacatcgtggacaagaatcacgttgtggaaccgggatctggcaccgacccccggtgccaacctgtatggatctcatccgttctatctggccctcgaagatggagggagcgcacacggcgtcttcctgctcaatagtaacgccatggatgtggtgctgcagcccagccctgccctgtcatggcgatcaaccgggggaatactggacgtgtatatttttctggggcctgagccaaagtcagtggtgcagcagtacctggacgtggttggctacccatttatgccaccctattggggcctgggcttccacctctgccggtgggggtactccagcactgctattacccggcaggtagtagagaatatgacccgggctcacttcccgctcgatgtccagtggaatgacctggattatatggactcacgacgtgactttacgttcaataaggatggcttccgagatttcccagcgatggtacaggagctgcatcaggggggccgacgttatatgatgatcgtggaccccgcaatcagtagttcaggccctgccggctcatacaggccctacgatgagggtctccggaggggtgtgttcattactaacgagacaggccagccacttattggtaaagtatggccaggatctacagcctttcccgactttaccaatccgacggctctggcctggtgggaggacatggttgctgagttccacgatcaggtgccctttgatggcatgtggattgatatgaacgagcctagcaatttcatccgaggaagcgaagatggctgtccgaataacgagctcgagaaccctccctacgtcccaggggtcgtaggcggcactttgcaggctgccactatctgtgcgtctagccaccagttcttgagcacacattataatttgcataatctgtatgggcttacagaggctatcgcgtctcacagggcccttgtgaaggcgcgcgggactcgtccctttgtgattagcagatccacatttgcaggacatggccgctacgctggacactggacaggagacgtttggtcttcttgggagcagctggcctcatccgtccccgagatcctgcagtttaatctcctcggggtacccttagtcggcgcagacgtttgcggttttctgggcaatacaagcgaggagctttgtgtaagatggactcagctcggtgcattctatccttttatgcgcaaccataactcgctgctgtcgctcccgcaagaaccgtactcattctcagagcccgcccaacaggcaatgaggaaagcactgacccttcgatatgctctcctcccccatctgtacacattattccaccaggctcatgtcgctggggaaactgtggccagaccactctttttagaatttcctaaagattcatccacctggactgtggaccaccaactgttgtggggggaggctctgctgatcaccccagtgttacaggcaggcaaagcagaggtgactgggtattttccccttggaacatggtacgacctgcagaccgtcccagtggaagcgctggggtccctgcctccaccccccgctgcaccccgtgaacccgctatccacagtgagggccaatgggtgactttgccagcccctttggacacaatcaatgtccacttaagagctggctatatcatcccgctgcaagggcccgggctgaccactaccgagtctaggcaacagcctatggcgcttgctgtagccctaacaaaggggggggaggcgcgtggagagttgttttgggatgatggcgaaagcttagaagtccttgaacgaggagcttacacccaggttattttcttggccagaaacaataccatagtcaatgaattagtcagggtcacatctgagggcgctgggctgcagctccaaaaggtcaccgtactgggggtggccacggcaccccagcaggtgctgtctaatggcgtgcccgtctcaaacttcacttacagtcctgatacgaaagtattagacatctgcgtcagcctcctcatgggcgagcagttcctcgttagttggtgttag

SEQ ID NO: 274989 - DNA, 2859 bp, Artificial Sequence
  derived and/or modified sequence
atgggagttagacatcccccgtgttcgcaccgtttgctggccgtgtgtgccctcgtttctctggcaacagctgcgttgctcggacatattctgttacacgacttccttcttgtccctcgtgagctgtctggaagcagcccggttctcgaagagactcatcccgcacaccaacaaggcgcttcacgccccggccctcgcgacgcccaggctcaccccggtcgtccccgcgccgtgccaacacagtgcgatgtgccgcctaattcccgctttgattgcgctcctgacaaggctattactcaggaacaatgtgaggccagggggtgctgttacatccctgctaagcaaggtctgcagggcgctcaaatgggccagccatggtgttttttccccccatcatatccatcttacaagctggaaaatctaagttccagcgagatgggatacacagcaacactaactagaaccactccaaccttttttcctaaagatatattgactctcaggcttgacgttatgatggagacagagaacagactgcattttacaatcaaggatccggccaatcgtcggtacgaggtgccacttgagacacctcatgtccactcccgggcaccgagccctttatattcagtcgaattttcagaagagccttttggcgtgattgtccgaagacagctggacggccgggttctattaaatacaaccgtcgctcccctcttctttgctgatcagtttctgcaactgtctacgagtctcccaagccagtacattacaggactggctgaacacctgtccccactgatgctgtcaacttcctggacccgtattacgctctggaaccgggacttagcgcctacccccggggccaatctctatggttctcaccctttttatctggcccttgaagatggtggtagtgcccatggtgtctttctgctcaacagtaatgccatggatgtcgtgctccaaccctccccggctctcagctggcgctcaaccggcggcattctcgatgtttacattttcctgggccctgagccaaaatcagtggtgcagcagtatttggacgtggtcggttacccattcatgccaccttactggggactcggatttcacttgtgcaggtggggctattcaagcaccgcaatcacaagacaggtggtcgagaacatgacgcgcgcccatttccctctggacgtccagtggaatgacctggactatatggacagtaggcgggacttcacatttaacaaagatgggtttagagactttcccgcgatggttcaggaactacatcagggggggagacgatatatgatgatcgtggatcccgccatctcttctagcggccctgccggctcctacagaccgtacgatgaaggcctgagaaggggcgtgtttatcacaaacgagacaggacagcccctgataggcaaggtttggcccggctccaccgccttccccgatttcacaaaccctacggcgttagcctggtgggaagacatggtggccgaatttcatgaccaagtgcccttcgatggcatgtggatcgatatgaacgagccatcaaattttataagaggcagcgaagacggctgccccaataatgaactagaaaaccccccatacgtgcctggcgtcgtgggtggtactcttcaggccgccactatctgcgcctcctctcatcaatttctgtcaacccactataatctgcacaacttgtatggactgacggaggctattgctagccaccgcgcactggttaaggcccgtggcactcggccttttgttatctcgcgtagcacctttgccggccatgggagatatgcagggcactggacgggggatgtctggtcatcgtgggagcaactcgcatcctcggtccctgaaattctgcagttcaacctcctcggggtgcctctggtgggggctgacgtctgcgggttcctgggtaacacaagtgaggagttgtgcgttcggtggacccaactgggcgcgttttacccgttcatgcggaaccacaactctctcctatcactgccacaggaaccgtactcattcagtgagcctgctcagcaggcgatgagaaaggccctcactctgcgctatgccttgctcccgcatctctataccttgttccaccaggcacacgttgccggagagactgtggctcgtccactgttcctagagttccccaaagatagctcaacctggacggtggaccaccagctgctctggggcgaggcactgctaattacccctgtactgcaagcagggaaggccgaagtgactggctattttcctcttggtacctggtatgaccttcagacagtgcctgtggaagccctggggagtctccctccgccccccgctgcccccagagaacccgctatccatagcgaaggtcagtgggttacactccccgcccctctggatacaatcaacgttcacctgagagccgggtacatcatcccactccaaggacccgggctgactactacagaaagccggcagcaacccatggctcttgccgtggcgcttaccaaggggggcgaggctcgcggcgaactgttttgggatgatggcgaatccttagaggtactggagcggggcgcttatacacaggtcatctttctcgcccggaataacactattgtcaacgagttggttagggtcacaagcgagggggcaggcctccaacttcagaaggtgactgtcctaggagttgccacagctcctcagcaggtgctgtccaacggcgtgcctgtgtctaatttcacatatagccccgacacaaaagtactggacatttgcgtgagtctcctgatgggcgagcagttcctggtctcctggtgttag

SEQ ID NO: 274990 - DNA, 2859 bp, Artificial Sequence
  derived and/or modified sequence
atgggcgtgcgccaccccccctgcagccaccggctgctggccgtgtgtgccctggtgtccctggccacagctgccctgctgggccacatcctgctgcatgacttcctgctggtgccccgggagctgagcggcagcagccctgtgctggaggagacccacccagcccaccagcagggcgccagcaggcctggccccagagatgcccaggcccaccctggccggcccagggctgtgcccacccagtgtgatgtgccccccaacagcagatttgactgtgccccagacaaggccatcacccaggagcagtgtgaggcccggggctgctgctacatcccagccaagcagggcctgcagggcgcccagatgggccagccctggtgcttcttcccccccagctaccccagctacaagctggagaacctgagcagcagcgagatgggctacacagccaccctgaccaggaccacccccaccttcttccccaaggacatcctgaccctgcggctggatgtgatgatggagacagagaaccggctgcacttcaccatcaaggaccctgccaacagaagatatgaggtgcccctggagacccctcatgtgcacagccgggcccccagccccctgtacagcgtggagttcagcgaggagcccttcggcgtgattgtgcggcggcagctggatggccgggtgctgctgaacaccaccgtggcccccctcttctttgctgaccagttcctgcagctgagcaccagcctgcccagccagtacatcaccggcctggccgagcacctgagccccctgatgctgagcacctcctggacccgcatcaccctgtggaacagagacctggcccccacccctggggccaacctgtatggcagccaccccttctacctggccctggaggatggcggcagcgcccacggcgtcttcctgctgaacagcaatgccatggatgtggtgctgcagcccagccctgccctgtcctggaggagcactggaggcatcctggatgtgtacatcttcctgggccctgagcccaagtctgtggtgcagcagtacctggatgtggtgggctaccccttcatgccaccctactggggcctgggcttccacctgtgccgctggggctacagcagcacagccatcacccggcaggtggtggagaacatgacccgggcccacttccccctggatgtgcagtggaatgacctggactacatggacagcagaagagacttcaccttcaacaaggatggcttccgggacttccctgccatggtgcaggagctgcaccagggcggccgccgctacatgatgattgtggaccctgccatcagcagcagcggccctgctggcagctaccggccctatgatgagggcctgcggcggggcgtcttcatcaccaatgagaccggccagcccctgattggcaaggtgtggccaggcagcacagccttcccagacttcaccaaccccacagccctggcctggtgggaggacatggtggccgagttccatgaccaggtgccctttgatggcatgtggattgacatgaatgagcccagcaacttcatccggggctctgaagatggctgccccaacaatgagctggagaaccccccctacgtgcctggggtggtgggcggcaccctgcaggccgccaccatctgtgccagcagccaccagttcctgagcacccactacaacctgcacaacctgtatggcctgacagaggccatcgccagccaccgggccctggtgaaggcccggggcacccggcccttcgtcatcagccgcagcacctttgctggccacggccgctatgccggccactggacaggagatgtgtggagctcctgggagcagctggccagctctgtgcctgagatcctgcagttcaacctgctgggcgtgcccctggtgggcgcagatgtgtgtggcttcctgggcaacaccagcgaggagctgtgtgtgcgctggacccagctgggcgccttctaccccttcatgaggaaccacaacagcctgctgagcctgccccaggagccctacagcttcagcgagcccgcccagcaggccatgaggaaggccctgaccctgcgctatgccctgctgccccacctgtacaccctcttccaccaggcccacgtggccggggagaccgtggcccggcccctcttcctggagttccccaaggacagcagcacctggacagtggaccaccagctgctgtggggcgaggccctgctgatcacccctgtgctgcaggccggcaaggccgaggtgacaggctacttccccctgggcacctggtatgacctgcagacagtgcctgtggaggccctgggcagcctgcccccacctcctgctgccccccgggagcccgccatccacagcgagggccagtgggtgaccctgcctgcccccctggacaccatcaacgtgcacctgcgggccggctacatcatccccctgcagggccctggcctgaccaccacagagagccggcagcagcccatggccctggccgtggccctgaccaagggcggggaggcccggggggagctgttctgggatgatggagagagcctggaggtgctggagcggggggcctacacccaggtgatcttcctggccaggaacaacaccatcgtgaatgagctggtgcgggtgaccagcgagggcgccggcctgcagctgcagaaggtgacagtgctgggcgtggccacagccccccagcaggtgctgagcaatggagtgcctgtgagcaacttcacctacagcccagacaccaaggtgctggacatctgtgtgtccctgctgatgggagagcagttcctggtgtcctggtgctag

SEQ ID NO: 274991 - DNA, 2859 bp, Artificial Sequence
  derived and/or modified sequence
atgggcgtgcggcaccccccctgcagccaccggctgctggccgtgtgcgccctggttagcttagccactgccgcgctcctcggtcatattctgctgcacgatttcctgcttgtgccccgcgaactttctggctcaagtccagtactagaggaaactcatccagcccatcagcagggggcctcacggcctggccctagagatgcacaagctcaccccgggagaccccgcgcagtccctacacagtgtgacgtgccaccgaactctcgattcgactgcgcaccagataaggcaatcacccaggagcagtgcgaggcgagggggtgctgttacattccagcgaagcagggtcttcagggcgcacaaatggggcagccctggtgtttctttccccctagctacccctcctacaagcttgagaacctgtccagctccgagatggggtatacagccaccttaacccggactacccctaccttctttccaaaagacattctgactttgcgcctggacgtgatgatggagaccgagaaccggctgcacttcaccatcaaggacccagcaaaccggcgctacgaagttcctttggaaaccccccatgtgcacagcagggctccctcaccactgtactccgtcgagtttagtgaggagccctttggtgtcatcgtacgacgccagctggatggtcgtgtgctgctcaacaccacagtggcaccgctgttttttgctgatcagttcctgcaactgagtacctcgttgcctagccagtacattactgggctcgccgaacatcttagtccactgatgctgtcaacctcctggactaggatcaccttgtggaatagggacctggctcctactcctggcgcaaacttgtacggtagccatccgttctacttggcactagaggacggaggttcagctcatggtgtctttttactcaacagtaacgccatggatgtggtcttgcagccctcacccgccctgtcctggcgtagtactggcggcattctggatgtctatatctttctggggcccgaacccaagtccgtagtgcagcagtacttggatgtcgtgggctatcccttcatgcctccttactggggtctcgggtttcacctttgccggtgggggtattctagcactgcgattacccgacaggtcgtcgagaacatgaccagggctcactttcccctggacgtccagtggaatgacctggactacatggattcgaggagggatttcacctttaataaggatggctttagggactttccggctatggtgcaggaactgcaccaggggggcagacggtacatgatgatcgtggatcctgccatatcctctagtggtccagcgggctcctaccgaccctacgacgaaggattgcgccggggcgtctttattacaaatgagacaggacaacctctcataggcaaagtctggcccggttcgacagcatttcccgacttcaccaatcctaccgccctcgcatggtgggaagacatggtcgctgagtttcacgatcaggtgcctttcgatggtatgtggattgatatgaacgagcctagtaattttatccgcgggagtgaagacggttgcccgaataacgagctggagaatcctccatacgtgccaggagtcgttggggggaccctccaggccgccacaatttgcgctagctcccaccagtttctgtcaacacattacaacctgcacaacctgtatggcctcacagaggcgattgcatcccaccgcgccctggtcaaggctcgggggactcgcccttttgtgattagccgcagcacatttgccgggcacggtcggtatgccgggcactggacaggtgacgtatggagctcgtgggaacagctggcctcttcagttccggaaatactgcagttcaatctgctgggggtgcctttggtgggcgctgacgtctgcggatttctaggcaatacctccgaggagctttgtgtaagatggacacaactgggagccttctatccattcatgcgtaaccataatagtctcctgtcgttgcctcaagaaccctactccttcagtgagccagcacagcaggccatgcgaaaggccctgacactgagatacgctctcctcccccatctctacaccctttttcaccaagctcatgtcgctggtgaaaccgtcgcacgacccctctttcttgagttcccaaaagacagcagcacctggacggtggatcatcagctgctgtggggcgaagccctgctgatcactcctgtgcttcaggccgggaaagccgaggtgacagggtattttcccttaggcacctggtatgacttgcagaccgtgcctgtggaggcactgggaagtctgcctccgccacctgcagctcctcgggagccggccatccactctgagggacaatgggtcactctgcccgcccctttggatacgattaatgtacatctgcgcgcaggctatattattcccctgcaggggcctgggctgactacaacagagtcacgccagcagccaatggcattggctgtcgccttgacaaagggaggtgaagcgaggggggaactgttttgggacgacggcgagtctttagaagtcctggaaaggggtgcctacacacaggttatctttctcgcacggaacaatacaattgtgaatgagttggttcgcgttacatcagaaggggccggtcttcaattacagaaggttaccgtactgggagttgccaccgccccacagcaggtgctcagcaatggcgtcccagtatctaacttcacctattcgccagacaccaaggttctggatatttgcgtttctctcctaatgggagaacagttcctggtgtcatggtgctag

SEQ ID NO: 274992 - DNA, 2859 bp, Artificial Sequence
  derived and/or modified sequence
atgggcgtgcggcaccccccctgcagccaccggctgctggccgtgtgtgccttggttagcctggccacagctgctctgttaggccacatactcctgcatgactttcttctcgtacctcgcgaactgtccggctctagcccagtgctcgaggagacacatcctgctcaccagcagggcgcgtcgcgtccaggccctcgagatgcccaggcccaccctgggaggcctagagcggttcccacccagtgtgacgtccccccaaattctcgatttgactgcgctcccgacaaggccattacacaggagcagtgcgaagctcgcgggtgttgttacatccctgccaaacagggactacaaggtgcccaaatggggcaaccctggtgcttttttcctccaagctacccgtcttataaattggaaaacctatcatcatcggagatggggtacacagctaccctgactaggaccacccccacattcttccccaaggatatcctgacactccgtctagacgtaatgatggagactgagaatcggctgcacttcaccatcaaggacccagcaaataggagatacgaagtgcccctcgaaactccccacgtgcacagtagggcacctagccccctgtactccgtcgagttctcagaagagccctttggtgtcatcgtccgccggcaactcgatggacgcgttctcctgaacaccactgtggctcctctcttcttcgcagaccagttcctgcagctgtccacttctctgccttcacaatatattactggcctcgccgaacacctgagcccactcatgcttagcacatcatggaccagaataaccctctggaaccgcgatctggctcctaccccgggggccaacctttacggatcccaccccttctatttggcacttgaggacggtggatccgcgcatggagtgttcttgctcaacagcaatgcaatggatgtggtcctgcaacctagtcctgccctctcttggaggtctacagggggcattcttgacgtgtatatttttttggggcccgaaccaaagtcagtcgtccagcaatacctggatgttgtaggctacccattcatgcctccgtactggggactcggtttccatctctgccgatggggttattcaagcacagccatcacccggcaggtggtggagaacatgactcgagctcacttcccgctggatgttcagtggaatgacttagattacatggacagtcgcagagatttcaccttcaacaaagacggtttccgtgactttccagctatggtccaagagctccaccaaggaggacgcaggtatatgatgatcgtggatccagccatctcctcctccggaccagcggggagctatcggccgtatgatgaaggactacgaaggggcgtattcataaccaacgagaccggccagccgttaattgggaaagtatggccaggctccaccgcttttccagatttcactaaccctaccgccctggcctggtgggaggacatggttgcggaatttcacgaccaggtgccattcgatggaatgtggattgatatgaacgagccaagcaattttatcagagggtctgaagacgggtgccctaacaacgagttggagaatcctccgtacgtcccaggtgttgtcgggggaacattacaagccgccactatctgtgccagtagccaccagttcctttccactcactacaacttgcacaacctctacgggctcaccgaggcaatcgcgagccatcgggcccttgtcaaggcaaggggcacaagacctttcgtgattagcagaagtacattcgccggccatggccgttacgctggccattggaccggggacgtttggagtagttgggagcagttagcatcatctgtccctgaaattctgcaatttaacttacttggggtgcctctagttggcgcagacgtttgcggctttctaggcaacacctctgaggagctatgcgtaagatggacgcagttgggtgccttctaccccttcatgagaaatcacaacagtctgctgtctttgccccaagagccatactctttctcggagccagcccaacaagccatgaggaaggctctcacgctccgctatgcactcctgccccacctgtatactctatttcatcaggcccacgtggccggggaaacagtggctcggcctctctttcttgagttccctaaagactcttccacatggactgtcgaccaccaactgctgtggggtgaagcactgttaatcacgccagtgctacaggccgggaaagctgaagtgaccggctacttccccctcgggacctggtatgatctgcaaacggtcccagttgaagctttgggatccctcccacccccgcctgcggcaccacgagagccagccatacattccgaaggtcagtgggtcacactaccggcacctcttgacactatcaatgtgcaccttagggccggctatatcattcccctacaaggccctggcctgaccaccacagaatctcggcagcagcccatggccttggccgtggcgctaacaaagggaggcgaagccagaggcgagttattttgggacgacggggagagcctggaggtgcttgagcggggtgcttatacacaggtgatttttctcgctcgcaacaacactattgttaatgaactcgtgcgagttacttcagagggtgcaggattacagctgcagaaggttactgtgttgggagtggcgaccgcgccccagcaggtgctttctaatggcgtgcccgtcagcaacttcacctactcccctgacaccaaggtccttgatatctgtgtgtcactgctcatgggcgagcagttcctggtgtcctggtgttag

SEQ ID NO: 274993 - DNA, 314 bp, Artificial Sequence
  derived and/or modified sequence
taatacgactcactatagggaaataagagagaaaagaagagtaagaagaaatataagagccaccatgggggtccggcatcccccatgctcccacagactgctggctgtatgtgcactcgtgtcgctcgcgacagccgcgcttttgccgcagaactcaaagatccccggacctacgttcttggacccgcactgataagctgccttctgcggggcttgccttctggccatgcccttcttctctcccttgcacctgtacctcttggtctttgaataaagcctgagtaggaaggcggccgctcgagcatgcatctaga

SEQ ID NO: 274994 - DNA, 3774 bp, Artificial Sequence
  derived and/or modified sequence
acccgcctctgcgcgcccccgggcacgaccccggagtctccgcgggcggccagggcgcgcgtgcgcggaggtgagccgggccggggctgcggggcttccctgagcgcgggccgggtcggtggggcggtcggctgcccgcgcggcctctcagttgggaaagctgaggttgtcgccggggccgcgggtggaggtcggggatgaggcagcaggtaggacagtgacctcggtgacgcgaaggaccccggccacctctaggttctcctcgtccgcccgttgttcagcgagggaggctctgcgcgtgccgcagctgacggggaaactgaggcacggagcgggcctgtaggagctgtccaggccatctccaaccatgggagtgaggcacccgccctgctcccaccggctcctggccgtctgcgccctcgtgtccttggcaaccgctgcactcctggggcacatcctactccatgatttcctgctggttccccgagagctgagtggctcctccccagtcctggaggagactcacccagctcaccagcagggagccagcagaccagggccccgggatgcccaggcacaccccggccgtcccagagcagtgcccacacagtgcgacgtcccccccaacagccgcttcgattgcgcccctgacaaggccatcacccaggaacagtgcgaggcccgcggctgttgctacatccctgcaaagcaggggctgcagggagcccagatggggcagccctggtgcttcttcccacccagctaccccagctacaagctggagaacctgagctcctctgaaatgggctacacggccaccctgacccgtaccacccccaccttcttccccaaggacatcctgaccctgcggctggacgtgatgatggagactgagaaccgcctccacttcacgatcaaagatccagctaacaggcgctacgaggtgcccttggagaccccgcatgtccacagccgggcaccgtccccactctacagcgtggagttctccgaggagcccttcggggtgatcgtgcgccggcagctggacggccgcgtgctgctgaacacgacggtggcgcccctgttctttgcggaccagttccttcagctgtccacctcgctgccctcgcagtatatcacaggcctcgccgagcacctcagtcccctgatgctcagcaccagctggaccaggatcaccctgtggaaccgggaccttgcgcccacgcccggtgcgaacctctacgggtctcaccctttctacctggcgctggaggacggcgggtcggcacacggggtgttcctgctaaacagcaatgccatggatgtggtcctgcagccgagccctgcccttagctggaggtcgacaggtgggatcctggatgtctacatcttcctgggcccagagcccaagagcgtggtgcagcagtacctggacgttgtgggatacccgttcatgccgccatactggggcctgggcttccacctgtgccgctggggctactcctccaccgctatcacccgccaggtggtggagaacatgaccagggcccacttccccctggacgtccagtggaacgacctggactacatggactcccggagggacttcacgttcaacaaggatggcttccgggacttcccggccatggtgcaggagctgcaccagggcggccggcgctacatgatgatcgtggatcctgccatcagcagctcgggccctgccgggagctacaggccctacgacgagggtctgcggaggggggttttcatcaccaacgagaccggccagccgctgattgggaaggtatggcccgggtccactgccttccccgacttcaccaaccccacagccctggcctggtgggaggacatggtggctgagttccatgaccaggtgcccttcgacggcatgtggattgacatgaacgagccttccaacttcatcaggggctctgaggacggctgccccaacaatgagctggagaacccaccctacgtgcctggggtggttggggggaccctccaggcggccaccatctgtgcctccagccaccagtttctctccacacactacaacctgcacaacctctacggcctgaccgaagccatcgcctcccacagggcgctggtgaaggctcgggggacacgcccatttgtgatctcccgctcgacctttgctggccacggccgatacgccggccactggacgggggacgtgtggagctcctgggagcagctcgcctcctccgtgccagaaatcctgcagtttaacctgctgggggtgcctctggtcggggccgacgtctgcggcttcctgggcaacacctcagaggagctgtgtgtgcgctggacccagctgggggccttctaccccttcatgcggaaccacaacagcctgctcagtctgccccaggagccgtacagcttcagcgagccggcccagcaggccatgaggaaggccctcaccctgcgctacgcactcctcccccacctctacacactgttccaccaggcccacgtcgcgggggagaccgtggcccggcccctcttcctggagttccccaaggactctagcacctggactgtggaccaccagctcctgtggggggaggccctgctcatcaccccagtgctccaggccgggaaggccgaagtgactggctacttccccttgggcacatggtacgacctgcagacggtgccagtagaggcccttggcagcctcccacccccacctgcagctccccgtgagccagccatccacagcgaggggcagtgggtgacgctgccggcccccctggacaccatcaacgtccacctccgggctgggtacatcatccccctgcagggccctggcctcacaaccacagagtcccgccagcagcccatggccctggctgtggccctgaccaagggtggggaggcccgaggggagctgttctgggacgatggagagagcctggaagtgctggagcgaggggcctacacacaggtcatcttcctggccaggaataacacgatcgtgaatgagctggtacgtgtgaccagtgagggagctggcctgcagctgcagaaggtgactgtcctgggcgtggccacggcgccccagcaggtcctctccaacggtgtccctgtctccaacttcacctacagccccgacaccaaggtcctggacatctgtgtctcgctgttgatgggagagcagtttctcgtcagctggtgttagccgggcggagtgtgttagtctctccagagggaggctggttccccagggaagcagagcctgtgtgcgggcagcagctgtgtgcgggcctgggggttgcatgtgtcacctggagctgggcactaaccattccaagccgccgcatcgcttgtttccacctcctgggccggggctctggcccccaacgtgtctaggagagctttctccctagatcgcactgtgggccggggccctggagggctgctctgtgttaataagattgtaaggtttgccctcctcacctgttgccggcatgcgggtagtattagccacccccctccatctgttcccagcaccggagaagggggtgctcaggtggaggtgtggggtatgcacctgagctcctgcttcgcgcctgctgctctgccccaacgcgaccgctgcccggctgcccagagggctggatgcctgccggtccccgagcaagcctgggaactcaggaaaattcacaggacttgggagattctaaatcttaagtgcaattatttttaataaaaggggcatttggaatc

SEQ ID NO: 274995 - DNA, 3589 bp, Artificial Sequence
  derived and/or modified sequence
acccgcctctgcgcgcccccgggcacgaccccggagtctccgcgggcggccagggcgcgcgtgcgcggaggttctcctcgtccgcccgttgttcagcgagggaggctctgcgcgtgccgcagctgacggggaaactgaggcacggagcgggcctgtaggagctgtccaggccatctccaaccatgggagtgaggcacccgccctgctcccaccggctcctggccgtctgcgccctcgtgtccttggcaaccgctgcactcctggggcacatcctactccatgatttcctgctggttccccgagagctgagtggctcctccccagtcctggaggagactcacccagctcaccagcagggagccagcagaccagggccccgggatgcccaggcacaccccggccgtcccagagcagtgcccacacagtgcgacgtcccccccaacagccgcttcgattgcgcccctgacaaggccatcacccaggaacagtgcgaggcccgcggctgttgctacatccctgcaaagcaggggctgcagggagcccagatggggcagccctggtgcttcttcccacccagctaccccagctacaagctggagaacctgagctcctctgaaatgggctacacggccaccctgacccgtaccacccccaccttcttccccaaggacatcctgaccctgcggctggacgtgatgatggagactgagaaccgcctccacttcacgatcaaagatccagctaacaggcgctacgaggtgcccttggagaccccgcatgtccacagccgggcaccgtccccactctacagcgtggagttctccgaggagcccttcggggtgatcgtgcgccggcagctggacggccgcgtgctgctgaacacgacggtggcgcccctgttctttgcggaccagttccttcagctgtccacctcgctgccctcgcagtatatcacaggcctcgccgagcacctcagtcccctgatgctcagcaccagctggaccaggatcaccctgtggaaccgggaccttgcgcccacgcccggtgcgaacctctacgggtctcaccctttctacctggcgctggaggacggcgggtcggcacacggggtgttcctgctaaacagcaatgccatggatgtggtcctgcagccgagccctgcccttagctggaggtcgacaggtgggatcctggatgtctacatcttcctgggcccagagcccaagagcgtggtgcagcagtacctggacgttgtgggatacccgttcatgccgccatactggggcctgggcttccacctgtgccgctggggctactcctccaccgctatcacccgccaggtggtggagaacatgaccagggcccacttccccctggacgtccagtggaacgacctggactacatggactcccggagggacttcacgttcaacaaggatggcttccgggacttcccggccatggtgcaggagctgcaccagggcggccggcgctacatgatgatcgtggatcctgccatcagcagctcgggccctgccgggagctacaggccctacgacgagggtctgcggaggggggttttcatcaccaacgagaccggccagccgctgattgggaaggtatggcccgggtccactgccttccccgacttcaccaaccccacagccctggcctggtgggaggacatggtggctgagttccatgaccaggtgcccttcgacggcatgtggattgacatgaacgagccttccaacttcatcaggggctctgaggacggctgccccaacaatgagctggagaacccaccctacgtgcctggggtggttggggggaccctccaggcggccaccatctgtgcctccagccaccagtttctctccacacactacaacctgcacaacctctacggcctgaccgaagccatcgcctcccacagggcgctggtgaaggctcgggggacacgcccatttgtgatctcccgctcgacctttgctggccacggccgatacgccggccactggacgggggacgtgtggagctcctgggagcagctcgcctcctccgtgccagaaatcctgcagtttaacctgctgggggtgcctctggtcggggccgacgtctgcggcttcctgggcaacacctcagaggagctgtgtgtgcgctggacccagctgggggccttctaccccttcatgcggaaccacaacagcctgctcagtctgccccaggagccgtacagcttcagcgagccggcccagcaggccatgaggaaggccctcaccctgcgctacgcactcctcccccacctctacacactgttccaccaggcccacgtcgcgggggagaccgtggcccggcccctcttcctggagttccccaaggactctagcacctggactgtggaccaccagctcctgtggggggaggccctgctcatcaccccagtgctccaggccgggaaggccgaagtgactggctacttccccttgggcacatggtacgacctgcagacggtgccagtagaggcccttggcagcctcccacccccacctgcagctccccgtgagccagccatccacagcgaggggcagtgggtgacgctgccggcccccctggacaccatcaacgtccacctccgggctgggtacatcatccccctgcagggccctggcctcacaaccacagagtcccgccagcagcccatggccctggctgtggccctgaccaagggtggggaggcccgaggggagctgttctgggacgatggagagagcctggaagtgctggagcgaggggcctacacacaggtcatcttcctggccaggaataacacgatcgtgaatgagctggtacgtgtgaccagtgagggagctggcctgcagctgcagaaggtgactgtcctgggcgtggccacggcgccccagcaggtcctctccaacggtgtccctgtctccaacttcacctacagccccgacaccaaggtcctggacatctgtgtctcgctgttgatgggagagcagtttctcgtcagctggtgttagccgggcggagtgtgttagtctctccagagggaggctggttccccagggaagcagagcctgtgtgcgggcagcagctgtgtgcgggcctgggggttgcatgtgtcacctggagctgggcactaaccattccaagccgccgcatcgcttgtttccacctcctgggccggggctctggcccccaacgtgtctaggagagctttctccctagatcgcactgtgggccggggccctggagggctgctctgtgttaataagattgtaaggtttgccctcctcacctgttgccggcatgcgggtagtattagccacccccctccatctgttcccagcaccggagaagggggtgctcaggtggaggtgtggggtatgcacctgagctcctgcttcgcgcctgctgctctgccccaacgcgaccgctgcccggctgcccagagggctggatgcctgccggtccccgagcaagcctgggaactcaggaaaattcacaggacttgggagattctaaatcttaagtgcaattatttttaataaaaggggcatttggaatc

SEQ ID NO: 274996 - DNA, 2859 bp, Artificial Sequence
  derived and/or modified sequence
atgggcgtcagacaccctccttgctcacacaggctgctcgccgtttgtgcgctcgtgtcacttgctaccgcggcactactaggacacatcctcctgcacgactttttgctggttccgagggaactgtcaggatctagccccgtgctggaggaaacccatccagcccatcagcagggcgctagccgtccaggccctagggacgcccaggcgcatcctgggcgtcctagagctgtccctacacagtgtgacgtgccgccaaactccagatttgactgcgccccagacaaagccatcacgcaggaacagtgcgaagcccgtggctgctgctacattcctgcaaagcagggtctgcagggcgcacaaatgggacagccctggtgcttcttcccacccagctatccatcttataaactggagaatttatccagtagtgaaatggggtacactgcgactctcaccagaactacaccaaccttctttccaaaagatattctgacactgaggctggacgttatgatggagacagaaaatcgccttcacttcacgataaaggacccagctaacagacggtacgaggttcctcttgagacccctcatgtccatagtcgcgctccttcacctctgtatagcgtcgagttctccgaggagccatttggagtgatcgtgcgaaggcagctggatggtagggtgctgctgaatactacagtggctcctttattctttgcagatcagttcctgcagctctccactagtttgccaagtcagtacatcacgggcctagcggagcacttaagcccattgatgctttctacgtcatggacccgaatcactctgtggaacagagacctggcccctaccccaggagctaacctgtacggtagccaccctttctacctcgccttagaggatgggggttccgcccatggagtctttctgctgaactccaacgcaatggatgtggtgctgcaacctagccccgctctgagctggagatccaccgggggaatcctggacgtatacatttttttagggcctgaacccaaaagtgtcgtgcaacagtatctagacgtggttggctaccctttcatgcccccttactgggggttgggattccacctctgccgatggggctactctagtactgcaatcacccgtcaggtcgtagaaaatatgacgagggcccattttcccctcgatgtgcagtggaatgacctggactatatggacagcagaagagacttcacctttaacaaggacgggtttagggatttcccagctatggttcaagagcttcaccaagggggacgtagatatatgatgatcgtggaccccgcaattagcagctctggccctgccggaagctacagaccttatgatgaagggctacgcagaggcgtgttcattactaacgaaaccggacagccactgattggcaaagtgtggcccggttctactgcctttccagatttcactaaccccactgccctggcctggtgggaggacatggttgcagagttccacgatcaggtgccattcgacggaatgtggatcgatatgaatgagccatcaaattttatccgtggcagcgaagacggctgtcctaataatgagctggagaatcctccttacgtgccaggtgtggtcgggggtactctccaggctgcaacaatctgtgcctcttctcaccagttcctgtctactcactacaaccttcataatctctatggtttaaccgaggctatcgctagtcaccgcgcacttgtgaaggccaggggaacccgccctttcgtcatttccaggtctacattcgccggacacggacgatacgcagggcactggaccggggacgtctggtcgtcttgggaacagctggccagctcagtgcctgagatcctgcaatttaacctgctcggcgtgcccttagttggcgctgatgtctgcggctttctcgggaataccagcgaagagttatgtgtccgttggacccagttgggcgctttctaccctttcatgcgaaaccataattctctcctgtccctgccacaagaaccatactccttctcagagccagctcagcaggcgatgcggaaggcgctgaccctgaggtacgcattactcccgcacctgtatacactgtttcaccaggctcacgtggccggagaaacagtggcacgccctctttttctggagttccctaaggactctagcacctggaccgtcgaccaccagcttctctggggggaggcacttcttataactcccgtgctacaggccggaaaagctgaagtgaccggctacttcccactcggcacctggtatgatctgcaaaccgtacccgtcgaggctctggggagcctaccaccgcctccggctgctcccagggagccagccattcacagcgagggtcagtgggtcacactgcctgcgccattggacacaatcaacgtgcaccttagggcaggttatattatccccttgcaaggacctggcctgacaacaacagaatcgagacagcagcccatggccctcgctgtagccctgacaaaagggggagaagcacgcggtgaacttttctgggatgatggcgaaagtttggaggtgctggaacggggtgcctacacacaggttatcttcctggccaggaacaacaccatcgtcaacgaactcgttcgggttacaagtgaaggggcaggcctgcagttgcaaaaagtcactgtgcttggggtcgccacagcccctcagcaggtgttatccaatggcgtgccagtgagcaacttcacatactcccctgacactaaagtgttagacatttgcgtttccctgctaatgggtgaacagtttcttgttagttggtgctag

SEQ ID NO: 274997 - DNA, 2859 bp, Artificial Sequence
  derived and/or modified sequence
atgggggttcggcacccaccatgtagccaccgattacttgccgtttgcgcactggtatcactggccaccgccgctttactgggtcacattttacttcacgattttttactggtccccagagagctctcagggagtagtcccgtattagaggaaactcatcccgcacaccagcagggagctagtcgcccaggccctcgggacgcgcaggcacatcctggtcggcctcgtgcagttccgactcaatgtgacgtgccgccaaatagtaggtttgactgtgccccagacaaagcaatcacccaagagcagtgcgaggccagagggtgttgctatatcccagctaagcaaggattgcaaggggctcagatgggccagccctggtgcttctttcccccaagctatccaagctataagctagagaacctgagttcatccgagatgggctacacagccacacttactagaaccacccctacttttttccctaaggacatcttgacccttaggttagatgtaatgatggaaaccgaaaacaggctccattttaccatcaaagatcccgcaaaccgccgatacgaagtgcctctcgagacaccacacgtccatagcagagccccttctcctttgtattctgtagagttctcagaggaaccattcggcgtcatcgtgcgcagacagctagatggaagggtattgctaaacaccaccgtagcacccctgttcttcgcggaccagttcctccagcttagcaccagcttgccctctcagtatattaccgggctggcagagcatttatctccgctgatgctgagtacctcttggactcggatcaccctatggaatcgcgacttagcacctacccctggagccaatctgtacgggtcccatccattctatcttgccctggaggacggcggatcagctcacggcgtgtttttactcaattcaaacgcgatggatgtcgtactgcagcctagccccgcactatcatggaggtccaccggcggaatccttgatgtatatatctttcttggacccgagcccaagtctgtggtgcagcaatatctggacgtggtgggatacccctttatgcctccatactgggggcttggcttccacctttgccggtggggctacagctctaccgcaattacacgccaagtcgtagagaatatgactagggcccatttcccattggatgtccagtggaacgacctggactacatggatagccgtcgggacttcacgtttaacaaagacggcttccgggattttcctgctatggtccaggaactgcaccagggcggacgcaggtacatgatgattgtggatcccgcaattagctcatccggtccagccggaagctatcgaccatacgatgagggcctgcgacgcggagtgttcatcacaaatgagacaggccaaccgttaattgggaaggtgtggccaggctccacagcattccccgacttcacaaaccccaccgccctggcttggtgggaagacatggtcgcagagttccatgaccaggtcccctttgatggtatgtggatcgacatgaacgaacctagcaatttcatccgcggtagtgaggacggctgccctaataatgagttggaaaacccgccatatgtccccggtgtggtggggggaactctgcaggctgcaactatctgtgcctcttcccatcagtttttaagcacccattacaacctgcataacctttacgggttgacagaggctatcgcttctcacagggccctggtgaaagcacgaggaaccagaccattcgtgatttctagatccacatttgctggacacgggaggtatgccggtcattggacaggcgacgtgtggtctagttgggagcagctggcgagttctgtgcctgagatattgcagtttaacttgctcggcgtacccctagtgggcgctgatgtgtgcgggtttctcggcaacacgagcgaggagctgtgtgtccgctggactcaactgggtgccttctacccttttatgcgcaatcacaactccctcctttccctgcctcaggagccatacagtttttctgagcccgcacagcaggccatgcgaaaagccctgaccttgaggtatgcccttcttccccacctctacaccctcttccatcaagcgcacgtggcaggcgaaacagttgcaagacctctgtttctagagtttcccaaagattcatctacctggaccgtagaccaccaactgctgtggggggaggcccttcttataacgcccgtattgcaggccggtaaagccgaagtcacgggctacttccctctgggcacttggtatgatctccaaacagttcccgtggaggcccttggtagtctgccaccgcctcctgctgcgcctcgagaaccagcgattcactcagagggccagtgggttacattaccagccccactcgataccattaacgtgcacctgcgggctggatatattatccctctccaaggccctgggcttaccaccaccgagagccgccagcagccaatggcgctggcggtcgccctgaccaagggaggcgaagctagaggcgagctgttctgggatgatggcgagtctttggaagttctagaacggggtgcctacacgcaggtgatctttctcgccaggaacaacactatagtaaacgaactcgtgcgggtcacctccgagggagcaggtctccagctccaaaaagtcacagtgctgggagtagcgaccgctccccagcaggtgctttccaatggtgtccctgtctccaacttcacgtattcgccagacaccaaggtgcttgacatttgcgttagcctcctgatgggtgagcagtttttagtttcttggtgttag

SEQ ID NO: 274998 - DNA, 2859 bp, Artificial Sequence
  derived and/or modified sequence
atgggagtacgacatcctccgtgctctcaccggctgcttgcagtttgtgccctagtgtctctggccaccgctgcattgttgggacacatactgttacatgacttcttgcttgtgcccagggagctgagtggaagttcccctgtgctcgaggaaacgcacccagcgcaccagcaaggcgcgagtcgccccgggccgcgtgacgctcaggctcatccgggtcgacccagggcggtccccacccaatgcgacgtgcctcctaattctcgtttcgactgtgcacctgacaaggctataacacaggagcaatgcgaggctagagggtgctgctacataccagccaaacaggggttgcaaggcgctcagatgggtcaaccttggtgttttttcccacccagctacccaagctataaactggagaacttgagctcaagcgagatgggatacacagccacacttacacgaaccacaccaacatttttcccgaaagacatccttacactacgacttgatgtgatgatggagacagaaaataggctgcactttacgattaaagacccggccaataggcggtatgaagttcctttggagaccccacatgtgcactcacgggccccctcaccgctgtactccgttgaattttccgaggagccgtttggtgtgattgttagacgccaacttgacggaagagtcctgctgaacacaactgttgcccctctgttcttcgcagatcagttcttgcagctcagtacttccctgccgtcacagtacatcactggactggccgaacacctgagccccttaatgctgtctacgagttggacacgcataactctgtggaatcgggacctggcccccacacctggcgctaacctgtatggctctcaccctttttacctggcccttgaggatggcggtagtgcccacggtgtattcctacttaacagcaacgccatggacgttgtcctccagccttcacctgcgctctcgtggcggtccactggtggaattctggatgtttatatcttcttgggtccggagcctaagtccgtggttcagcaatacctagacgtagtgggctaccctttcatgccaccgtattggggcctggggttccatctatgccggtggggctactcaagcacagccataacaagacaggttgttgaaaacatgactcgcgcacacttcccactggacgtgcagtggaacgacttagactatatggattcgcggcgtgattttacatttaacaaagacggcttcagggacttccccgccatggttcaagaactgcaccagggaggcagaagatatatgatgatcgtagaccctgctatttcttcaagtggtcctgccggttcctacaggccttacgacgaaggcctgagacgtggagtgttcatcacaaatgaaacaggacaaccactcatcgggaaggtttggccaggatccaccgcatttcctgactttacaaatccaacggcattagcatggtgggaggatatggtggccgagttccacgaccaggtgcctttcgacggaatgtggatcgatatgaacgagccttccaactttataagaggttccgaggacgggtgccctaataacgagctcgaaaaccccccttatgtgcctggcgtggttggaggcacgctgcaggccgctacaatttgtgccagtagccatcagttcctttccactcattataatttacataacttgtatggcctcacagaggctattgcatctcatcgggccctggttaaagcacgaggcacacgaccatttgtgatttcacgcagcacttttgccggacacggaaggtatgctggccattggaccggggatgtttggtcctcatgggagcagctcgcctcctccgtgccagaaatattacaattcaacctgctcggcgttcctctcgtcggagccgacgtgtgcggcttccttggcaacacgtccgaagagctctgtgtacgctggacacagcttggagccttctatcctttcatgcgtaaccacaatagtcttctatctttgccccaggaaccctactcgttctcggagcctgctcagcaagcgatgagaaaagctttaacccttcgctacgcacttcttccacatctttacactttgtttcatcaggctcacgtggccggggagaccgttgcgcgccctctgtttttggagttccccaaggatagcagcacttggaccgtggaccaccagcttctgtggggagaggctctccttattacaccggtgctgcaggcgggaaaagctgaggtgacaggttacttcccacttgggacctggtacgacttgcaaactgttcctgtagaggccctcggcagccttcctcctcccccggccgcacctagagagcctgccatacacagtgaagggcagtgggtgactttgcctgctccactcgacacgattaatgtgcacttgagggcaggctatattattccgttacaaggcccagggctcaccaccactgagtctcgtcagcaacccatggcactcgccgttgccttaactaaaggcggtgaagctcggggagaactgttttgggacgatggagaatcattagaagttttagaacgcggagcttacactcaagttatttttctggcccggaacaacacgatcgttaatgaactggtgcgggtgacgagcgaaggcgctggattacagctgcaaaaggtaactgtgttgggagtcgctaccgctcctcagcaggtgctgtccaacggtgtgcctgtttccaatttcacgtattctcccgatactaaagtacttgatatttgtgtgtctctcctcatgggcgaacaatttctggttagctggtgctag

SEQ ID NO: 274999 - DNA, 2859 bp, Artificial Sequence
  derived and/or modified sequence
atgggcgtgagacacccaccctgcagccacagactactcgccgtgtgcgccctggtgagcctggcaactgccgccctgcttggccacattctgctacacgactttctcctggtgccaagggagctgtctggaagcagcccagtgctcgaagaaactcaccccgcacatcagcaaggggccagtcgccccgggccacgagatgcccaggcccacccgggaagacctagagccgtgcctacccagtgcgatgtcccccctaattcgagattcgactgcgctcccgataaagccatcacccaggagcaatgcgaggctcggggctgctgttatatcccagctaaacaaggcctgcagggggcccagatgggtcaaccttggtgtttctttcccccttcttacccatcctacaagcttgagaacctatcaagttccgagatggggtacacggccactttaactcgaaccacccccactttctttccaaaggacatactgacactgcgcctggacgtaatgatggagaccgagaacaggttgcattttaccataaaagacccagctaaccggcggtacgaagtgcccttggagacaccacacgtgcatagccgcgccccgtctcctttatactctgtggagttctctgaggaaccattcggtgtgattgtccgacgacagctggatggcagagtgcttctaaacacaaccgtcgctccactgttcttcgctgatcaattcctgcagctctcaacatcactgcccagtcagtatattacaggactggccgagcacctaagcccactgatgctctctacgagttggacaaggatcaccctttggaaccgagacctggctcctaccccgggcgccaatctctacggctctcaccctttctatctagctctggaagatggcggaagcgctcacggagtgttcctcctaaatagcaatgcaatggatgtcgtgctccagccctctcccgcactgtcatggcgatccacaggggggattttagacgtttacatttttctcggtcctgagcctaagtctgtggtccaacaatacttggacgttgtggggtaccctttcatgcccccttattgggggctggggtttcatctgtgtcgttggggctactcaagtacagccatcacaaggcaggtggtggaaaacatgactcgagcccattttcctctggacgttcaatggaacgatctagactatatggactctaggcgagacttcacatttaacaaggatggctttcgcgattttcccgctatggtccaagaacttcaccaaggcgggcggcgctatatgatgatcgtcgatcccgccatctcctcgtccggacccgcaggtagctatcgaccatacgacgaaggtctgcggaggggcgtgttcattacaaacgagacaggccagcccttaattggcaaagtctggccaggttctacagccttccctgacttcactaacccaaccgccctcgcatggtgggaagacatggtggctgagtttcacgatcaggtcccgtttgacggtatgtggattgatatgaatgaaccctcaaactttattcgaggttcagaggatgggtgtcctaacaatgagctcgaaaatcccccatatgtgcctggggttgtgggaggcactttacaggctgctacaatctgtgcttcaagccatcaatttctgagtacgcattataacctgcataacctgtatggtctcaccgaggctattgccagtcaccgggccctggtgaaggcacgcggaacacggccctttgtaatcagccgtagcacgttcgcgggccatggccgttacgccgggcactggaccggtgacgtctggagcagttgggaacagctggcatcctccgtgcctgagatcctccagtttaatcttcttggggtcccacttgtcggggcagatgtgtgcggatttctgggtaacacatctgaggaactgtgtgtgagatggactcagctgggtgccttttatcccttcatgaggaaccataacagtctgctgagtctaccccaggaaccctattcattcagcgaacctgctcagcaggctatgaggaaagcactgacactgcgatacgcccttctaccacacttgtacacactatttcaccaggctcatgtcgctggagaaactgtcgcccgtccgcttttccttgaattcccaaaggatagttcaacctggacagtcgatcaccagttgctgtggggagaggccctactaatcacccctgtcttgcaggccggcaaagccgaggtcactggctattttcctctcgggacgtggtacgatctgcagacagttcctgtggaagccctgggctcgttaccaccaccaccagccgctcccagagagcccgcaattcattccgaaggacagtgggtgacactcccagctcccctagatacaatcaatgtacacttaagggccggttacattattccactgcaaggaccaggtctgaccacaaccgaatccaggcagcagccgatggctctcgccgtcgctctcacaaagggtggcgaagctcgaggcgagttgttctgggacgatggggaatcacttgaggttcttgagaggggagcctacactcaggtgatattcttggcacggaacaatacaattgtgaacgagctggtcagagttaccagcgaaggagcggggctccagctccaaaaggtgacggtgcttggcgtcgctacagcaccgcagcaggttttaagtaacggggtccctgttagtaacttcacgtacagtccagatacaaaagtgctggacatctgcgtgtcactcctcatgggcgaacagttcctggttagttggtgctag

SEQ ID NO: 275000 - DNA, 2859 bp, Artificial Sequence
  derived and/or modified sequence
atgggtgtccgccatcctccatgcagccaccgcttactcgcagtctgcgcactcgtttccctagccacagccgccctcttgggccatatattactgcatgattttcttctggtcccccgggaactgtcaggatccagtcctgttttagaagaaactcatccagcacaccagcagggcgcttcccgccccggcccccgtgatgcacaggctcaccccggcagacctcgcgcagtccccactcagtgtgatgtccccccaaatagcagatttgactgcgcccccgataaagccatcacgcaggagcagtgcgaagcaagaggatgttgttatattcctgcaaaacagggactgcaaggcgcgcagatgggccagccttggtgctttttcccccctagttaccccagttataaactggagaacctgtcatccagcgagatgggctacaccgccacattgaccagaacgacacccacattcttccctaaagatattcttacactacgcctagacgtcatgatggagacggaaaatcgcctacattttacaatcaaggatcccgccaacagacgctatgaggtgcccctggaaacgccacacgtgcacagccgagcccccagtcctctatacagtgtagagttttccgaagaacctttcggtgtaatcgtccgacgccagcttgatggacgcgtcctgctgaatactacggtcgctcctctattctttgccgatcagttcctacagctttccacatctttacccagccagtatatcacaggcctagcagagcacctctcccccctcatgctgagtacctcatggacgagaatcaccctgtggaatagagacctggcccctacccccggagctaatctttatggcagtcacccattctacctagcactggaggatggcgggtcggcgcacggagtgttcctcctgaattctaatgcaatggatgtagttctgcaaccctctcccgctctgtcatggcggtctacaggcggcatcctagatgtttacatattccttggccccgagccaaagtcggttgtgcagcaatacctggatgtggtaggctaccctttcatgccgccttattggggcctgggttttcatctctgcaggtgggggtacagctcaacagctattactaggcaggtggttgaaaacatgaccagggctcacttcccacttgatgttcagtggaacgacttagactatatggattcgcggcgtgattttacatttaacaaagacggcttcagggacttccccgccatggttcaagaactgcaccagggaggcagaagatatatgatgatcgtagaccctgctatttcttcaagtggtcctgccggttcctacaggccttacgacgaaggcctgagacgtggagtgttcatcacaaatgaaacaggacaaccactcatcgggaaggtttggccaggatccaccgcatttcctgactttacaaatccaacggcattagcatggtgggaggatatggtagctgagtttcacgaccaggttcctttcgacggcatgtggattgatatgaatgagcccagtaattttatacgcggtagcgaggacggctgccccaataacgagctggagaatccgccatatgtacccggggtagtaggcggtacattgcaagcagctacaatttgcgcctccagccaccagttcctgagcacgcattacaacctgcacaacctttatggtttaacagaagctatagcatcccacagagccctcgtcaaagcgcgcggcacaagaccatttgtgatctcaaggtcaacctttgccgggcacgggcggtacgctggacactggacaggagatgtgtggtccagttgggaacagttagcaagtagtgtacctgagatcctccaatttaacctgctgggggtcccattggttggtgctgacgtgtgcggctttctagggaatactagtgaagagctttgtgttagatggacccagctcggcgcattttaccccttcatgaggaatcataattctttgctatccttgccacaggaaccatacagctttagtgagcccgctcagcaggcaatgaggaaggcactgacattgaggtatgctctcctccctcatttgtacactctgttccaccaagcccacgttgctggagaaaccgttgcaagacccctgttcctggaattccccaaggactcttccacttggaccgtggaccatcagctgttgtggggagaagcccttttgattacccccgtgctccaggccggcaaggctgaagtgacagggtattttcctctaggaacttggtatgacctccagaccgtccctgttgaagctctgggatccctccctcctccacccgccgccccaagggaaccagctatccacagtgaagggcagtgggtgactttgcctgctccactcgacacgattaatgtgcacttgagggcaggctatattattccgttacaaggcccagggctcaccaccactgagtctcgtcagcaacccatggcactcgccgttgccttaactaaaggcggtgaagctcggggagaactgttttgggacgatggagaatcattagaagttttagaacgcggagcttacactcaagttatttttctggcccggaacaacacgatcgttaatgaactggtgcgggtgacgagcgaaggcgctggattacagctgcagaaggtgacagtcttaggggtcgctacagctccacagcaggttctttcaaacggcgtcccagtatccaatttcacttattccccagacaccaaggttctcgatatttgcgtatccttgctaatgggggaacagtttctcgtgagctggtgttag

SEQ ID NO: 275001 - DNA, 2859 bp, Artificial Sequence
  derived and/or modified sequence
atgggagtacgtcatcccccatgcagccaccggttgttggctgtttgtgcactcgtttccctggcaaccgctgctttgttaggccacattcttttacacgacttcctactcgtcccccgcgaattgagcggatcatctccagtccttgaggagacccaccccgcgcaccagcaaggggccagccggcccggcccaagagatgcacaggcccatcccgggaggcctcgcgctgtgccgacccagtgtgacgtgccccctaactcacgattcgattgcgccccagacaaagccattactcaggaacagtgtgaagcacgtggctgttgctatattcccgctaaacagggtctgcagggagctcagatgggtcaaccctggtgcttctttcccccgtcataccctagctacaagctagaaaacctctcttccagcgagatgggttataccgcaactctcacccgcacaacccccacttttttccctaaagatatattgaccctgcggctggatgtgatgatggagactgaaaatcgactccacttcaccataaaggatcctgctaacagaagatacgaagtgcctctagaaacgcctcacgtccacagtcgggctccatcccccttgtattctgtggaattttcagaagaaccatttggagtgatcgtccgtaggcagttggacggcagagtgctgctcaacaccaccgtggcccccttatttttcgctgatcaattcttgcagctgtctacaagccttccctcacagtacattactggtctggctgaacacttatcacccctcatgttgtcaacttcctggaccagaatcactttatggaatcgcgatctggctccgacaccaggcgccaatttgtacggcagtcaccctttttacctcgccctcgaggatggagggagtgcccatggagttttcttacttaacagcaacgcaatggatgtggttctgcaaccttccccggccctctcttggcgctcaaccggaggaattctcgacgtgtatattttcttgggaccagaacccaaatcagttgtgcagcaatatttggacgtggtaggctatccttttatgcccccctattggggtctcggcttccatctgtgtcggtggggatacagttctacagcaatcaccagacaggttgtagagaacatgacacgcgctcacttccctctggacgtccaatggaacgacttagactatatggattcacgacgggacttcacattcaataaagacgggtttcgcgatttccctgcgatggttcaagagctgcatcagggcgggcgccggtacatgatgatcgtcgatcctgcaatcagttcgtccggacctgccggttcctatcgaccatatgacgaaggattacgcagaggggttttcataactaatgagaccggccagcccttaataggaaaggtatggcctggttctaccgcattccctgattttactaatccgactgctctggcctggtgggaggatatggttgctgaattccatgaccaggtgccttttgatggaatgtggattgacatgaatgaaccgagcaattttattagaggttccgaggatggctgtccaaacaacgagctagaaaacccaccatatgtccctggagtagttggagggacactgcaggctgctaccatctgtgcatcctcgcaccagttcctgagtactcattataacctgcacaatctctatgggctgactgaagctatcgcttcccatagggctttagtgaaggcccggggtacccgaccttttgttatatcaagatctacctttgctggacatggaaggtacgctggccattggaccggcgacgtctggtcatcatgggagcagttagctagttcagtgcctgaaatactccagttcaacctgctcggcgttcccctggtgggtgcagatgtgtgtggctttttaggaaataccagcgaggagttatgcgtgaggtggactcagctgggcgctttctatcctttcatgcgtaatcataatagtttgttaagtttgccccaggagccttacagtttcagcgagccagcccaacaggccatgcgaaaagcactgacactgcgttacgccttgttgccacacctgtatacccttttccatcaggcgcacgtcgcaggagaaactgtagctcgacctttgttcctcgaattccccaaagactcttcaacgtggacggtcgatcaccaactcctctggggcgaggcactacttattactcctgtgctgcaggccggaaaagcggaagtgactggctactttccactcggcacttggtacgatctccaaacagttcccgtcgaagctttaggttctctgcccccaccccctgccgctccccgtgaacctgctatccatagtgagggacagtgggtcactctgccagccccattagacacaatcaatgtccacctgcgagccggctatataatcccattgcagggaccgggcctaaccacgacggaaagcaggcaacagcccatggcactggctgtagcgcttactaaagggggagaggcacgtggcgaattattctgggatgatggtgaaagtctggaagttctggagagaggggcttacacccaggtcatctttttggcgcgaaataacacaatcgtgaacgaactggttagagttacaagcgagggcgccggcctacaactacagaaagtgaccgtcttgggtgtcgccaccgccccccaacaggttctttcgaatggcgtcccagtttcaaacttcacctactctccagatacgaaagtcctcgatatatgcgtgtcattactgatgggcgagcaatttcttgtgtcgtggtgttag

SEQ ID NO: 275002 - RNA, 272 nt, Artificial Sequence
  derived and/or modified sequence
gggaaauaagagagaaaagaagaguaagaagaaauauaagagccaccauggggguccggcaucccccaugcucccacagacugcuggcuguaugugcacucgugucgcucgcgacagccgcgcuuuugccgcagaacucaaagauccccggaccuacguucuuggacccgcacugauaagcugccuucugcggggcuugccuucuggccaugcccuucuucucucccuugcaccuguaccucuuggucuuugaauaaagccugaguaggaag

SEQ ID NO: 275003 - RNA, 3002 nt, Artificial Sequence
  derived and/or modified sequence
gggaaauaagagagaaaagaagaguaagaagaaauauaagagccaccaugggggugcggcacccgccuuguucgcaucggcuccucgcugugugugcauuggugucgcuggcgacagcggcgcuccuuggucacauuuuguugcacgacuuucuccuggugcccagagaguuguccggaucgucccccguguuggaggaaacucaucccgcacaccagcagggggccucgcgcccugggccacgcgacgcccaagcccaccccgguagaccaagggcaguacccacacagugugaugugccaccaaacucgagauucgauugugcgccggacaaagcuauuacccaagaacagugcgaagcgagagggugcuguuacauccccgcaaaacaaggacuccagggugcucagaugggacagcccuggugcuucuuuccucccucguauccaagcuauaaguuggaaaaucuguccucaucggaaaugggauauacagcaacacugacaaggacgacuccgacauucuucccgaaggacauucuuacauugagguuggacgucaugauggaaacggaaaaccggcuccacuucacgaucaaggacccggcgaaccgcagauacgaggucccacucgagacaccccaugugcacagcagggcucccucgccguuguauucggucgaauuuucggaagagcccuucggagugaucguccggaggcagcuggaugguagggugcucuugaauacgaccgucgcaccguuguucuuugcggaucaguuucuccaacuuucaacuucguugccgucgcaguacaucacgggacucgcagagcaucucucaccgcucaugcugagcacuucguggacgaggaucacgcuguggaacagagacuuggcgccaacgccuggggcgaaccuuuacgggagccacccuuucuaucuugcgcucgaggaugggggaucggcacacggggucuuucugcucaacucaaacgcuauggacgucgucuugcagccgucgccggcucugucauggcggagcacgggugguauucuggacguguacaucuuccucggcccugaaccaaagucgguggugcagcaguaccuugacgucgucggguacccauucaugcccccguauuggggacuggguuuucaucucugccgcuggggguacuccucgaccgcuaucacccgccaagugguggagaacaugacgcgggcacauuuccccuuggaugugcaauggaaugaccuugacuacauggauucaaggagggauuucaccuucaacaaagacggguuucgggacuuccccgcgauggugcaagaacugcaccagggaggaagaagauacaugaugaucguagaucccgcgaucagcuccuccggaccggcaggaucguacagacccuaugacgaaggcuugcgacgcggaguguucaucaccaacgaaacagggcagccucucauugggaagguguggcccgguagcacugccuuuccugacuucaccaauccgacugccuuggcguggugggaagauaugguggcggaguuccaugaccaggugcccuuugaugguauguggaucgauaugaacgagcccucaaauuucauccggggaucggaagauggcugcccaaacaacgaacucgaaaacccgccuuacguaccaggggucguaggaggaacgcuccaggccgcgacaaucugcgcgucgucgcaccaauuccugucaacccacuacaauuugcauaaucucuauggacugacggaggccauugcaucacaucgagcuuuggugaaggcgagaggaacacggccguuugugaucucgcgcuccacguucgcgggacacgggagguacgcagggcacuggacgggagaugucuggagcagcugggaacaauuggcgucgucgguaccggaaauucugcaguucaaccucuugggagucccucugguaggugccgacgucuguggauuucucgggaacaccuccgaggaacugugcguccgauggacgcaguugggagcguuuuacccguucaugcgaaaccacaacucacuguugucacucccucaagagccauauucguucucggagccggcacaacaagcgaugcgcaaagcgcucacacuucgcuacgcccuuuugccgcaucuguacacccuuuuucaccaggcgcacguagccggggaaacuguggcgaggcccuuguuccucgaauuuccgaaggacucaucgacuuggacagucgaucaccaacuuuuguggggagaggcguuguugauuacaccggugcugcaggccggaaaagccgagguaacaggguauuuuccuuuggguacgugguacgaccuccagacgguccccguggaggcgcuugggucgcuuccuccacccccagcagccccucgcgagcccgcgauccauucggagggacaaugggugacucuucccgcuccgcuugacacaauuaacgugcaucuuagagccggauauaucauuccguugcagggaccgggccucacaacaacggagucgcgccagcagccgauggcacucgcuguagcguugacuaaagggggagaagcucggggagagcucuuuugggaugacggcgagagccucgaaguacuugagcgcggugccuauacacaagucauuuuucucgcacgcaauaacacaaucgugaacgagcucguaagagucacaagcgaaggagccgggcuucaacuccagaagguaacagucuugggcguagccaccgcuccccagcagguccugucaaacggaguaccggucagcaauuucacguacucgccggacacgaagguguuggauauuugcgucagccugcuuaugggagaacaguuucuuguaagcuggugcugaagcgcugccuucugcggggcuugccuucuggccaugcccuucuucucucccuugcaccuguaccucuuggucuuugaauaaagccugaguaggaag

SEQ ID NO: 275004 - RNA, 2859 nt, Artificial Sequence
  derived and/or modified sequence
augggaguacgacauccuccgugcucucaccggcugcuugcaguuugugcccuagugucucuggccaccgcugcauuguugggacacauacuguuacaugacuucuugcuugugcccagggagcugaguggaaguuccccugugcucgaggaaacgcacccagcgcaccagcaaggcgcgagucgccccgggccgcgugacgcucaggcucauccgggucgacccagggcgguccccacccaaugcgacgugccuccuaauucucguuucgacugugcaccugacaaggcuauaacacaggagcaaugcgaggcuagagggugcugcuacauaccagccaaacagggguugcaaggcgcucagaugggucaaccuugguguuuuuucccacccagcuacccaagcuauaaacuggagaacuugagcucaagcgagaugggauacacagccacacuuacacgaaccacaccaacauuuuucccgaaagacauccuuacacuacgacuugaugugaugauggagacagaaaauaggcugcacuuuacgauuaaagacccggccaauaggcgguaugaaguuccuuuggagaccccacaugugcacucacgggcccccucaccgcuguacuccguugaauuuuccgaggagccguuuggugugauuguuagacgccaacuugacggaagaguccugcugaacacaacuguugccccucuguucuucgcagaucaguucuugcagcucaguacuucccugccgucacaguacaucacuggacuggccgaacaccugagccccuuaaugcugucuacgaguuggacacgcauaacucuguggaaucgggaccuggcccccacaccuggcgcuaaccuguauggcucucacccuuuuuaccuggcccuugaggauggcgguagugcccacgguguauuccuacuuaacagcaacgccauggacguuguccuccagccuucaccugcgcucucguggcgguccacugguggaauucuggauguuuauaucuucuuggguccggagccuaaguccgugguucagcaauaccuagacguagugggcuacccuuucaugccaccguauuggggccugggguuccaucuaugccgguggggcuacucaagcacagccauaacaagacagguuguugaaaacaugacucgcgcacacuucccacuggacgugcaguggaacgacuuagacuauauggauucgcggcgugauuuuacauuuaacaaagacggcuucagggacuuccccgccaugguucaagaacugcaccagggaggcagaagauauaugaugaucguagacccugcuauuucuucaagugguccugccgguuccuacaggccuuacgacgaaggccugagacguggaguguucaucacaaaugaaacaggacaaccacucaucgggaagguuuggccaggauccaccgcauuuccugacuuuacaaauccaacggcauuagcauggugggaggauaugguggccgaguuccacgaccaggugccuuucgacggaauguggaucgauaugaacgagccuuccaacuuuauaagagguuccgaggacgggugcccuaauaacgagcucgaaaaccccccuuaugugccuggcgugguuggaggcacgcugcaggccgcuacaauuugugccaguagccaucaguuccuuuccacucauuauaauuuacauaacuuguauggccucacagaggcuauugcaucucaucgggcccugguuaaagcacgaggcacacgaccauuugugauuucacgcagcacuuuugccggacacggaagguaugcuggccauuggaccggggauguuugguccucaugggagcagcucgccuccuccgugccagaaauauuacaauucaaccugcucggcguuccucucgucggagccgacgugugcggcuuccuuggcaacacguccgaagagcucuguguacgcuggacacagcuuggagccuucuauccuuucaugcguaaccacaauagucuucuaucuuugccccaggaacccuacucguucucggagccugcucagcaagcgaugagaaaagcuuuaacccuucgcuacgcacuucuuccacaucuuuacacuuuguuucaucaggcucacguggccggggagaccguugcgcgcccucuguuuuuggaguuccccaaggauagcagcacuuggaccguggaccaccagcuucuguggggagaggcucuccuuauuacaccggugcugcaggcgggaaaagcugaggugacagguuacuucccacuugggaccugguacgacuugcaaacuguuccuguagaggcccucggcagccuuccuccucccccggccgcaccuagagagccugccauacacagugaagggcagugggugacuuugccugcuccacucgacacgauuaaugugcacuugagggcaggcuauauuauuccguuacaaggcccagggcucaccaccacugagucucgucagcaacccauggcacucgccguugccuuaacuaaaggcggugaagcucggggagaacuguuuugggacgauggagaaucauuagaaguuuuagaacgcggagcuuacacucaaguuauuuuucuggcccggaacaacacgaucguuaaugaacuggugcgggugacgagcgaaggcgcuggauuacagcugcaaaagguaacuguguugggagucgcuaccgcuccucagcaggugcuguccaacggugugccuguuuccaauuucacguauucucccgauacuaaaguacuugauauuugugugucucuccucaugggcgaacaauuucugguuagcuggugcuag

SEQ ID NO: 275005 - RNA, 2859 nt, Artificial Sequence
  derived and/or modified sequence
augggcgugagacacccacccugcagccacagacuacucgccgugugcgcccuggugagccuggcaacugccgcccugcuuggccacauucugcuacacgacuuucuccuggugccaagggagcugucuggaagcagcccagugcucgaagaaacucaccccgcacaucagcaaggggccagucgccccgggccacgagaugcccaggcccacccgggaagaccuagagccgugccuacccagugcgauguccccccuaauucgagauucgacugcgcucccgauaaagccaucacccaggagcaaugcgaggcucggggcugcuguuauaucccagcuaaacaaggccugcagggggcccagaugggucaaccuugguguuucuuucccccuucuuacccauccuacaagcuugagaaccuaucaaguuccgagaugggguacacggccacuuuaacucgaaccacccccacuuucuuuccaaaggacauacugacacugcgccuggacguaaugauggagaccgagaacagguugcauuuuaccauaaaagacccagcuaaccggcgguacgaagugcccuuggagacaccacacgugcauagccgcgccccgucuccuuuauacucuguggaguucucugaggaaccauucggugugauuguccgacgacagcuggauggcagagugcuucuaaacacaaccgucgcuccacuguucuucgcugaucaauuccugcagcucucaacaucacugcccagucaguauauuacaggacuggccgagcaccuaagcccacugaugcucucuacgaguuggacaaggaucacccuuuggaaccgagaccuggcuccuaccccgggcgccaaucucuacggcucucacccuuucuaucuagcucuggaagauggcggaagcgcucacggaguguuccuccuaaauagcaaugcaauggaugucgugcuccagcccucucccgcacugucauggcgauccacaggggggauuuuagacguuuacauuuuucucgguccugagccuaagucugugguccaacaauacuuggacguugugggguacccuuucaugcccccuuauugggggcugggguuucaucugugucguuggggcuacucaaguacagccaucacaaggcaggugguggaaaacaugacucgagcccauuuuccucuggacguucaauggaacgaucuagacuauauggacucuaggcgagacuucacauuuaacaaggauggcuuucgcgauuuucccgcuaugguccaagaacuucaccaaggcgggcggcgcuauaugaugaucgucgaucccgccaucuccucguccggacccgcagguagcuaucgaccauacgacgaaggucugcggaggggcguguucauuacaaacgagacaggccagcccuuaauuggcaaagucuggccagguucuacagccuucccugacuucacuaacccaaccgcccucgcauggugggaagacaugguggcugaguuucacgaucaggucccguuugacgguauguggauugauaugaaugaacccucaaacuuuauucgagguucagaggauggguguccuaacaaugagcucgaaaaucccccauaugugccugggguugugggaggcacuuuacaggcugcuacaaucugugcuucaagccaucaauuucugaguacgcauuauaaccugcauaaccuguauggucucaccgaggcuauugccagucaccgggcccuggugaaggcacgcggaacacggcccuuuguaaucagccguagcacguucgcgggccauggccguuacgccgggcacuggaccggugacgucuggagcaguugggaacagcuggcauccuccgugccugagauccuccaguuuaaucuucuuggggucccacuugucggggcagaugugugcggauuucuggguaacacaucugaggaacugugugugagauggacucagcugggugccuuuuaucccuucaugaggaaccauaacagucugcugagucuaccccaggaacccuauucauucagcgaaccugcucagcaggcuaugaggaaagcacugacacugcgauacgcccuucuaccacacuuguacacacuauuucaccaggcucaugucgcuggagaaacugucgcccguccgcuuuuccuugaauucccaaaggauaguucaaccuggacagucgaucaccaguugcuguggggagaggcccuacuaaucaccccugucuugcaggccggcaaagccgaggucacuggcuauuuuccucucgggacgugguacgaucugcagacaguuccuguggaagcccugggcucguuaccaccaccaccagccgcucccagagagcccgcaauucauuccgaaggacagugggugacacucccagcuccccuagauacaaucaauguacacuuaagggccgguuacauuauuccacugcaaggaccaggucugaccacaaccgaauccaggcagcagccgauggcucucgccgucgcucucacaaaggguggcgaagcucgaggcgaguuguucugggacgauggggaaucacuugagguucuugagaggggagccuacacucaggugauauucuuggcacggaacaauacaauugugaacgagcuggucagaguuaccagcgaaggagcggggcuccagcuccaaaaggugacggugcuuggcgucgcuacagcaccgcagcagguuuuaaguaacggggucccuguuaguaacuucacguacaguccagauacaaaagugcuggacaucugcgugucacuccucaugggcgaacaguuccugguuaguuggugcuag

SEQ ID NO: 275006 - RNA, 2859 nt, Artificial Sequence
  derived and/or modified sequence
auggguguccgccauccuccaugcagccaccgcuuacucgcagucugcgcacucguuucccuagccacagccgcccucuugggccauauauuacugcaugauuuucuucuggucccccgggaacugucaggauccaguccuguuuuagaagaaacucauccagcacaccagcagggcgcuucccgccccggcccccgugaugcacaggcucaccccggcagaccucgcgcaguccccacucagugugauguccccccaaauagcagauuugacugcgcccccgauaaagccaucacgcaggagcagugcgaagcaagaggauguuguuauauuccugcaaaacagggacugcaaggcgcgcagaugggccagccuuggugcuuuuuccccccuaguuaccccaguuauaaacuggagaaccugucauccagcgagaugggcuacaccgccacauugaccagaacgacacccacauucuucccuaaagauauucuuacacuacgccuagacgucaugauggagacggaaaaucgccuacauuuuacaaucaaggaucccgccaacagacgcuaugaggugccccuggaaacgccacacgugcacagccgagcccccaguccucuauacaguguagaguuuuccgaagaaccuuucgguguaaucguccgacgccagcuugauggacgcguccugcugaauacuacggucgcuccucuauucuuugccgaucaguuccuacagcuuuccacaucuuuacccagccaguauaucacaggccuagcagagcaccucuccccccucaugcugaguaccucauggacgagaaucacccuguggaauagagaccuggccccuacccccggagcuaaucuuuauggcagucacccauucuaccuagcacuggaggauggcgggucggcgcacggaguguuccuccugaauucuaaugcaauggauguaguucugcaacccucucccgcucugucauggcggucuacaggcggcauccuagauguuuacauauuccuuggccccgagccaaagucgguugugcagcaauaccuggaugugguaggcuacccuuucaugccgccuuauuggggccuggguuuucaucucugcagguggggguacagcucaacagcuauuacuaggcaggugguugaaaacaugaccagggcucacuucccacuugauguucaguggaacgacuuagacuauauggauucgcggcgugauuuuacauuuaacaaagacggcuucagggacuuccccgccaugguucaagaacugcaccagggaggcagaagauauaugaugaucguagacccugcuauuucuucaagugguccugccgguuccuacaggccuuacgacgaaggccugagacguggaguguucaucacaaaugaaacaggacaaccacucaucgggaagguuuggccaggauccaccgcauuuccugacuuuacaaauccaacggcauuagcauggugggaggauaugguagcugaguuucacgaccagguuccuuucgacggcauguggauugauaugaaugagcccaguaauuuuauacgcgguagcgaggacggcugccccaauaacgagcuggagaauccgccauauguacccgggguaguaggcgguacauugcaagcagcuacaauuugcgccuccagccaccaguuccugagcacgcauuacaaccugcacaaccuuuaugguuuaacagaagcuauagcaucccacagagcccucgucaaagcgcgcggcacaagaccauuugugaucucaaggucaaccuuugccgggcacgggcgguacgcuggacacuggacaggagaugugugguccaguugggaacaguuagcaaguaguguaccugagauccuccaauuuaaccugcugggggucccauugguuggugcugacgugugcggcuuucuagggaauacuagugaagagcuuuguguuagauggacccagcucggcgcauuuuaccccuucaugaggaaucauaauucuuugcuauccuugccacaggaaccauacagcuuuagugagcccgcucagcaggcaaugaggaaggcacugacauugagguaugcucuccucccucauuuguacacucuguuccaccaagcccacguugcuggagaaaccguugcaagaccccuguuccuggaauuccccaaggacucuuccacuuggaccguggaccaucagcuguuguggggagaagcccuuuugauuacccccgugcuccaggccggcaaggcugaagugacaggguauuuuccucuaggaacuugguaugaccuccagaccgucccuguugaagcucugggaucccucccuccuccacccgccgccccaagggaaccagcuauccacagugaagggcagugggugacuuugccugcuccacucgacacgauuaaugugcacuugagggcaggcuauauuauuccguuacaaggcccagggcucaccaccacugagucucgucagcaacccauggcacucgccguugccuuaacuaaaggcggugaagcucggggagaacuguuuugggacgauggagaaucauuagaaguuuuagaacgcggagcuuacacucaaguuauuuuucuggcccggaacaacacgaucguuaaugaacuggugcgggugacgagcgaaggcgcuggauuacagcugcagaaggugacagucuuaggggucgcuacagcuccacagcagguucuuucaaacggcgucccaguauccaauuucacuuauuccccagacaccaagguucucgauauuugcguauccuugcuaaugggggaacaguuucucgugagcugguguuag

SEQ ID NO: 275007 - RNA, 2859 nt, Artificial Sequence
  derived and/or modified sequence
augggaguacgucaucccccaugcagccaccgguuguuggcuguuugugcacucguuucccuggcaaccgcugcuuuguuaggccacauucuuuuacacgacuuccuacucgucccccgcgaauugagcggaucaucuccaguccuugaggagacccaccccgcgcaccagcaaggggccagccggcccggcccaagagaugcacaggcccaucccgggaggccucgcgcugugccgacccagugugacgugcccccuaacucacgauucgauugcgccccagacaaagccauuacucaggaacagugugaagcacguggcuguugcuauauucccgcuaaacagggucugcagggagcucagaugggucaacccuggugcuucuuucccccgucauacccuagcuacaagcuagaaaaccucucuuccagcgagauggguuauaccgcaacucucacccgcacaacccccacuuuuuucccuaaagauauauugacccugcggcuggaugugaugauggagacugaaaaucgacuccacuucaccauaaaggauccugcuaacagaagauacgaagugccucuagaaacgccucacguccacagucgggcuccaucccccuuguauucuguggaauuuucagaagaaccauuuggagugaucguccguaggcaguuggacggcagagugcugcucaacaccaccguggcccccuuauuuuucgcugaucaauucuugcagcugucuacaagccuucccucacaguacauuacuggucuggcugaacacuuaucaccccucauguugucaacuuccuggaccagaaucacuuuauggaaucgcgaucuggcuccgacaccaggcgccaauuuguacggcagucacccuuuuuaccucgcccucgaggauggagggagugcccauggaguuuucuuacuuaacagcaacgcaauggaugugguucugcaaccuuccccggcccucucuuggcgcucaaccggaggaauucucgacguguauauuuucuugggaccagaacccaaaucaguugugcagcaauauuuggacgugguaggcuauccuuuuaugccccccuauuggggucucggcuuccaucugugucgguggggauacaguucuacagcaaucaccagacagguuguagagaacaugacacgcgcucacuucccucuggacguccaauggaacgacuuagacuauauggauucacgacgggacuucacauucaauaaagacggguuucgcgauuucccugcgaugguucaagagcugcaucagggcgggcgccgguacaugaugaucgucgauccugcaaucaguucguccggaccugccgguuccuaucgaccauaugacgaaggauuacgcagagggguuuucauaacuaaugagaccggccagcccuuaauaggaaagguauggccugguucuaccgcauucccugauuuuacuaauccgacugcucuggccuggugggaggauaugguugcugaauuccaugaccaggugccuuuugauggaauguggauugacaugaaugaaccgagcaauuuuauuagagguuccgaggauggcuguccaaacaacgagcuagaaaacccaccauaugucccuggaguaguuggagggacacugcaggcugcuaccaucugugcauccucgcaccaguuccugaguacucauuauaaccugcacaaucucuaugggcugacugaagcuaucgcuucccauagggcuuuagugaaggcccgggguacccgaccuuuuguuauaucaagaucuaccuuugcuggacauggaagguacgcuggccauuggaccggcgacgucuggucaucaugggagcaguuagcuaguucagugccugaaauacuccaguucaaccugcucggcguuccccuggugggugcagauguguguggcuuuuuaggaaauaccagcgaggaguuaugcgugagguggacucagcugggcgcuuucuauccuuucaugcguaaucauaauaguuuguuaaguuugccccaggagccuuacaguuucagcgagccagcccaacaggccaugcgaaaagcacugacacugcguuacgccuuguugccacaccuguauacccuuuuccaucaggcgcacgucgcaggagaaacuguagcucgaccuuuguuccucgaauuccccaaagacucuucaacguggacggucgaucaccaacuccucuggggcgaggcacuacuuauuacuccugugcugcaggccggaaaagcggaagugacuggcuacuuuccacucggcacuugguacgaucuccaaacaguucccgucgaagcuuuagguucucugcccccacccccugccgcuccccgugaaccugcuauccauagugagggacagugggucacucugccagccccauuagacacaaucaauguccaccugcgagccggcuauauaaucccauugcagggaccgggccuaaccacgacggaaagcaggcaacagcccauggcacuggcuguagcgcuuacuaaagggggagaggcacguggcgaauuauucugggaugauggugaaagucuggaaguucuggagagaggggcuuacacccaggucaucuuuuuggcgcgaaauaacacaaucgugaacgaacugguuagaguuacaagcgagggcgccggccuacaacuacagaaagugaccgucuugggugucgccaccgccccccaacagguucuuucgaauggcgucccaguuucaaacuucaccuacucuccagauacgaaaguccucgauauaugcgugucauuacugaugggcgagcaauuucuugugucgugguguuag

SEQ ID NO: 275008 - protein, 285 aa, Artificial Sequence
  derived and/or modified sequence
MTNAQIILLIDNARMAVDDFNLKYENEHSFKKDLEIEVEGLRRTLDNLTIVTTDLEQEVEGMRKELILMKKHHEQEMEKHHVPSDFNVNVKVDTGPREDLIKVLEDMRQEYELIIKKKHRDLDTWYKEQSAAMSQEAASPATVQSRQGDIHELKRTFQALEIDLQTQYSTKSALENMLSETQSRYSCKLQDMQEIISHYEEELTQLRHELERQNNEYQVLLGIKTHLEKEITTYRRLLEGESEGTREESKSSMKVSATPKIKAITQETINGRLVLCQVNEIQKHA

SEQ ID NO: 275009 - DNA, 858 bp, Artificial Sequence
  derived and/or modified sequence
atgaccaacgcccagatcatcctgctgatcgacaacgccagaatggccgtggacgacttcaacctgaagtacgagaacgagcacagcttcaagaaggacctggagatcgaggtggagggcctgagaagaaccctggacaacctgaccatcgtgaccaccgacctggagcaggaggtggagggcatgagaaaggagctgatcctgatgaagaagcaccacgagcaggagatggagaagcaccacgtgcccagcgacttcaacgtgaacgtgaaggtggacaccggccccagagaggacctgatcaaggtgctggaggacatgagacaggagtacgagctgatcatcaagaagaagcacagagacctggacacctggtacaaggagcagagcgccgccatgagccaggaggccgccagccccgccaccgtgcagagcagacagggcgacatccacgagctgaagagaaccttccaggccctggagatcgacctgcagacccagtacagcaccaagagcgccctggagaacatgctgagcgagacccagagcagatacagctgcaagctgcaggacatgcaggagatcatcagccactacgaggaggagctgacccagctgagacacgagctggagagacagaacaacgagtaccaggtgctgctgggcatcaagacccacctggagaaggagatcaccacctacagaagactgctggagggcgagagcgagggcaccagagaggagagcaagagcagcatgaaggtgagcgccacccccaagatcaaggccatcacccaggagaccatcaacggcagactggtgctgtgccaggtgaacgagatccagaagcacgcctag

SEQ ID NO: 275010 - DNA, 858 bp, Artificial Sequence
  derived and/or modified sequence
atgaccaatgcacagataattcttctgattgataacgccaggatggcagtggatgactttaacctgaagtacgaaaacgaacactcatttaaaaaggaccttgagattgaagtggaagggctacggcggacattggacaacctcaccattgtgaccaccgacctcgagcaggaagtagagggtatgcgaaaagaactgatcctcatgaaaaagcatcacgagcaagagatggaaaagcatcacgtcccctcggactttaacgttaacgtgaaagttgacacagggcctcgcgaagacctgattaaggtgttggaggacatgcggcaggagtatgaattgatcattaaaaaaaagcaccgagacctggacacatggtacaaagagcaaagcgctgccatgtcccaggaggccgcatccccggccacagtccaatctcgccagggggacatccatgagctgaaacggactttccaagcactggagattgacctgcagacccagtacagcactaagagtgctttggaaaacatgctcagtgagacacagtctaggtacagttgtaaattacaggacatgcaggaaatcattagccactacgaagaagagctgacccaactccgtcatgagctggaaaggcaaaataatgaatatcaggtgctccttggcataaagacacatctggaaaaggaaattaccacatatcggcgccttctggaaggagagagtgaagggacacgggaggagagcaagtcatcaatgaaggtgtcagctacacccaagattaaggcgatcactcaagagacaatcaatggtcgactggttctgtgtcaggtcaacgaaattcagaagcacgcttag

SEQ ID NO: 275011 - DNA, 858 bp, Artificial Sequence
  derived and/or modified sequence
atgaccaatgcccagatcatcctgctgattgacaatgccaggatggctgtggatgacttcaacctgaagtatgaaaatgagcacagcttcaagaaggacctggagattgaggtggagggcctgcggaggaccctggacaacctgaccatcgtgaccacagacctggagcaggaggtggagggcatgaggaaggagctgatcctgatgaagaagcaccacgagcaggagatggagaagcaccacgtgcccagcgacttcaacgtgaatgtgaaggtggacaccggcccccgggaggacctgatcaaggtgctggaggacatgaggcaggagtatgagctgatcatcaagaagaagcaccgggacctggacacctggtacaaggagcagagcgctgccatgagccaggaggccgccagccctgccaccgtgcagagccggcagggcgacatccacgagctgaagaggaccttccaggccctggagattgacctgcagacccagtacagcaccaagagcgccctggagaacatgctgtctgagacccagagccgctacagctgcaagctgcaggacatgcaggagatcatcagccactatgaggaggagctgacccagctgcggcatgagctggagcggcagaacaatgagtaccaggtgctgctgggcatcaagacccacctggagaaggagatcaccacctacagaaggctgctggagggggagagcgagggcacccgggaggagagcaagagctccatgaaggtgtctgccacccccaagatcaaggccatcacccaggagaccatcaatggccgcctggtgctgtgccaggtgaatgagatccagaagcacgcctag

SEQ ID NO: 275012 - DNA, 858 bp, Artificial Sequence
  derived and/or modified sequence
atgaccaacgcccagatcatcctgctgatcgacaacgcccggatggccgtcgatgatttcaacttaaagtacgaaaatgaacatagtttcaagaaagatctggagatcgaggtcgaaggattgagacggacactggacaatctgactattgtgactacagatctggagcaagaggttgaaggtatgaggaaagagctgattctcatgaaaaaacaccacgagcaagagatggaaaaacatcacgtcccgtctgacttcaacgtgaacgtgaaggtggatactggacctagagaagatttgattaaagttctggaagatatgcggcaggaatatgaacttatcattaagaagaaacacagggatctggatacgtggtataaagaacagtctgcggcaatgtcacaagaagccgcttccccagccacggtgcagtcccggcagggggacattcatgagttaaagcggaccttccaggctctggaaatcgacctccagacacagtactcaacgaagtctgccttagagaatatgctctctgagacccaatcccggtattcatgcaagctacaggatatgcaggagattatcagccactatgaggaggaattgacccaactccgacacgagctcgagaggcagaataacgaataccaagtcttgctcggaatcaaaactcacctggaaaaagagattactacttaccggcggttgcttgagggcgagtcagaaggtacacgggaggaatccaaatcctcgatgaaggtctccgctaccccgaaaattaaggctatcactcaggagactatcaatggaagattggttctgtgtcaggttaacgagatccagaagcatgcctag

SEQ ID NO: 275013 - DNA, 858 bp, Artificial Sequence
  derived and/or modified sequence
atgacaaacgctcagataattctgctgatcgacaacgcacgcatggcagtcgacgactttaaccttaagtacgagaacgagcatagctttaaaaaggatctggagatcgaagttgaagggctccgcagaacactggacaacctgacaatcgtgaccacggacctagagcaggaagtggaaggcatgcgaaaagagctgatcctgatgaagaagcaccatgaacaggaaatggagaagcaccatgtcccaagtgattttaacgtgaacgtcaaagtggatactggtcctcgcgaagatctgatcaaagtgctggaggacatgcggcaggagtatgaactcataattaaaaaaaagcatcgggacctggacacatggtacaaggagcagtccgctgctatgtctcaagaggccgcttcaccagcaaccgtgcagtctagacagggcgacatccatgagctgaaacggacttttcaggctttggaaatcgatctccaaacacagtacagtactaagtctgccctagaaaacatgctgagcgagacccagagtagatattcatgcaaactgcaagatatgcaggaaataatcagccactacgaagaagaactgacccagctgcgtcacgagcttgaacgccaaaacaacgagtaccaagtattacttggaatcaagacccacctggaaaaagaaatcaccacttacaggaggcttctcgaaggggaatccgagggtactcgggaggaaagcaaatcctcgatgaaggtctcagccacccctaaaatcaaagctataacccaagaaaccatcaatggaagactggtcctttgccaagtcaatgaaatccagaagcacgcctag

SEQ ID NO: 275014 - protein, 1990 aa, Artificial Sequence
  derived and/or modified sequence
MFRNSLKMLLTGGKSSRKNRSSDGGSEEPPDRRQSSVDSRQSRSGQGGISTESDCAFEPDYAVPPLPVSEGDAEQELGPPPSVDEAANTLMTRLGFLLGEKVTEVQPGDQYSMEVQDENQTSAITQRISPCSTLTSSTASPPASSPCSTLPPISTNATAKDCSYGAVTSPTSTLESRDSGIIATLTSYSENVERTKYAGESSKELGSGGNIKPWQSQKSSMDSCLYRVDENMTASTYSLNKIPERNLETVLSQSVQSIPLYLMPRPNSVAATSSAHLEDLAYLDEQRHTPLRTSLRMPRQSMGGARTQQDLRVRFAPYRPPDISLKPLLFEVPSITTESVFVGRDWVFHEIDAQLQSSNASVNQGVVIVGNIGFGKTAIISRLVALSCHGTRMRQIASDSPHASPKHVDANRELPLTQPPSAHSSITSGSCPGTPEMRRRQEEAMRRLASQVVAYHYCQADNAYTCLVPEFVHNVAALLCRSPQLTAYREQLLREPHLQSMLSLRSCVQDPMASFRRGVLEPLENLHKERKIPDEDFIILIDGLNEAEFHKPDYGDTIVSFLSKMIGKFPSWLKLIVTVRTSLQEITKLLPFHRIFLDRLEENEAIDQDLQAYILHRIHSSSEIQNNISLNGKMDNTTFGKLSSHLKTLSQGSYLYLKLTFDLIEKGYLVLKSSSYKVVPVSLSEVYLLQCNMKFPTQSSFDRVMPLLNVAVASLHPLTDEHIFQAINAGSIEGTLEWEDFQQRMENLSMFLIKRRDMTRMFVHPSFREWLIWREEGEKTKFLCDPRSGHTLLAFWFSRQEGKLNRQQTIELGHHILKAHIFKGLSKKVGVSSSILQGLWISYSTEGLSMALASLRNLYTPNIKVSRLLILGGANINYRTEVLNNAPILCVQSHLGYTEMVALLLEFGANVDASSESGLTPLGYAAAAGYLSIVVLLCKKRAKVDHLDKNGQCALVHAALRGHLEVVKFLIQCDWTMAGQQQGVFKKSHAIQQALIAAASMGYTEIVSYLLDLPEKDEEEVERAQINSFDSLWGETALTAAAGRGKLEVCRLLLEQGAAVAQPNRRGAVPLFSTVRQGHWQIVDLLLTHGADVNMADKQGRTPLMMAASEGHLGTVDFLLAQGASIALMDKEGLTALSWACLKGHLSVVRSLVDNGAATDHADKNGRTPLDLAAFYGDAEVVQFLVDHGAMIEHVDYSGMRPLDRAVGCRNTSVVVTLLKKGAKIGPATWAMATSKPDIMIILLSKLMEEGDMFYKKGKVKEAAQRYQYALKKFPREGFGEDLKTFRELKVSLLLNLSRCRRKMNDFGMAEEFATKALELKPKSYEAYYARARAKRSSRQFAAALEDLNEAIKLCPNNREIQRLLLRVEEECRQMQQPQQPPPPPQPQQQLPEEAEPEPQHEDIYSVQDIFEEEYLEQDVENVSIGLQTEARPSQGLPVIQSPPSSPPHRDSAYISSSPLGSHQVFDFRSSSSVGSPTRQTYQSTSPALSPTHQNSHYRPSPPHTSPAHQGGSYRFSPPPVGGQGKEYPSPPPSPLRRGPQYRASPPAESMSVYRSQSGSPVRYQQETSVSQLPGRPKSPLSKMAQRPYQMPQLPVAVPQQGLRLQPAKAQIVRSNQPSPAVHSSTVIPTGAYGQVAHSMASKYQSSQGDIGVSQSRLVYQGSIGGIVGDGRPVQHVQASLSAGAICQHGGLTKEDLPQRPSSAYRGGVRYSQTPQIGRSQSASYYPVCHSKLDLERSSSQLGSPDVSHLIRRPISVNPNEIKPHPPTPRPLLHSQSVGLRFSPSSNSISSTSNLTPTFRPSSSIQQMEIPLKPAYERSCDELSPVSPTQGGYPSEPTRSRTTPFMGIIDKTARTQQYPHLHQQNRTWAVSSVDTVLSPTSPGNLPQPESFSPPSSISNIAFYNKTNNAQNGHLLEDDYYSPHGMLANGSRGDLLERVSQASSYPDVKVARTLPVAQAYQDNLYRQLSRDSRQGQTSPIKPKRPFVESNV

SEQ ID NO: 275015 - DNA, 5973 bp, Artificial Sequence
  derived and/or modified sequence
atgttcagaaacagcctgaagatgctgctgaccggcggcaagagcagcagaaagaacagaagcagcgacggcggcagcgaggagccccccgacagaagacagagcagcgtggacagcagacagagcagaagcggccagggcggcatcagcaccgagagcgactgcgccttcgagcccgactacgccgtgccccccctgcccgtgagcgagggcgacgccgagcaggagctgggccccccccccagcgtggacgaggccgccaacaccctgatgaccagactgggcttcctgctgggcgagaaggtgaccgaggtgcagcccggcgaccagtacagcatggaggtgcaggacgagaaccagaccagcgccatcacccagagaatcagcccctgcagcaccctgaccagcagcaccgccagcccccccgccagcagcccctgcagcaccctgccccccatcagcaccaacgccaccgccaaggactgcagctacggcgccgtgaccagccccaccagcaccctggagagcagagacagcggcatcatcgccaccctgaccagctacagcgagaacgtggagagaaccaagtacgccggcgagagcagcaaggagctgggcagcggcggcaacatcaagccctggcagagccagaagagcagcatggacagctgcctgtacagagtggacgagaacatgaccgccagcacctacagcctgaacaagatccccgagagaaacctggagaccgtgctgagccagagcgtgcagagcatccccctgtacctgatgcccagacccaacagcgtggccgccaccagcagcgcccacctggaggacctggcctacctggacgagcagagacacacccccctgagaaccagcctgagaatgcccagacagagcatgggcggcgccagaacccagcaggacctgagagtgagattcgccccctacagaccccccgacatcagcctgaagcccctgctgttcgaggtgcccagcatcaccaccgagagcgtgttcgtgggcagagactgggtgttccacgagatcgacgcccagctgcagagcagcaacgccagcgtgaaccagggcgtggtgatcgtgggcaacatcggcttcggcaagaccgccatcatcagcagactggtggccctgagctgccacggcaccagaatgagacagatcgccagcgacagcccccacgccagccccaagcacgtggacgccaacagagagctgcccctgacccagccccccagcgcccacagcagcatcaccagcggcagctgccccggcacccccgagatgagaagaagacaggaggaggccatgagaagactggccagccaggtggtggcctaccactactgccaggccgacaacgcctacacctgcctggtgcccgagttcgtgcacaacgtggccgccctgctgtgcagaagcccccagctgaccgcctacagagagcagctgctgagagagccccacctgcagagcatgctgagcctgagaagctgcgtgcaggaccccatggccagcttcagaagaggcgtgctggagcccctggagaacctgcacaaggagagaaagatccccgacgaggacttcatcatcctgatcgacggcctgaacgaggccgagttccacaagcccgactacggcgacaccatcgtgagcttcctgagcaagatgatcggcaagttccccagctggctgaagctgatcgtgaccgtgagaaccagcctgcaggagatcaccaagctgctgcccttccacagaatcttcctggacagactggaggagaacgaggccatcgaccaggacctgcaggcctacatcctgcacagaatccacagcagcagcgagatccagaacaacatcagcctgaacggcaagatggacaacaccaccttcggcaagctgagcagccacctgaagaccctgagccagggcagctacctgtacctgaagctgaccttcgacctgatcgagaagggctacctggtgctgaagagcagcagctacaaggtggtgcccgtgagcctgagcgaggtgtacctgctgcagtgcaacatgaagttccccacccagagcagcttcgacagagtgatgcccctgctgaacgtggccgtggccagcctgcaccccctgaccgacgagcacatcttccaggccatcaacgccggcagcatcgagggcaccctggagtgggaggacttccagcagagaatggagaacctgagcatgttcctgatcaagagaagagacatgaccagaatgttcgtgcaccccagcttcagagagtggctgatctggagagaggagggcgagaagaccaagttcctgtgcgaccccagaagcggccacaccctgctggccttctggttcagcagacaggagggcaagctgaacagacagcagaccatcgagctgggccaccacatcctgaaggcccacatcttcaagggcctgagcaagaaggtgggcgtgagcagcagcatcctgcagggcctgtggatcagctacagcaccgagggcctgagcatggccctggccagcctgagaaacctgtacacccccaacatcaaggtgagcagactgctgatcctgggcggcgccaacatcaactacagaaccgaggtgctgaacaacgcccccatcctgtgcgtgcagagccacctgggctacaccgagatggtggccctgctgctggagttcggcgccaacgtggacgccagcagcgagagcggcctgacccccctgggctacgccgccgccgccggctacctgagcatcgtggtgctgctgtgcaagaagagagccaaggtggaccacctggacaagaacggccagtgcgccctggtgcacgccgccctgagaggccacctggaggtggtgaagttcctgatccagtgcgactggaccatggccggccagcagcagggcgtgttcaagaagagccacgccatccagcaggccctgatcgccgccgccagcatgggctacaccgagatcgtgagctacctgctggacctgcccgagaaggacgaggaggaggtggagagagcccagatcaacagcttcgacagcctgtggggcgagaccgccctgaccgccgccgccggcagaggcaagctggaggtgtgcagactgctgctggagcagggcgccgccgtggcccagcccaacagaagaggcgccgtgcccctgttcagcaccgtgagacagggccactggcagatcgtggacctgctgctgacccacggcgccgacgtgaacatggccgacaagcagggcagaacccccctgatgatggccgccagcgagggccacctgggcaccgtggacttcctgctggcccagggcgccagcatcgccctgatggacaaggagggcctgaccgccctgagctgggcctgcctgaagggccacctgagcgtggtgagaagcctggtggacaacggcgccgccaccgaccacgccgacaagaacggcagaacccccctggacctggccgccttctacggcgacgccgaggtggtgcagttcctggtggaccacggcgccatgatcgagcacgtggactacagcggcatgagacccctggacagagccgtgggctgcagaaacaccagcgtggtggtgaccctgctgaagaagggcgccaagatcggccccgccacctgggccatggccaccagcaagcccgacatcatgatcatcctgctgagcaagctgatggaggagggcgacatgttctacaagaagggcaaggtgaaggaggccgcccagagataccagtacgccctgaagaagttccccagagagggcttcggcgaggacctgaagaccttcagagagctgaaggtgagcctgctgctgaacctgagcagatgcagaagaaagatgaacgacttcggcatggccgaggagttcgccaccaaggccctggagctgaagcccaagagctacgaggcctactacgccagagccagagccaagagaagcagcagacagttcgccgccgccctggaggacctgaacgaggccatcaagctgtgccccaacaacagagagatccagagactgctgctgagagtggaggaggagtgcagacagatgcagcagccccagcagccccccccccccccccagccccagcagcagctgcccgaggaggccgagcccgagccccagcacgaggacatctacagcgtgcaggacatcttcgaggaggagtacctggagcaggacgtggagaacgtgagcatcggcctgcagaccgaggccagacccagccagggcctgcccgtgatccagagcccccccagcagccccccccacagagacagcgcctacatcagcagcagccccctgggcagccaccaggtgttcgacttcagaagcagcagcagcgtgggcagccccaccagacagacctaccagagcaccagccccgccctgagccccacccaccagaacagccactacagacccagccccccccacaccagccccgcccaccagggcggcagctacagattcagccccccccccgtgggcggccagggcaaggagtaccccagccccccccccagccccctgagaagaggcccccagtacagagccagcccccccgccgagagcatgagcgtgtacagaagccagagcggcagccccgtgagataccagcaggagaccagcgtgagccagctgcccggcagacccaagagccccctgagcaagatggcccagagaccctaccagatgccccagctgcccgtggccgtgccccagcagggcctgagactgcagcccgccaaggcccagatcgtgagaagcaaccagcccagccccgccgtgcacagcagcaccgtgatccccaccggcgcctacggccaggtggcccacagcatggccagcaagtaccagagcagccagggcgacatcggcgtgagccagagcagactggtgtaccagggcagcatcggcggcatcgtgggcgacggcagacccgtgcagcacgtgcaggccagcctgagcgccggcgccatctgccagcacggcggcctgaccaaggaggacctgccccagagacccagcagcgcctacagaggcggcgtgagatacagccagaccccccagatcggcagaagccagagcgccagctactaccccgtgtgccacagcaagctggacctggagagaagcagcagccagctgggcagccccgacgtgagccacctgatcagaagacccatcagcgtgaaccccaacgagatcaagccccacccccccacccccagacccctgctgcacagccagagcgtgggcctgagattcagccccagcagcaacagcatcagcagcaccagcaacctgacccccaccttcagacccagcagcagcatccagcagatggagatccccctgaagcccgcctacgagagaagctgcgacgagctgagccccgtgagccccacccagggcggctaccccagcgagcccaccagaagcagaaccacccccttcatgggcatcatcgacaagaccgccagaacccagcagtacccccacctgcaccagcagaacagaacctgggccgtgagcagcgtggacaccgtgctgagccccaccagccccggcaacctgccccagcccgagagcttcagcccccccagcagcatcagcaacatcgccttctacaacaagaccaacaacgcccagaacggccacctgctggaggacgactactacagcccccacggcatgctggccaacggcagcagaggcgacctgctggagagagtgagccaggccagcagctaccccgacgtgaaggtggccagaaccctgcccgtggcccaggcctaccaggacaacctgtacagacagctgagcagagacagcagacagggccagaccagccccatcaagcccaagagacccttcgtggagagcaacgtgtag

SEQ ID NO: 275016 - DNA, 5973 bp, Artificial Sequence
  derived and/or modified sequence
atgtttcgcaacagcttaaaaatgctgctaactggcgggaaatcatcacggaaaaatcgaagttctgacgggggatccgaagagcctccagacagaagacagtccagtgttgactcgcgccagagtcgatcaggccaagggggcatcagcacggagtctgattgcgcatttgagccagactatgcagtcccgcccctgcctgtgtctgagggagatgctgagcaggagctcgggccacctccttctgtggatgaggctgctaacacactcatgactaggctgggctttctgttaggcgagaaagtcacggaggtgcagccaggagaccagtacagcatggaagtacaggatgaaaatcaaacctctgccatcactcagcgtatctcaccctgcagtacgctcaccagctcaactgcaagccctcccgcctcatctccttgctccacattgccaccaatcagtaccaacgcaactgcaaaggattgctcttatggggccgtcacaagcccaacctccactttggaaagcagggacagtgggattatagccaccctaacatcgtatagcgagaacgttgagcgaactaaatatgccggcgaatcttctaaagaactgggcagtggagggaatattaagccttggcagagccaaaagtcaagtatggactcctgtctgtaccgggtggatgagaacatgacagctagcacatattcactgaacaaaatcccagagcgcaatctcgagaccgtgctgagccagtcagtccagagcataccattatacctgatgcccaggcccaatagcgtcgccgccaccagttccgcccatttagaggatctggcctaccttgatgaacagcgccacacacccctcagaacaagcctgagaatgccacggcaatccatgggtggcgctcggacccagcaggaccttcgcgtgcgtttcgccccctatagaccaccagatatctcactcaagcccctgctgttcgaggtaccctctattaccacagaatctgtattcgtgggacgcgactgggttttccacgagatagatgcacagttgcagtcctcaaacgcctctgtcaatcagggcgtcgtcatagttgggaatatcggcttcggcaaaacggctatcatctcacgcctcgtcgccttatcctgccacggcactcgcatgagacagatcgcttccgattcgccccacgctagccccaaacacgtcgacgctaacagagagttgcccctgactcagcccccttcagcccattcctcgataacatctgggagttgccctggtacgcctgagatgcgacggcgccaggaagaagcaatgcgacgactggcttcccaggtcgtggcttatcactactgtcaggccgacaacgcctacacctgcttagtgccggagtttgtccacaacgtcgccgcactgttatgtagatccccccagctgactgcatatcgcgaacagcttctgagagagcctcacctgcaaagtatgctgtcgctgcgatcttgcgtccaggaccccatggcaagctttaggcgaggagtgctagagccactcgaaaatttacataaggagcggaaaatccctgacgaagatttcatcatcctcattgacgggctaaacgaagcagaattccacaaacccgattatggagataccattgtttcatttttgtccaagatgatcgggaaattcccaagctggctcaaactgatcgtgactgtccgcacttcattacaggaaatcacaaaactgttgcctttccacagaatttttctagaccgcctcgaggaaaacgaggccattgaccaggatctgcaagcctacattctgcaccggatccattctagtagcgagattcaaaacaatatttctctgaatggaaagatggacaatactacctttggcaagctttccagccacctgaagaccctgtctcaggggtcttacctctacctgaagctgacatttgatttgatcgagaagggctatttggtgctcaagtcctcaagctacaaggtcgtgcctgttagtttgagtgaggtctatctgctgcagtgtaacatgaagtttccaacacaatcatctttcgaccgcgtcatgcccctcctaaatgtggcagtcgccagcctacatccacttaccgacgaacatattttccaggccatcaacgccggcagtatagagggtacccttgagtgggaagattttcaacagcgcatggagaatctgagcatgttcctcataaagcgaagagatatgacacgcatgttcgttcacccctcctttcgcgagtggctcatttggcgagaggaaggagagaaaactaagtttctatgcgatcctcgttctgggcataccctgctggctttttggttttcaaggcaggagggaaaactgaaccggcagcaaaccatagagctggggcaccacatactgaaggctcatatctttaagggtctgagtaagaaagtcggggtgtcaagttctatactgcaggggctttggatttcctatagcaccgaagggcttagcatggccctggctagcttaaggaatctgtatacacctaatattaaggtgtcccggttgctgattttagggggcgccaacatcaactaccggactgaggtcctgaacaacgcaccgatcctttgcgtgcagagccatttggggtacacagaaatggtggctctcctgttggagtttggtgcaaacgtcgatgcatcaagcgagtcggggctgactcccttgggctacgctgccgctgccggctatctatccatagtggtgctcctttgcaagaaacgggctaaggtggatcacctagataagaacggtcagtgtgcacttgttcacgcagctctgcgtggacatctggaagttgtcaaatttttaattcagtgtgactggacaatggccgggcagcagcagggcgtgttcaagaagtcccatgccattcaacaggccctgatcgcagctgcctccatgggctatacggaaattgtatcctatctacttgatcttccagaaaaggatgaagaagaggttgaaagggctcagataaattcttttgactcactctggggcgagacagccctgaccgcagctgcagggagggggaagctcgaggtgtgcagattgttacttgagcaaggagcagcagttgcgcagcccaaccgtagaggagcggtgccccttttttccaccgtgcgccagggacattggcaaatcgtggatcttttactgacgcacggggctgatgtcaacatggccgacaagcagggacggacacctctgatgatggctgcgtctgaaggccatctgggcaccgtggattttttactggcacagggcgccagcatagccctcatggacaaagaaggtcttaccgcgctgagctgggcctgtctgaaaggccacctgtccgtcgtccgttctctggtcgacaacggggctgctactgaccacgccgataaaaacggtcgcacccccttagatttagcggccttctacggagatgccgaagtggtgcagttcctggttgatcatggggccatgatcgagcatgttgactactcaggcatgaggccattggatagagctgtgggttgccggaatacttctgtggtcgtgaccctgttaaagaagggggctaaaatcggcccagctacatgggcaatggcaacatccaagcctgacatcatgatcattcttctgagtaagctgatggaagagggtgatatgttttataagaagggcaaagttaaggaggccgctcaacgctatcagtacgcactgaagaaattccccagagagggctttggggaagatctgaaaacctttcgtgaattaaaggtcagtctgctgctaaatttatccagatgtcgtcggaagatgaacgactttggcatggcggaagaatttgctaccaaagctttggagctgaaacctaaaagttatgaagcctactatgctcgggctagagcgaagcgatcttctcgacagtttgctgccgccctggaggatcttaatgaggccataaaactttgccccaataatcgtgagatacaacgactactgctgagggtggaggaggagtgtaggcagatgcagcaaccacagcaaccgcctcctccccctcaacctcagcagcagctccccgaggaggcagagccagaaccccagcacgaggatatatacagcgtccaggacatctttgaggaggagtacctcgagcaggacgttgagaacgtgagcattggtttgcaaaccgaagcccgcccatctcagggactgccagtcatccagtcaccaccatctagtccaccccatagagacagcgcttacatttcctcgtccccattgggctcccaccaggtgtttgattttcgcagctcttcaagcgttggctctccaactcggcagacctaccagagtacttccccagcactgagtcccacacaccagaactctcactatcgaccatcacctccacatacttcacctgcccaccagggcggttcgtacagattctcgcccccccccgtggggggccagggtaaagaataccccagccctcctccttctccactgcgaaggggcccacagtaccgggcttctcccccagctgagtccatgtccgtgtaccgaagtcaaagcggctcccctgtgcggtatcagcaagagacttccgtgagtcaacttcccggtaggcctaagtctcccctgtcaaaaatggcacagcgcccataccagatgccccagttgcccgtggccgtgccccaacaaggactgcgccttcagcccgcaaaagctcagatcgttcggtctaatcagccaagtcccgcggtgcactcaagtacggtgatacccacaggtgcttatggccaagtcgctcattctatggcctccaagtaccagtcatctcaaggggacatcggggtgagtcaatctagactggtctaccagggcagcattggtggtatagtgggagatggcagaccagtgcagcacgttcaggccagcctatctgcaggcgcaatttgccagcacgggggtctaacgaaggaggaccttccccagcgtccctccagtgcttaccggggaggagtgcggtacagtcagaccccacagattggccgtagtcagagcgcctcatactatcctgtctgccattcgaagctcgatttagagcgctcctccagccagctggggtcccccgatgttagccatctgattcggcgccctatctctgttaatcccaatgaaataaagcctcatccaccgaccccacgaccactgctgcatagccagtccgtgggcttaaggttctctccatcgtcgaacagtatttctagcacatccaacctcacacccacttttagaccatccagttccattcagcagatggagatccccctcaaacctgcttacgaaagaagctgtgacgagttaagcccagtctcgccgacacaggggggctaccccagtgaacctacacgatcaaggaccacccccttcatgggaatcattgataagacagccaggacacagcagtacccccatttgcaccaacaaaacagaacgtgggcagtgagctctgtcgacaccgtgttgagtccaacatcccctggaaacttgccccagcccgaatcattctcccccccctcctctataagtaatatagccttctacaataaaactaacaatgcgcagaacggccatttactcgaggacgattattattccccccatggtatgctggccaatggatcaagaggtgacctgctggagcgagtgagtcaagccagttcctacccagacgtcaaggtggccaggacccttccagtggctcaagcctatcaggataatctttaccgacagttgagcagggattcccgccagggacaaacctcccctattaaacctaaaaggcccttcgtggaaagtaatgtctag

SEQ ID NO: 275017 - DNA, 5973 bp, Artificial Sequence
  derived and/or modified sequence
atgttcaggaacagcctgaagatgctgctgactggaggcaagagcagcaggaagaacagaagcagtgatggcggcagcgaggagcccccagaccggcggcagagctctgtggacagccggcagagccgcagcggccagggcggcatcagcacagaaagtgactgtgcctttgagccagactatgctgtgccccccctgcctgtgtctgaaggagatgctgagcaggagctgggccccccacccagcgtggatgaggccgccaacaccctgatgacccggctgggcttcctgctgggggagaaggtgacagaggtgcagcccggggaccagtacagcatggaggtgcaggatgagaaccagaccagcgccatcacccagaggatcagcccctgcagcaccctgaccagcagcacagccagccccccagccagcagcccctgcagcaccctgccccccatcagcaccaatgccacagccaaggactgcagctatggagctgtgaccagccccaccagcaccctggagagccgggacagcggcatcatcgccaccctgaccagctacagtgaaaatgtggagaggaccaagtatgctggggagagcagcaaggagctgggcagcggcggcaacatcaagccctggcagagccagaagagctccatggacagctgcctgtacagagtggatgagaacatgacagccagcacctacagcctgaacaagatccctgagaggaacctggagaccgtgctgagccagagcgtgcagagcatccccctgtacctgatgccccggcccaacagcgtggccgccaccagcagcgcccacctggaggacctggcctacctggatgagcagaggcacacccccctgcggaccagcctgaggatgccccggcagagcatgggcggggcccggacccagcaggacctgcgggtgcgctttgccccctaccggcccccagacatcagcctgaagcccctgctgtttgaggtgcccagcatcaccacagaatctgtgtttgtgggccgggactgggtgttccatgaaattgatgcccagctgcagagcagcaatgcctctgtgaaccagggcgtggtgattgtgggcaacatcggctttgggaagacagccatcatcagccggctggtggccctgagctgccacggcaccaggatgaggcagatcgccagtgacagcccccacgccagccccaagcacgtggatgccaaccgggagctgcccctgacccagcccccatctgcccacagcagcatcaccagcggcagctgccccggcaccccagagatgagaagacggcaggaggaggccatgaggcggctggccagccaggtggtggcctaccactactgccaggccgacaatgcctacacctgcctggtgcctgagtttgtgcacaacgtggccgccctgctgtgccgcagcccccagctgacagcctaccgggagcagctgctgcgggagccccacctgcagagcatgctgagcctgcggagctgtgtgcaggaccccatggccagcttccggcggggcgtgctggagcccctggagaacctgcacaaggagaggaagatcccagatgaggacttcatcatcctgattgatggcctgaatgaagctgagttccacaagccagactatggagacaccatcgtgtccttcctgagcaagatgattggcaagttccccagctggctgaagctgattgtgacagtgaggaccagcctgcaggagatcaccaagctgctgcccttccaccgcatcttcctggaccggctggaggagaatgaggccatcgaccaggacctgcaggcctacatcctgcaccgcatccacagcagcagcgagatccagaacaacatcagcctgaatggcaagatggacaacaccaccttcggcaagctgagcagccacctgaagaccctgagccagggcagctacctgtacctgaagctgacctttgacctgattgagaagggctacctggtgctgaagagcagcagctacaaggtggtgcctgtgtccctgtctgaggtgtacctgctgcagtgcaacatgaagttccccacccagagcagctttgacagagtgatgcccctgctgaatgtggccgtggccagcctgcaccccctgacagatgagcacatcttccaggccatcaatgccggcagcattgagggcaccctggagtgggaggacttccagcagaggatggagaacctgtccatgttcctgatcaagagaagagacatgaccaggatgtttgtgcaccccagcttccgggagtggctgatctggagggaggagggggagaagaccaagttcctgtgtgaccccaggagcggccacaccctgctggccttctggttcagccggcaggagggcaagctgaaccggcagcagaccatcgagctgggccaccacatcctgaaggcccacatcttcaagggcctgagcaagaaggtgggcgtgagcagcagcatcctgcagggcctgtggatctcctacagcacagagggcctgtccatggccctggccagcctgaggaacctgtacacccccaacatcaaggtgtcccggctgctgatcctgggcggggccaacatcaactacagaacagaggtgctgaacaatgcccccatcctgtgtgtgcagagccacctgggctacacagagatggtggccctgctgctggagtttggagccaacgtggatgccagcagcgagagcggcctgacccccctgggctatgctgctgctgctggctacctgagcatcgtggtgctgctgtgcaagaagagggccaaggtggaccacctggacaagaatggccagtgtgccctggtgcacgccgccctgcggggccacctggaggtggtgaagttcctgatccagtgtgactggaccatggccggccagcagcagggcgtcttcaagaagagccacgccatccagcaggccctgattgctgctgcctccatgggctacacagagatcgtgtcctacctgctggacctgcctgagaaggatgaggaggaggtggagcgggcccagatcaacagctttgacagcctgtggggcgagacagccctgacagctgctgctggccggggcaagctggaggtgtgccgcctgctgctggagcagggcgctgctgtggcccagcccaacagaagaggagctgtgcccctcttcagcacagtgcggcagggccactggcagatcgtggacctgctgctgacccatggagcagatgtgaacatggctgacaagcagggccgcacccccctgatgatggccgccagcgagggccacctgggcaccgtggacttcctgctggcccagggcgccagcatcgccctgatggacaaggagggcctgacagccctgtcctgggcctgcctgaagggccacctgtctgtggtgcgcagcctggtggacaatggagctgccacagaccacgccgacaagaatggaagaacacccctggacctggccgccttctatggagatgctgaggtggtgcagttcctggtggaccacggggccatgattgagcacgtggactacagcggcatgaggcccctggacagagctgtgggctgcaggaacacctctgtggtggtgaccctgctgaagaagggggccaagattggccctgccacctgggccatggccaccagcaagccagacatcatgatcatcctgctgagcaagctgatggaggagggggacatgttctacaagaagggcaaggtgaaggaggccgcccagcgctaccagtatgccctgaagaagttcccccgggagggctttggagaggacctgaagaccttccgggagctgaaggtgtccctgctgctgaacctgagccgctgcaggaggaagatgaatgactttggcatggccgaggagtttgccaccaaggccctggagctgaagcccaagagctatgaggcctactatgcccgggcccgggccaagaggagcagccggcagtttgctgctgccctggaggacctgaatgaggccatcaagctgtgccccaacaaccgggagatccagaggctgctgctgcgggtggaggaggagtgccggcagatgcagcagccccagcagcccccacctccaccccagccccagcagcagctgcctgaggaggccgagcctgagccccagcacgaggacatctacagcgtgcaggacatctttgaggaggagtacctggagcaggatgtggagaatgtgtccatcggcctgcagacagaggcccggcccagccagggcctgcccgtcatccagagcccccccagcagccccccccaccgggacagcgcctacatcagcagcagccccctgggcagccaccaggtgtttgacttccgcagcagcagctctgtgggcagccccacccggcagacctaccagagcaccagccctgccctgagccccacccaccagaacagccactaccggcccagccccccccacaccagccctgcccaccagggcggcagctaccgcttcagccccccacctgtgggcggccagggcaaggagtaccccagccccccacccagccccctgcggcggggcccccagtaccgggccagccccccagctgagagcatgtctgtgtaccgcagccagagcggcagccctgtgcgctaccagcaggagacctctgtgtcccagctgcccggccggcccaagagccccctgagcaagatggcccagaggccctaccagatgccccagctgcctgtggccgtgccccagcagggcctgcggctgcagcctgccaaggcccagatcgtgcgcagcaaccagcccagccctgctgtgcacagcagcaccgtcatccccaccggggcctacggccaggtggcccacagcatggccagcaagtaccagagcagccagggcgacattggagtgtcccagagccggctggtgtaccagggcagcatcggcggcatcgtgggagatggccggcctgtgcagcacgtgcaggccagcctgtctgctggggccatctgccagcacggcggcctgaccaaggaggacctgccccagaggcccagcagcgcctacagaggaggagtgcgctacagccagaccccccagatcggccgcagccagagcgccagctactaccctgtgtgccacagcaagctggacctggagaggagcagcagccagctgggcagcccagatgtgagccacctgatccggcggcccatctctgtgaaccccaatgagatcaagccccacccccccaccccccggcccctgctgcacagccagagcgtgggcctgcgcttcagccccagcagcaacagcatcagcagcaccagcaacctgacccccaccttccggcccagcagcagcatccagcagatggagatccccctgaagccagcctatgaaagaagctgtgatgagctgagccctgtgagccccacccagggcggctaccccagcgagcccaccaggagcaggaccacccccttcatgggcatcatcgacaagacagcccggacccagcagtacccccacctgcaccagcagaacagaacctgggccgtgtcctctgtggacacagtgctgagccccaccagccctggcaacctgccccagcctgagagcttcagcccccccagcagcatcagcaacatcgccttctacaacaagaccaacaatgcccagaatggccacctgctggaggatgactactacagcccccacggcatgctggccaacggcagcagaggagacctgctggagcgggtgtcccaggccagcagctacccagatgtgaaggtggcccggaccctgcctgtggcccaggcctaccaggacaacctgtaccggcagctgagccgggacagccggcagggccagaccagccccatcaagcccaagaggccctttgtggagagcaatgtgtag

SEQ ID NO: 275018 - DNA, 5973 bp, Artificial Sequence
  derived and/or modified sequence
atgttccggaacagcctgaagatgctgctgaccggcggcaagagcagccgaaagaatcggagttccgatgggggaagtgaggaaccccctgatcgtcggcagtcttcagtagactccaggcagagccgaagcggtcagggcggaatctccacagagtccgactgtgctttcgagcccgactacgcagtgccaccccttccagtatctgagggggatgccgaacaagagctggggccccctccatccgtggacgaagcggctaacacactcatgactcggctgggcttcttgttgggggaaaaggtgacagaagtccagccaggcgaccaatactccatggaagttcaggacgaaaaccagacctcagcaattactcagaggatttcaccttgttccacgctgacatcttccacagccagcccccctgctagctcaccttgttccactctgcctcccatctccaccaatgcgacagcaaaggactgctcttacggagctgtgacgtccccaacatccaccctggagtctcgggattccggcattatcgccacgctgacgtcatacagtgagaacgttgagagaactaagtacgcaggagagtcttctaaggagttgggcagcggtggcaatatcaagccatggcagtcgcagaagtcctctatggattcgtgcctttaccgggtggatgagaacatgactgcaagcacttattcgctgaacaaaataccagagcgaaacttagagacggttctgtcccagtctgtacagtccatacccctttatttaatgcccagacctaacagcgtcgcggccacatccagtgctcatctggaagacctggcctacttagatgagcagcgccacacgcccctgcggacgtctctgaggatgccgcgccagtctatgggcggggctcgaacgcagcaggacctcagggtccgattcgctccctaccgaccccccgatatctcacttaagcctctcctgttcgaagtgccttcgataactaccgagagcgtgttcgtgggcagagactgggtttttcacgaaatcgacgcccagctccagtcatccaacgccagcgtgaaccagggagtcgtgattgtgggaaacatcggttttggtaaaacagctataatatcaaggttggtggctctgtcttgtcacggcacccggatgagacagatcgcttctgattcaccacacgcatcaccaaaacacgttgatgccaatcgggagctgccacttacccagccgccatccgcccactctagcatcacatcaggtagttgtcccggtaccccggagatgaggcgacgtcaggaggaagccatgcgacgattggcgtctcaagtggttgcctatcactactgtcaggcagataatgcttacacctgcctcgtacctgaattcgtacacaatgtagcggccctcctatgtaggtccccccagctcactgcctatcgggagcaactgctcagggagccccatttgcaatctatgctgagcctgaggagttgtgttcaggaccctatggcgtcatttaggaggggggtgcttgagcccctcgaaaacctgcacaaggagagaaagatccccgatgaggattttattatcctcattgatggtttgaacgaggccgagttccacaagccagactacggagatacaattgttagctttctgtccaaaatgattggcaagtttcctagctggttgaagctgattgtgaccgtcaggacttctttgcaggagattactaaactgctgccatttcaccgcatcttcctggaccggctcgaggaaaatgaagcaatcgatcaggacttgcaggcctacattctccatcggatccactctagctcagagatccaaaacaacatctcgcttaatggcaagatggacaacaccacatttggcaaattgtccagccatctgaagactctgagccaaggcagttatctctacttgaagctgacattcgaccttatcgaaaagggctatctggtcctgaaatcatccagctacaaagtcgttcctgtgagtctctctgaggtgtaccttctgcagtgcaatatgaagttccctacacaaagttcattcgaccgcgtcatgccccttctgaacgtcgcagtcgcttctcttcatcctcttactgatgaacatatcttccaggccattaatgcgggctcgattgaaggaacgctagagtgggaagactttcaacagagaatggagaacctctctatgttcctaatcaagcgccgggacatgactaggatgtttgtccacccatccttccgtgagtggctcatatggcgagaggaaggcgaaaagaccaaattcctttgcgacccccggagcgggcataccctcctagccttttggttcagccgccaggagggaaaactgaatcgccagcagaccatcgaactaggccaccatatcctcaaagcccatatattcaagggcctaagcaaaaaggtcggggtttcaagcagtattcttcagggactctggatttcatatagcacagaaggactatctatggcactggcgagcttgcgtaatctgtacacccctaatataaaagtctctagactgctgatcttgggcggcgctaatataaattaccgaactgaggtgctgaacaatgccccaattctgtgtgtccaaagtcaccttggttacacagagatggtggctctgctgctcgagttcggtgctaatgtagatgcttcttctgagagtggtctgactcctcttggatacgctgccgccgccggctatctgtctatcgtggttttactgtgcaaaaagcgggctaaggtggatcatctagataagaatggccagtgtgccctagtgcacgctgctctgagaggtcaccttgaggttgtcaagttcctgatccagtgtgattggacaatggcggggcagcaacagggcgtcttcaaaaaatcccatgcaatccaacaggctcttatagccgccgcctctatgggctatacagagatcgtctcttatctgctggaccttccagagaaggacgaggaggaagtggaaagagctcagataaactctttcgactcactgtggggggaaaccgccctgaccgctgccgcgggtaggggcaaacttgaggtttgccggctgcttcttgagcagggcgcagccgttgctcagccaaaccgcaggggggcagtgcccctgttctcaaccgtccggcaggggcattggcagattgtagatctgcttctgacccacggagcggacgtcaatatggctgataagcaggggaggacccctctgatgatggctgcttccgaaggccatctcggcacagtcgacttcctcctggcgcaaggtgcctccattgcgcttatggacaaggaaggactgacagcgctatcttgggcatgccttaaaggccacctgagtgtcgtacgatctttagtcgataacggcgctgctactgaccatgctgacaagaacggccggactcctctggatctggctgctttttatggtgacgcagaggtggtccagttcttagtggaccatggtgctatgattgaacatgtggattatagcggcatgcgccccctggaccgggctgttgggtgtcggaacacaagcgtggtcgttaccttgctgaaaaagggtgctaagataggacctgccacttgggcaatggccacgtctaagcccgatattatgatcattctgctgtccaaacttatggaggaaggagacatgttttacaagaaggggaaagtcaaagaggccgctcaaagataccagtacgctctcaagaagtttcctcgcgaagggttcggagaggatcttaagacatttagggagctgaaggtgtccctgctgctgaacttatcgcgctgcagaaggaaaatgaacgatttcgggatggcagaagaattcgcaaccaaggctctggagttaaaacccaaaagctacgaggcctactatgctcgagccagggccaaaaggagttcccgtcagttcgccgcagctctggaagatctgaacgaggctatcaagctctgccctaacaatcgggagatccagcggctgctgctgcgagttgaagaagagtgccgtcagatgcagcagcctcagcaacctcccccgcccccacagcctcagcagcagctgcctgaagaagcggagcccgagccccaacatgaagatatatatagtgtgcaagacatttttgaggaagaatacctagagcaggatgtggagaatgttagcataggccttcagacggaggctaggccgtcgcagggactccctgttatccagagccccccttctagcccaccccaccgggatagtgcatatatatcatctagcccgctgggaagtcaccaggtgtttgactttcggagctcctccagcgttggatcccctaccaggcagacctaccaatccacttcacccgcacttagccccacccatcagaattcacattatagaccctcccctccccacacctcacctgctcatcaagggggctcctatcggtttagcccccccccagtcgggggccagggaaaggaatacccgtctccaccacccagccccctccgtaggggacctcaatatcgagcatccccacctgcagaaagcatgagtgtgtatcgaagccagagtgggtcacctgttcggtatcagcaggagacctctgtttctcagctgcccgggcgtcctaagagccccctgtctaaaatggcgcagagaccgtatcaaatgcctcagctaccggtggccgtcccacaacagggactgaggcttcagcccgccaaggcccagatcgtgagatccaaccagccttccccagctgtccattcttcaactgtgatccccaccggcgcttatgggcaggtggcgcatagtatggcatccaagtaccaatcaagccagggagacatcggggtttctcagtctcgcctcgtttaccagggtagcattggcgggattgtgggtgatggcagaccagtccaacatgtccaagctagtctgagtgccggcgcgatttgtcagcatggcggtctgaccaaagaggacctgccccagcgcccttcctccgcttataggggcggggtacgctactcacagacacctcagataggtaggtcccagagtgcttcctattatccagtgtgccatagcaagctggacctcgaaagatcaagcagtcaattaggcagcccagacgtgagtcatctgattagacggccaatctcagtaaacccaaatgaaatcaagccacacccgcccacgcctcgacctctccttcacagtcaatccgttggactccggttctccccaagcagcaatagcattagttccacgagcaatctgacaccgacattccggccctcctcttctatacagcagatggagataccactaaaaccggcctacgaacgctcctgtgatgagctatctccggtgtcccctacccagggtgggtacccttccgaacctacccggagtcgcacaacccccttcatgggcatcatagacaagacagccaggacacagcaatatcctcatttgcaccaacagaatagaacatgggccgtgtcaagcgtcgacaccgtattgagccctacttctcccggtaacctgcctcagcccgagtctttttcacctccttcctcaataagcaatatcgccttctacaacaaaactaataatgctcagaacgggcatctattggaggacgattattactccccccacgggatgctagcgaatggatcacgcggcgacctgttagagcgggtgagtcaagctagttcttaccccgatgtgaaggtggccagaacgctgccagtcgcccaagcctatcaggacaacctgtacagacagcttagccgtgacagccgtcaaggccagacctcccctattaagcctaaacgcccattcgtggaatccaacgtgtag

SEQ ID NO: 275019 - DNA, 5972 bp, Artificial Sequence
  derived and/or modified sequence
atgtttcgcaactcactcaaaatgctcctcactggaggcaagagcagcagaaaaaaccgttcttctgacggcggatcagaagaacctccggacaggcgccaaagcagtgtggactcgcggcagagtaggtcaggccaaggcggaatttccaccgagagcgactgtgcatttgaaccagactacgccgtgccgccactgcccgttagcgagggcgacgcggaacaagagctcgggcctccaccctcagtggatgaagctgctaatacgctgatgacaaggttggggtttctgctgggcgagaaggtgaccgaggtccagccaggtgatcagtattcaatggaagtgcaggatgagaatcagactagtgccataactcagcgaatatcaccttgctcaacactgacttcctcaacggcatcccccccagcctccagcccatgctccaccctccccccaatctccactaatgcaactgccaaagactgctcctatggagccgtgacgagccccacctctacattggaatcaagggatagcggaatcatcgccacgctgactagttactcagaaaacgtcgaacggaccaaatacgcaggggagagctcaaaagagcttggatccggaggcaacattaaaccttggcagtcacagaaatcaagtatggatagctgtctatatcgggtcgacgaaaatatgactgcctccacgtattctctgaataagatacccgagcggaacctcgagactgttttgagccaaagtgtgcagtctattcccttgtacctaatgccgcgtcccaatagtgttgccgcaacctctagtgcacatctggaagacctggcatatctggatgagcagaggcacacgccactccggacgtctctccgaatgcctcgacagtccatggggggagctcgcacacaacaggatctccgcgtgcggtttgccccatatagacctccggacatatccctcaagcctttgctgttcgaagtaccctcaatcacaaccgagagtgtgttcgtgggaagagactgggtgtttcacgaaatcgatgcacaactgcagtcttccaacgcttctgtcaaccagggagtggttatcgttgggaatatagggtttggcaaaactgccatcatctcgcgcttggtggcactttcttgccatggaactcgcatgcgacaaatcgccagtgattccccgcatgcgtcgcccaagcacgtggatgcaaatagggagttgcccttgacccaacctccgtcagcgcactctagcatcacgagcgggtcttgcccaggcacgcctgagatgcgcaggaggcaggaagaggccatgcgaaggctcgcttcccaggtggtggcctatcattattgccaggctgacaacgcttacacctgcttagttccagagttcgttcataacgtagcggctctgctgtgcagatcaccccaactgaccgcctaccgagaacagttgctgagggaaccccacctacaatcgatgctgtcacttcgcagttgtgtgcaggacccaatggcgtcattccgcagaggagttctggagcccctcgagaacctccacaaggagagaaagatccctgacgaggactttattatactgatcgacggactcaacgaggctgaattccataagccagactatggggacacaatcgtttccttcttgtcaaagatgatcgggaagttcccttcctggctgaagctgatagtcacggtccggacaagcctgcaggagatcacaaaactgttgccttttcatcggatctttctcgatcggcttgaagaaaatgaggctatcgatcaggacctgcaagcctacatcctgcatagaattcattcatctagtgaaattcagaacaacatatctcttaatggcaaaatggataacactacgtttgggaaactgtccagccacctgaagacccttagtcagggtagctatctttatttgaaacttacattcgacctgatagagaaaggttatctggtgctcaagtcttcttcttataaggtggtccctgtaagcctctccgaagtctacttactccagtgtaatatgaagttcccgacacagtctagctttgaccgtgttatgcccctgctgaacgtggccgtggccagccttcaccctctaactgatgaacatatttttcaggccataaacgccggatctatcgaaggtactctggagtgggaggacttccaacaacgcatggaaaacttatcaatgtttctcataaagaggcgggatatgaccaggatgtttgtccatcccagctttagagagtggctaatatggcgtgaagaaggtgagaagaccaaatttctgtgtgaccctagaagcggtcatactttgttggctttctggttctctcgccaggagggcaaacttaaccgtcaacagactatagagctcgggcaccacattctcaaggcccatatctttaaaggtctgagcaagaaggtcggagtgtcttctagcatacttcagggactctggatcagttacagcacagaggggctctctatggcccttgccagcctgcggaatttgtacactcccaatatcaaagtttcccgattgttaattctcggaggcgctaatataaattataggactgaagtgcttaataatgcccctatactgtgtgtgcagtctcatttgggttacactgaaatggtggccctgctgctcgagttcggcgcaaatgtcgacgcgtcatctgagagtgggttaaccccgttgggctacgctgcagctgctggctatttatccattgtagttttgctgtgtaaaaaacgtgcaaaggtggaccatctggataagaatggccagtgcgcactggtgcacgcagccttaaggggtcacttagaggtcgttaaattcctcattcagtgtgattggaccatggcgggtcagcagcaaggcgttttcaaaaaatctcatgcgattcaacaagcgctcatagccgctgcctcaatgggatatactgagatagtcagctacctgcttgacctgcctgaaaaggacgaggaggaggtggaaagggcccagattaacagtttcgactccctctggggagaaacagccctgaccgctgctgctggcagaggaaaacttgaggtatgtaggcttctcttagaacagggggcagccgtggcacagcccaatagacggggagctgtaccacttttctcaacagtgcgtcaggggcattggcagatcgtcgatctgctcctgacccatggcgctgacgtgaatatggccgataagcagggacggacacctcttatgatggccgcttctgaggggcacctgggaacggttgacttcttattggctcaaggcgcttctattgccctgatggacaaagagggactcacggcgctcagctgggcctgcctgaaaggacacctgagcgtagtgcgctcattggttgataatggagccgcaacagatcacgcagacaaaaatggcaggactccactagatctggctgccttttacggggatgccgaggtggtccagtttctcgtggaccatggcgctatgatcgagcacgtggactactcagggatgcgacctctggatcgcgcagttggatgccgcaatacatctgtcgtagtgacactgctgaaaaagggtgctaagatcggcccagctacgtgggctatggcaactagcaagccggacatcatgatcattcttctctcaaaactcatggaggaaggggacatgttttataaaaagggaaaagtgaaggaggccgcacagcgttaccaatacgccctgaagaaatttccacgagaggggttcggcgaggatctcaagaccttccgggaactgaaagtgagtctgctcctcaatctatcacggtgtagacggaaaatgaatgattttggtatggccgaggaatttgcgaccaaagcacttgagctgaagccgaagagttacgaggcatattatgctagagctagggcgaagcggagttctcggcagttcgccgctgccctggaggatctaaatgaagccataaagctatgtcctaataaccgggagatacagcgcctgcttctgcgagtggaagaagaatgccggcagatgcagcagccccagcagccccctccaccccctcagccccagcagcaacttccagaagaagccgagccagagccccagcacgaagatatctactccgttcaagacatcttcgaagaggagtacctggaacaggacgtcgagaacgtgagcataggcttgcagacagaggctcgaccatcccaaggattacccgttattcagtccccgccatcaagtcccccacatcgggactctgcctacatcagttctagtccgctgggctcccaccaggtatttgatttccgctcttcttcgtcagtcggaagtcctactaggcaaacataccagagcacttccccagctctgtcgcccacacatcaaaatagtcactatcgaccctcccccccacatactagtcccgcacaccaaggcggatcctacaggtttagtccaccgccagtggggggacaaggtaaggagtatccttccccaccaccgagccccttacgaaggggacctcagtaccgagcatccccacccgctgagtcaatgagtgtatatagatcgcaatctggtagccctgtgagatatcagcaggagacctcggtgtcacagctgccaggccgtcccaaaagtcctctgtccaagatggcgcaaagaccctaccagatgcctcagcttcctgtggccgtgccacagcagggtctgcgcctgcagcctgcaaaagcacagatagtgcggagtaaccagccttcccccgctgtgcatagtagtaccgtgattccaaccggagcttatgggcaggtggcccacagtatggcatccaaataccagtcatctcaaggcgatataggtgtgagccagagcagactggtgtatcaaggatccatcgggggaatcgttggagatgggagaccggtgcagcatgtgcaggcgtctttatctgcaggggctatctgtcaacacgggggtctgaccaaagaggatctgccgcagcgtccttccagcgcttaccgcggaggggtaagatattcgcagacaccacagatcggcaggtcacagagtgcaagctattatcctgtgtgccactcaaaactcgatctggagcggtctagttcccagttaggcagcccagatgtgagtcatcttattagaagacccatctcagtcaacccgaacgaaataaagcctcatccccctacaccccgaccgcttctccactcacagagcgtcgggcttcgattttctccgtcctccaactccatatcttccacgagcaacctcacccccacatttcgtccttcctccagtattcaacagatggaaatacctctgaaaccagcttatgaacgttcctgtgacgagctatcccctgtatcccccacccagggaggatacccatctgaacctacaaggagccggaccaccccgttcatgggcatcatcgacaagacagcacgtacgcagcaatatccacatttgcaccagcagaaccgaacttgggctgtttctagcgtggacacggtgctttctcccaccagccccggtaatctccctcaaccggagagtttctccccaccgtcctctatctctaacatagcgttttataataaaacaaacaacgcccagaacgggcatctgctggaggatgattattatagtcctcacggcatgctggccaacggctcacggggagacttgctagagagagttagtcaagctagtagctatcctgatgtcaaggtcgccagaacactgcctgttgcccaggcttatcaggataacctctacaggcagttgagcagagattctcgccaaggtcagaccagccccatcaagcctaaacgccctttcgtagaatctaatgttta

SEQ ID NO: 275020 - DNA, 11747 bp, Artificial Sequence
  derived and/or modified sequence
ttttgcagtagaagagtataaccatgtttcggaatagtctcaagatgctgcttactggtgggaaatcaagtcgtaaaaacaggtcaagtgatggagggagcgaggaaccaccggatcgaagacagtcaagtgtagactctcgccaaagccgctctgggcaaggtggcatctccacagaaagcgactgtgcttttgagccagactacgctgtcccgccacttccagtgagtgaaggtgatgctgaacaggagcttggcccccctccatctgtagatgaggcagcaaacacactcatgactcgtctgggtttcctccttggagagaaagtcacagaagttcagccaggtgaccaatacagcatggaagtacaggatgaaaatcagacctcagcaatcacccagcggataagtccttgttccactctgactagcagcactgcctctccaccagccagtagcccctgctctacactcccacccatcagtacaaatgcaactgccaaggactgcagctatggggctgttactagtccaacctctacccttgaaagcagagatagtggcatcattgctacattaacaagctattctgaaaatgtggaacgcacaaaatatgctggggaaagcagtaaagaattaggatctggaggaaacataaaaccttggcagtctcaaaaatccagcatggactcctgtttgtatcgagtagatgaaaacatgactgcttccacctatagtctgaataagatcccagagagaaatttggaaacagtgttatctcaatcagtacagtctattcctttgtatctcatgccacggccaaattcagtagcagccaccagctctgcccacttggaagaccttgcttacctggatgagcagagacatacacctttgagaacttctctacgaatgccaagacagagcatgggtggtgctcgcacacagcaggatttaagagttcgctttgcaccttataggcctccagatatctccttgaagcctctgctctttgaagtgcccagcatcactacagagtcagtgtttgttggccgagattgggttttccacgaaatagatgctcaacttcaaagttcaaatgccagcgtgaaccaaggagtagtgattgtgggaaacattggattcggcaaaactgccatcatctccagactggtggccctcagctgccatggtacaaggatgagacagatcgcctcagacagcccacatgcctcccccaaacatgtggatgccaacagagagctgccactcacacagccaccttcagcccactcatctatcaccagtggaagctgcccaggaactccggaaatgcgcaggcggcaggaggaggctatgcgaagactagcctcgcaggtggttgcctatcactattgtcaagcagataatgcctacacttgcttggtgccagaatttgtccacaatgttgctgccttgctctgccgctcacctcagctgacagcctatcgggagcagcttcttcgggaacctcacctgcagagcatgctgagccttcgttcctgtgttcaagaccccatggcctccttccggaggggagttctggagccactagaaaatctccataaagagagaaaaatcccagatgaagatttcatcattttaattgatggattaaatgaagcagaatttcacaaaccggattatggggatacaattgtatcgtttctgagtaaaatgatcggaaagtttccttcttggctcaaactaattgtaacagttaggaccagtttacaggaaattaccaagctgctgcctttccataggatttttttggatcgactagaagagaatgaagccatagaccaggacctgcaggcttacatcctgcaccggatacacagcagctcagagatccagaataacatttcacttaatggcaaaatggacaatactacatttggcaaactcagttctcatctcaagaccctcagtcaagggtcctatctatatctgaaacttacatttgacctcatagagaaaggctatctagtgttaaagagctctagctacaaagtagttcctgtttcgctctcagaggtttatttactccagtgcaatatgaagttcccaacccagtcttcctttgaccgggtgatgcctctcctgaatgtggcagtggcctctctccacccactgactgatgagcatatcttccaggccatcaatgctgggagcattgaaggcacactagaatgggaggattttcagcagagaatggagaacctctccatgttcctaatcaagcgcagagacatgactcgtatgtttgtacatccttcttttcgagaatggcttatctggagagaagaaggagagaaaaccaaatttctctgtgatccgaggagtggtcacacgttacttgccttctggttttcccgccaagagggaaaactaaaccgacagcagactattgaactgggacatcacatcctcaaagcacacatttttaagggtttgagtaaaaaagttggtgtatcatcctccatcctccaaggtctctggatctcttatagcacagaaggtctttccatggcactggcgtctttacgaaatctctacactccaaatataaaggtcagccgactgctgattttgggaggtgccaatattaattaccggacagaggttttaaataatgctccaattctatgtgttcagtcccatcttggttacacagaaatggtagccctgctgctggagttcggggccaacgtggatgcctcttctgaaagtggcctgactcccctgggatatgctgcagcagcagggtacctgagcattgtggtgctgctgtgcaagaaacgggccaaggtggatcatttggataagaacgggcagtgtgctttggttcatgctgcactccgaggtcatctggaggttgtcaagtttttgattcagtgtgactggacgatggccggccagcagcaaggagtatttaagaagagccatgccatccaacaggccctcattgctgcagccagcatgggttatactgagattgtctcctacctacttgatcttccagaaaaagatgaagaggaagtagagcgagcacagatcaacagctttgacagtctctggggagagacagccctaacagctgcagccggaaggggcaaactggaggtgtgccgtttgctcttggaacaaggggcggcagtggcccagccaaaccgccgaggagcagtgccactattcagcacagtgcgccagggccactggcagattgttgatcttttactcacccatggagctgatgtcaacatggcagacaagcagggccgcactcccctgatgatggctgcttccgaaggccatctaggaaccgtggactttctgcttgcacaaggtgcctccattgctcttatggacaaagaaggattgacagccctcagctgggcttgtttgaagggccatctctcagtagtacgttctctggtggataacggagctgccacagaccatgctgacaagaatggccgtaccccactggatctggcagctttctatggcgatgctgaggtggtccagttcctggtagatcatggggccatgatcgagcacgttgactacagtggaatgcgccctttggatagggcagtggggtgccggaacacttctgttgttgtcactcttctgaagaaaggagccaagataggtccagccacatgggcgatggccacctccaagccagacatcatgatcatcctgttgagcaagctgatggaagagggggacatgttttataagaaaggtaaagtaaaggaagctgcccagcgctaccagtacgccctgaagaagttccctagagaagggtttggtgaggacttgaaaactttccgggaactaaaggtgtctctcctcctcaacctctctcggtgtcgcaggaaaatgaacgattttggaatggcggaggaatttgctactaaggccctggagctgaaaccgaaatcttatgaagcttactatgcgagagcaagggcaaaacgcagcagcagacagttcgcagcagccttagaggacctgaacgaggccatcaagctgtgtcccaacaaccgtgagatccagagacttctgctgagagtggaagaagagtgtagacagatgcagcagccacagcagccaccgccgccaccgcagcctcagcagcagttgccggaagaagcagaacctgagccacagcatgaagacatatactctgtacaggatatattcgaggaggagtacctggaacaggatgttgaaaatgtttccattggcctccagacagaggcccggcccagccaggggctcccggtcatccagagcccaccctcctctcccccgcatcgggactcagcctacatctccagctcacctcttggctctcatcaggtttttgacttccggtccagtagttctgtaggctctcccactagacagacctatcagtccacctcacctgccctttctccaactcatcagaactcacattacaggcctagcccaccacacacttccccggctcatcagggaggatcttaccgtttcagcccccctcctgtgggaggacagggcaaagaatacccaagccctcccccttcccctctccggagaggccctcagtatcgggccagccctccagctgaaagtatgagtgtctatagatcccagtctggttcacccgtgcgctatcagcaggaaacaagcgtcagtcagcttcctggcagacccaaatctccattatccaaaatggcccagcggccctaccagatgcctcagctccctgtggcagttccccagcaagggctcaggctacagcctgccaaggcccagattgtgagaagtaaccagcccagcccagccgtccattcaagcaccgtcatccccacaggagcctatggccaagtagcccattcaatggccagtaaataccagtcttcacaaggagacataggagtcagccagagccggttggtttatcaagggtcaattgggggaatcgtaggggatggaaggccggtgcagcatgtccaagccagcctgagtgcaggcgccatctgtcagcatggaggattgaccaaagaggatcttccacagcgaccttcctcagcataccgaggtggcgtgagatacagccagacaccacagatcggacgcagccagtcagcatcctattacccagtctgtcactcaaaactagatctggagcgctcctccagccaactaggttcccctgatgtgtcgcatttaatcagaagacctatcagtgtcaaccctaacgaaatcaaaccgcacccgccaactcccaggccgttgctgcattcccaaagtgtaggccttcgcttctctccatctagcaatagtatctcctccacctccaacctaactccgaccttccggccatcttcttccatccagcaaatggagatcccactgaaacctgcatatgagaggtcatgtgacgagctgtcgccagtgtctccaactcaaggaggttaccccagtgagcccacccgatccaggaccacaccattcatggggatcatagataaaacagcacggactcagcagtacccccacctccaccagcagaatcggacctgggcagtgtcatctgtggacaccgtcctcagtcccacgtctccaggcaacctgcctcagcctgagtccttcagtccaccatcatccatcagcaacattgccttttataacaaaaccaacaatgcacagaatggccatttgctggaggacgattattacagcccccatgggatgctggctaacgggtctcgtggagacctcttggagcgagtcagccaggcctcctcctatcccgacgtgaaggtagctcggactctacctgtggctcaggcataccaggacaacctgtacaggcagctgtcccgagactctcggcaagggcagacatcccctatcaaaccaaagagaccgttcgtggagtctaatgtttaaaagacgttttgttggagtgagacccatatgttttcactgcacattttcaggcttggtttccacattcgaggtagttctctggcttaatttctcatgtagtttctgtgtggtgttcagaggtggcagcccacatgctgaaatcctttgcatgcagccgactgggaagcggcctcccgggagccaggacttcagtttctcttgtctgtgcccagccacatgctctctccctctcttcagatgccaacgaggagattttcgtgctgtgtgctttaacccagggagatcagacacactggtcagctttttccaggagacaatcgctttcactgatgttcttgttgtgtaattgtctttttccttttttaaaaaataaggtgttcttgttcgttttcttctagaaactttagaaagagtgcgatgcccctttgcctttgcatccttagccagtgtcacccacacagccagccgcagcgcattctcatgctgtggcccctccccagaccgccagcgccctgcagccaccaggtctgcagtgtgcattaggattattgctggtcttcctagggggtaaaaggatcagagagagaagaattaagtgctaaattggaagaaaaccccaatataattatgtaaaatgtcactacattgattttccaagaggcattgtaggaacatgtcaaaaacagccagccctttaaatattgcagtcagccaaggaaattagatgagaattgtggctattaagagaattcactgagagttattctctagatttttagccgacaattaaccactaaaagctgctgcttttccagggtgggggagggaatgaatacatagaaaaacaaaaaagattgttctggattctcagtgaaaggctataggaagtctgttctggagacatctactttttagatcctgatacatcactgagtgtcatactccactaaaaggaaactctaaccgaaggctggctggtgtgacaatcccgttagttggatcttcacctacagccagattttgttctagtggccctcttcctgtaaacccagatggtgtcatacagaaattgtttctttcagaagcagattggaatctcttgggaccatgagactgagtcccaatatttccacccagggtcatgcccgttgttgtctacttccattttgagatctatagtttgattatctattattacaggaactgtttcttttctttttctaggagtgtttatgagagtgtgatattttaaagtcagacgcagcaaaaactgtttcagggtgaagaaagacccctttcagccctgttttgcagccctgggtgggggcatgagatagacagcaagcttctgatcttgaagcttgtctagaagacacatcttctaggtctcgtggtcatttggtaggctgacctttgagtgagcgaggccactattgagtggatagcaagaacattggaaccaaagcctcggcacaggcctggcactggctgtacatcagctcttacaactaaacaactcaactaagcaactgaaacgaaacaaaggagcattcgttctctgttgttaggaatcattctgctctgttagggaagggctgcaggaagggcagtttcctgaataaaaatctggctgcgaccagtcccatgtgtctggtaagtaagtaagtaagtaagtgccctttgaagggatcattaagacacagggagcatgaacctgagatcagaagcatttctttactaatttagattctgcgaaatagacggacctctccacccccaaacctaaaacaggccaggacttgtctctgtgctgaaagcaaatagcaagactaactcaagccccagcctctttccacactccctgatacctaaggactgctttctcagctagaccagggtgggcatcagcgacgccttctcagctagaccagggtaggcatcagcgtcctctctccatctctatacccctctctctcacatcaggaagatgaaatgtgtagctctagcggcaacctctagccaggagcccagtggcctctcagattgctttttggccaggtctcagcactgctggcatctttacatcttactccttaaaaccgcctctcgctgaggagccactgcattttgaagaatttctcagtgtctgtcaggaaagtgctcctgctcatttggaacgccacacaccacccgcactcacctgtccaggcgaatgagcaggtcctgtagctttacaaatatgccgctgatgccgcttctccccagggtctctcagttttccaggacaaaaagatttagggcctataccctatgggcaaaacacctaaaatgtcaacagtcaaaatgccattctttttggccatcataagagggagtaggtatcactgctgcatgccagttgtttttgactagaatatgccaaccagagcttgttggggcaggagacgtttttccttacaagcagactgcctgtgccctgtgccctgtttgctacttcactgccatggaatgatccgagtactgtatttcagagctgccccttccccagcagcaaacactcgctgagtccatgtctggcttcaggtgggaggaaatgtttcagatgaaacttactcaattcataccaccctgaaatggaggacagaggtgacaaacttcagtttaataggtttctcaccaagttgtatgttccattggcccaggattcttgcactaatgggtttctatcacatcatgtctataaatgggtgcactttactgtttgaatttgtaactgaagtactggatatttaagtgtgagtaatgtcttcattagaaaatagcagaaccgctcttgtcttttagtgtatttttcaagaaaaaaggaaaggaaagacatcaagcagtggatcacaacatttatagcacaagaaataacttgtatataagcatcaaaaagattaagaattttttaatatgaaaaatatttgcagtgattttaaagtgcttttccagcaatgttcttagggactcctgagacacggttactttatctactggatcagtaaggcacacaattaacaattaacaattaatgtttatttacaaagtaaagggaaaacctgtgtaacatgagaatttggcatgacaaaatggagaccattttgtatctgctgttgtatcttgtccgggttgcagacgtgcactattaaagtcccaagttaatagagcacaaacccttctcgctcctcccccatgtgcccctctttttagatgtgtataacttaaactcgatggctcaggaaaattccactaattagaatcatgtacagtaccccaggtcgttgtccagatatacaagtttgctaatgtagttaagcctggattattaaacacttttcctaaattattgtaaacagaacagcttagagaaaggtattctcagtccttaatattgtatagtagtttatgagcccctctctaaatattggtatttttatattccagagatgtacccaatagaaaaaattaaaaattaatcagtatctaatttaatatccataagtatttttccttagattttagtcacgtacagtgggctatgtggatgtcacttgtgcttcaccatagtttaccactaggtgtcactgtggctctgcactgcgcttgttttgtagcaaagaacagcggcatcccctcgggagagaggagctgcttccagggcaacaggcaagcgggctcagaggttcaggagaaggcaacagaggcctggaaggggtcttcgtgcatctgtgccagttgtgcaagacgaactctttgaacactacatgctttggacttcagccaggcagaggctggaagaaggttgaccagagctcccttgctctggtagagggatgggtacatggagaagccccttcttccccatgagcctccctcctgtcagttcctctcagcctccagcttttataactccagaagcgtcacagttgggtggtttgattcagagagagttatttttctactgcagaaatgccttggacaaaaccagtgctcactgaatctttgccacaaaatggaataggctatcccagggggcaagaggtgcccgcccctgtgcccagcctcctcttgatgctcccagtgcccagcagcctcgcacaccctgcctgtctgttcctgggctgcccatttctcaagaaaccgacctgcaaaggcagccggctgctgcctccacaccgagggctgtgcggtcctgctgctcgctcactgggaggtgcagctctttctcctcttcctctaggaattccagaccgaccatctaccatgactaacaacaatgaacaaagggcttaggggcaagagctacctgcaaagacgtgtcatggaacccttcaccatgcaatgccttgaactcagctctggctgctcccaagaaaaggtggctggctgggggcctggacacaagcacaatggggctggtggagccactgtgcagagctacttgaataatcactgggttttcatcaactccttttgtcatacagaccactcaagggctgaagtgttggtaaccttcatttcggtgtccaaagcctcacagcaggtgagccaccctgagatgcttgtggccacatggtggccacagtcagagctttgaaagtcagtaccaaatgaacgcataattggacaccaaaaatcaagtgttactttcatgtttcctcaccccatcatctcattgcctcctgctgactctgataccgacgctgagctgacttgccaggctgccgctggacgcgtagagatcaggccagcgccgcgctcatttttccaggtagacctactctgtggaacggaagtgccctagctgctttgtttttgtagcacttgctggctgaatttttcttttgctaatcgctaaccagaaagtctggttagagggggctcaactcaatccctttggtccccagcgccagacaagagttaattctggaaaattcagtacttgaatgtacctgccttattgcataccaatttactggggggaaaaaaaaagttaagagatgccggctccagatctccacttcattcacaggtgattttggaaatcctgtaagttacacttcctgttctggttttgttttgttttttgtttcctttggctgattcctgctgagtgaggccagttcctcatcaggctcagggcaggtgccttttcaggcgtggcctcctttccatctagcacagcatctttgtctctgttctgtctcctccaaatccaagatgattttaattagtacagacatgtacagtctacaattaaagagtgatttgtactaatatgattttgattcttcctcctctttgctgtcctttcaagacacttgctggaaaaagctttaatgcacttagttttcctttaggttttctatgactcagatgtaaaggactttctctgtacagtatattatccaatgcatgtttgttctctctcctgatatattgaacaccacacagttgtgaagccgtgcagtggggatgccccacaccccacagaggcatctacccctgtgtataaggaaagacattttcctttgctgtacttgcttgagcagttttattgtctgtacatgtgagctgtgtgagatagatgtgaaaagttcaaatgaatgcattttcctgccccatgtatacagattgtcatctgtacaaggaactgtatgtatgaaagcaaatgtacttatttataaatggctaacacttggaaaacca

SEQ ID NO: 275021 - protein, 46 aa, Artificial Sequence
  derived and/or modified sequence
  misc_feature (13)..(13): Xaa can be any naturally occurring amino acid
  misc_feature (24)..(24): Xaa can be any naturally occurring amino acid
DVQCGEGHFCHDXQTCCRASQGGXACCPYSQGVCCADQRHCCPVGF

SEQ ID NO: 275022 - protein, 593 aa, Artificial Sequence
  derived and/or modified sequence
MWTLVSWVALTAGLVAGTRCPDGQFCPVACCLDPGGASYSCCRPLLDKWPTTLSRHLGGPCQVDAHCSAGHSCIFTVSGTSSCCPFPEAVACGDGHHCCPRGFHCSADGRSCFQRSGNNSVGAIQCPDSQFECPDFSTCCVMVDGSWGCCPMPQASCCEDRVHCCPHGAFCDLVHTRCITPTGTHPLAKKLPAQRTNRAVALSSSVMCPDARSRCPDGSTCCELPSGKYGCCPMPNATCCSDHLHCCPQDTVCDLIQSKCLSKENATTDLLTKLPAHTVGDVKCDMEVSCPDGYTCCRLQSGAWGCCPFTQAVCCEDHIHCCPAGFTCDTQKGTCEQGPHQVPWMEKAPAHLSLPDPQALKRDVPCDNVSSCPSSDTCCQLTSGEWGCCPIPEAVCCSDHQHCCPQGYTCVAEGQCQRGSEIVAGLEKMPARRASLSHPRDIGCDQHTSCPVGQTCCPSLGGSWACCQLPHAVCCEDRQHCCPAGYTCNVKARSCEKEVVSAQPATFLARSPHVGVKDVECGEGHFCHDNQTCCRDNRQGWACCPYRQGVCCADRRHCCPAGFRCAARGTKCLRREAPRWDAPLRDPALRQLL

SEQ ID NO: 275023 - protein, 438 aa, Artificial Sequence
  derived and/or modified sequence
MWTLVSWVALTAGLVAGTRCPDGQFCPVACCLDPGGASYSCCRPLLDKWPTTLSRHLGGPCQVDAHCSAGHSCIFTVSGTSSCCPFPEAVACGDGHHCCPRGFHCSADGRSCFQRSGNNSVGAIQCPDSQFECPDFSTCCVMVDGSWGCCPMPQASCCEDRVHCCPHGAFCDLVHTRCITPTGTHPLAKKLPAQRTNRAVALSSSVMCPDARSRCPDGSTCCELPSGKYGCCPMPNATCCSDHLHCCPQDTVCDLIQSKCLSKENATTDLLTKLPAHTVGDVKCDMEVSCPDGYTCCRLQSGAWGCCPFTQAVCCEDHIHCCPAGFTCDTQKGTCEQGPHQVPWMEKAPAHLSLPDPQALKRDVPCDNVSSCPSSDTCCRDNRQGWACCPYRQGVCCADRRHCCPAGFRCAARGTKCLRREAPRWDAPLRDPALRQLL

SEQ ID NO: 275024 - protein, 413 aa, Artificial Sequence
  derived and/or modified sequence
MAITAAHGASTAVQTGDPASKDQVTTPWVPSSALIVSSNARTSPRAVLWSMAPGGAAPCPRLPAVKTGCTAVCDLIQSKCLSKENATTDLLTKLPAHTVGDVKCDMEVSCPDGYTCCRLQSGAWGCCPFTQAVCCEDHIHCCPAGFTCDTQKGTCEQGPHQVPWMEKAPAHLSLPDPQALKRDVPCDNVSSCPSSDTCCQLTSGEWGCCPIPEAVCCSDHQHCCPQGYTCVAEGQCQRGSEIVAGLEKMPARRASLSHPRDIGCDQHTSCPVGQTCCPSLGGSWACCQLPHAVCCEDRQHCCPAGYTCNVKARSCEKEVVSAQPATFLARSPHVGVKDVECGEGHFCHDNQTCCRDNRQGWACCPYRQGVCCADRRHCCPAGFRCAARGTKCLRREAPRWDAPLRDPALRQLL

SEQ ID NO: 275025 - DNA, 1782 bp, Artificial Sequence
  derived and/or modified sequence
atgtggaccctagtatcgtgggtcgccttgactgctgggctcgtggcaggcactaggtgcccggatggccagttttgccccgtcgcctgctgtctcgatcctggcggggcgtcatattcgtgttgccgccctctcctagataagtggcccaccactctgtcccgccacttggggggcccctgccaggtggatgctcactgttccgccgggcatagttgcatctttacggtttcaggcaccagttcttgctgtcccttccccgaggcagtggcatgcggtgacggccaccactgttgcccacgcgggttccactgctccgccgatggcaggtcttgctttcaaaggagcggcaacaattcagttggggccattcagtgcccggactctcagtttgaatgccccgatttttcaacttgctgtgtcatggtggacggctcctggggatgttgtcccatgccgcaggcttcatgttgtgaggacagagtccattgttgcccgcacggcgccttttgtgatcttgtgcacaccagatgcataaccccgaccgggacccaccctttagccaaaaagctacccgctcagcggaccaatagagccgtggctctgagctccagtgtcatgtgtcccgatgcgcgcagcagatgtcctgatgggagtacctgttgtgagttgccaagcggtaaatacgggtgctgccctatgcctaatgcgacatgctgtagcgaccacctgcactgttgtcctcaggatactgtatgtgacctaatacagtctaaatgcttatctaaggagaacgctaccactgatctattgaccaagctgccagcccatacggtgggtgacgtgaaatgtgatatggaggtgagttgtccagacgggtacacttgttgtcgcctccaatccggggcttggggttgttgtccatttacacaggctgtctgttgtgaggaccacattcattgctgccctgcaggcttcacatgtgatacacagaaaggcacatgtgagcagggtcctcaccaggtcccatggatggaaaaggccccagctcacctttccttgcccgacccacaggccttgaagcgcgacgtgccctgcgacaacgtttctagttgcccttcctccgatacttgctgccaactgacttccggagaatggggctgttgtcccattccagaggccgtctgttgcagcgaccatcagcattgctgccctcagggctatacttgtgtcgctgaaggccagtgccaacgcggtagcgagatagtggcaggtctggagaaaatgccagcaaggcgcgcttccctgtcccacccgcgcgatattgggtgtgatcagcacacttcatgccccgttggccagacctgttgtccaagcctcggtggttcctgggcatgttgccagctcccccatgccgtttgttgcgaggaccggcaacattgctgtccagctggctatacttgcaacgtcaaggcacgctcatgcgaaaaggaggtggtctctgcccagcctgccactttcctggcccggtcaccacatgttggcgtgaaggacgtggagtgcggggaaggtcacttttgccacgataatcaaacttgctgcagggacaatcgtcaaggttgggcgtgctgcccatatcggcagggagtatgctgcgctgatcgacgacactgctgcccagctggattccgttgcgctgctcgcggtaccaagtgtctccggcgcgaggctccccggtgggacgcccctttacgcgatcccgccctgcgacaattgttatag

SEQ ID NO: 275026 - DNA, 1317 bp, Artificial Sequence
  derived and/or modified sequence
atgtggacgcttgtaagctgggtcgcactgaccgcgggcctggtagccggtacgcggtgtccggacggacagttctgcccagtggcctgctgcctggatcctggaggcgctagctactcatgctgccgcccgttgctcgataaatggcctacgaccctttctcgacatctggggggaccatgtcaagtagatgctcactgctctgcgggacacagttgtatctttacagtatcaggaactagcagctgttgcccttttcccgaagctgtcgcatgcggcgacggtcatcactgctgtcctcggggctttcattgctctgcagatgggagaagttgctttcagagaagcggtaacaactcggtcggagccatccagtgcccagacagccagttcgagtgcccggacttttcaacgtgctgtgttatggtagacggcagttgggggtgctgccctatgcctcaagccagttgctgcgaagatcgtgtccattgctgtccccacggagccttctgcgatctggtccacacaaggtgtattacccccacagggacacatccacttgctaaaaagctcccggcccagcgaaccaatagggcagttgctctgtcttcctcggtgatgtgccccgatgcccgttcccggtgtcccgacggatcaacctgctgcgagcttccaagtggcaagtacggatgctgccccatgccaaacgctacttgctgctccgaccacctgcactgctgtccacaagacaccgtgtgcgacctcatccagtctaagtgcctgagtaaagagaacgcaaccacagatctgcttacgaaactgcccgcacatactgtgggggatgttaagtgtgatatggaggtctcatgcccagacggttatacctgctgtcggctgcagtcaggggcctgggggtgttgtccattcacccaggccgtatgctgcgaagatcatatccactgttgtcctgccgggtttacttgtgatacacagaagggaacttgcgagcaagggccccaccaggtgccatggatggagaaggcgccagcccacttgtcactccccgacccccaggcccttaaacgggacgttccttgtgacaatgtgagcagctgtccctccagtgacacttgttgtagggataaccggcagggttgggcctgttgcccgtatcggcaaggggtttgttgcgctgaccgacgccattgctgtcctgccggtttccggtgcgcggcccgaggcactaagtgtcttcgacgggaagcccccaggtgggatgcaccactgcgtgatcccgctctgcgccagttactgtag

SEQ ID NO: 275027 - DNA, 1242 bp, Artificial Sequence
  derived and/or modified sequence
atggctatcaccgctgcacacggtgcctcaactgccgtgcagactggagaccccgctagcaaggatcaggtgactacgccttgggtgccaagctcagctcttattgtgagctccaatgctcgcactagccctagggccgttctgtggagcatggcaccgggcggggcagctccctgtcctagacttcccgccgtgaaaacaggttgtactgccgtgtgtgatttgatccaaagcaaatgccttagtaaggagaatgccaccactgacctccttaccaaactacccgctcacactgtgggggatgtcaaatgcgacatggaggtgtcttgcccagatggttatacctgctgtcggctgcagtcgggagcctggggctgttgcccttttacccaggccgtgtgctgcgaggatcacattcactgttgtcccgctgggttcacgtgcgatacccagaaggggacgtgtgagcaggggcctcatcaggttccatggatggaaaaggccccagctcatctgagcttgccagatccacaagcccttaagagagacgttccttgtgataatgtgagcagctgtccaagcagtgatacgtgttgtcagcttaccagtggggagtggggatgctgtccgatccccgaggctgtttgttgctcagaccaccagcattgctgtccgcagggatacacgtgcgtggccgagggccaatgccagcgagggtcagaaattgtagccggtttagaaaagatgccagctcgcagagccagcctctcccacccgcgggatattgggtgcgatcagcacacatcctgtccggtcggacagacctgttgccccagcttaggaggcagctgggcttgctgccagctgcctcacgccgtttgctgcgaggatcggcagcattgctgtccggcaggatacacctgtaacgttaaagctcgcagttgcgagaaagaagtggtgtccgcccagccggccacctttcttgcccgctctccacacgtaggagtgaaggatgtggagtgcggagaaggccatttttgccacgataaccagacctgctgcagagacaatcgccagggctgggcctgttgcccatatcgccagggcgtctgctgcgctgatcgacgccactgttgtcccgcaggcttcagatgcgcagcacgtggaacgaagtgcttacggagagaggcccctcggtgggacgccccactgcgtgatccggccctgcggcagcttctttag

SEQ ID NO: 275028 - DNA, 2305 bp, Artificial Sequence
  derived and/or modified sequence
ggcgagaggaagcagggaggagagtgatttgagtagaaaagaaacacagcattccaggctggccccacctctatattgataagtagccaatgggagcgggtagccctgatccctggccaatggaaactgaggtaggcgggtcatcgcgctggggtctgtagtctgagcgctacccggttgctgctgcccaaggaccgcggagtcggacgcaggcagaccatgtggaccctggtgagctgggtggccttaacagcagggctggtggctggaacgcggtgcccagatggtcagttctgccctgtggcctgctgcctggaccccggaggagccagctacagctgctgccgtccccttctggacaaatggcccacaacactgagcaggcatctgggtggcccctgccaggttgatgcccactgctctgccggccactcctgcatctttaccgtctcagggacttccagttgctgccccttcccagaggccgtggcatgcggggatggccatcactgctgcccacggggcttccactgcagtgcagacgggcgatcctgcttccaaagatcaggtaacaactccgtgggtgccatccagtgccctgatagtcagttcgaatgcccggacttctccacgtgctgtgttatggtcgatggctcctgggggtgctgccccatgccccaggcttcctgctgtgaagacagggtgcactgctgtccgcacggtgccttctgcgacctggttcacacccgctgcatcacacccacgggcacccaccccctggcaaagaagctccctgcccagaggactaacagggcagtggccttgtccagctcggtcatgtgtccggacgcacggtcccggtgccctgatggttctacctgctgtgagctgcccagtgggaagtatggctgctgcccaatgcccaacgccacctgctgctccgatcacctgcactgctgcccccaagacactgtgtgtgacctgatccagagtaagtgcctctccaaggagaacgctaccacggacctcctcactaagctgcctgcgcacacagtgggggatgtgaaatgtgacatggaggtgagctgcccagatggctatacctgctgccgtctacagtcgggggcctggggctgctgcccttttacccaggctgtgtgctgtgaggaccacatacactgctgtcccgcggggtttacgtgtgacacgcagaagggtacctgtgaacaggggccccaccaggtgccctggatggagaaggccccagctcacctcagcctgccagacccacaagccttgaagagagatgtcccctgtgataatgtcagcagctgtccctcctccgatacctgctgccaactcacgtctggggagtggggctgctgtccaatcccagaggctgtctgctgctcggaccaccagcactgctgcccccagggctacacgtgtgtagctgaggggcagtgtcagcgaggaagcgagatcgtggctggactggagaagatgcctgcccgccgggcttccttatcccaccccagagacatcggctgtgaccagcacaccagctgcccggtggggcagacctgctgcccgagcctgggtgggagctgggcctgctgccagttgccccatgctgtgtgctgcgaggatcgccagcactgctgcccggctggctacacctgcaacgtgaaggctcgatcctgcgagaaggaagtggtctctgcccagcctgccaccttcctggcccgtagccctcacgtgggtgtgaaggacgtggagtgtggggaaggacacttctgccatgataaccagacctgctgccgagacaaccgacagggctgggcctgctgtccctaccgccagggcgtctgttgtgctgatcggcgccactgctgtcctgctggcttccgctgcgcagccaggggtaccaagtgtttgcgcagggaggccccgcgctgggacgcccctttgagggacccagccttgagacagctgctgtgagggacagtactgaagactctgcagccctcgggaccccactcggagggtgccctctgctcaggcctccctagcacctccccctaaccaaattctccctggaccccattctgagctccccatcaccatgggaggtggggcctcaatctaaggccttccctgtcagaagggggttgtggcaaaagccacattacaagctgccatcccctccccgtttcagtggaccctgtggccaggtgcttttccctatccacaggggtgtttgtgtgtgtgcgcgtgtgcgtttcaataaagtttgtacactttc

SEQ ID NO: 275029 - DNA, 1661 bp, Artificial Sequence
  derived and/or modified sequence
gctgctgcccaaggaccgcggagtcggacgcaggcagaccatgtggaccctggtgagctgggtggccttaacagcagggctggtggctggaacgcggtgcccagatggtcagttctgccctgtggcctgctgcctggaccccggaggagccagctacagctgctgccgtccccttctggacaaatggcccacaacactgagcaggcatctgggtggcccctgccaggttgatgcccactgctctgccggccactcctgcatctttaccgtctcagggacttccagttgctgccccttcccagaggccgtggcatgcggggatggccatcactgctgcccacggggcttccactgcagtgcagacgggcgatcctgcttccaaagatcaggtaacaactccgtgggtgccatccagtgccctgatagtcagttcgaatgcccggacttctccacgtgctgtgttatggtcgatggctcctgggggtgctgccccatgccccaggcttcctgctgtgaagacagggtgcactgctgtccgcacggtgccttctgcgacctggttcacacccgctgcatcacacccacgggcacccaccccctggcaaagaagctccctgcccagaggactaacagggcagtggccttgtccagctcggtcatgtgtccggacgcacggtcccggtgccctgatggttctacctgctgtgagctgcccagtgggaagtatggctgctgcccaatgcccaacgccacctgctgctccgatcacctgcactgctgcccccaagacactgtgtgtgacctgatccagagtaagtgcctctccaaggagaacgctaccacggacctcctcactaagctgcctgcgcacacagtgggggatgtgaaatgtgacatggaggtgagctgcccagatggctatacctgctgccgtctacagtcgggggcctggggctgctgcccttttacccaggctgtgtgctgtgaggaccacatacactgctgtcccgcggggtttacgtgtgacacgcagaagggtacctgtgaacaggggccccaccaggtgccctggatggagaaggccccagctcacctcagcctgccagacccacaagccttgaagagagatgtcccctgtgataatgtcagcagctgtccctcctccgatacctgctgccgagacaaccgacagggctgggcctgctgtccctaccgccagggcgtctgttgtgctgatcggcgccactgctgtcctgctggcttccgctgcgcagccaggggtaccaagtgtttgcgcagggaggccccgcgctgggacgcccctttgagggacccagccttgagacagctgctgtgagggacagtactgaagactctgcagccctcgggaccccactcggagggtgccctctgctcaggcctccctagcacctccccctaaccaaattctccctggaccccattctgagctccccatcaccatgggaggtggggcctcaatctaaggccttccctgtcagaagggggttgtggcaaaagccacattacaagctgccatcccctccccgtttcagtggaccctgtggccaggtgcttttccctatccacaggggtgtttgtgtgtgtgcgcgtgtgcgtttcaataaagtttgtacactttc

SEQ ID NO: 275030 - DNA, 1866 bp, Artificial Sequence
  derived and/or modified sequence
gctgctgcccaaggaccgcggagtcggacgcaggcagaccatgtggaccctggtgagctgggtggccttaacagcagggctggtggctggaacgcggtgcccagatggtcagttctgccctgtggcctgctgcctggaccccggaggagccagctacagctgctgccgtccccttctggacaaatggcccacaacactgagcaggcatctgggtggcccctgccaggttgatgcccactgctctgccggccactcctgcatctttaccgtctcagggacttccagttgctgccccttcccagaggccgtggcatgcggggatggccatcactgctgcccacggggcttccactgcagtgcagacgggcgatcctgcttccaaagatcaggtaacaactccgtgggtgccatccagtgccctgatagtcagttcgaatgcccggacttctccacgtgctgtgttatggtcgatggctcctgggggtgctgccccatgccccaggcttcctgctgtgaagacagggtgcactgctgtgtgtgacctgatccagagtaagtgcctctccaaggagaacgctaccacggacctcctcactaagctgcctgcgcacacagtgggggatgtgaaatgtgacatggaggtgagctgcccagatggctatacctgctgccgtctacagtcgggggcctggggctgctgcccttttacccaggctgtgtgctgtgaggaccacatacactgctgtcccgcggggtttacgtgtgacacgcagaagggtacctgtgaacaggggccccaccaggtgccctggatggagaaggccccagctcacctcagcctgccagacccacaagccttgaagagagatgtcccctgtgataatgtcagcagctgtccctcctccgatacctgctgccaactcacgtctggggagtggggctgctgtccaatcccagaggctgtctgctgctcggaccaccagcactgctgcccccagggctacacgtgtgtagctgaggggcagtgtcagcgaggaagcgagatcgtggctggactggagaagatgcctgcccgccgggcttccttatcccaccccagagacatcggctgtgaccagcacaccagctgcccggtggggcagacctgctgcccgagcctgggtgggagctgggcctgctgccagttgccccatgctgtgtgctgcgaggatcgccagcactgctgcccggctggctacacctgcaacgtgaaggctcgatcctgcgagaaggaagtggtctctgcccagcctgccaccttcctggcccgtagccctcacgtgggtgtgaaggacgtggagtgtggggaaggacacttctgccatgataaccagacctgctgccgagacaaccgacagggctgggcctgctgtccctaccgccagggcgtctgttgtgctgatcggcgccactgctgtcctgctggcttccgctgcgcagccaggggtaccaagtgtttgcgcagggaggccccgcgctgggacgcccctttgagggacccagccttgagacagctgctgtgagggacagtactgaagactctgcagccctcgggaccccactcggagggtgccctctgctcaggcctccctagcacctccccctaaccaaattctccctggaccccattctgagctccccatcaccatgggaggtggggcctcaatctaaggccttccctgtcagaagggggttgtggcaaaagccacattacaagctgccatcccctccccgtttcagtggaccctgtggccaggtgcttttccctatccacaggggtgtttgtgtgtgtgcgcgtgtgcgtttcaataaagtttgtacactttc

SEQ ID NO: 275031 - DNA, 1782 bp, Artificial Sequence
  derived and/or modified sequence
atgtggaccctggtgtcctgggtggccctgacagctggcctggtggccggcacccgctgcccagatggccagttctgccctgtggcctgctgcctggaccccggcggggccagctacagctgctgccggcccctgctggacaagtggcccaccaccctgagccgccacctgggcggcccctgccaggtggatgcccactgcagcgctggccacagctgcatcttcaccgtgtctggcaccagcagctgctgccccttccctgaggccgtggcctgtggagatggccaccactgctgcccccggggcttccactgcagcgcagatggccgcagctgcttccagaggagcggcaacaacagcgtgggcgccatccagtgcccagacagccagtttgagtgcccagacttcagcacctgctgcgtgatggtggatggctcctggggctgctgccccatgccccaggccagctgctgtgaagatagagtgcactgctgcccccatggagccttctgtgacctggtgcacacccgctgcatcacccccaccggcacccaccccctggccaagaagctgcctgcccagaggaccaacagagctgtggccctgagcagctctgtgatgtgcccagatgcccggagccgctgcccagatggcagcacctgctgtgagctgcccagcggcaagtatggctgctgccccatgcccaatgccacctgctgcagcgaccacctgcactgctgcccccaggacacagtgtgtgacctgatccagagcaagtgcctgagcaaagaaaatgccaccacagacctgctgaccaagctgcctgcccacacagtgggagatgtgaagtgtgacatggaggtgtcctgcccagatggctacacctgctgccgcctgcagagcggggcctggggctgctgccccttcacccaggccgtgtgctgtgaggaccacatccactgctgcccagctggcttcacctgtgacacccagaagggcacctgtgagcagggcccccaccaggtgccctggatggagaaggccccagcccacctgagcctgcctgacccccaggccctgaagagagatgtgccctgtgacaacgtgagcagctgccccagcagtgacacctgctgccagctgaccagcggggagtggggctgctgccccatccctgaggccgtgtgctgcagcgaccaccagcactgctgcccccagggctacacctgtgtggccgagggccagtgccagaggggcagcgagatcgtggccggcctggagaagatgcctgcccggcgggccagcctgagccacccccgggacatcggctgtgaccagcacaccagctgccctgtgggccagacctgctgccccagcctgggcggctcctgggcctgctgccagctgccccatgctgtgtgctgtgaggaccggcagcactgctgcccagctggctacacctgcaatgtgaaggcccggagctgtgagaaggaggtggtgtctgcccagcctgccaccttcctggcccggagcccccacgtgggcgtgaaggatgtggagtgtggggagggccacttctgccacgacaaccagacctgctgccgggacaaccggcagggctgggcctgctgcccctaccggcagggcgtgtgctgtgccgacagaagacactgctgcccagctggcttccgctgtgccgcccggggcaccaagtgcctgcggcgggaggccccccgctgggatgcccccctgcgggaccctgccctgcggcagctgctgtag

SEQ ID NO: 275032 - DNA, 1317 bp, Artificial Sequence
  derived and/or modified sequence
atgtggaccctggtgtcctgggtggccctgacagctggcctggtggccggcacccgctgcccagatggccagttctgccctgtggcctgctgcctggaccccggcggggccagctacagctgctgccggcccctgctggacaagtggcccaccaccctgagccgccacctgggcggcccctgccaggtggatgcccactgcagcgctggccacagctgcatcttcaccgtgtctggcaccagcagctgctgccccttccctgaggccgtggcctgtggagatggccaccactgctgcccccggggcttccactgcagcgcagatggccgcagctgcttccagaggagcggcaacaacagcgtgggcgccatccagtgcccagacagccagtttgagtgcccagacttcagcacctgctgcgtgatggtggatggctcctggggctgctgccccatgccccaggccagctgctgtgaagatagagtgcactgctgcccccatggagccttctgtgacctggtgcacacccgctgcatcacccccaccggcacccaccccctggccaagaagctgcctgcccagaggaccaacagagctgtggccctgagcagctctgtgatgtgcccagatgcccggagccgctgcccagatggcagcacctgctgtgagctgcccagcggcaagtatggctgctgccccatgcccaatgccacctgctgcagcgaccacctgcactgctgcccccaggacacagtgtgtgacctgatccagagcaagtgcctgagcaaagaaaatgccaccacagacctgctgaccaagctgcctgcccacacagtgggagatgtgaagtgtgacatggaggtgtcctgcccagatggctacacctgctgccgcctgcagagcggggcctggggctgctgccccttcacccaggccgtgtgctgtgaggaccacatccactgctgcccagctggcttcacctgtgacacccagaagggcacctgtgagcagggcccccaccaggtgccctggatggagaaggccccagcccacctgagcctgcctgacccccaggccctgaagagagatgtgccctgtgacaacgtgagcagctgccccagcagtgacacctgctgccgggacaaccggcagggctgggcctgctgcccctaccggcagggcgtgtgctgtgccgaccggcggcactgctgcccagctggcttccgctgtgccgcccggggcaccaagtgcctgcggcgggaggccccccgctgggatgcccccctgcgggaccctgccctgcggcagctgctgtag

SEQ ID NO: 275033 - DNA, 1242 bp, Artificial Sequence
  derived and/or modified sequence
atggccatcacagctgcccatggagccagcacagctgtgcagacaggagaccctgccagcaaggaccaggtgaccaccccctgggtgcccagcagcgccctgattgtgagcagcaatgcccggaccagccccagggctgtgctgtggagcatggcccctggaggagctgccccctgcccccggctgcctgctgtgaagacaggctgcacagctgtgtgtgacctgatccagagcaagtgcctgagcaaagaaaatgccaccacagacctgctgaccaagctgcctgcccacacagtgggagatgtgaagtgtgacatggaggtgtcctgcccagatggctacacctgctgccgcctgcagagcggggcctggggctgctgccccttcacccaggccgtgtgctgtgaggaccacatccactgctgcccagctggcttcacctgtgacacccagaagggcacctgtgagcagggcccccaccaggtgccctggatggagaaggccccagcccacctgagcctgcctgacccccaggccctgaagagagatgtgccctgtgacaacgtgagcagctgccccagcagtgacacctgctgccagctgaccagcggggagtggggctgctgccccatccctgaggccgtgtgctgcagcgaccaccagcactgctgcccccagggctacacctgtgtggccgagggccagtgccagaggggcagcgagatcgtggccggcctggagaagatgcctgcccggcgggccagcctgagccacccccgggacatcggctgtgaccagcacaccagctgccctgtgggccagacctgctgccccagcctgggcggctcctgggcctgctgccagctgccccatgctgtgtgctgtgaggaccggcagcactgctgcccagctggctacacctgcaatgtgaaggcccggagctgtgagaaggaggtggtgtctgcccagcctgccaccttcctggcccggagcccccacgtgggcgtgaaggatgtggagtgtggggagggccacttctgccacgacaaccagacctgctgccgggacaaccggcagggctgggcctgctgcccctaccggcagggcgtgtgctgtgccgacagaagacactgctgcccagctggcttccgctgtgccgcccggggcaccaagtgcctgcggcgggaggccccccgctgggatgcccccctgcgggaccctgccctgcggcagctgctgtag

SEQ ID NO: 275034 - DNA, 1782 bp, Artificial Sequence
  derived and/or modified sequence
atgtggaccctggtgagctgggtggccctgaccgccggcctggtggctggaacccggtgtcctgacggacagttctgccccgtggcgtgctgtctggatcccggcggggcctcctacagttgctgtcgcccacttttagataagtggccaaccacactgtcacggcacctaggtggcccctgccaggttgatgcgcactgcagcgcaggccacagttgcatcttcaccgtctccggcacatcgtcgtgctgcccattccctgaggcagtggcctgtggcgacgggcatcattgttgcccccgtggctttcattgttccgccgatggtagatcttgtttccaaagatctggtaataactctgttggggccatacagtgcccagattcacaattcgagtgccccgacttttcaacttgttgcgtaatggtggatggcagctggggatgttgtcccatgcctcaggcctcgtgctgcgaggatcgcgtgcattgctgtcctcacggcgccttctgcgacctggtccatactaggtgtatcacccccaccgggactcatccgctagccaaaaagcttcccgcacagaggactaatcgcgcggtcgccctctcctcgagtgtgatgtgtcccgacgctcggtcaaggtgcccagatgggagcacttgctgcgaactcccctccggaaagtacggatgctgcccgatgcctaatgccacttgttgctccgaccacttgcattgttgcccacaggatactgtgtgtgatcttatccagtcgaagtgtctgtccaaagagaacgccactaccgacctgttgaccaagttgcccgctcacaccgtcggagatgttaagtgcgacatggaagtgtcttgtcctgacggctacacgtgttgccggttgcagtccggcgcttggggctgttgccctttcactcaggccgtatgttgcgaggaccatatacactgctgccccgcaggctttacatgtgatacacagaagggaacgtgtgagcaggggccccaccaggtgccctggatggaaaaggctccggctcacctatctttgcctgatcctcaggctctgaagcgggacgttccctgtgataatgttagtagctgtcccagcagtgacacctgctgccagctgaccagtggtgagtgggggtgttgtcccatccctgaggcagtctgctgttcagatcaccagcactgctgcccccagggctatacctgcgtggccgaaggacaatgccagcgcggttctgagattgtggcgggactggagaagatgccggcaaggcgcgcctcgctctctcacccacgagatataggatgtgaccagcacacaagctgcccagtgggccaaacatgctgtcccagcctgggcggctcatgggcctgctgccaactgcctcacgcagtctgttgtgaagacagacaacattgctgtcccgcagggtatacttgtaatgtcaaggccagatcatgcgaaaaagaggtcgtgagcgctcagcccgctactttcctagcccgaagtccacacgtcggggtgaaggatgtcgagtgtggggagggccacttttgtcacgacaatcagacctgctgcagagacaatcgccagggatgggcctgctgcccttatcgccagggtgtgtgctgcgccgaccggcgccactgttgccccgcaggattccgctgcgccgctagaggtactaagtgtctgcgaagggaagcacctcgttgggatgctcccctccgggacccagccttgaggcagctgctctag

SEQ ID NO: 275035 - DNA, 1317 bp, Artificial Sequence
  derived and/or modified sequence
atgtggaccctggtgagctgggtggccctgaccgccggcctggtggctggcaccaggtgcccggatgggcagttctgtccagtggcatgctgtctcgatccaggaggcgctagttactcttgctgtcggcccctgctggacaagtggccaacaacgttgagcagacatctgggcggaccctgtcaagtggacgcccactgttccgctggacactcatgcatcttcactgtatccggaacatcctcgtgttgcccgtttcccgaagcagtggcctgcggggatgggcatcattgctgccctagagggttccattgctcagcggatggacggtcctgctttcagcggtcagggaataattcggtgggagctattcagtgccctgactcacaatttgagtgtcctgattttagtacgtgctgtgtgatggtggacgggtcctggggctgctgccccatgccccaggcctcatgttgtgaagatcgcgtccactgttgcccccatggagccttctgcgatttggtgcacacccggtgcatcacgcccaccggaacccatcccctcgcaaagaagctcccggctcaaaggactaacagagctgtggcattatccagcagtgttatgtgtcctgacgcgcggagccgctgtcccgacggaagcacatgctgcgagctgcctagcggtaaatatggttgctgcccaatgcccaatgctacatgctgcagtgaccacctgcactgctgcccccaagacaccgtgtgtgacctcatccagtctaagtgcctctccaaggaaaacgccacaaccgatcttttaacaaaactacctgctcacaccgttggtgacgtcaagtgcgatatggaggtgagctgtcctgacggttatacctgttgtagactacagagcggcgcatggggctgttgccccttcactcaggcggtgtgctgcgaggaccacattcattgttgtcctgcaggcttcacgtgtgatacacagaagggtacttgtgaacagggcccccaccaggtcccgtggatggaaaaggcacccgcgcacttgagcctcccggaccctcaggcgctcaaaagggatgtgccttgcgataatgtctccagttgtccaagtagcgacacatgctgccgcgataaccggcagggctgggcatgctgcccgtacaggcaaggggtgtgttgcgcagaccgaaggcactgttgccccgccggattccgctgtgccgccagaggcactaaatgtcttcgacgcgaagctccacgatgggacgctccattgcgggatccggctctccgtcagctcctttag

SEQ ID NO: 275036 - DNA, 1242 bp, Artificial Sequence
  derived and/or modified sequence
atggccatcaccgccgcccacggcgccagcaccgccgtgcagaccggcgaccctgcgtctaaagaccaagtcaccaccccctgggtgcccagctctgccctaatcgtctcaagcaacgctaggaccagcccgcgggctgttctgtggtccatggcccccggtggagctgcaccctgccctcgcctccccgccgtcaagaccggctgcaccgcagtctgtgacttaatacagtcaaagtgtctttccaaagagaacgctacaaccgacttgctaaccaaactgcccgcacacaccgtaggagatgtcaagtgtgatatggaggtttcctgtcccgacgggtacacatgttgtcggctgcaaagcggagcctggggctgctgtccctttacacaggccgtttgttgcgaagaccatatacactgctgccccgcgggttttacatgtgacacccagaaaggaacctgcgaacaaggaccccaccaagtaccctggatggagaaggctccagcccatctctcgctgccagaccctcaggctttgaaaagagacgttccctgtgacaacgtctccagttgcccttcaagtgacacatgctgtcagctgactagcggggagtggggatgttgccccatacccgaggccgtttgttgttccgaccaccagcactgctgcccgcagggttatacttgcgttgccgagggccagtgtcaacgcggatcagagattgtggcggggctggagaagatgccagctcggcgggctagcctgagtcatccgagagacattggttgtgaccaacacacttcatgcccagtggggcagacctgttgccctagcctaggaggaagctgggcgtgctgccagctgccccacgctgtgtgttgcgaagaccggcagcactgctgtcccgcaggttacacctgcaatgttaaggctaggtcgtgtgagaaagaagtagtcagtgcccagcctgccacatttttagctaggtctccccacgtaggagtgaaggatgtggagtgtggggagggccatttttgccatgataaccagacatgctgtcgggataaccggcaaggctgggcgtgctgcccatatcgccagggggtctgctgtgctgaccggaggcattgttgtccggctgggtttcgatgcgctgcccgtggtactaagtgtttgcgacgagaagccccgcgctgggacgctccactgcgcgacccagctctgcggcagttgctttag

SEQ ID NO: 275037 - DNA, 1782 bp, Artificial Sequence
  derived and/or modified sequence
atgtggactcttgtgtcatgggtggcgttgaccgcaggccttgtggccggaaccaggtgtccagatggacaattctgtcctgttgcttgttgccttgacccaggcggagcttcctattcgtgttgcagacccctgctcgacaagtggcctacaacactttcccggcatctgggaggcccttgtcaagtagatgctcattgttctgctggccactcttgtatctttaccgtttccgggacctcctcttgttgcccttttccagaggcggtcgcctgcggcgatgggcaccattgttgccctcggggatttcactgctcagctgacggaagatcctgctttcaacgctcaggaaacaactccgttggtgcaatccagtgtcccgattctcaattcgaatgtcccgacttttccacttgttgtgttatggttgacggttcgtggggatgttgtccgatgcctcaggcaagctgctgtgaggaccgcgttcactgttgtcctcatggagctttttgcgacctggtgcataccagatgcatcacacctactggaacgcatcccctggcgaaaaagctccccgctcagagaactaacagagctgttgccctgagttcctcagtgatgtgccccgatgcgagaagtcgttgccctgatggaagcacgtgttgtgaattgccctcaggcaagtatggatgttgccctatgccgaatgcaacttgttgttccgatcaccttcattgctgtccacaagatacagtatgcgatctcattcagtctaagtgtctcagcaaggaaaatgccacaaccgacctgctgacaaagctgcccgcacacacggtaggggatgttaaatgcgacatggaagtatcttgccctgacggttatacctgttgcagactgcagtccggcgcttgggggtgttgcccattcacccaggccgtctgctgtgaggatcacatccattgctgccctgctggattcacctgcgacacccaaaaggggacctgcgagcagggacctcaccaggtgccatggatggagaaagcaccagcccacctctcactgccagatccccaggccctgaagagagatgtcccatgcgacaacgtgagttcctgtccttcatctgatacatgctgtcaactgacctccggcgagtggggatgttgccccataccagaggccgtctgctgttccgaccaccagcactgttgtcctcagggctacacatgcgtggctgagggtcagtgtcagagaggtagtgagatcgtggctgggttagagaaaatgcctgcgcgtcgcgcaagcctctcccacccccgagatatcggatgtgaccagcacacatcgtgtccagtcggacagacatgctgtccatctctggggggatcttgggcgtgttgccaacttccccatgccgtatgctgcgaggaccgccagcactgttgccctgctggctacacatgtaatgtgaaagccaggagctgcgagaaggaggtggtctctgcccagccagccactttcctcgccagatccccacacgtgggcgttaaggacgtggaatgtggggaaggacatttttgtcacgataatcagacatgctgccgagacaacagacagggctgggcatgctgcccatacaggcagggcgtctgctgcgcagatcggaggcactgctgtccagcgggatttcggtgtgccgctcgcggaacaaaatgtttgcgcagagaggcaccacgatgggacgcccctctgcgcgacccagcccttagacagctcctgtag

SEQ ID NO: 275038 - DNA, 1317 bp, Artificial Sequence
  derived and/or modified sequence
atgtggacactcgtcagctgggttgcccttaccgctggcctggtggcgggaactcgctgccctgacggccaattctgcccagtggcttgttgcttggatccgggaggagctagttatagttgttgtcggcctcttttggataaatggcccacaaccttgtctcggcatctgggaggtccctgtcaggtggatgcacactgcagcgctggccattcatgtatttttaccgtctctgggacatctagttgctgcccgttccccgaggctgtggcatgcggcgatggacaccactgctgcccaagaggattccattgtagcgcagatgggcgaagttgtttccaacggtccggaaataactcagtgggggctatccagtgtccggactctcagtttgagtgtccggatttcagtacatgctgtgtgatggtggatgggtcttgggggtgctgccctatgccccaggcctcttgttgcgaggacagggtgcattgttgcccacacggcgctttctgtgacctagttcataccagatgcatcacacctaccggtacacatcctctcgctaagaaacttcccgctcagaggaccaacagggccgtggccctctcctcttcggttatgtgcccggacgccagaagtcggtgcccagatggcagcacttgctgtgagctcccaagcgggaagtatggctgttgcccaatgccgaacgcgacctgctgctctgatcacctgcactgctgtccccaggacaccgtttgcgacctgatccagagcaaatgcctgagcaaagagaatgcaacaacagatctcctcacaaagcttccagcccatactgtgggcgacgttaagtgtgatatggaagtgtcatgccctgatggatatacctgctgtcggctgcaatctggagcttggggctgctgcccatttacacaggcagtttgttgtgaagaccatatccattgttgtcccgctgggtttacctgtgacactcagaaaggtacatgcgagcagggcccacaccaagtaccttggatggagaaggctcctgctcacctgtcacttcctgacccgcaggctctgaaacgggacgtgccatgcgataacgtatccagctgcccttcctcagatacctgctgcagagataaccgtcaaggctgggcctgttgcccatatcgacaaggcgtgtgttgtgctgatcggcgacattgctgtcccgctgggtttagatgtgccgctagaggaacgaaatgcttgcgcagagaagcccctcgctgggacgctcccttgagagatcctgccttgagacagctgctgtag

SEQ ID NO: 275039 - DNA, 1242 bp, Artificial Sequence
  derived and/or modified sequence
atggcgattaccgccgcacacggcgcaagcaccgcagtccagaccggggatcccgcttcaaaggatcaggtcactaccccttgggtcccatcttcagcactgatagtgtcgagtaatgcaaggacttcccccagagccgtgctgtggagcatggcaccgggtggcgcagccccttgcccaaggctcccagcggtgaagacagggtgcacagctgtgtgtgatctgatacagagcaaatgcctatcaaaagagaacgctaccaccgacttgctcactaagctgccagctcacaccgtgggcgacgtgaagtgtgacatggaggtctcctgcccagacgggtacacttgctgccgccttcaatccggtgcctggggctgctgtccgtttacgcaggctgtctgttgtgaggaccatattcattgttgccctgccggtttcacttgcgatacccagaaagggacttgtgagcaggggcctcaccaggtcccatggatggagaaggcgccagcccatctgagtctaccggatcctcaggccctgaagagagatgtgccttgtgacaacgtctcttcctgcccttcatctgacacttgctgccagctgactagcggtgagtggggatgctgcccaatccctgaggctgtttgctgctctgatcaccagcattgctgtccacagggttacacttgcgtggctgagggccagtgccaaagggggagcgaaatcgtggccggactggagaagatgcctgccagaagggcctccctgagccaccctagggatatcggctgtgaccaacatacttcgtgtcccgtcggccagacctgctgcccatcccttggcggttcttgggcttgctgccagctacctcacgctgtgtgttgtgaggacaggcaacattgctgcccggcaggatacacatgtaacgtcaaggctagaagttgtgagaaggaagtcgtcagcgctcaacccgcaacctttctggctcgctccccccatgtgggggtaaaggacgtggagtgtggcgaaggccacttttgtcatgataatcaaacatgttgtcgagacaatagacaggggtgggcgtgctgcccctatcggcagggcgtgtgttgcgcagatcggaggcactgctgcccagctggctttcgctgcgccgcaagagggactaagtgtttgcgcagagaggccccacggtgggacgctcctttgagggatcccgcacttagacaactcctgtag

SEQ ID NO: 275040 - DNA, 1782 bp, Artificial Sequence
  derived and/or modified sequence
atgtggacactagtatcatgggtggctttgacagctggtctggtagcaggcactagatgccctgacggccaattctgccccgtcgcttgctgcctggaccccggaggcgcctcttattcctgttgccgaccgctactcgacaaatggcccacaacactcagccggcacctcggtggaccctgtcaggttgacgctcattgttcagccggccatagctgtatattcacagtatccgggacaagctcttgctgccccttcccagaggccgtcgcttgcggggacggacaccactgttgtccacgggggtttcattgttctgccgatggtaggtcatgtttccagcgatcagggaataattcagttggtgccatccaatgtcccgacagtcaatttgaatgccctgacttctccacatgctgcgtgatggtcgatgggagctggggctgttgtcccatgccacaagcctcctgctgcgaggaccgtgtgcattgctgcccccacggggctttttgcgacctcgtccatacacggtgcataacacccaccggaacacaccctctagcaaagaaactgcctgctcaacgtaccaaccgcgcggtagcattatcatccagtgtcatgtgccccgatgcaaggagccgctgccccgacgggtctacctgttgcgagttgcctagcgggaagtacggctgctgcccgatgcctaatgccacctgctgctccgaccacctgcactgctgcccccaagacaccgtctgcgaccttattcagagtaagtgtctatcaaaggagaatgccacaaccgatcttctcacaaaattgcccgcacacaccgtaggagatgttaaatgtgatatggaagtcagttgtcccgacgggtacacatgctgcagattacagtccggcgcctgggggtgctgcccatttacacaggcggtctgctgcgaagatcatattcattgttgtcctgctggatttacctgcgacacacagaaaggaacgtgcgagcagggcccccaccaagtgccatggatggaaaaggccccggcgcacttaagccttcccgatccacaggccctcaagagagatgtaccatgcgacaatgtgagctcctgccctagttcagatacctgctgtcagctgacaagtggagagtggggatgttgtcctatcccagaagcagtgtgttgcagtgaccaccagcactgctgtccacaggggtacacatgcgtggcagaaggccaatgccagcgtggctcagagattgtggctggattggaaaaaatgcccgccagaagagccagcctgagccatccacgcgatatcgggtgcgaccagcacacgtcatgccccgtcggtcaaacatgttgtccttctttgggaggctcctgggcatgttgccagctgcctcacgcggtctgctgcgaggaccgacagcactgctgcccagccggttacacatgcaacgtgaaagcgcgtagctgtgaaaaagaggtcgtgagtgctcagcccgctacatttcttgctcgctctccacacgtgggagtgaaggatgttgaatgcggcgagggtcacttttgccacgacaatcagacctgctgtcgggacaatcgccagggttgggcttgttgtccataccggcagggagtttgctgcgctgaccgacgacactgttgtccggccggattccgctgcgccgctcgtggaaccaagtgtcttagacgtgaagctcctcggtgggacgcacctcttcgcgatcccgctctccgacagcttctgtag

SEQ ID NO: 275041 - DNA, 1782 bp, Artificial Sequence
  derived and/or modified sequence
atgtggactctggtgtcatgggttgcccttacagccggtctggtcgccggaaccagatgccctgacggtcagttctgccccgtcgcttgttgcttggatcctggaggggcttcctacagctgttgtcgcccacttctagataaatggcccaccaccttatctcgtcatctcggggggccctgtcaagttgatgctcactgtagtgcgggtcactcctgcatctttactgtctcgggcacctcatcatgttgtccgtttcctgaggctgtggcttgcggcgacggtcatcactgttgccctagaggctttcattgcagcgctgatggccggagctgtttccaaaggtccggtaataactctgtcggagcaattcaatgcccagattcccagttcgagtgtccagacttttcaacctgctgtgtaatggttgacggcagctggggatgctgcccgatgcctcaagccagctgctgcgaggatagggtgcattgttgtccacatggagccttttgtgaccttgtgcatacgaggtgtattacccctacaggcactcaccctctcgctaaaaaactaccagcccagcggactaacagagccgtggctctgtcaagctcagtcatgtgccccgatgccagaagtaggtgccccgatggaagtacgtgctgcgagctgccatccggaaaatatggatgttgcccaatgcccaacgccacatgttgctctgatcaccttcattgctgccctcaggacacggtgtgcgacctgatccagtccaagtgcttgtcaaaagagaacgccacaacagatttgctaacgaagttacccgcccacaccgtcggagacgttaaatgcgatatggaagtgagttgtccagatggatacacttgttgcagactccagtcgggcgcctggggatgctgccctttcacccaagcagtgtgttgtgaagaccatattcactgttgccctgccggatttacctgcgatacacaaaaaggtacgtgtgagcaaggcccacaccaagtaccctggatggagaaggcccctgcacacctgagcctgccagacccacaagctctcaaaagggacgtcccatgtgataacgtgtcaagctgtcctagttctgacacctgctgccagctgaccagcggtgaatggggttgttgtcctatcccggaagccgtatgctgcagtgaccaccagcactgttgtccacagggctacacttgcgtagctgaaggacagtgtcagagaggaagcgaaatcgtagccggactggagaaaatgccagcaagacgggcaagcttatcccatcctagagatatcggttgcgatcaacacacatcatgccccgtgggacagacctgctgcccttcacttggcggaagttgggcctgctgccagcttccgcacgccgtatgctgcgaagaccgccaacactgctgtccggccggctacacttgtaacgtgaaggcgagatcctgtgaaaaagaagtggtatcagcccagcccgccacttttttggctaggtcaccacatgtgggagtaaaagacgtggagtgcggagagggccatttctgccatgataaccaaacatgctgccgcgataatagacagggatgggcatgctgcccatacagacagggggtgtgttgcgcagacagaagacattgttgccctgccggctttcgatgcgcagccaggggcacaaaatgcctgcgaagagaagctccccggtgggatgcacctttgcgggacccagctctacgccagctcttatag

SEQ ID NO: 275042 - DNA, 1782 bp, Artificial Sequence
  derived and/or modified sequence
atgtggaccctggtgagctgggtggccctgaccgccggcctggtggccggcaccagatgccccgacggccagttctgccccgtggcctgctgcctggaccccggcggcgccagctacagctgctgcagacccctgctggacaagtggcccaccaccctgagcagacacctgggcggcccctgccaggtggacgcccactgcagcgccggccacagctgcatcttcaccgtgagcggcaccagcagctgctgccccttccccgaggccgtggcctgcggcgacggccaccactgctgccccagaggcttccactgcagcgccgacggcagaagctgcttccagagaagcggcaacaacagcgtgggcgccatccagtgccccgacagccagttcgagtgccccgacttcagcacctgctgcgtgatggtggacggcagctggggctgctgccccatgccccaggccagctgctgcgaggacagagtgcactgctgcccccacggcgccttctgcgacctggtgcacaccagatgcatcacccccaccggcacccaccccctggccaagaagctgcccgcccagagaaccaacagagccgtggccctgagcagcagcgtgatgtgccccgacgccagaagcagatgccccgacggcagcacctgctgcgagctgcccagcggcaagtacggctgctgccccatgcccaacgccacctgctgcagcgaccacctgcactgctgcccccaggacaccgtgtgcgacctgatccagagcaagtgcctgagcaaggagaacgccaccaccgacctgctgaccaagctgcccgcccacaccgtgggcgacgtgaagtgcgacatggaggtgagctgccccgacggctacacctgctgcagactgcagagcggcgcctggggctgctgccccttcacccaggccgtgtgctgcgaggaccacatccactgctgccccgccggcttcacctgcgacacccagaagggcacctgcgagcagggcccccaccaggtgccctggatggagaaggcccccgcccacctgagcctgcccgacccccaggccctgaagagagacgtgccctgcgacaacgtgagcagctgccccagcagcgacacctgctgccagctgaccagcggcgagtggggctgctgccccatccccgaggccgtgtgctgcagcgaccaccagcactgctgcccccagggctacacctgcgtggccgagggccagtgccagagaggcagcgagatcgtggccggcctggagaagatgcccgccagaagagccagcctgagccaccccagagacatcggctgcgaccagcacaccagctgccccgtgggccagacctgctgccccagcctgggcggcagctgggcctgctgccagctgccccacgccgtgtgctgcgaggacagacagcactgctgccccgccggctacacctgcaacgtgaaggccagaagctgcgagaaggaggtggtgagcgcccagcccgccaccttcctggccagaagcccccacgtgggcgtgaaggacgtggagtgcggcgagggccacttctgccacgacaaccagacctgctgcagagacaacagacagggctgggcctgctgcccctacagacagggcgtgtgctgcgccgacagaagacactgctgccccgccggcttcagatgcgccgccagaggcaccaagtgcctgagaagagaggcccccagatgggacgcccccctgagagaccccgccctgagacagctgctgtag

SEQ ID NO: 275043 - DNA, 1317 bp, Artificial Sequence
  derived and/or modified sequence
atgtggaccctggtgagctgggtggccctgaccgccggcctggtggccggcaccagatgccccgacggccagttctgccccgtggcctgctgcctggaccccggcggcgccagctacagctgctgcagacccctgctggacaagtggcccaccaccctgagcagacacctgggcggcccctgccaggtggacgcccactgcagcgccggccacagctgcatcttcaccgtgagcggcaccagcagctgctgccccttccccgaggccgtggcctgcggcgacggccaccactgctgccccagaggcttccactgcagcgccgacggcagaagctgcttccagagaagcggcaacaacagcgtgggcgccatccagtgccccgacagccagttcgagtgccccgacttcagcacctgctgcgtgatggtggacggcagctggggctgctgccccatgccccaggccagctgctgcgaggacagagtgcactgctgcccccacggcgccttctgcgacctggtgcacaccagatgcatcacccccaccggcacccaccccctggccaagaagctgcccgcccagagaaccaacagagccgtggccctgagcagcagcgtgatgtgccccgacgccagaagcagatgccccgacggcagcacctgctgcgagctgcccagcggcaagtacggctgctgccccatgcccaacgccacctgctgcagcgaccacctgcactgctgcccccaggacaccgtgtgcgacctgatccagagcaagtgcctgagcaaggagaacgccaccaccgacctgctgaccaagctgcccgcccacaccgtgggcgacgtgaagtgcgacatggaggtgagctgccccgacggctacacctgctgcagactgcagagcggcgcctggggctgctgccccttcacccaggccgtgtgctgcgaggaccacatccactgctgccccgccggcttcacctgcgacacccagaagggcacctgcgagcagggcccccaccaggtgccctggatggagaaggcccccgcccacctgagcctgcccgacccccaggccctgaagagagacgtgccctgcgacaacgtgagcagctgccccagcagcgacacctgctgcagagacaacagacagggctgggcctgctgcccctacagacagggcgtgtgctgcgccgacagaagacactgctgccccgccggcttcagatgcgccgccagaggcaccaagtgcctgagaagagaggcccccagatgggacgcccccctgagagaccccgccctgagacagctgctgtag

SEQ ID NO: 275044 - DNA, 1242 bp, Artificial Sequence
  derived and/or modified sequence
atggccatcaccgccgcccacggcgccagcaccgccgtgcagaccggcgaccccgccagcaaggaccaggtgaccaccccctgggtgcccagcagcgccctgatcgtgagcagcaacgccagaaccagccccagagccgtgctgtggagcatggcccccggcggcgccgccccctgccccagactgcccgccgtgaagaccggctgcaccgccgtgtgcgacctgatccagagcaagtgcctgagcaaggagaacgccaccaccgacctgctgaccaagctgcccgcccacaccgtgggcgacgtgaagtgcgacatggaggtgagctgccccgacggctacacctgctgcagactgcagagcggcgcctggggctgctgccccttcacccaggccgtgtgctgcgaggaccacatccactgctgccccgccggcttcacctgcgacacccagaagggcacctgcgagcagggcccccaccaggtgccctggatggagaaggcccccgcccacctgagcctgcccgacccccaggccctgaagagagacgtgccctgcgacaacgtgagcagctgccccagcagcgacacctgctgccagctgaccagcggcgagtggggctgctgccccatccccgaggccgtgtgctgcagcgaccaccagcactgctgcccccagggctacacctgcgtggccgagggccagtgccagagaggcagcgagatcgtggccggcctggagaagatgcccgccagaagagccagcctgagccaccccagagacatcggctgcgaccagcacaccagctgccccgtgggccagacctgctgccccagcctgggcggcagctgggcctgctgccagctgccccacgccgtgtgctgcgaggacagacagcactgctgccccgccggctacacctgcaacgtgaaggccagaagctgcgagaaggaggtggtgagcgcccagcccgccaccttcctggccagaagcccccacgtgggcgtgaaggacgtggagtgcggcgagggccacttctgccacgacaaccagacctgctgcagagacaacagacagggctgggcctgctgcccctacagacagggcgtgtgctgcgccgacagaagacactgctgccccgccggcttcagatgcgccgccagaggcaccaagtgcctgagaagagaggcccccagatgggacgcccccctgagagaccccgccctgagacagctgctgtag

SEQ ID NO: 275045 - DNA, 900 bp, Artificial Sequence
  derived and/or modified sequence
atgaaagaaagtcggcagaccagtaaactgaagaacaatagccccggtactgccgaggggtgcggaggcgggggtgggggtggggggggaggtggttccgggggctccggaggcggaggcgggggaggtgggggtggcgataaatctccacctggatctgccgcgagcaagagagcccggaccgcttacacttctgcccaactggtagagctggagaaggagtttcattttaatcgctacctctgtaggccccggcgagtcgagatggccaatctgctgaacctgtccgaacggcagatcaagatctggttccagaataggagaatgaagtacaagaaggatcagaaggccaaggggctggctagcagcagcggaggtccttctccggctggcagccccccacagcctatgcagtccaccgccggctttatgaatgctttgcatagtatgaccccttcttatgaatctccatcgccgccggcgtttggcaaggctcaccaaaacgcctatgctctcccatccaattaccagcctccactcaagggatgtggagccccccagaagtatcccccaactcctgccccagagtacgaacctcacgttctacaggccaatgggggcgcctacggcacccctaccatgcaggggtcccctgtgtacgtggggggaggaggctatgcagacccacttccgccgcccgccggcccttctctgtacggccttaatcacttgagtcaccacccaagtggcaacctggattacaatggagcacccccaatggcaccctcccagcaccacggtccctgtgaaccccaccccacctataccgatctttcctctcaccatgcgcctcccccccagggcagaatacaggaggccccaaagctaacacatctatag

SEQ ID NO: 275046 - DNA, 900 bp, Artificial Sequence
  derived and/or modified sequence
atgaaagagagtcggcagacctccaaactcaaaaataattcccctggcacggctgagggttgcggtggcggtggtgggggcggaggaggaggcggatccgggggctccggaggtggcggaggaggcgggggcggtggtgataagtctccgcctggcagcgcagcaagtaagagagcccgcacggcctacactagcgcccagctggtcgaacttgagaaagaattccactttaaccggtatttgtgtcgtccaaggcgagtcgaaatggctaacctgctcaatctgagcgagcgacagattaaaatatggtttcagaatagaagaatgaaatataagaaagatcagaaggccaagggactggcctctagcagtggaggaccctccccggcaggctctccgccccagccaatgcaatctaccgccggctttatgaacgcgctgcacagcatgactcccagctatgagtccccctcaccaccggccttcgggaaagctcaccaaaacgcttatgctctgccatccaactaccagccgccactgaagggttgcggggcccctcagaaatacccccctacccctgcccctgagtatgaaccgcatgtcctacaagccaacggtggagcctatgggacaccgacaatgcagggctctccagtctacgtcggtggaggaggctacgcagatccattaccaccccctgcaggaccctccctgtatggtttgaatcacctgtcccaccatcccagcggtaatctggattacaatggggctccccccatggccccttcccagcatcatggcccctgcgaaccacacccaacctacactgatctgtccagccatcacgcaccccccccacaagggcgaatacaagaagccccaaaactgacgcatttgtag

SEQ ID NO: 275047 - DNA, 900 bp, Artificial Sequence
  derived and/or modified sequence
atgaaggagagccggcagaccagcaagctgaagaacaacagccctggaacagctgagggctgcggcggcggcggcggcggcggcggcggcggcggcagcggcggcagcggcggcggcggcggcggcggcggcggcggggacaagagccccccaggcagcgctgccagcaagagggccaggacagcctacaccagcgcccagctggtggagctggagaaggagttccacttcaaccgctacctgtgccggcccaggagagtggagatggccaacctgctgaacctgtctgagcggcagatcaagatctggttccagaacagaaggatgaagtacaagaaggaccagaaggccaagggcctggccagcagcagcggcggccccagccctgctggcagccccccccagcccatgcagagcacagctggcttcatgaatgccctgcacagcatgacccccagctatgagagccccagccccccagccttcggcaaggcccaccagaatgcctatgccctgcccagcaactaccagccccccctgaagggctgtggggccccccagaagtacccacccaccccagccccagaatatgagccccacgtgctgcaggccaatggaggagcctacggcacccccaccatgcagggcagccctgtgtatgtgggcggcggcggctatgctgaccccctgcccccacctgctggccccagcctgtatggcctgaaccacctgagccaccaccccagcggcaacctggactacaatggagccccacccatggcccccagccagcaccacggcccctgtgagccccaccccacctacacagacctgagcagccaccacgcccccccaccccagggccgcatccaggaggcccccaagctgacccacctgtag

SEQ ID NO: 275048 - DNA, 900 bp, Artificial Sequence
  derived and/or modified sequence
atgaaggagagccggcagaccagcaagctgaagaacaacagccccgggacagctgagggctgcggcggtggcggaggtggtggtggcgggggaggctcaggcggctcaggcggcgggggcgggggcgggggcggcggcgataagagtcctcccggttctgctgccagcaagcgcgccagaacagcttacaccagcgctcagttggtggaactcgagaaggagttccactttaatcgttacctctgtaggccgagacgcgtggagatggctaacttgctgaatctctctgagaggcagataaagatttggttccagaatcggagaatgaagtataagaaggaccagaaggctaaggggcttgcctcttcaagcggcggtcctagcccagccggttcgccaccccagcccatgcaatccacagccggatttatgaacgccctgcattccatgacaccttcttacgagtcaccctccccaccagcctttgggaaggcacaccagaatgcctatgctctgcccagcaattaccagccccccttaaaaggctgtggagctccccagaaataccctccaactcccgctcccgagtatgagccacacgtgttgcaggccaacggcggagcttacggcactcccactatgcagggctcaccggtgtatgttgggggtggcggctatgccgatccactgccaccgccggcgggtcctagcctttatgggctgaaccatctctcccatcatccctctggtaatttggactacaatggcgcaccccctatggcgccaagtcaacaccacggaccttgtgaaccccaccccacatacactgatctgtcctctcaccatgctccgcctccccaggggcgcatacaggaggcaccgaagctcacacacctatag

SEQ ID NO: 275049 - DNA, 900 bp, Artificial Sequence
  derived and/or modified sequence
atgaaggagagccggcagaccagcaagctgaagaacaacagccccggcacagccgagggctgcggaggcggaggcgggggcggggggggtgggggtagtggcggaagcggcgggggcggaggcgggggcggcgggggggacaagtcccccccaggctcagccgccagcaaaagagctcgaactgcttatacctctgcacagctggtcgagctcgaaaaggagttccactttaatcggtatctatgccgcccaagacgggttgagatggccaacctgttgaatctatctgagaggcagattaagatatggttccagaacaggcggatgaagtacaagaaagatcagaaagccaagggtcttgccagctcatcgggggggcccagcccagctgggtctccaccccagccaatgcaatctacggctggcttcatgaacgccctgcactctatgacaccatcctatgagagcccttcacccccagcctttgggaaggcacaccagaacgcatacgccctcccatctaactatcagcctccgttgaaaggatgcggtgcaccccagaaatatccaccaacgccggcccccgagtacgagcctcacgtattgcaggcaaacggtggtgcctatggcacccccacgatgcaagggagcccagtttatgtgggcggcggcggctatgccgacccccttcctccacctgccggcccttcactgtacggactcaaccacctgagccaccatccttctggcaatctcgattataatggggccccacctatggcaccaagtcagcaccacgggccttgcgagccacatcccacgtataccgacttatcatctcaccatgcgcctccaccccagggcagaatacaagaggccccaaagctaacccacctctag

SEQ ID NO: 275050 - DNA, 900 bp, Artificial Sequence
  derived and/or modified sequence
atgaaagaaagccgacagacaagcaagctgaagaacaatagtcctggtacggcagaggggtgcggaggcggaggcggtgggggaggcggtgggggatcagggggatctggcggtgggggaggcggtggagggggtggggacaaatcgcctcccggaagtgccgcaagcaaacgtgctcggaccgcttataccagcgcccaactcgtggaattggaaaaggaattccatttcaatcggtacctgtgccgtcctcgtagagtcgagatggctaatctgttaaatttatctgagagacaaatcaaaatttggtttcagaataggaggatgaagtataagaaggaccagaaagcaaaaggtctggcctcatccagtggcggtccctcccccgctggctcgccaccccagccaatgcaatccacggccggttttatgaatgcactgcattcaatgaccccttcatacgagtctccgtcgccccctgcttttggcaaagcacaccagaacgcctacgcccttccttccaactaccagccacccttgaagggctgcggtgcccctcagaagtacccccctacgccagcacctgaatacgaaccccatgtgcttcaggccaatggcggagcatacgggaccccaacgatgcaggggtcccctgtctacgtgggcggtggaggttacgccgatccactccctccacctgctgggccatcactttatggcctcaatcacctgtctcatcatccttccggaaatttggattataatggagcacccccaatggctccctcccagcaccatggtccatgtgagcctcaccccacatataccgatctttcatctcatcatgcaccccctccacaggggagaattcaagaggctcccaagctaacccatctttag

SEQ ID NO: 275051 - DNA, 900 bp, Artificial Sequence
  derived and/or modified sequence
atgaaggaaagtcgacagacgagcaaactgaaaaacaattcacctggaaccgctgagggctgcggcggtggcggaggaggaggcggaggcggaggctctggcggaagtgggggaggtgggggaggcggaggcggtggcgacaagagtccccctggatccgcagctagcaaacgtgccagaacagcttacactagcgcacagctggtggagctggaaaaagagtttcattttaaccgttacctgtgcagacctcggagagtggagatggctaacctactaaacctgtcagagagacagatcaagatttggttccaaaacaggcgcatgaagtataaaaaggaccagaaagctaagggcctcgcatccagctcagggggaccatctccagccggttcaccgccacagcctatgcaaagtacagccggattcatgaacgccctccactcaatgacgccctcatacgaatcccctagtcccccagcttttggcaaggcacatcagaatgcctatgctcttccttcaaattatcaacctccactcaaggggtgcggcgcaccccaaaaatatcctcctactcctgctcctgagtacgaaccgcacgtcttgcaggcaaatggcggagcttatgggacacctaccatgcagggcagccctgtctacgtcggaggtggcggttacgccgatcctcttccaccaccagcgggaccctctctatacggtctcaatcatctgagtcaccatccctcaggtaatcttgactacaatggggctccaccaatggccccttcacagcaccacggcccatgcgaaccgcacccaacttacacagatttatcttcccaccacgctcctccacctcagggacgcattcaagaggccccaaagctcacgcatctgtag

SEQ ID NO: 275052 - DNA, 900 bp, Artificial Sequence
  derived and/or modified sequence
atgaaggagagcagacagaccagcaagctgaagaacaacagccccggcaccgccgagggctgcggcggcggcggcggcggcggcggcggcggcggcagcggcggcagcggcggcggcggcggcggcggcggcggcggcgacaagagcccccccggcagcgccgccagcaagagagccagaaccgcctacaccagcgcccagctggtggagctggagaaggagttccacttcaacagatacctgtgcagacccagaagagtggagatggccaacctgctgaacctgagcgagagacagatcaagatctggttccagaacagaagaatgaagtacaagaaggaccagaaggccaagggcctggccagcagcagcggcggccccagccccgccggcagccccccccagcccatgcagagcaccgccggcttcatgaacgccctgcacagcatgacccccagctacgagagccccagcccccccgccttcggcaaggcccaccagaacgcctacgccctgcccagcaactaccagccccccctgaagggctgcggcgccccccagaagtacccccccacccccgcccccgagtacgagccccacgtgctgcaggccaacggcggcgcctacggcacccccaccatgcagggcagccccgtgtacgtgggcggcggcggctacgccgaccccctgcccccccccgccggccccagcctgtacggcctgaaccacctgagccaccaccccagcggcaacctggactacaacggcgccccccccatggcccccagccagcaccacggcccctgcgagccccaccccacctacaccgacctgagcagccaccacgccccccccccccagggcagaatccaggaggcccccaagctgacccacctgtag

SEQ ID NO: 275053 - DNA, 675 bp, Artificial Sequence
  derived and/or modified sequence
atgagcagctacttcgtgaacagcaccttccccgtgaccctggccagcggccaggagagcttcctgggccagctgcccctgtacagcagcggctacgccgaccccctgagacactaccccgccccctacggccccggccccggccaggacaagggcttcgccaccagcagctactacccccccgccggcggcggctacggcagagccgccccctgcgactacggccccgcccccgccttctacagagagaaggagagcgcctgcgccctgagcggcgccgacgagcagccccccttccaccccgagcccagaaagagcgactgcgcccaggacaagagcgtgttcggcgagaccgaggagcagaagtgcagcacccccgtgtacccctggatgcagagaatgaacagctgcaacagcagcagcttcggccccagcggcagaagaggcagacagacctacaccagataccagaccctggagctggagaaggagttccactacaacagatacctgaccagaagaagaagaatcgagatcgcccacgccctgtgcctgaccgagagacagatcaagatctggttccagaacagaagaatgaagtggaagaaggagagcaagctgctgagcgccagccagctgagcgccgaggaggaggaggagaagcaggccgagtag

SEQ ID NO: 275054 - DNA, 675 bp, Artificial Sequence
  derived and/or modified sequence
atgtcctcttactttgtcaattccacctttccagtcactctcgcttccgggcaggaatctttcttggggcaactcccattatattcatccggttatgcagacccacttcgccactatccagccccctacggccctggacccggtcaggataagggattcgctacctccagttactaccctccagctggaggaggctatggcagggctgccccttgtgactatggccccgcacccgcattttatcgggagaaggagtctgcttgtgccctgtcgggcgcagatgaacagccacccttccaccctgagcctcggaagtccgactgtgcacaggacaagagtgtcttcggcgagaccgaggaacaaaaatgttcgacaccggtgtacccttggatgcagcgtatgaactcgtgtaatagctcgtccttcggcccaagtggacggaggggcaggcagacttacaccaggtaccagaccctcgagctcgaaaaggaatttcactataaccgctacttgacccgtagacggcgaatcgaaattgcacacgccctgtgcctgacagagcgtcagattaaaatttggtttcagaatcgccgcatgaagtggaaaaaggagagcaagctgctgtctgcatcacagctgtctgctgaggaagaagaggagaaacaagcagagtag

SEQ ID NO: 275055 - DNA, 675 bp, Artificial Sequence
  derived and/or modified sequence
atgagcagctactttgtgaacagcaccttccctgtgaccctggccagcggccaggagagcttcctgggccagctgcccctgtacagcagcggctatgctgaccccctgcggcactacccagccccctacggccctggccctggccaggacaagggctttgccaccagcagctactaccccccagctgggggcggctacggccgggccgccccctgtgactatggccctgccccagccttctaccgggagaaggagagcgcctgtgccctgtctggagcagatgagcagccccccttccaccctgagcccaggaagagtgactgtgcccaggacaagtctgtgtttggagaaacagaggagcagaagtgcagcacccctgtgtacccctggatgcagaggatgaacagctgcaacagcagcagctttggccccagcggcagaagaggccggcagacctacacccgctaccagaccctggagctggagaaggagttccactacaaccgctacctgaccaggagaagaagaattgaaattgcccacgccctgtgcctgacagagcggcagatcaagatctggttccagaacagaaggatgaagtggaagaaggagagcaagctgctgagcgccagccagctgtctgctgaggaggaggaggagaagcaggccgagtag

SEQ ID NO: 275056 - DNA, 675 bp, Artificial Sequence
  derived and/or modified sequence
atgagcagctacttcgtgaacagcaccttccccgtgaccctggcctcaggccaagagtctttcctgggccagctcccactttatagctccggctacgccgatccactaaggcattaccccgctccttatggacccggccccggacaagataaaggctttgccaccagctcatactatcccccggcgggtggcggatacgggagggccgctccctgcgattatggacccgctcctgcgttctacagagaaaaggaaagtgcctgcgctctctctggggccgacgaacagccccctttccacccagaacctcgaaaatccgattgtgctcaggataagtccgttttcggtgaaacagaggagcaaaagtgctccactcctgtctatccatggatgcagcgtatgaattcctgcaacagctcctcttttgggcccagcggccgaagaggccggcaaacatacacaagatatcaaaccttggagctcgagaaggagttccactataaccgttacctgactaggaggcgtcggatcgagatagctcatgccctctgtttgacagagaggcagattaagatctggttccaaaatagacgtatgaagtggaaaaaagagagtaaattactcagtgcatcgcagctctcagcggaagaagaggaagagaagcaagctgagtag

SEQ ID NO: 275057 - DNA, 675 bp, Artificial Sequence
  derived and/or modified sequence
atgagctcatatttcgtcaattccacttttcccgttacattggcctccgggcaggagtcttttctgggccagttgccactgtactcctctggttacgctgatccgctgcgccactatcccgctccatacggtcccggtcccggacaagacaaaggattcgccacttcaagttactatcctcccgctgggggagggtacgggagagctgctccttgcgattatggccctgcccctgcattctaccgcgaaaaagaatctgcttgcgcactgagcggtgccgacgagcagcctcctttccacccagagccaaggaaatctgactgcgcgcaggacaagagcgtttttggagagactgaggaacagaagtgttcgacacccgtgtacccttggatgcagaggatgaactcctgtaatagcagcagctttggtccctcaggcaggaggggtcggcagacctatacccgctaccagactctggaattagagaaagagtttcactacaatcgctacctgactaggcgcaggcggatcgagattgctcatgccctgtgcctaactgagcgtcagataaagatatggtttcagaataggcgaatgaaatggaagaaagagagcaaattactgtctgcttctcaactgtcggcagaagaagaggaagagaagcaagctgagtag

SEQ ID NO: 275058 - DNA, 675 bp, Artificial Sequence
  derived and/or modified sequence
atgtcgtcttactttgtgaactcaacatttcccgtgacacttgctagcggccaggaaagtttcctcggacagctgcctctatatagttcggggtacgccgaccccctgaggcactaccccgctccctatgggccaggaccaggacaggacaagggcttcgccactagcagctattacccaccggctggggggggatatgggcgcgccgcaccttgcgattacggacctgcaccggcgttctatcgggagaaggaatcagcctgtgctttaagtggtgctgacgagcagccaccctttcaccccgagcctcgcaagtccgactgcgcccaggacaagtctgtattcggggagactgaagaacaaaagtgctccaccccagtgtacccctggatgcagagaatgaactcatgtaattcttcgagctttggaccaagcggtcgacgggggcgtcaaacttatacccgataccaaaccctggaactagagaaagaattccattacaaccgttacctgactagacgcaggaggatcgaaattgcacatgcactatgtctcacagagaggcaaatcaaaatctggtttcagaaccgaagaatgaagtggaaaaaggaatcgaaacttttgagtgcaagtcagctgagcgctgaagaagaggaggagaagcaggctgagtag

SEQ ID NO: 275059 - DNA, 675 bp, Artificial Sequence
  derived and/or modified sequence
atgagcagctacttcgtgaacagcaccttccccgtgaccctggcctctggccaggagtcatttttgggacagcttcctctttacagttccgggtacgcggatcctctcagacattacccagccccctacggtccaggtccaggccaggacaaggggtttgccacaagctcttattatcctccggccggcggtggatacgggcgagccgccccctgtgattacgggcctgccccagcgttctatcgcgagaaagagtccgcctgcgcactcagtggggctgatgaacaacctccctttcacccagagcctcgaaaaagcgattgtgcccaggataaaagtgtttttggagagacagaggaacagaaatgctctacacccgtgtacccctggatgcagcgaatgaactcttgcaatagttctagttttggccctagtggacggcggggccggcagacttacactcgttatcagactctggagctcgagaaggaattccactacaacaggtacttaacgaggcgcaggcgtattgagattgcgcatgccctttgcctgaccgagcggcagatcaaaatttggtttcagaatcgtcggatgaagtggaaaaaggagagcaagctcctctccgcctcacagcttagtgctgaggaagaagaagaaaagcaggcagaatag

SEQ ID NO: 275060 - DNA, 675 bp, Artificial Sequence
  derived and/or modified sequence
atgagtagctactttgtcaattcaacattcccagtgactctcgcctccggtcaggagtcctttctggggcagctcccactgtatagctctggatatgctgaccccctgagacattacccagctccctatggcccaggcccaggccaagacaaaggcttcgccacttcaagctactaccctccagctgggggaggctatggaagagcggctccatgtgactacggcccagccccagcattttatagagagaaagagagtgcttgcgctctgtccggcgctgacgagcaaccgccttttcatcccgaacctcgcaagtctgattgcgcacaagacaagagcgtctttggcgagacagaggagcagaagtgtagtacccctgtgtacccatggatgcagcgcatgaactcctgcaattcctcgtcttttggcccatctggacgcagaggccgtcagacctatacaaggtaccaaacactcgagctcgagaaggagttccattacaaccgttacctgaccaggcgcaggagaattgaaattgctcatgcactctgcctcacagaaagacagataaagatctggttccagaaccgtcggatgaagtggaagaaggaaagcaaactgctctccgccagccaactgtccgctgaagaggaagaagaaaagcaggccgagtag

SEQ ID NO: 275061 - protein, 196 aa, Artificial Sequence
  derived and/or modified sequence
MCCKVMLLGDTGVGKTCFLIQFKDGAFLSGTFIATVGIDFRNKVVTVDGVRVKLQIWDTAGQERFRSVTHAYYRDAQALLLLYDITNKSSFDNIRAWLTEIHEYAQRDVVIMLLGNKADMSSERVIRSEDGETLAREYGVPFLETSAKTGMNVELAFLAIAKELKYRAGHQADEPSFQIRDYVESQKKRSSCCSFM

SEQ ID NO: 275062 - DNA, 591 bp, Artificial Sequence
  derived and/or modified sequence
atgtgttgtaaagttatgctcttgggcgacaccggggtcggcaaaacgtgtttcttgatccagtttaaagacggagccttcctgtcaggcacatttatcgccacagttggtatcgattttaggaacaaagtagtgaccgtggatggtgtccgcgtaaagcttcaaatttgggacactgccggccaggagagatttcgctctgttacccacgcttactaccgggatgcccaggccctgctgttgctgtacgacatcacaaataaatcctcctttgacaacattcgggcttggctgactgagatccatgaatacgcgcagagggatgtggtaatcatgttactagggaataaggcagatatgagtagtgagcgcgtcattaggtctgaggacggcgaaacattggccagggagtatggcgtgccatttctcgaaacctccgctaaaacagggatgaacgttgagctcgcattcctcgctattgccaaggaattgaaataccgggcaggtcaccaggctgacgagccttctttccagatcagagactatgtcgagtcccagaaaaagcggtcctcgtgttgctctttcatgtag

SEQ ID NO: 275063 - DNA, 591 bp, Artificial Sequence
  derived and/or modified sequence
atgtgctgcaaggtgatgctgctgggggacacaggagtgggcaagacctgcttcctgatccagttcaaggatggagccttcctgagcggcaccttcatcgccaccgtgggcatcgacttcaggaacaaggtggtgacagtggatggagtgcgggtgaagctgcagatctgggacacagctggccaggagcgcttccgctctgtgacccacgcctactacagagatgcccaggccctgctgctgctgtatgacatcaccaacaagagcagctttgacaacatccgggcctggctgacagagatccacgagtatgcccagagagatgtggtgatcatgctgctgggcaacaaggctgacatgagcagcgagagggtcatccgctcagaagatggagagaccctggcccgggagtatggagtgcccttcctggagaccagcgccaagacaggcatgaatgtggagctggccttcctggccatcgccaaggagctgaagtaccgggccggccaccaggctgatgagcccagcttccagatccgggactatgtggagagccagaagaagaggagcagctgctgcagcttcatgtag

SEQ ID NO: 275064 - DNA, 591 bp, Artificial Sequence
  derived and/or modified sequence
atgtgctgcaaggtgatgctgctgggcgacaccggcgtgggcaagacatgctttctgatccagtttaaagatggcgcctttctaagtggcacctttatcgctaccgtgggcatcgattttcgtaataaagtggtcaccgtggacggcgtccgcgtgaagctgcagatttgggacacggccggtcaagaacgatttcggtccgtcactcacgcctactatcgcgacgctcaagcattgctgctgttgtacgatattacaaacaagagctctttcgacaacatacgagcctggttgaccgaaattcatgaatatgctcagcgggatgtcgtgattatgctgctggggaacaaggccgatatgagcagcgaacgcgtgattcggagtgaggacggggaaacgctcgcccgggagtacggcgtaccatttctcgagacgtctgcaaagacgggtatgaacgtcgaactggcattcctcgctatagccaaagaactaaaatatagagctggacatcaggctgatgaacccagctttcaaatcagagattacgtcgagagccagaagaagcggtcgagctgttgtagttttatgtag

SEQ ID NO: 275065 - DNA, 591 bp, Artificial Sequence
  derived and/or modified sequence
atgtgctgcaaggtcatgctgctgggagataccggagtgggcaaaacatgcttcctcattcagttcaaggacggtgcatttctgagtgggacctttatcgcaaccgtcggaatagacttccggaacaaggtcgttaccgtggacggagtccgtgtgaagctgcagatttgggatactgcaggccaggaacgctttcgtagtgtgacacacgcctactatagggacgctcaagctctacttttgctgtatgacatcaccaataagtcttcttttgataacattcgcgcatggctgaccgagatccacgagtatgcccagagagatgtagtgattatgctgctgggcaataaggccgacatgtccagcgagcgggttatacgttcagaggatggggagacactggcgcgtgaatatggcgtcccatttctggaaacgagcgcaaagacagggatgaacgtagaattggcatttctggcaatcgctaaggaactgaagtaccgggcaggccatcaagcagacgagccttcctttcaaattagggactatgtcgagtctcagaagaaaaggtcttcctgttgtagctttatgtag

SEQ ID NO: 275066 - DNA, 1494 bp, Artificial Sequence
  derived and/or modified sequence
aaagctctcccctggtgggacattctgggcacaaccaacaggccgggggaaatgagaggtgatccatactaaagggtcaaagtccccgcaccaggcagaggccccaaaacaccgcagcgtacatgtgctgcaaggtgatgcttctgggagacacaggcgtcggcaaaacatgtttcctgatccaattcaaagacggggccttcctgtccggaaccttcatagccaccgtcggcatagacttcaggaacaaggtggtgactgtggatggcgtgagagtgaagctgcagatctgggacaccgctgggcaggaacggttccgaagcgtcacccatgcttattacagagatgctcaggccttgcttctgctgtatgacatcaccaacaaatcttctttcgacaacatcagggcctggctcactgagattcatgagtatgcccagagggacgtggtgatcatgctgctaggcaacaaggcggatatgagcagcgaaagagtgatccgttccgaagacggagagaccttggccagggagtacggtgttcccttcctggagaccagcgccaagactggcatgaatgtggagttagcctttctggccatcgccaaggaactgaaataccgggccgggcatcaggcggatgagcccagcttccagatccgagactatgtagagtcccagaagaagcgctccagctgctgctccttcatgtgaatcccagggggcagagaggaggctctggaggcacacaggatgcagccttccccctcccaggcctggcttattccaagaggctgagccaatggggagaaagatggaggactcactgcacagccgcttcctagcagggagctatactccaactcctacttgagttcctgcggtctccccgcatccacagggagggtaaaacacttagcttttattttaatagtacataatttaataccaaaaaaggcgcctggatccccaaaaaaccgaggctgggagctagtggcccttttgctttctaggacttggggggccggccctccctcctaagcataacaaaggtggtgttgctccagctcagccccaggggacacagatgcactttgggggtgagggcaggtaatgactccatcgcaccctcagttcagctggacagaggctcaggtgaccccagccttcactgtctcccgctctccaggagcttatcttcgccccatctcccaaataagtgggcccttgtgctgtgaggaagaccaaagcctcagggaagataagagatatggagatgggagggggaggacaaggggcagagagtagggtctagctggctatctctggccttactaacacccccctggaggcatgccccttttctccagcacacaagcacattggggcacctggaaatattggttccaggctcctgttctctggacttcagatcctgggggagcccctcccccccctgaatccctggcttagctaccttcctgcctgtgcacct

SEQ ID NO: 275067 - DNA, 591 bp, Artificial Sequence
  derived and/or modified sequence
atgtgctgcaaggtgatgctgctgggcgacaccggcgtgggcaagacctgcttcctgatccagttcaaggacggcgccttcctgagcggcaccttcatcgccaccgtgggcatcgacttcagaaacaaggtggtgaccgtggacggcgtgagagtgaagctgcagatctgggacaccgccggccaggagagattcagaagcgtgacccacgcctactacagagacgcccaggccctgctgctgctgtacgacatcaccaacaagagcagcttcgacaacatcagagcctggctgaccgagatccacgagtacgcccagagagacgtggtgatcatgctgctgggcaacaaggccgacatgagcagcgagagagtgatcagaagcgaggacggcgagaccctggccagagagtacggcgtgcccttcctggagaccagcgccaagaccggcatgaacgtggagctggccttcctggccatcgccaaggagctgaagtacagagccggccaccaggccgacgagcccagcttccagatcagagactacgtggagagccagaagaagagaagcagctgctgcagcttcatgtag

SEQ ID NO: 275068 - protein, 286 aa, Artificial Sequence
  derived and/or modified sequence
MSAPLDAALHALQEEQARLKMRLWDLQQLRKELGDSPKDKVPFSVPKIPLVFRGHTQQDPEVPKSLVSNLRIHCPLLAGSALITFDDPKVAEQVLQQKEHTINMEECRLRVQVQPLELPMVTTIQMSSQLSGRRVLVTGFPASLRLSEEELLDKLEIFFGKTRNGGGDVDVRELLPGSVMLGFARDGVAQRLCQIGQFTVPLGGQQVPLRVSPYVNGEIQKAEIRSQPVPRSVLVLNIPDILDGPELHDVLEIHFQKPTRGGGEVEALTVVPQGQQGLAVFTSESG

SEQ ID NO: 275069 - DNA, 861 bp, Artificial Sequence
  derived and/or modified sequence
atgagcgcccctttggacgcagctctgcacgctctacaggaggaacaggcacgactgaagatgagactgtgggatctgcagcagctgcgaaaagaactcggtgactcccctaaggataaggtgcccttttccgttcccaaaatccctttggtgtttcgtggccacacgcaacaggacccagaggtcccgaaatcactggttagcaatctgagaattcattgccctcttctggctggctcagccctgatcaccttcgatgacccaaaggttgctgagcaggtactccagcagaaagagcacactataaatatggaggaatgccgactgcgggtgcaggttcagccgctggagcttcctatggtaaccactatccaaatgagtagccagctttccggccggagagtgctagtgaccggctttccagcatcgcttcgcttgagcgaggaagaactgctggacaaactggagatcttcttcggcaaaacgcgcaatggtgggggcgacgttgatgtgcgcgagctgctcccagggtcagtcatgctgggtttcgctagggacggtgtggcccagcgtctgtgccagatcgggcagtttacagtacctctagggggacagcaggtcccccttagagtctcgccctacgtgaacggagagatccagaaagccgagatcagatcccagcccgtgcctcgtagcgtgttagtactgaacatccccgatatcctcgatggacctgagctccatgatgtcctggagatccattttcagaagcccacgagaggtggaggcgaagtggaagcacttacagtggtgccccagggacagcaaggactggccgtctttacttctgagtctgggtag

SEQ ID NO: 275070 - DNA, 1241 bp, Artificial Sequence
  derived and/or modified sequence
ggcagggggcggcatgtgagcgccagaaggcagggatttcacggaaatgaaagtggaagcaaacagcctgcgagcagagcctcctgaggtgtatttcgggtcttgctggggctgagagagaccacagccctttggggggtacaaacaagagttcagttgctgtgaattctgccactgtgcccagctctgaagcctcagctcttgccaaacagacccgagacccatgtcagccccactggatgccgccctccacgcccttcaggaggagcaggccagactcaagatgaggctgtgggacctgcagcagctgagaaaggagctcggggactcccccaaagacaaggtcccattttcagtgcccaagatccccctggtattccgaggacacacccagcaggacccggaagtgcctaagtctttagtttccaatttgcggatccactgccctctgcttgcgggctctgctctgatcacctttgatgaccccaaagtggctgagcaggtgctgcaacaaaaggagcacacgatcaacatggaggagtgccggctgcgggtgcaggtccagcccttggagctgcccatggtcaccaccatccagatgtccagccagttgagtggccggagggtgttggtcactggatttcctgccagcctcaggctgagtgaggaggagctgctggacaagctagagatcttctttggcaagactaggaacggaggtggcgatgtggacgttcgggagctactgccagggagtgtcatgctggggtttgctagggatggagtggctcagcgtctgtgccaaatcggccagttcacagtgccactgggtgggcagcaagtccctctgagagtctctccgtatgtgaacggggagatccagaaggctgagatcaggtcgcagccagttccccgctcggtactggtgctcaacattcctgatatcttggatggcccggagctgcatgacgtcctggagatccacttccagaagcccacccgcgggggcggggaggtagaggccctgacagtcgtaccccaaggacagcagggcctagcagtcttcacctctgagtcaggctaggggcctccccttctcatcctccccacccccccgccaaggttctcacactggcctgggcttgggtgcccatataggaggtctgtatgttcaccaacagtgcggaggggtcacacattgcaaaacactgcccagaacagtaaaaagagcctgcatgcca

SEQ ID NO: 275071 - DNA, 861 bp, Artificial Sequence
  derived and/or modified sequence
atgtctgcccccctggatgctgccctgcacgccctgcaggaggagcaggcccggctgaagatgaggctgtgggacctgcagcagctgaggaaggagctgggggacagccccaaggacaaggtgcccttctctgtgcccaagatccccctggtgttccggggccacacccagcaggaccctgaggtgcccaagagcctggtgagcaacctgcgcatccactgccccctgctggccggcagcgccctgatcacctttgatgaccccaaggtggccgagcaggtgctgcagcagaaggagcacaccatcaacatggaggagtgccgcctgcgggtgcaggtgcagcccctggagctgcccatggtgaccaccatccagatgagcagccagctgtctggaagaagagtgctggtgacaggcttccctgccagcctgcggctgtctgaggaggagctgctggacaagctggagatcttcttcggcaagaccagaaatggaggaggagatgtggatgtgcgggagctgctgcccggctctgtgatgctgggctttgccagagatggagtggcccagaggctgtgccagatcggccagttcaccgtgcccctgggcggccagcaggtgcccctgcgggtgagcccctacgtgaatggagagatccagaaggccgagatccgcagccagcctgtgcccaggtctgtgctggtgctgaacatcccagacatcctggatggccctgagctgcatgatgtgctggagatccacttccagaagcccacccggggcggcggggaggtggaggccctgactgtggtgccccagggccagcagggcctggccgtgttcaccagcgagagcggctag

SEQ ID NO: 275072 - DNA, 861 bp, Artificial Sequence
  derived and/or modified sequence
atgagcgcccccctggacgccgccctgcacgccctgcaggaggagcaggctcgtctgaagatgaggctgtgggacctccagcaacttcgaaaggagttaggtgattctccgaaagacaaggtgccgttcagtgtgccaaagattcctctagtgtttaggggacacacccagcaggatccggaagtgcccaagtcattagtcagtaatcttaggatccactgcccattgctggcaggaagcgccctcataacttttgatgaccctaaagtggcagagcaggtgctgcagcaaaaagaacataccataaacatggaggaatgccgtttacgagttcaggtccagccactagaacttcctatggtgacgacaattcagatgagcagccagctaagcggcaggagagttcttgttaccgggtttccggccagcctcagacttagcgaagaagagctcctggataaactggagatctttttcggtaaaacacgaaatgggggcggtgatgtagacgtcagggaactgcttcccggctccgtgatgctgggtttcgcacgcgacggcgtggcccagagactgtgtcagatcggacaatttacagtgccacttggcggtcagcaagtgccgctgagggtcagcccatatgtgaacggtgagatacaaaaagctgagatccgaagtcaacctgttccccgaagtgtcctcgtgctgaacatcccagatattctcgatggccccgagctccatgatgtgctagagattcactttcaaaagcctactagaggcggaggggaggtggaagcgctgactgtcgttccccagggccaacaaggactggcggttttcacaagcgaatctggatag

SEQ ID NO: 275073 - DNA, 861 bp, Artificial Sequence
  derived and/or modified sequence
atgtccgctcccctcgacgctgccctacacgcactccaggaagaacaggctcgcctgaaaatgagactctgggacctccagcaactcaggaaagaattgggggactctccgaaagacaaagtgcctttttcggtgcctaagatcccactggtcttccggggacacacgcagcaggatcctgaggttcccaagtccctggtcagcaatctccggatccactgtcccctcctggcaggcagcgccttgattacctttgatgatccaaaggtagctgaacaagtgctgcagcaaaaagaacacacaatcaatatggaagagtgtaggctccgggttcaggtgcagccactcgaactgcccatggtcacaacaatccaaatgtcctcccaactttcgggccgacgtgtactggtcacaggattcccagcgagcctgcggctgagcgaggaggagttgttggacaagctggaaatcttttttggaaagaccagaaacggaggcggagacgtggatgtgagggagctcctgccaggaagcgtgatgctggggtttgccagagatggtgtcgctcagcgcttgtgccagatcggtcagttcacagtcccacttggcggacagcaggtgcccctgagggttagtccctatgtgaatggcgagatccagaaggctgaaattaggagccaacccgtaccaaggagcgttctcgtgctgaacatcccagacattctggacggccctgagctccatgatgtcctggaaatccactttcaaaaacccacacgcggtggaggcgaagtagaggctttgaccgtggtacctcagggccagcaaggcttagccgtgtttaccagcgaatctggctag

SEQ ID NO: 275074 - DNA, 861 bp, Artificial Sequence
  derived and/or modified sequence
atgagcgcccccctggacgccgccctgcacgccctgcaggaggagcaggccagactgaagatgagactgtgggacctgcagcagctgagaaaggagctgggcgacagccccaaggacaaggtgcccttcagcgtgcccaagatccccctggtgttcagaggccacacccagcaggaccccgaggtgcccaagagcctggtgagcaacctgagaatccactgccccctgctggccggcagcgccctgatcaccttcgacgaccccaaggtggccgagcaggtgctgcagcagaaggagcacaccatcaacatggaggagtgcagactgagagtgcaggtgcagcccctggagctgcccatggtgaccaccatccagatgagcagccagctgagcggcagaagagtgctggtgaccggcttccccgccagcctgagactgagcgaggaggagctgctggacaagctggagatcttcttcggcaagaccagaaacggcggcggcgacgtggacgtgagagagctgctgcccggcagcgtgatgctgggcttcgccagagacggcgtggcccagagactgtgccagatcggccagttcaccgtgcccctgggcggccagcaggtgcccctgagagtgagcccctacgtgaacggcgagatccagaaggccgagatcagaagccagcccgtgcccagaagcgtgctggtgctgaacatccccgacatcctggacggccccgagctgcacgacgtgctggagatccacttccagaagcccaccagaggcggcggcgaggtggaggccctgaccgtggtgccccagggccagcagggcctggccgtgttcaccagcgagagcggctag

SEQ ID NO: 275075 - protein, 456 aa, Artificial Sequence
  derived and/or modified sequence
MTTTFLQTSSSTFGGGSTRGGSLLAGGGGFGGGSLSGGGGSRSISASSARFVSSGSGGGYGGGMRVCGFGGGAGSVFGGGFGGGVGGGFGGGFGGGDGGLLSGNEKITMQNLNDRLASYLDKVRALEEANADLEVKIHDWYQKQTPTSPECDYSQYFKTIEELRDKIMATTIDNSRVILEIDNARLAADDFRLKYENELALRQGVEADINGLRRVLDELTLARTDLEMQIEGLNEELAYLKKNHEEEMKEFSSQLAGQVNVEMDAAPGVDLTRVLAEMREQYEAMAEKNRRDVEAWFFSKTEELNKEVASNTEMIQTSKTEITDLRRTMQELEIELQSQLSMKAGLENSLAETECRYATQLQQIQGLIGGLEAQLSELRCEMEAQNQEYKMLLDIKTRLEQEIATYRSLLEGQDAKMAGIAIREASSGGGGSSSNFHINVEESVDGQVVSSHKREI

SEQ ID NO: 275076 - protein, 291 aa, Artificial Sequence
  derived and/or modified sequence
MTGTRSRPQPAQNATTANTSRPLKSSGTRYENELALRQGVEADINGLRRVLDELTLARTDLEMQIEGLNEELAYLKKNHEEEMKEFSSQLAGQVNVEMDAAPGVDLTRVLAEMREQYEAMAEKNRRDVEAWFFSKTEELNKEVASNTEMIQTSKTEITDLRRTMQELEIELQSQLSMKAGLENSLAETECRYATQLQQIQGLIGGLEAQLSELRCEMEAQNQEYKMLLDIKTRLEQEIATYRSLLEGQDAKMAGIAIREASSGGGGSSSNFHINVEESVDGQVVSSHKREI

SEQ ID NO: 275077 - DNA, 1371 bp, Artificial Sequence
  derived and/or modified sequence
atgacgactacttttctgcaaacatcctcatccacgttcgggggcggcagcactcggggcggaagcttgctcgctgggggcggcggctttggcggcggatccctgtccggcggtggagggagtcgtagcatatcagccagctctgcccggtttgtgtcctccgggagcggaggagggtacgggggcggaatgcgcgtctgtggtttcgggggtggggccggcagcgtgttcgggggaggatttggcggcggagtgggaggcggattcggcgggggcttcggcggaggggatggagggctgctaagcgggaatgagaaaattacaatgcagaatctgaatgatcggctagcctcatacctcgataaagtgcgagcgttggaggaggctaacgccgaccttgaagtcaaaatccacgactggtaccagaaacaaacccctaccagccccgagtgcgattactcccaatattttaagaccatcgaagaactcagggacaaaatcatggccactaccatagataatagcagagtcattcttgagatagacaatgctagattagctgccgacgacttcagactgaaatacgagaacgagcttgcactaaggcaaggagttgaagctgacatcaatgggttgcgtcgagtcctggacgaacttactcttgcacggacagatctggagatgcaaatcgaagggcttaacgaggagctcgcttatctgaaaaagaaccatgaagaggaaatgaaggagttctcctcccaacttgcaggacaggttaatgtggaaatggatgcagccccgggagtcgacctgactagagtactggcggagatgagagaacaatacgaggccatggctgaaaagaatcggagagacgttgaagcatggtttttttcaaagacagaagagctgaataaagaagtggcttctaatactgagatgatacaaacttctaaaacagagatcacagatctgagaagaacaatgcaggaactggagattgagctgcaaagccagctctctatgaaggccggactggagaacagtcttgccgaaacagagtgcagatacgcaacccagctgcagcaaatccaggggcttatcggcgggctcgaggctcagttgagcgagctgagatgtgaaatggaggctcagaaccaggagtacaagatgctccttgatataaagacccggctggaacaggagatagcaacgtatagatccctcctggaaggtcaggacgctaagatggcagggatcgctatccgtgaagcctcctccgggggaggaggaagtagctcaaactttcacataaacgtggaggagagcgtagatggacaggtcgtgtcctcacacaagcgagaaatctag

SEQ ID NO: 275078 - DNA, 876 bp, Artificial Sequence
  derived and/or modified sequence
atgacagggacacgctctaggcctcagcccgcccagaatgcgaccaccgccaacaccagtagaccccttaagtcttcggggacacggtacgagaacgaactagctctccggcagggcgtagaagctgacattaatggtctccggagagtcctggatgagcttacactcgcccggacggacctagagatgcaaatcgagggacttaatgaagaactggcatatcttaaaaagaaccacgaggaagaaatgaaggaattctcgtctcagctagcaggccaagtgaatgtagagatggatgccgcgcccggcgttgaccttactcgcgtgctggccgagatgcgggagcaatatgaagccatggccgagaagaaccgacgcgacgtggaggcctggtttttttccaaaaccgaggaacttaataaggaagtcgcttccaacaccgagatgattcaaacatccaagacagagattacagacctgcggcgcaccatgcaggagctagagatcgagctgcagtctcaactgtccatgaaggccggtctcgagaactctctcgcagagacagagtgcagatacgccacccaactgcagcagattcagggcttaataggcggcctggaagcacagttgagcgaactgagatgcgagatggaggctcagaaccaggagtacaagatgctcttggacattaaaaccaggctcgaacaggagattgctacttaccggtctttattggagggacaggatgccaagatggcaggaatcgccatccgggaggcaagttccggcgggggaggctccagttccaactttcatatcaatgttgaagagagcgtggacggacaggtggtgtcgtcacacaaacgggagatctag

SEQ ID NO: 275079 - DNA, 1371 bp, Artificial Sequence
  derived and/or modified sequence
atgacgacaacatttctgcagacgagctcttcaacttttggagggggctctacgagaggagggagcctccttgcaggtggcggagggtttggaggcggaagtcttagtggtggaggagggtccagatcaattagtgcttcctcggcacgtttcgtgtcaagcggcagcggtggcggttatggtggagggatgagggtatgtggtttcggcggaggcgcaggcagcgtgttcggcggaggtttcgggggaggggttgggggtggttttggggggggcttcggaggcggagatggcggtctgctgagcggtaatgagaagattaccatgcaaaatctcaatgaccgcctggcttcgtatctggacaaggtgcgggcactagaagaggctaacgctgatttggaagtgaaaattcatgactggtatcagaagcaaacccctacgagccctgaatgcgactattcacaatattttaagaccatcgaagagctgcgtgacaagattatggctaccacaatcgacaactcacgggttatactggagatcgataacgctagactggctgccgatgatttccggcttaagtacgagaacgagctagctctccgccagggcgttgaggcagacattaatgggctacgccgggttcttgatgagctgacgctggcacgcactgatctggaaatgcagattgaagggcttaatgaggagctggcctatttaaaaaaaaaccacgaggaagagatgaaagagttttctagccagctcgcaggccaagttaacgtggaaatggacgccgccccgggcgtagacctgacccgtgtgctggcagaaatgcgcgaacaatatgaagccatggctgaaaaaaacagacgcgacgtggaagcctggtttttcagcaagaccgaagagctcaacaaagaggtggcctctaatacagagatgatccaaacttctaagaccgaaatcactgacctgagacgaacaatgcaggagttggaaattgaactacagtcccagctgtccatgaaggctggcctagagaatagcctggctgagacggaatgccgctacgccacacaattgcagcagattcagggccttatagggggactggaggctcagttgagcgaactgcgttgtgaaatggaggctcagaatcaagagtacaaaatgctactggatatcaaaaccaggctcgagcaggagattgccacataccgtagcctgttggagggccaggacgctaaaatggccggcatcgccattcgggaagcttcctcaggcggcggaggcagctccagtaatttccatattaatgtggaagaatccgtggacggtcaggtagtgtctagccacaaacgggagatctag

SEQ ID NO: 275080 - DNA, 756 bp, Artificial Sequence
  derived and/or modified sequence
atgactggtacacggtccaggccccagcctgctcaaaatgcaactacagctaacactagcaggcctctgaaaagctccggcactcgctatgaaaatgagctggccctgcgccagggggtggaggccgacattaacggacttaggagagtgttggatgaacttaccttggctcggactgatctcgagatgcagattgaaggtctgaatgaggaattagcctatctgaagaaaaatcacgaagaggagatgaaggagttcagcagccaactggccggtcaggtcaacgtagagatggacgctgctcctggagtggacctcactagggtcttagcggaaatgcgcgagcaatacgaagctatggcggagaagaatcgccgcgacgtggaggcatggttcttctctaaaacggaggagctaaataaggaagtagcctcaaatacagagatgatccagacatcaaagacagagattactgatcttaggaggaccatgcaggagctggagatcgagctgcaatcccagctaagcatgaaggccggtctagaaaactccctggccgagacggaatgccgatacgcaactcaattgcagcagattcaggggctcatagggggattggaggcgcagctgtccgagctgaggtgtgagatggaagcacaaaaccaggagtacaaaatgctcctggatatcaagacacgattagagcaggaaatcgccacctatcggtcgttgctggaaggccaggatgcaaaatag

SEQ ID NO: 275081 - DNA, 663 bp, Artificial Sequence
  derived and/or modified sequence
atgacgggcacgaggtcccgtccccaacccgcacagaatgcaactaccgcaaacacatctagacccttgaagagctcgggcacacgctacgaaaacgaactggctctacgtcagggagttgaggctgatatcaacggattacgacgcgtgcttgatgagctgactttagcgcgcacagacctggaaatgcagatcgaaggtctgaatgaggagcttgcatatctgaagaagaaccacgaggaagagatgaaggaattttcatcccagctcgcgggacaggtgaacgtggagatggatgctgcccccggcgtcgatctgacaagggtcctagccgagatgcgggagcagtatgaagccatggctgagaaaaaccgacgcgacgttgaagcttggtttttcagtaagacagaggaactgaacaaagaagtcgcgagtaacaccgaaatgatccagacctcaaaaaccgaaatcactgatctgagaaggaccatgcaggaactggagatcgagctccagtctcagctgagtatgaaagcaggcctcgagaacagcttagccgaaactgaatgccggtatgccacccagctgcagcagatacaagggttgatcggagggcttgaggcccagctctccgagctgcgttgcgaaatggaagcacagtag

SEQ ID NO: 275082 - DNA, 5237 bp, Artificial Sequence
  derived and/or modified sequence
aaatgtactcagcaccctgctaaggaggctggagaccccatcacggccatggcaatcccgaaggaggagctgtttcaaggttggttatgaacatgtaaccccagagccccgctgctgtagcctggactgggacccccttctgccccctccctagctgtcctgttctggcctccagcacccacaaaccaccacccccaacttaacttctcaggaagccttggagctggagggagaggcctggctgcacccccagctgggactgcccagaggcgcttgtccctgcccatgaaagcctcccttgtcacagctgaaaccttccctctgcctcaggggcccctggaatgtggctgcggggcggggtctgggcccacacaggtggggcaggtgactgtcaggtctcaggcctgagtgtcaggaatgaagcctgcctttgtgtgtgcacagtgcagggtggggctggactggggacacttttctgtctcagcctggagacctgggataggagggagaggggagtggggaagttgaggggagtgcctttacatcctgctggtcatcgtggccacttcagtctgttgagcatttcctgtgagtcatcttgctccaactgagagtcaggctgagctggagttatttccattttcctgattggtagactaaggctcagagagaggaggcggcattacccaaagccgcacagctggtaaatgggaaaagaggggtttaaaggtaagtctctgggctccaggacacaccccctctccctggcatttccctggggaacaggagaggtgtgggagggttctaaggttgttggagacttcattctccttgtgccctcaaatgctcactatggccctgaggggagtctgtgttaatggcctaagtttaaatcaggaaccaggctcagagaggctgagtctctttccactgggctgcactgcctcattctaaggagaaaaggccagctccacagatggccccatctggctgcagtgggcaaaggtcagaaactggcacagcatcctgggcaggctgcctggggcagggcccggggctacagcctgggctggggccagacagagctttatcttcgcaaggccatcccacctggtgctaatgaggaggctccgggccccacccagatctggagctcacagtagcggtttggactgaaaccagggatttgtgcgtggggcagtgaggggggcagctgccgcccctggcctgggcctgagagtatagagaaagccacctcgaggggctgctggaggagagtcaggtgcagaaggggatctggctggggtccagcccttcctcaccctggggtgaaaggcgagtaattgttcttgagttaattgctggggccacaatgtctgcagaggcttttaatgagctctggatgatctgagtttgattatttttctttcggaggaaaagacaataccctcccacccatgagacaataccacactgtctgtgcccagcattggaggccaggctcactgcgaagatggatgagaaggaacccacccccagccttgctggctggcagttccccttgccagcccagctcagatgcaggaatttggggtctgcaggaaggactctttccctgtgccctgtttggttgagggtgtgaggacctgtttgagtcctggctttgccccttaccagtggtgccacctggcacaagttgcttcacctctccaagtttcaatttcattctttctgaatcttgggtgggggtcaccctctgttgtgaggatgagaggaggtgatggatgcaaaagtgctttgtaaatcacaaagtgcagggtagaagtaaaggattatgctattatagcaaaataagaacctaagaacaacctgcgttgccccataggagctggctatggaaggtcgatgccgttgagcctaagaacatgctcaggctcacagggcatgttctgatgcccaacgacaaagcccctcctggtgagggcactcaggcgcaggtgccggtcatgcaccctggcccctgcatgtctggcacctgggtggggatccaggagggggcaggatgggggctcttgggccacagggcttccctggaagtgagagttgagagcgccccttgccacagggaaacagagacttaaaaaggtaaatgtccacagtcttaccatggtaattggtagggtcaggatttgaacccaggcctcacagtcttaccatgataattgataaagccaggattcaaacccgggcctgagggactccagagccctgtccacttcaccatgctgcaacctgggctaggaatcctcctcctgagtttctgtaagccctggggccaggtccagagggctgagccacacctccaagtggcactgcccacaggtatcaggtgtccctggaaaggtgtccctgagctggtggcagagaaaagggctctcctgagtgttcaactccccgtctgtgtgaagcaatgccttggtcttcaagatctccggtgtcttccagcctgcctgccagtctcccttctcttcccttccacagcattcaggcacatagagccttctgcagcggcccgtccccagccagcacttgacaggacagatgggggctaatctggccctgctaagcagcgacatgcctctcctggagaaggcaggggcttcctggaacttgccccagccttatcagcggaggtttgccccaacacatcccagaaacgagcaaaggttcagcgccgtgcagttggcaggtgtcgggatcatcagtcatccccttgtcagtcccaagcctgctgggcttttgtgagggtgccaggaacacaggctggaggatggcaggaggggagtagaggtgggaggaggggagtccatctgcagcaccaggtaaggggatggatgctggctcctctggtcacctcagctggaacactactcaaggtccctggctcctgtcctccacctgcccccaggggccctgcattcccatccccagggcctccactctccctgagccctgcagtctctcactcactcactcactcactcattcactcactcactcactcacagggttttgagttggataacacagcataatgatcggccagtggactcccaaactaagaacacggagctgtcctcttggggagaggctcagggctcggggaagtgaagtccagctgagggcacagttggcctgagctgctctcagtacaggcagaggccttggtagctgtgctgtgatgagagttcgctccctgctgctctcttctggcatggagagatgaacctgtaatccaagtgttaaaaccgtgccctggggaaaaacactattaattctgaatcatctcttttgttgcattaaaaaaaaatagaagagaaaaacttcacatgacccactcaaggtgtgcaggcagctgtgtttgtcaggaaggcagaaggagttggctttgctttaggggaggagacgaggtcccacaacaccctctgaagggtatataaggagccccagcgtgcagcctggcctggtacctcctgccagcatctcttgggtttgctgagaactcacgggctccagctacctggccatgaccaccacatttctgcaaacttcttcctccacctttgggggtggctcaacccgagggggttccctcctggctgggggaggtggctttggtggggggagtctctctgggggaggtggaagccgaagtatctcagcttcttctgctaggtttgtctcttcagggtcaggaggaggatatgggggtggcatgagggtctgtggctttggtggaggggctggtagtgttttcggtggaggctttggagggggcgttggtgggggttttggtggtggctttggtggtggcgatggtggtctcctctctggcaatgagaaaattaccatgcagaacctcaatgaccgcctggcctcctacctggacaaggtacgtgccctggaggaggccaatgctgacctggaggtgaagatccatgactggtaccagaagcagaccccaaccagcccagaatgcgactacagccaatacttcaagaccattgaagagctccgggacaagatcatggccaccaccatcgacaactcccgggtcatcctggagatcgacaatgccaggctggctgcggacgacttcaggctcaagtatgagaatgagctggccctgcgccagggcgttgaggctgacatcaacggcttgcgccgagtcctggatgagctgaccctggccaggactgacctggagatgcagatcgagggcctgaatgaggagctagcctacctgaagaagaaccacgaagaggagatgaaggagttcagcagccagctggccggccaggtcaatgtggagatggacgcagcaccgggtgtggacctgacccgtgtgctggcagagatgagggagcagtacgaggccatggcggagaagaaccgccgggatgtcgaggcctggttcttcagcaagactgaggagctgaacaaagaggtggcctccaacacagaaatgatccagaccagcaagacggagatcacagacctgagacgcacgatgcaggagctggagatcgagctgcagtcccagctcagcatgaaagctgggctggagaactcactggccgagacagagtgccgctatgccacgcagctgcagcagatccaggggctcattggtggcctggaggcccagctgagtgagctccgatgcgagatggaggctcagaaccaggagtacaagatgctgcttgacataaagacacggctggagcaggagatcgctacttaccgcagcctgctcgagggccaggatgccaagatggctggcattgccatcagggaagcctcttcaggaggtggtggtagcagcagcaatttccacatcaatgtagaagagtcagtggatggacaggtggtttcttcccacaagagagaaatctaagtgtctattgcaggagaaacgtcccttgccactccccactctcatcaggccaagtggaggactggccagagggcctgcacatgcaaactccagtccctgccttcagagagctgaaaagggtccctcggtcttttatttcagggctttgcatgcgctctattccccctctgcctctccccaccttctttggagcaaggagatgcagctgtattgtgtaacaagctcatttgtacagtgtctgttcatgtaataaagaattacttttccttttgcaaatatc

SEQ ID NO: 275083 - DNA, 3758 bp, Artificial Sequence
  derived and/or modified sequence
agctctggatgatctgagtttgattatttttctttcggaggaaaagacaataccctcccacccatgagacaataccacactgtctgtgcccagcattggaggccaggctcactgcgaagatggatgagaaggaacccacccccagccttgctggctggcagttccccttgccagcccagctcagatgcaggaatttggggtctgcaggaaggactctttccctgtgccctgtttggttgagggtgtgaggacctgtttgagtcctggctttgccccttaccagtggtgccacctggcacaagttgcttcacctctccaagtttcaatttcattctttctgaatcttgggtgggggtcaccctctgttgtgaggatgagaggaggtgatggatgcaaaagtgctttgtaaatcacaaagtgcagggtagaagtaaaggattatgctattatagcaaaataagaacctaagaacaacctgcgttgccccataggagctggctatggaaggtcgatgccgttgagcctaagaacatgctcaggctcacagggcatgttctgatgcccaacgacaaagcccctcctggtgagggcactcaggcgcaggtgccggtcatgcaccctggcccctgcatgtctggcacctgggtggggatccaggagggggcaggatgggggctcttgggccacagggcttccctggaagtgagagttgagagcgccccttgccacagggaaacagagacttaaaaaggtaaatgtccacagtcttaccatggtaattggtagggtcaggatttgaacccaggcctcacagtcttaccatgataattgataaagccaggattcaaacccgggcctgagggactccagagccctgtccacttcaccatgctgcaacctgggctaggaatcctcctcctgagtttctgtaagccctggggccaggtccagagggctgagccacacctccaagtggcactgcccacaggtatcaggtgtccctggaaaggtgtccctgagctggtggcagagaaaagggctctcctgagtgttcaactccccgtctgtgtgaagcaatgccttggtcttcaagatctccggtgtcttccagcctgcctgccagtctcccttctcttcccttccacagcattcaggcacatagagccttctgcagcggcccgtccccagccagcacttgacaggacagatgggggctaatctggccctgctaagcagcgacatgcctctcctggagaaggcaggggcttcctggaacttgccccagccttatcagcggaggtttgccccaacacatcccagaaacgagcaaaggttcagcgccgtgcagttggcaggtgtcgggatcatcagtcatccccttgtcagtcccaagcctgctgggcttttgtgagggtgccaggaacacaggctggaggatggcaggaggggagtagaggtgggaggaggggagtccatctgcagcaccaggtaaggggatggatgctggctcctctggtcacctcagctggaacactactcaaggtccctggctcctgtcctccacctgcccccaggggccctgcattcccatccccagggcctccactctccctgagccctgcagtctctcactcactcactcactcactcattcactcactcactcactcacagggttttgagttggataacacagcataatgatcggccagtggactcccaaactaagaacacggagctgtcctcttggggagaggctcagggctcggggaagtgaagtccagctgagggcacagttggcctgagctgctctcagtacaggcagaggccttggtagctgtgctgtgatgagagttcgctccctgctgctctcttctggcatggagagatgaacctgtaatccaagtgttaaaaccgtgccctggggaaaaacactattaattctgaatcatctcttttgttgcattaaaaaaaaatagaagagaaaaacttcacatgacccactcaaggtgtgcaggcagctgtgtttgtcaggaaggcagaaggagttggctttgctttaggggaggagacgaggtcccacaacaccctctgaagggtatataaggagccccagcgtgcagcctggcctggtacctcctgccagcatctcttgggtttgctgagaactcacgggctccagctacctggccatgaccaccacatttctgcaaacttcttcctccacctttgggggtggctcaacccgagggggttccctcctggctgggggaggtggctttggtggggggagtctctctgggggaggtggaagccgaagtatctcagcttcttctgctaggtttgtctcttcagggtcaggaggaggatatgggggtggcatgagggtctgtggctttggtggaggggctggtagtgttttcggtggaggctttggagggggcgttggtgggggttttggtggtggctttggtggtggcgatggtggtctcctctctggcaatgagaaaattaccatgcagaacctcaatgaccgcctggcctcctacctggacaaggtacgtgccctggaggaggccaatgctgacctggaggtgaagatccatgactggtaccagaagcagaccccaaccagcccagaatgcgactacagccaatacttcaagaccattgaagagctccgggacaaggtatgagaatgagctggccctgcgccagggcgttgaggctgacatcaacggcttgcgccgagtcctggatgagctgaccctggccaggactgacctggagatgcagatcgagggcctgaatgaggagctagcctacctgaagaagaaccacgaagaggagatgaaggagttcagcagccagctggccggccaggtcaatgtggagatggacgcagcaccgggtgtggacctgacccgtgtgctggcagagatgagggagcagtacgaggccatggcggagaagaaccgccgggatgtcgaggcctggttcttcagcaagactgaggagctgaacaaagaggtggcctccaacacagaaatgatccagaccagcaagacggagatcacagacctgagacgcacgatgcaggagctggagatcgagctgcagtcccagctcagcatgaaagctgggctggagaactcactggccgagacagagtgccgctatgccacgcagctgcagcagatccaggggctcattggtggcctggaggcccagctgagtgagctccgatgcgagatggaggctcagaaccaggagtacaagatgctgcttgacataaagacacggctggagcaggagatcgctacttaccgcagcctgctcgagggccaggatgccaagatggctggcattgccatcagggaagcctcttcaggaggtggtggtagcagcagcaatttccacatcaatgtagaagagtcagtggatggacaggtggtttcttcccacaagagagaaatctaagtgtctattgcaggagaaacgtcccttgccactccccactctcatcaggccaagtggaggactggccagagggcctgcacatgcaaactccagtccctgccttcagagagctgaaaagggtccctcggtcttttatttcagggctttgcatgcgctctattccccctctgcctctccccaccttctttggagcaaggagatgcagctgtattgtgtaacaagctcatttgtacagtgtctgttcatgtaataaagaattacttttccttttgcaaata

SEQ ID NO: 275084 - DNA, 2393 bp, Artificial Sequence
  derived and/or modified sequence
gcacagctggtaaatgggaaaagaggggtttaaagcattcaggcacatagagccttctgcagcggcccgtccccagccagcacttgacaggacagatgggggctaatctggccctgctaagcagcgacatgcctctcctggagaaggcaggggcttcctggaacttgccccagccttatcagcggaggtttgccccaacacatcccagaaacgagcaaaggttcagcgccgtgcagttggcaggtgtcgggatcatcagtcatccccttgtcagtcccaagcctgctgggcttttgtgagggtgccaggaacacaggctggaggatggcaggaggggagtagaggtgggaggaggggagtccatctgcagcaccaggtaaggggatggatgctggctcctctggtcacctcagctggaacactactcaaggtccctggctcctgtcctccacctgcccccaggggccctgcattcccatccccagggcctccactctccctgagccctgcagtctctcactcactcactcactcactcattcactcactcactcactcacaggtgtgcaggcagctgtgtttgtcaggaaggcagaaggagttggctttgctttaggggaggagacgaggtcccacaacaccctctgaagggtatataaggagccccagcgtgcagcctggcctggtacctcctgccagcatctcttgggtttgctgagaactcacgggctccagctacctggccatgaccaccacatttctgcaaacttcttcctccacctttgggggtggctcaacccgagggggttccctcctggctgggggaggtggctttggtggggggagtctctctgggggaggtggaagccgaagtatctcagcttcttctgctaggtttgtctcttcagggtcaggaggaggatatgggggtggcatgagggtctgtggctttggtggaggggctggtagtgttttcggtggaggctttggagggggcgttggtgggggttttggtggtggctttggtggtggcgatggtggtctcctctctggcaatgagaaaattaccatgcagaacctcaatgaccgcctggcctcctacctggacaaggtacgtgccctggaggaggccaatgctgacctggaggtgaagatccatgactggtaccagaagcagaccccaaccagcccagaatgcgactacagccaatacttcaagaccattgaagagctccgggacaagatcatggccaccaccatcgacaactcccgggtcatcctggagatcgacaatgccaggctggctgcggacgacttcaggctcaagtatgagaatgagctggccctgcgccagggcgttgaggctgacatcaacggcttgcgccgagtcctggatgagctgaccctggccaggactgacctggagatgcagatcgagggcctgaatgaggagctagcctacctgaagaagaaccacgaagaggagatgaaggagttcagcagccagctggccggccaggtcaatgtggagatggacgcagcaccgggtgtggacctgacccgtgtgctggcagagatgagggagcagtacgaggccatggcggagaagaaccgccgggatgtcgaggcctggttcttcagcaagactgaggagctgaacaaagaggtggcctccaacacagaaatgatccagaccagcaagacggagatcacagacctgagacgcacgatgcaggagctggagatcgagctgcagtcccagctcagcatgaaagctgggctggagaactcactggccgagacagagtgccgctatgccacgcagctgcagcagatccaggggctcattggtggcctggaggcccagctgagtgagctccgatgcgagatggaggctcagaaccaggagtacaagatgctgcttgacataaagacacggctggagcaggagatcgctacttaccgcagcctgctcgagggccaggatgccaagatggctggcattgccatcagggaagcctcttcaggaggtggtggtagcagcagcaatttccacatcaatgtagaagagtcagtggatggacaggtggtttcttcccacaagagagaaatctaagtgtctattgcaggagaaacgtcccttgccactccccactctcatcaggccaagtggaggactggccagagggcctgcacatgcaaactccagtccctgccttcagagagctgaaaagggtccctcggtcttttatttcagggctttgcatgcgctctattccccctctgcctctccccaccttctttggagcaaggagatgcagctgtattgtgtaacaagctcatttgtacagtgtctgttcatgtaataaagaattacttttccttttgcaaat

SEQ ID NO: 275085 - DNA, 2527 bp, Artificial Sequence
  derived and/or modified sequence
aaggtacgtgccctggaggaggccaatgctgacctggaggtgaagatccatgactggtaccagaagcagaccccaaccagcccagaatgcgactacagccaatacttcaagaccattgaagagctccgggacaaggtatgagaatgagctggccctgcgccagggcgttgaggctgacatcaacggcttgcgccgagtcctggatgagctgaccctggccaggactgacctggagatgcagatcgagggcctgaatgaggagctagcctacctgaagaagaaccacgaagaggagatgaaggagttcagcagccagctggccggccaggtcaatgtggagatggacgcagcaccgggtgtggacctgacccgtgtgctggcagagatgagggagcagtacgaggccatggcggagaagaaccgccgggatgtcgaggcctggttcttcagcaagactgaggagctgaacaaagaggtggcctccaacacagaaatgatccagaccagcaagacggagatcacagacctgagacgcacgatgcaggagctggagatcgagctgcagtcccagctcagcatgaaagctgggctggagaactcactggccgagacagagtgccgctatgccacgcagctgcagcagatccaggggctcattggtggcctggaggcccagctgagtgagctccgatgcgagatggaggctcagaaccaggagtacaagatgctgcttgacataaagacacggctggagcaggagatcgctacttaccgcagcctgctcgagggccaggatgccaagtaggcgcctgggcacaggggaaggagtgatgagggctgcttgtggctagggtgcagggtcatcctaagggaatggcagggtgtccctaagcagccttgagggactgtgaaaagagaactgagcaaggagggaggatctggactcctcactctggtccttggctgttacctgggacaggtcacttcctctctctggatccgtgtttcttctgtaaatgatagaggctgggctagtggtagttaagatctagtgctcattccattctctgcatgagatagatgggtattcttgtagttcagaatcttgaccagctcagtggctcatgcctgtaatcccagcactttgggagtccaaggcgggtggatcacttgaggtcaggagttcgagaccagcatggccaatatggtgaaaccccgtctctactaaaaatacaaaaattagctgggcgtggtggcgggtgcctgtaatcccagctactcgggaggctgaggcacaagaatcacttgaacccgggaggcggaggtttcagtgggctgagatcgtgccactgcactccagcctgggcgacagagtgagattccgtctcaaaaaacaaaacaaaacaaaacaaaatctgtctacttggggatagcaggcctggatgggctagcaggatgtcccacccctagaggagtcagatgtgtgggtggtggtggtgtagggtctgaagaacactgcatagctatctacatgagcttcccttacggacacttgagcttgtgccctttgcttaaatcagcttccctctttctttcaggatggctggcattgccatcagggaaggtaggaaggctttactcttctggtgtggggtggggaggggagatgttgaagccaccacccccttcggaatagggaggaaggagaaagagcccaaacatcccattaggtgggaacattcccattcattagatgcctcttccccagtgggaacttctgtcagccccaggtgagattgcagctggtgatttattgagaaacttccaggttgagtaggcttcattcagggcatgtctctcccccaggccccatcttcatacacttccgctaagatgcccacaattcatcccccttcatgtgcagcttgaaaaaccctgacattgttgctccctgccgggcatacctgccattgccactgcccatctctgtgatgaggaattcaacaccagatctctggcagctcttgagggattggccagtggccattctcaggggtgctgtctagttttcccagagccccgccaaggtcctggccaccgtggcagagcggggaggttcccccactctaaagcctactccttctctctctagcctcttcaggaggtggtggtagcagcagcaatttccacatcaatgtagaagagtcagtggatggacaggtggtttcttcccacaagagagaaatctaagtgtctattgcaggagaaacgtcccttgccactccccactctcatcaggccaagtggaggactggccagagggcctgcacatgcaaactccagtccctgccttcagagagctgaaaagggtccctcggtcttttatttcagggctttgcatgcgctctattccccctctgcctctccccaccttctttggagcaaggagatgcagctgtattgtgtaacaagctcatttgtacagtgtctgttcatgtaataaagaattacttttccttttgcaaat

SEQ ID NO: 275086 - DNA, 903 bp, Artificial Sequence
  derived and/or modified sequence
gaagaggccccaaaagaagtcccacttcttcctggtggagaggtgagggctgcaggcccaaccctatgagtgatgggggcaagtgagggacactagttccacgcccgcatgctgccaaatgtactcagcaccctgctaaggaggctggagaccccatcacggccatggcaatcccgaaggaggagctgtttcaaggtacgtgccctggaggaggccaatgctgacctggaggtgaagatccatgactggtaccagaagcagaccccaaccagcccagaatgcgactacagccaatacttcaagaccattgaagagctccgggacaaggtatgagaatgagctggccctgcgccagggcgttgaggctgacatcaacggcttgcgccgagtcctggatgagctgaccctggccaggactgacctggagatgcagatcgagggcctgaatgaggagctagcctacctgaagaagaaccacgaagaggagatgaaggagttcagcagccagctggccggccaggtcaatgtggagatggacgcagcaccgggtgtggacctgacccgtgtgctggcagagatgagggagcagtacgaggccatggcggagaagaaccgccgggatgtcgaggcctggttcttcagcaagactgaggagctgaacaaagaggtggcctccaacacagaaatgatccagaccagcaagacggagatcacagacctgagacgcacgatgcaggagctggagatcgagctgcagtcccagctcagcatgaaagctgggctggagaactcactggccgagacagagtgccgctatgccacgcagctgcagcagatccaggggctcattggtggcctggaggcccagctgagtgagctccgatgcgagatggaggctcagaa

SEQ ID NO: 275087 - DNA, 1371 bp, Artificial Sequence
  derived and/or modified sequence
atgaccaccaccttcctgcagaccagcagcagcacctttggaggcggcagcacccggggcggcagcctgctggccggcggcggcggctttggaggcggcagcctgagcggcggcggcggcagccgcagcatcagcgccagcagcgccaggtttgtgagcagcggcagcggcggcggctacggcggcggcatgagggtgtgtggctttggaggaggagctggctctgtgtttggaggcggctttggaggcggcgtgggcggcggctttggaggcggctttggaggaggagatggcggcctgctgtctggaaatgagaagatcaccatgcagaacctgaatgaccggctggccagctacctggacaaggtgcgggccctggaggaggccaatgctgacctggaggtgaagatccatgactggtaccagaagcagacccccaccagcccagaatgtgactacagccagtacttcaagaccatcgaggagctgcgggacaagatcatggccaccaccatcgacaacagcagggtcatcctggagattgacaatgcccggctggccgcagatgacttccggctgaagtatgaaaatgagctggccctgcggcagggcgtggaggccgacatcaatggcctgcggcgggtgctggatgagctgaccctggccaggacagacctggagatgcagatcgagggcctgaatgaggagctggcctacctgaagaagaaccacgaggaggagatgaaggagttcagcagccagctggccggccaggtgaatgtggagatggatgctgcccctggggtggacctgaccagggtgctggccgagatgagggagcagtatgaggccatggccgagaagaacagaagagatgtggaggcctggttcttcagcaagacagaggagctgaacaaggaggtggccagcaacacagagatgatccagaccagcaagacagagatcacagacctgcggaggaccatgcaggagctggagattgagctgcagagccagctgtccatgaaggccggcctggagaacagcctggccgagacagagtgccgctatgccacccagctgcagcagatccagggcctcatcggcggcctggaggcccagctgtctgagctgcgctgtgagatggaggcccagaaccaggagtacaagatgctgctggacatcaagacccggctggagcaggagatcgccacctaccgcagcctgctggagggccaggatgccaagatggccggcatcgccatccgggaggccagcagcggcggcggcggcagcagcagcaacttccacatcaacgtggaggagagcgtggatggccaggtggtgagcagccacaagcgggagatctag

SEQ ID NO: 275088 - DNA, 876 bp, Artificial Sequence
  derived and/or modified sequence
atgacaggcaccaggagccggccccagcctgcccagaatgccaccacagccaacaccagccggcccctgaagagcagcggcaccaggtatgaaaatgagctggccctgcggcagggcgtggaggccgacatcaatggcctgcggcgggtgctggatgagctgaccctggccaggacagacctggagatgcagatcgagggcctgaatgaggagctggcctacctgaagaagaaccacgaggaggagatgaaggagttcagcagccagctggccggccaggtgaatgtggagatggatgctgcccctggggtggacctgaccagggtgctggccgagatgagggagcagtatgaggccatggccgagaagaacagaagagatgtggaggcctggttcttcagcaagacagaggagctgaacaaggaggtggccagcaacacagagatgatccagaccagcaagacagagatcacagacctgcggaggaccatgcaggagctggagattgagctgcagagccagctgtccatgaaggccggcctggagaacagcctggccgagacagaatgtagatatgccacccagctgcagcagatccagggcctgattggaggcctggaggcccagctgtctgagctgcgctgtgagatggaggcccagaaccaggagtacaagatgctgctggacatcaagacccggctggagcaggagatcgccacctaccgcagcctgctggagggccaggatgccaagatggccggcatcgccatccgggaggccagcagcggcggcggcggcagcagcagcaacttccacatcaacgtggaggagagcgtggatggccaggtggtgagcagccacaagcgggagatctag

SEQ ID NO: 275089 - DNA, 756 bp, Artificial Sequence
  derived and/or modified sequence
atgacaggcaccaggagccggccccagcctgcccagaatgccaccacagccaacaccagccggcccctgaagagcagcggcaccaggtatgaaaatgagctggccctgcggcagggcgtggaggccgacatcaatggcctgcggcgggtgctggatgagctgaccctggccaggacagacctggagatgcagatcgagggcctgaatgaggagctggcctacctgaagaagaaccacgaggaggagatgaaggagttcagcagccagctggccggccaggtgaatgtggagatggatgctgcccctggggtggacctgaccagggtgctggccgagatgagggagcagtatgaggccatggccgagaagaacagaagagatgtggaggcctggttcttcagcaagacagaggagctgaacaaggaggtggccagcaacacagagatgatccagaccagcaagacagagatcacagacctgcggaggaccatgcaggagctggagattgagctgcagagccagctgtccatgaaggccggcctggagaacagcctggccgagacagaatgtagatatgccacccagctgcagcagatccagggcctgattggaggcctggaggcccagctgtctgagctgcgctgtgagatggaggcccagaaccaggagtacaagatgctgctggacatcaagacccggctggagcaggagatcgccacctaccgcagcctgctggagggccaggatgccaagtag

SEQ ID NO: 275090 - DNA, 663 bp, Artificial Sequence
  derived and/or modified sequence
atgacaggcaccaggagccggccccagcctgcccagaatgccaccacagccaacaccagccggcccctgaagagcagcggcaccaggtatgaaaatgagctggccctgcggcagggcgtggaggccgacatcaatggcctgcggcgggtgctggatgagctgaccctggccaggacagacctggagatgcagatcgagggcctgaatgaggagctggcctacctgaagaagaaccacgaggaggagatgaaggagttcagcagccagctggccggccaggtgaatgtggagatggatgctgcccctggggtggacctgaccagggtgctggccgagatgagggagcagtatgaggccatggccgagaagaacagaagagatgtggaggcctggttcttcagcaagacagaggagctgaacaaggaggtggccagcaacacagagatgatccagaccagcaagacagagatcacagacctgcggaggaccatgcaggagctggagattgagctgcagagccagctgtccatgaaggccggcctggagaacagcctggccgagacagaatgtagatatgccacccagctgcagcagatccagggcctgattggaggcctggaggcccagctgtctgagctgcgctgtgagatggaggcccagtag

SEQ ID NO: 275091 - DNA, 1371 bp, Artificial Sequence
  derived and/or modified sequence
atgaccaccaccttcctgcagaccagcagcagcaccttcggcggcggatccaccagaggagggtctcttctggctggcggcggcggattcggtgggggatctttgtccggtggaggaggcagccgttccatctccgccagttctgctagatttgtttcgtctgggtcaggaggcgggtacggcgggggcatgagagtttgcggattcggcgggggagctggtagtgtcttcggcggcggtttcggtggcggcgtgggcggtggctttggagggggcttcggtggcggcgatggaggcctgctgtctgggaatgagaagatcaccatgcagaacttgaatgacagactggcaagctacctggacaaggtgagagccttagaggaagctaacgcagatctggaagtcaagatccatgactggtatcagaaacagactcccacatcacctgaatgtgactactcgcagtacttcaaaaccattgaggagttacgcgataaaattatggccaccaccattgataattcccgcgtcatactggaaatcgacaatgcccgcctggcagcggatgattttcgcttgaagtatgagaatgagctcgccttgagacagggagtggaagcggatataaatggcctgcgaagagttctggacgagctaactcttgctaggaccgacctagagatgcagatagaagggctgaacgaagaactggcctacttgaagaaaaaccatgaggaagagatgaaggaattctcgagtcagctggcaggccaggtgaatgtcgagatggacgccgctcctggagttgatctgacccgagtcctggcagaaatgagagagcagtacgaggcaatggcagagaagaaccggcgggatgtggaagcctggttcttttctaaaacagaggaattgaacaaggaggtggcatcaaatactgagatgattcagacatcaaagaccgagatcactgacttgagaaggaccatgcaggaactcgagatagaactccagtcccaactgagtatgaaggccggtttggagaattcgcttgccgagactgagtgcaggtatgccacacaactgcagcaaatccaaggccttattggaggactcgaggcccagttgtccgaactacgctgcgagatggaggcgcagaaccaggaatataaaatgctactggatatcaaaacaagactggagcaggagattgccacttaccgctctctgctcgagggccaggatgccaaaatggcaggcatcgccatcagagaagcaagttccggaggaggagggagcagctcaaactttcacatcaacgtggaagagtcagtggatggccaggtggtcagctcacacaagcgggaaatctag

SEQ ID NO: 275092 - DNA, 876 bp, Artificial Sequence
  derived and/or modified sequence
atgaccggcacccggagccggccccagcccgcccagaacgccaccaccgctaacacctcgcggccactcaaatctagtgggacccgctacgagaatgagttagctcttaggcagggtgtggaagccgacataaatggactgcgacgtgtcctggatgaactaaccttagcccggaccgacctggagatgcaaatcgaggggcttaatgaggagctcgcctacttgaaaaaaaaccacgaggaagaaatgaaggaattctcatcccaactggctgggcaggttaacgtcgagatggacgctgccccaggcgtggatttaaccagggtacttgcagagatgcgcgagcagtacgaagccatggcggaaaagaataggcgcgacgtggaagcatggtttttcagtaagaccgaggagctgaacaaggaggttgcatcaaacaccgaaatgattcagacctccaagaccgagatcacagacctccgtagaactatgcaggagttggaaatcgaattacagtcacagttgagcatgaaggcaggactcgagaatagtttggccgagacggaatgtcggtatgctactcagttgcagcagatacaagggctgatcgggggcctcgaagcccaactgagcgagcttcgctgtgaaatggaggctcaaaatcaagagtacaagatgctgcttgacattaaaacaaggctcgagcaggagattgccacttatcgatctctgcttgagggccaagacgctaagatggccggcatcgctattagagaagctagcagtgggggcggtggctcttcatctaactttcatattaatgtggaggagtcagtcgatggtcaagtggtgtcttcccacaagcgcgagatttag

SEQ ID NO: 275093 - DNA, 1371 bp, Artificial Sequence
  derived and/or modified sequence
atgaccaccaccttcctgcagaccagcagcagcaccttcggcggcgggtcgacacggggaggtagcctgttggctgggggtggcggctttggcggcgggtccctcagcggagggggcggctctagatcaatttccgcgtcttctgcacgcttcgtgtcgagcggctctgggggcggctatgggggaggtatgcgcgtctgcggcttcggcggcggcgccggaagcgtgttcggagggggcttcggaggaggagtcggcggcggtttcggagggggttttggcggcggcgacggcggattgctcagcggtaatgagaaaatcaccatgcaaaacctgaacgacagactcgcctcatatttggacaaagtgcgcgcacttgaagaagccaatgctgacctagaagttaaaatccatgattggtatcagaagcagactcctaccagtcccgaatgcgactattcacagtatttcaagacaattgaggaattaagagataagatcatggccactacgatcgacaatagtcgtgtgatactcgaaatcgataatgcccgcctggctgccgatgacttccgcttgaaatacgaaaatgaactcgcattacggcagggcgtggaggctgacattaacggactccggagggtgctagacgagctcacactcgccaggaccgatctcgaaatgcaaatagagggcctgaatgaagaacttgcctatctgaagaaaaaccatgaagaagaaatgaaggaattctcatcacagctggctggccaggtgaatgtagagatggatgctgcacccggtgtggacttaactcgagtattggcagagatgcgcgaacagtacgaagcaatggctgaaaagaatcgacgagacgtggaagcttggttcttttctaaaaccgaagagctgaacaaagaagtggcgtctaacacggagatgatccagacaagtaaaacggagatcactgacctcaggaggaccatgcaggagttagaaatcgaactgcaatcccagctgtctatgaaggctggcctggaaaactctctagcagaaacagaatgccgctatgccacccagctccagcaaattcagggactgatcgggggtttggaggcccagctatcagagctgagatgcgaaatggaagctcagaaccaggagtacaaaatgttgctggatataaagactcgactggagcaagagatcgccacctatcggtccctgcttgaagggcaggacgccaaaatggccgggattgcaatccgagaggcctcgtcaggcggtgggggtagctcatcaaactttcacatcaacgttgaggagagcgttgacggtcaggtcgtgtctagtcataaacgcgagatttag

SEQ ID NO: 275094 - DNA, 756 bp, Artificial Sequence
  derived and/or modified sequence
atgaccggcacccggagccggccccagcccgcccagaacgccaccacagctaatacatcacgtcccctgaagtctagtggcacccgctacgagaacgaactcgccctacgacagggagtggaggcagacattaacggcctgagaagggttctggatgaactgaccctggctaggaccgatctggaaatgcagattgagggtcttaacgaagagctggcctaccttaaaaagaaccatgaggaagagatgaaagaattttcttcccagctcgccggccaggtgaacgttgaaatggacgccgcacccggcgtggatttgaccagggtgcttgcggagatgcgcgagcagtacgaggccatggctgaaaagaatcgtcgcgatgttgaagcctggtttttcagcaagacagaggaactcaacaaggaggtagctagcaacaccgaaatgattcagacaagtaagactgagatcaccgacctgagacggaccatgcaggagctcgagatcgaacttcaatcccagctgagcatgaaggccgggctggagaatagcttggccgagaccgaatgcagatacgcaacccagttgcagcagattcagggtctgattggcggcctagaggcacagctcagtgagcttcggtgcgagatggaggcccagaatcaagagtataagatgctccttgatattaagacacggctggagcaggagatcgccacttacagatcacttctcgagggccaggacgccaaatag

SEQ ID NO: 275095 - DNA, 663 bp, Artificial Sequence
  derived and/or modified sequence
atgaccggcacccggagccggccccagcccgcccagaacgccaccacagctaatacgtctaggccgctgaaaagcagtggcactaggtacgagaatgagcttgccttgcgacagggagttgaagctgatattaatggattacgtagagtccttgatgagctgaccctcgcacggacggatctggagatgcagattgaaggcttgaatgaagagttggcctacctgaaaaagaaccacgaagaggagatgaaagagttctcgagccagttggctgggcaggtgaatgtggaaatggacgccgcacccggggtggatctgacgcgtgtgctggcggaaatgagagagcaatacgaggcaatggccgaaaagaatcgccgtgacgtggaggcttggttcttctctaagacagaggagctgaacaaagaggtggcttccaataccgaaatgattcagacctcaaaaacagagatcaccgacctgcgccgcaccatgcaagagctggagatagaactgcagtcgcaactgagcatgaaggccggtctggagaacagcctggccgagacggagtgccgatacgccacacagctgcagcagattcaggggctcatagggggcttagaggcacagctctctgaacttagatgtgaaatggaggcccagtag

SEQ ID NO: 275096 - DNA, 1371 bp, Artificial Sequence
  derived and/or modified sequence
atgaccactacatttctccagacttcctcatctacctttggcggtggcagcacccgcggaggctccctattggccggaggcggaggctttgggggaggcagcctttccggaggagggggaagtcgcagtatctcggcgtcaagtgctcgtttcgtgtcttccgggtccggcggaggctatggcggtggaatgcgagtatgcggcttcggtgggggagccggttccgtcttcgggggagggtttgggggtggtgtaggtgggggatttggaggaggcttcgggggtggagacggcggacttctcagcgggaacgagaaaattacaatgcaaaatttgaacgatcggctggcatcctatttggacaaagttagagccctggaagaagccaatgccgaccttgaagtgaagattcacgactggtaccagaagcagacgccgacatctccagagtgtgactattcacagtacttcaagaccatcgaggaattaagggataaaatcatggcgacaaccatcgataactccagggtaattctcgagattgataatgctcgactcgccgctgatgacttcaggcttaaatatgagaatgagctggccctgagacaaggagtggaggccgatatcaacgggctccgtcgagtcttggacgaattgacactggctcgcacggacttagagatgcagatcgagggactaaatgaagagcttgcgtatctgaagaaaaatcacgaagaagaaatgaaagaattcagcagtcagctcgctgggcaggtcaacgtggagatggatgcggctcccggagtggacttaactcgagtgctggctgagatgcgcgagcagtatgaggccatggccgaaaagaaccgcagggacgtggaggcctggttcttcagcaaaacggaagaactgaacaaggaagtagcatcaaataccgagatgattcagactagtaaaacagagataacagacttgaggagaacaatgcaggaacttgaaatcgagctccaaagccagctatctatgaaagctggcttggagaactccctggcagaaacagaatgtcgctacgccacccagctgcagcagatccaaggattaatcggcggtctggaggcccagctctctgagctgagatgcgaaatggaagctcaaaaccaggagtataagatgctcctggatattaagacccgtctggaacaggaaattgctacataccgcagcctgttggagggccaagacgcaaaaatggctggcatcgcaatccgagaagctagcagcggaggcggtggcagttcctctaacttccacatcaacgtagaggagtccgtcgatggacaggtggtgagctctcataagcgcgagatttag

SEQ ID NO: 275097 - DNA, 876 bp, Artificial Sequence
  derived and/or modified sequence
atgaccggcaccaggtccagaccacaacctgcccaaaacgcaactaccgctaacacctcccgacccctcaaatcatccgggacacgatacgagaacgaattggccctcaggcagggggtggaagccgatatcaatggactgcggagggtcctcgatgaactgacactagcgagaacagatttggagatgcagatagagggcctaaatgaagagctggcctacctgaagaagaaccacgaagaggagatgaaagaattctccagccagctagcaggtcaagtgaatgtggagatggacgccgctcccggtgtggatctgaccagagttctggccgagatgcgagagcagtacgaagccatggccgaaaaaaatcggagggatgtggaggcatggttttttagtaagacggaggaactgaacaaagaggttgcttctaatacggagatgattcagacatccaaaaccgagataaccgatttacggaggacaatgcaggagctggagatagaacttcagtcacaacttagcatgaaggccggactcgagaactctctggctgaaaccgaatgtagatacgcaacccaacttcagcaaattcaaggacttattggagggcttgaggctcagttgtccgaactaagatgcgaaatggaggcccaaaatcaggagtacaagatgctgctggacatcaaaactagactggagcaagagattgcgacctaccggagcctgttggagggtcaggatgctaagatggctggcattgccattcgggaagcaagctcaggtggcggaggatcatccagcaacttccacatcaacgtcgaggaatccgtcgatggccaggtcgtgtcaagccataaaagggaaatctag

SEQ ID NO: 275098 - DNA, 1371 bp, Artificial Sequence
  derived and/or modified sequence
atgacaaccaccttcctgcagacttccagcagcacctttggtggcggaagcaccagaggaggatccctgctggccggagggggaggctttggaggaggctctctttctggagggggtgggagtcgctcaatatccgcatcatcagcaagattcgtttcatccgggtcaggaggagggtatggaggcggaatgcgggtttgcggatttggtgggggagctggaagcgtgttcggtgggggattcggaggtggcgtcggcggaggatttggcggagggtttggcggaggcgacggcggtcttctctcaggtaacgagaagattacaatgcagaatttgaatgatcgattggcctcttacctggataaagtcagagccctggaggaggccaacgccgacctggaagtgaagattcatgactggtaccagaaacaaaccccaacctcgcctgaatgtgactatagccaatatttcaaaactattgaggaactaagagacaagattatggccaccacaattgacaacagccgggttatactggaaatcgacaacgctcggctggctgctgatgactttcgccttaaatacgagaatgagctcgcactgagacagggagtggaggccgatatcaatggtctgaggagggtgttagatgaactaactcttgctaggactgaccttgagatgcaaatagaggggctcaatgaagagctggcatatctgaagaagaaccacgaagaggaaatgaaagaatttagctcacaattggctggacaagtgaacgtcgaaatggacgcggcaccaggagttgatctgacaagggtcctggcggagatgagggaacagtacgaggctatggccgagaagaataggcgagacgtggaggcctggttctttagtaagaccgaggagctgaacaaggaagtggcatccaacacagagatgatacagacatcgaagacagagatcaccgatctgcgccgaactatgcaggaattggagatcgaattgcagtctcaactgtcaatgaaggccggtctggaaaactctctggctgaaacggagtgccgttacgcgactcagctgcaacagatacagggattaatcggagggctggaggcccaactttctgaactgcgctgtgaaatggaagcacagaatcaggagtataagatgctgctggacatcaaaaccaggttggagcaggaaattgctacgtataggagccttttagaaggccaggacgccaaaatggcgggaattgcaattcgcgaagcttccagcggtggcggagggtcatcatccaatttccacatcaacgttgaagagtctgtggacgggcaggtcgtgtcatcccataaacgcgagatctag

SEQ ID NO: 275099 - DNA, 756 bp, Artificial Sequence
  derived and/or modified sequence
atgaccggaactcggagccgaccgcagcccgctcagaatgccaccactgccaatacgtccaggccactcaaaagttcagggacacggtatgaaaatgaactagccctgcggcagggcgtcgaggccgacatcaacggcctcaggagagtgctcgacgagctgaccttagctagaaccgacctcgagatgcagatcgaggggctgaacgaggaactcgcatacctgaaaaagaatcatgaggaagagatgaaggagttcagctctcagctcgccggtcaggtgaatgtggaaatggatgctgctcctggcgtcgacctcaccagggtgcttgccgagatgcgagagcagtatgaggccatggccgaaaaaaaccggcgagatgtcgaagcctggttcttttccaaaaccgaagagctgaacaaagaggttgcttctaataccgaaatgattcaaacctctaagacggagataacggacttgcggagaaccatgcaagaattagagatcgaacttcagagccagctgagcatgaaggcaggcctggagaactcgctggcggagacagaatgtagatatgccacgcagctgcaacagatacaggggctgattggcggactcgaggcccagctttctgagctgcgttgtgaaatggaagcacagaaccaggagtacaaaatgcttcttgatatcaaaacccgcttagagcaggaaatcgcaacatatcgctccttactagaaggccaggacgcaaaatag

SEQ ID NO: 275100 - DNA, 663 bp, Artificial Sequence
  derived and/or modified sequence
atgacgggcactagaagtagaccgcagcccgctcagaatgccaccaccgccaacacatcaagacccttaaagtccagcgggaccagatacgagaatgagcttgcactgcgccagggcgtggaggccgacataaacggcctgcgcagagttctcgatgaactgacgctcgcgagaacagaccttgagatgcagatcgaggggctaaacgaggaactcgcctatttgaagaagaaccacgaggaggaaatgaaggaattctctagtcaactagcaggccaagttaatgttgagatggatgctgctcccggtgtggacctcacgcgtgtgctggcggagatgcgggagcaatatgaggctatggcagagaagaacaggagggacgttgaggcatggtttttttctaagactgaggaactcaacaaagaggtagcctccaacacagaaatgattcagacaagtaagaccgaaattactgatttacggaggaccatgcaggagctggagatagaactgcagtcccagctgtctatgaaggccggactcgaaaactctctggcagagacggagtgccgatatgccacccaactgcagcagattcagggtcttatcgggggactggaagctcaattatctgagcttcggtgtgagatggaagcccaatag

SEQ ID NO: 275101 - DNA, 1371 bp, Artificial Sequence
  derived and/or modified sequence
atgaccaccaccttcctgcagaccagcagcagcaccttcggcggcggcagcaccagaggcggcagcctgctggccggcggcggcggcttcggcggcggcagcctgagcggcggcggcggcagcagaagcatcagcgccagcagcgccagattcgtgagcagcggcagcggcggcggctacggcggcggcatgagagtgtgcggcttcggcggcggcgccggcagcgtgttcggcggcggcttcggcggcggcgtgggcggcggcttcggcggcggcttcggcggcggcgacggcggcctgctgagcggcaacgagaagatcaccatgcagaacctgaacgacagactggccagctacctggacaaggtgagagccctggaggaggccaacgccgacctggaggtgaagatccacgactggtaccagaagcagacccccaccagccccgagtgcgactacagccagtacttcaagaccatcgaggagctgagagacaagatcatggccaccaccatcgacaacagcagagtgatcctggagatcgacaacgccagactggccgccgacgacttcagactgaagtacgagaacgagctggccctgagacagggcgtggaggccgacatcaacggcctgagaagagtgctggacgagctgaccctggccagaaccgacctggagatgcagatcgagggcctgaacgaggagctggcctacctgaagaagaaccacgaggaggagatgaaggagttcagcagccagctggccggccaggtgaacgtggagatggacgccgcccccggcgtggacctgaccagagtgctggccgagatgagagagcagtacgaggccatggccgagaagaacagaagagacgtggaggcctggttcttcagcaagaccgaggagctgaacaaggaggtggccagcaacaccgagatgatccagaccagcaagaccgagatcaccgacctgagaagaaccatgcaggagctggagatcgagctgcagagccagctgagcatgaaggccggcctggagaacagcctggccgagaccgagtgcagatacgccacccagctgcagcagatccagggcctgatcggcggcctggaggcccagctgagcgagctgagatgcgagatggaggcccagaaccaggagtacaagatgctgctggacatcaagaccagactggagcaggagatcgccacctacagaagcctgctggagggccaggacgccaagatggccggcatcgccatcagagaggccagcagcggcggcggcggcagcagcagcaacttccacatcaacgtggaggagagcgtggacggccaggtggtgagcagccacaagagagagatctag

SEQ ID NO: 275102 - DNA, 876 bp, Artificial Sequence
  derived and/or modified sequence
atgaccggcaccagaagcagaccccagcccgcccagaacgccaccaccgccaacaccagcagacccctgaagagcagcggcaccagatacgagaacgagctggccctgagacagggcgtggaggccgacatcaacggcctgagaagagtgctggacgagctgaccctggccagaaccgacctggagatgcagatcgagggcctgaacgaggagctggcctacctgaagaagaaccacgaggaggagatgaaggagttcagcagccagctggccggccaggtgaacgtggagatggacgccgcccccggcgtggacctgaccagagtgctggccgagatgagagagcagtacgaggccatggccgagaagaacagaagagacgtggaggcctggttcttcagcaagaccgaggagctgaacaaggaggtggccagcaacaccgagatgatccagaccagcaagaccgagatcaccgacctgagaagaaccatgcaggagctggagatcgagctgcagagccagctgagcatgaaggccggcctggagaacagcctggccgagaccgagtgcagatacgccacccagctgcagcagatccagggcctgatcggcggcctggaggcccagctgagcgagctgagatgcgagatggaggcccagaaccaggagtacaagatgctgctggacatcaagaccagactggagcaggagatcgccacctacagaagcctgctggagggccaggacgccaagatggccggcatcgccatcagagaggccagcagcggcggcggcggcagcagcagcaacttccacatcaacgtggaggagagcgtggacggccaggtggtgagcagccacaagagagagatctag

SEQ ID NO: 275103 - DNA, 756 bp, Artificial Sequence
  derived and/or modified sequence
atgaccggcaccagaagcagaccccagcccgcccagaacgccaccaccgccaacaccagcagacccctgaagagcagcggcaccagatacgagaacgagctggccctgagacagggcgtggaggccgacatcaacggcctgagaagagtgctggacgagctgaccctggccagaaccgacctggagatgcagatcgagggcctgaacgaggagctggcctacctgaagaagaaccacgaggaggagatgaaggagttcagcagccagctggccggccaggtgaacgtggagatggacgccgcccccggcgtggacctgaccagagtgctggccgagatgagagagcagtacgaggccatggccgagaagaacagaagagacgtggaggcctggttcttcagcaagaccgaggagctgaacaaggaggtggccagcaacaccgagatgatccagaccagcaagaccgagatcaccgacctgagaagaaccatgcaggagctggagatcgagctgcagagccagctgagcatgaaggccggcctggagaacagcctggccgagaccgagtgcagatacgccacccagctgcagcagatccagggcctgatcggcggcctggaggcccagctgagcgagctgagatgcgagatggaggcccagaaccaggagtacaagatgctgctggacatcaagaccagactggagcaggagatcgccacctacagaagcctgctggagggccaggacgccaagtag

SEQ ID NO: 275104 - DNA, 663 bp, Artificial Sequence
  derived and/or modified sequence
atgaccggcaccagaagcagaccccagcccgcccagaacgccaccaccgccaacaccagcagacccctgaagagcagcggcaccagatacgagaacgagctggccctgagacagggcgtggaggccgacatcaacggcctgagaagagtgctggacgagctgaccctggccagaaccgacctggagatgcagatcgagggcctgaacgaggagctggcctacctgaagaagaaccacgaggaggagatgaaggagttcagcagccagctggccggccaggtgaacgtggagatggacgccgcccccggcgtggacctgaccagagtgctggccgagatgagagagcagtacgaggccatggccgagaagaacagaagagacgtggaggcctggttcttcagcaagaccgaggagctgaacaaggaggtggccagcaacaccgagatgatccagaccagcaagaccgagatcaccgacctgagaagaaccatgcaggagctggagatcgagctgcagagccagctgagcatgaaggccggcctggagaacagcctggccgagaccgagtgcagatacgccacccagctgcagcagatccagggcctgatcggcggcctggaggcccagctgagcgagctgagatgcgagatggaggcccagtag

SEQ ID NO: 275105 - protein, 216 aa, Artificial Sequence
  derived and/or modified sequence
MAEPRQEFEVMEDHAGTYGLGDRKDQREPKKVAVVRTPPKSPSSAKSRLQTAPVPMPDLKNVKSKIGSTENLKHQPGGGKVQIVYKPVDLSKVTSKCGSLGNIHHKPGGGQVEVKSEKLDFKDRVQSKIGSLDNITHVPGGGNKKIETHKLTFRENAKAKTDHGAEIVYKSPVVSGDTSPRHLSNVSSTGSIDMVDSPQLATLADEVSASLAKQGL

SEQ ID NO: 275106 - protein, 523 aa, Artificial Sequence
  derived and/or modified sequence
CWGSGHLLSSQYVERHFSREGTTQHSTGAGDHCYYQGKLRGNPHSFAALSTCQGLHGVFSDGNLTYIVEPQEVAGPWGAPQGPLPHLIYRTPLLPDPLGCREPGCLFAVPAQSAPPNRPRLRRKRQVRRGHPTVHSETKYVELIVINDHQLFEQMRQSVVLTSNFAKSVVNLADVIYKEQLNTRIVLVAMETWADGDKIQVQDDLLETLARLMVYRREGLPEPSDATHLFSGRTFQSTSSGAAYVGGICSLSHGGGVNEYGNMGAMAVTLAQTLGQNLGMMWNKHRSSAGDCKCPDIWLGCIMEDTGFYLPRKFSRCSIDEYNQFLQEGGGSCLFNKPLKLLDPPECGNGFVEAGEECDCGSVQECSRAGGNCCKKCTLTHDAMCSDGLCCRRCKYEPRGVSCREAVNECDIAETCTGDSSQCPPNLHKLDGYYCDHEQGRCYGGRCKTRDRQCQVLWGHAAADRFCYEKLNVEGTERGSCGRKGSGWVQCSKQPQQGRAVWLPPLCQHLWSSSARGPGGRHQ

SEQ ID NO: 275107 - DNA, 1572 bp, Artificial Sequence
  derived and/or modified sequence
tgctggggaagtggccacctgttgtcatcacagtatgtggagcgccatttctcccgggaggggacaacccaacattccacaggggccggggatcactgctattaccaaggtaagctgcgcgggaatccccattctttcgccgccctgagcacctgccagggccttcacggtgtcttctccgatggcaatctgacttacattgtggaaccacaagaggtggccgggccttggggcgccccgcagggcccgctccctcaccttatctacaggacaccacttctgcctgatccattgggatgccgggagcccggctgtctgttcgctgtgcccgcacagagtgctccacccaacaggcctagactgcggcgcaagcgccaagttcggcgtggtcaccctactgtacatagcgaaaccaagtacgttgagctgatcgtcatcaatgatcaccaactgtttgagcagatgcgacagtctgtggttctgacttccaacttcgcaaaatccgtggtgaacctcgccgatgttatatataaggaacagctcaatacaaggatagtgttggtcgctatggaaacctgggctgatggcgacaagatacaggtgcaggacgacctgctggagaccctagccaggctgatggtgtaccggcgggaagggttgcctgaaccctccgacgccacccatctgttcagcggccgcacgtttcagtctaccagctctggggccgcctacgtcggtggtatctgcagtctgagccacggcggcggggtaaacgaatacggtaacatgggtgctatggcggtgacattagcgcagactctggggcaaaacctcggcatgatgtggaataaacatagatctagcgctggggactgtaaatgtccagatatatggttaggttgtatcatggaggatacaggattctatctcccacgcaagttttccagatgttctatcgatgaatataaccagttcctgcaggaaggaggcggaagttgcctgttcaacaaacccctcaaactgttagatccacccgagtgtggaaacgggttcgtggaagcaggggaagaatgtgactgcgggagtgttcaggagtgttcacgggctggtggcaactgctgtaagaaatgtactctcacacacgatgcgatgtgctccgatgggctctgctgccgccgttgtaagtacgagccacgcggcgtgtcatgccgggaagcagtgaacgaatgcgacatagcggagacctgtactggagacagcagccagtgccctccaaacctacataaactggatggctattattgcgatcatgagcagggcaggtgctatggcggacgatgcaagacaagagatcgacagtgccaagtcctatggggccacgctgctgccgacagattctgctacgagaaactgaacgtggagggcaccgaaaggggcagttgcggacggaaaggttctgggtgggtccagtgcagcaaacagccccaacaggggagggccgtgtggctaccgccactgtgccagcacttatggagctcaagcgctagggggcccggcggccgtcatcagtag

SEQ ID NO: 275108 - DNA, 1572 bp, Artificial Sequence
  derived and/or modified sequence
tgctggggcagcggccacctgctgagcagccagtatgtggagcggcacttcagccgggagggcaccacccagcacagcactggagctggggaccactgctactaccagggcaagctgcggggcaacccccacagctttgctgccctgagcacctgccagggcctgcacggcgtcttcagtgatggcaacctgacctacatcgtggagccccaggaggtggccggcccctggggcgccccccagggccccctgccccacctgatctaccgcacccccctgctgcctgaccccctgggctgccgggagcccggctgcctgtttgctgtgcctgcccagagcgccccacccaaccggccccggctgcggaggaagaggcaggtgcggcggggccaccccaccgtgcacagcgagaccaagtatgtggagctgattgtcatcaatgaccaccagctgtttgagcagatgaggcagagcgtggtgctgaccagcaactttgccaagtctgtggtgaacctggctgatgtgatctacaaggagcagctgaacaccagaattgtgctggtggccatggagacctgggcagatggagacaagatccaggtgcaggatgacctgctggagaccctggcccggctgatggtgtaccgccgggagggcctgcctgagcccagtgatgccacccacctgttcagcggccgcaccttccagagcaccagcagcggggccgcctacgtgggcggcatctgcagcctgagccatggaggcggcgtgaatgaatatggcaacatgggcgccatggctgtgaccctggcccagaccctgggccagaacctgggcatgatgtggaacaagcacaggagcagcgctggggactgcaagtgcccagacatctggctgggctgcatcatggaggacaccggcttctacctgcccaggaagttcagccgctgcagcattgatgagtacaaccagttcctgcaggagggcggcggcagctgcctcttcaacaagcccctgaagctgctggaccccccagaatgtggaaatggatttgtggaggccggggaggagtgtgactgtggctctgtgcaggagtgcagcagagctgggggcaactgctgcaagaagtgcaccctgacccatgatgccatgtgcagtgatggcctgtgctgccgccgctgcaagtatgagccccggggcgtgtcctgccgggaggccgtgaatgaatgtgacattgctgagacctgcacaggagacagcagccagtgcccccccaacctgcacaagctggatggctactactgtgaccacgagcagggccgctgctatggaggccgctgcaagacccgggaccggcagtgccaggtgctgtggggccatgctgctgctgaccgcttctgctatgagaagctgaatgtggagggcacagagcggggcagctgtggcaggaagggcagcggctgggtgcagtgcagcaagcagccccagcagggccgggctgtgtggctgccccccctgtgccagcacctgtggagcagcagcgcccggggccctgggggccgccaccagtag

SEQ ID NO: 275109 - DNA, 1572 bp, Artificial Sequence
  derived and/or modified sequence
tgctggggcagcggccacctgctgagcagccagtacgtggagcggcatttttctagagaaggaacaacgcagcacagtacaggggcaggagatcattgctactatcagggaaagctcaggggcaacccacactcttttgccgcactttccacctgtcagggtttacacggggtgttttccgatggcaacctgacatatatcgtcgaaccccaggaggtggccgggccatggggggcgccccaaggccccctcccacatttgatatacagaactcccctgctgcccgatccccttgggtgccgggagccaggttgcctgttcgctgttcctgcccagtcagcacctcccaaccgtcctagactgagaagaaaaagacaggtccggaggggccatccaaccgtccactctgagacgaagtacgtagagctgatcgtgattaatgaccaccaactgtttgagcagatgcgacaaagcgtggtcctcacatccaacttcgctaagtccgtggtaaacctggctgacgttatttataaagaacagttaaacacccgcattgttctggttgccatggagacgtgggccgatggcgacaaaatccaggtccaagacgatctcttagagaccctggcgaggttgatggtgtacaggagggagggactgccagaaccgtctgacgcaacccaccttttctccgggagaacgttccagtcgacttccagtggggcagcttatgtgggtggaatttgctccctgtctcacggaggcggtgtaaacgagtacgggaatatgggcgccatggcggtcacactcgcccaaacgctggggcagaaccttggtatgatgtggaacaagcatcgctcatccgctggcgactgtaagtgtcctgacatttggctgggctgcattatggaagataccggattctacctcccccgcaagttcagccgctgcagcattgacgagtataaccagtttcttcaggaaggtgggggatcatgtctcttcaacaaaccattaaaacttcttgatccccctgaatgcggaaatggctttgttgaggccggtgaggagtgtgactgtgggtcagtgcaggaatgctcacgagcgggagggaactgctgcaagaagtgcacactgacccatgacgccatgtgttccgatgggctttgctgccgtcggtgtaaatacgaaccccgcggagtgtcctgtcgggaagctgtaaacgagtgcgacatcgccgagacctgtactggagatagctcccaatgcccccccaatctccacaagctggacggttactactgcgatcatgaacagggtcgatgctatggtgggaggtgcaagacccgagaccggcagtgtcaagtactctggggacacgccgctgccgatcgattttgctatgagaagttgaacgtggagggcaccgagaggggatcctgtgggcggaaaggatctggctgggtccagtgctccaaacaaccccaacagggtcgggccgtgtggcttcccccgctgtgccagcatctatggagtagcagtgcacgagggccaggcggaaggcaccagtag

SEQ ID NO: 275110 - DNA, 1572 bp, Artificial Sequence
  derived and/or modified sequence
tgctggggaagcgggcatcttctgagcagtcagtacgtcgagcgccactttagcagagaaggaactacccaacacagtaccggcgctggcgaccattgttattaccagggaaaattaagaggtaacccccattcttttgccgctttgtccacctgtcaggggctgcatggcgtattttcggacgggaacctgacttacattgttgaaccacaagaagttgcgggtccctggggagcgcctcagggaccattgccccacctcatctaccgaactcccttgctgcctgatccactgggatgtcgcgagcccggatgtctgttcgctgtcccggcacagtccgccccacctaatagacctcggttaaggcgtaagagacaggtccgcagagggcatcccaccgtacactccgaaacaaagtatgtcgagctgatcgtcattaacgaccaccaacttttcgagcagatgcgccaatcggtggttctcaccagtaatttcgctaaaagcgtggtgaatttggcggatgtgatttacaaggaacagctaaacacacgaatcgtccttgtggccatggagacttgggctgatggggataagatacaagtgcaggacgacctcttggaaaccctggccagacttatggtgtatagaagagaggggctgcccgagccaagtgatgctacccacctcttttccgggaggaccttccagtcaacgtccagcggggcagcctatgtagggggtatatgcagtctcagtcacggagggggagtcaatgagtacggcaacatgggcgctatggcggtgacactagctcagacactcggccagaacctcggaatgatgtggaataaacatcgaagctccgccggagattgtaagtgccctgatatttggttgggatgcatcatggaagacacaggcttctacctgcccaggaaattctcaaggtgcagtatcgacgaatataaccagttccttcaggaaggaggaggttcctgcctctttaataaaccgctgaagctgttggaccccccagaatgtggaaatggctttgttgaggcaggcgaagagtgcgactgcgggtctgttcaagaatgcagtagagcgggaggaaattgttgtaagaagtgtacattaacacacgatgcaatgtgctcggacggcctatgttgcaggagatgtaagtacgagcctaggggtgtgtcctgtagagaggcggtcaatgaatgtgatatcgccgagacctgtaccggagatagcagtcagtgccctccaaacttacacaagcttgatggctattattgcgatcatgagcagggtcgatgttacggaggaagatgtaagactagagatagacagtgtcaagttttatggggccatgccgcagccgacaggttctgctacgaaaagctaaacgttgagggaactgaacgcggttcttgcggcaggaaaggatcaggttgggtgcagtgttccaaacagccccagcagggccgagctgtgtggctcccaccattatgccagcacctctggtcgagctctgcaaggggccctggagggcgacatcagtag

SEQ ID NO: 275111 - DNA, 1572 bp, Artificial Sequence
  derived and/or modified sequence
tgctggggcagcggccacctgctgagcagccagtacgtggagagacacttcagcagagagggcaccacccagcacagcaccggcgccggcgaccactgctactaccagggcaagctgagaggcaacccccacagcttcgccgccctgagcacctgccagggcctgcacggcgtgttcagcgacggcaacctgacctacatcgtggagccccaggaggtggccggcccctggggcgccccccagggccccctgccccacctgatctacagaacccccctgctgcccgaccccctgggctgcagagagcccggctgcctgttcgccgtgcccgcccagagcgccccccccaacagacccagactgagaagaaagagacaggtgagaagaggccaccccaccgtgcacagcgagaccaagtacgtggagctgatcgtgatcaacgaccaccagctgttcgagcagatgagacagagcgtggtgctgaccagcaacttcgccaagagcgtggtgaacctggccgacgtgatctacaaggagcagctgaacaccagaatcgtgctggtggccatggagacctgggccgacggcgacaagatccaggtgcaggacgacctgctggagaccctggccagactgatggtgtacagaagagagggcctgcccgagcccagcgacgccacccacctgttcagcggcagaaccttccagagcaccagcagcggcgccgcctacgtgggcggcatctgcagcctgagccacggcggcggcgtgaacgagtacggcaacatgggcgccatggccgtgaccctggcccagaccctgggccagaacctgggcatgatgtggaacaagcacagaagcagcgccggcgactgcaagtgccccgacatctggctgggctgcatcatggaggacaccggcttctacctgcccagaaagttcagcagatgcagcatcgacgagtacaaccagttcctgcaggagggcggcggcagctgcctgttcaacaagcccctgaagctgctggacccccccgagtgcggcaacggcttcgtggaggccggcgaggagtgcgactgcggcagcgtgcaggagtgcagcagagccggcggcaactgctgcaagaagtgcaccctgacccacgacgccatgtgcagcgacggcctgtgctgcagaagatgcaagtacgagcccagaggcgtgagctgcagagaggccgtgaacgagtgcgacatcgccgagacctgcaccggcgacagcagccagtgcccccccaacctgcacaagctggacggctactactgcgaccacgagcagggcagatgctacggcggcagatgcaagaccagagacagacagtgccaggtgctgtggggccacgccgccgccgacagattctgctacgagaagctgaacgtggagggcaccgagagaggcagctgcggcagaaagggcagcggctgggtgcagtgcagcaagcagccccagcagggcagagccgtgtggctgccccccctgtgccagcacctgtggagcagcagcgccagaggccccggcggcagacaccagtag

SEQ ID NO: 275112 - DNA, 2876 bp, Artificial Sequence
  derived and/or modified sequence
tgctgggggtctggccacctcctctcctcgcaatacgtggagcgccacttcagccgggaggggacaacccagcacagcaccggggctggagaccactgctactaccaggggaagctccgggggaacccgcactccttcgccgccctctccacctgccaggggctgcatggggtcttctctgatgggaacttgacttacatcgtggagccccaagaggtggctggaccttggggagcccctcagggaccccttccccacctcatttaccggacccctctcctcccagatcccctcggatgcagggaaccaggctgcctgtttgctgtgcctgcccagtcggctcctccaaaccggccgaggctgagaaggaaaaggcaggtccgccggggccaccctacagtgcacagtgaaaccaagtatgtggagctaattgtgatcaacgaccaccagctgttcgagcagatgcgacagtcggtggtcctcaccagcaactttgccaagtccgtggtgaacctggccgatgtgatatacaaggagcagctcaacactcgcatcgtcctggttgccatggaaacatgggcagatggggacaagatccaggtgcaggatgacctcctggagaccctggcccggctcatggtctaccgacgggagggtctgcctgagcccagtgatgccacccacctcttctcgggcaggaccttccagagcacgagcagcggggcagcctacgtggggggcatatgctccctgtcccacggcgggggtgtgaacgagtacggcaacatgggggcgatggccgtgacccttgcccagacgctgggacagaacctgggcatgatgtggaacaaacaccggagctcggcaggggactgcaagtgtccagacatctggctgggctgcatcatggaggacactgggttctacctgccccgcaagttctcgcgctgtagcatcgacgagtacaaccagtttctgcaggagggtggtggcagctgcctcttcaacaagcccctcaagctcctggaccccccagagtgcgggaacggcttcgtggaggcaggggaggagtgcgactgcggctcggtgcaggagtgcagccgcgcaggtggcaactgctgcaagaaatgcaccctgactcacgacgccatgtgcagcgacgggctctgctgtcgccgctgcaagtacgaaccacggggtgtgtcctgccgagaggccgtgaacgagtgcgacatcgcggagacctgcaccggggactctagccagtgcccgcctaacctgcacaagctggacggttactactgtgaccatgagcagggccgctgctacggaggtcgctgcaaaacccgggaccggcagtgccaggttctttggggccatgcggctgctgatcgcttctgctacgagaagctgaatgtggaggggacggagcgtgggagctgtgggcgcaagggatctggctgggtccagtgcagtaagcagccccaacagggacgtgctgtgtggcttcctcctctgtgtcaacatctctggagctcctcggctaggggacctggtgggagacatcagtagtgtcaccttctaccaccagggcaaggagctggactgcaggggaggccacgtgcagctggcggacggctctgacctgagctatgtggaggatggcacagcctgcgggcctaacatgttgtgcctggaccatcgctgcctgccagcttctgccttcaacttcagcacctgccccggcagtggggagcgccggatttgctcccaccacggggtctgcagcaatgaagggaagtgcatctgtcagccagactggacaggcaaagactgcagtatccataaccccctgcccacgtccccacccacgggggagacggagagatataaaggtcccagcggcaccaacatcatcattggctccattgctggggctgtcctggttgcagccatcgtcctgggcggcacgggctggggatttaaaaacattcgccgaggaaggtccggaggggcctaagtgccaccctcctccctccaagcctggcacccaccgtctcggccctgaaccacgaggctgcccccatccagccacggagggaggcaccatgcaaatgtcttccaggtccaaacccttcaactcctggctccgcaggggtttgggtgggggctgtggccctgcccttggcaccaccagggtggaccaggcctggagggcacttcctccacagtcccccacccacctcctgcggctcagccttgcacacccactgccccgtgtgaatgtagcttccacctcatggattgccacagctcaactcgggggcgcctggagggatgcccccaggcagccaccagtggacctagcctggatggcccctccttgcaaccaggcagctgagaccagggtcttacctctctgggacctagggggacggggctgacatctacattttttaaaactgaatcttaatcgatgaatgtaaactcgggggtgctggggccagggcagatgtggggatgttttgacatttacaggagggcccggagaaactgaggtatggccatgccctagaccctccccaaggatgaccacacccgaagtcctgtcactgagcacagtcaggggctgggcatcccagcttgcccccgcttagccccgctgagcttggaggaagtatgagtgctgattcaaaccaaagctgcctgtgccatgcccaaggcctaggttatgggtacggcaaccacatgtcccagatcgtctccaattcgaaaacaaccgtcctgctgtccctgtcaggacacatggattttggcagggcggggggggttctagaaaatatagttcctataataaaatggcaccttcccccttt

SEQ ID NO: 275113 - DNA, 69 bp, Artificial Sequence
  derived and/or modified sequence
atggcctcagcctgtggcgctcctggtcctggtggagcgttaggcagccaggctccctcatggtactag

SEQ ID NO: 275114 - protein, 930 aa, Artificial Sequence
  derived and/or modified sequence
MDEQSVERWLTEQRAQCPHCRAPLQLRELVNCRWAEEVTQQLDTLQLCSLTKHEENEKDKCENHHEKLSVFCWTCKKCICHQCALWGGMHGGHTFKPLAEIYEQHVTKVNEEVAKLRRRLMELISLVQEVERNVEAVRNAKDERVREIRNAVEMMIARLDTQLKNKLITLMGQKTSLTQETELLESLLQEVEHQLRSCSKSELISKSSEILMMFQQVHRKPMASFVTTPVPPDFTSELVPSYDSATFVLENFSTLRQRADPVYSPPLQVSGLCWRLKVYPDGNGVVRGYYLSVFLELSAGLPETSKYEYRVEMVHQSCNDPTKNIIREFASDFEVGECWGYNRFFRLDLLANEGYLNPQNDTVILRFQVRSPTFFQKSRDQHWYITQLEAAQTSYIQQINNLKERLTIELSRTQKSRDLSPPDNHLSPQNDDALETRAKKSACSDMLLEGGPTTASVREAKEDEEDEEKIQNEDYHHELSDGDLDLDLVYEDEVNQLDGSSSSASSTATSNTEENDIDEETMSGENDVEYNNMELEEGELMEDAAAAGPAGSSHGYVGSSSRISRRTHLCSAATSSLLDIDPLILIHLLDLKDRSSIENLWGLQPRPPASLLQPTASYSRKDKDQRKQQAMWRVPSDLKMLKRLKTQMAEVRCMKTDVKNTLSEIKSSSAASGDMQTSLFSADQAALAACGTENSGRLQDLGMELLAKSSVANCYIRNSTNKKSNSPKPARSSVAGSLSLRRAVDPGENSRSKGDCQTLSEGSPGSSQSGSRHSSPRALIHGSIGDILPKTEDRQCKALDSDAVVVAVFSGLPAVEKRRKMVTLGANAKGGHLEGLQMTDLENNSETGELQPVLPEGASAAPEEGMSSDSDIECDTENEEQEEHTSVGGFHDSFMVMTQPPDEDTHSSFPDGEQIGPEDLSFNTDENSGR

SEQ ID NO: 275115 - DNA, 2793 bp, Artificial Sequence
  derived and/or modified sequence
atggacgagcagagcgtggagagatggctgaccgagcagagagcccagtgcccccactgcagagcccccctgcagctgagagagctggtgaactgcagatgggccgaggaggtgacccagcagctggacaccctgcagctgtgcagcctgaccaagcacgaggagaacgagaaggacaagtgcgagaaccaccacgagaagctgagcgtgttctgctggacctgcaagaagtgcatctgccaccagtgcgccctgtggggcggcatgcacggcggccacaccttcaagcccctggccgagatctacgagcagcacgtgaccaaggtgaacgaggaggtggccaagctgagaagaagactgatggagctgatcagcctggtgcaggaggtggagagaaacgtggaggccgtgagaaacgccaaggacgagagagtgagagagatcagaaacgccgtggagatgatgatcgccagactggacacccagctgaagaacaagctgatcaccctgatgggccagaagaccagcctgacccaggagaccgagctgctggagagcctgctgcaggaggtggagcaccagctgagaagctgcagcaagagcgagctgatcagcaagagcagcgagatcctgatgatgttccagcaggtgcacagaaagcccatggccagcttcgtgaccacccccgtgccccccgacttcaccagcgagctggtgcccagctacgacagcgccaccttcgtgctggagaacttcagcaccctgagacagagagccgaccccgtgtacagcccccccctgcaggtgagcggcctgtgctggagactgaaggtgtaccccgacggcaacggcgtggtgagaggctactacctgagcgtgttcctggagctgagcgccggcctgcccgagaccagcaagtacgagtacagagtggagatggtgcaccagagctgcaacgaccccaccaagaacatcatcagagagttcgccagcgacttcgaggtgggcgagtgctggggctacaacagattcttcagactggacctgctggccaacgagggctacctgaacccccagaacgacaccgtgatcctgagattccaggtgagaagccccaccttcttccagaagagcagagaccagcactggtacatcacccagctggaggccgcccagaccagctacatccagcagatcaacaacctgaaggagagactgaccatcgagctgagcagaacccagaagagcagagacctgagcccccccgacaaccacctgagcccccagaacgacgacgccctggagaccagagccaagaagagcgcctgcagcgacatgctgctggagggcggccccaccaccgccagcgtgagagaggccaaggaggacgaggaggacgaggagaagatccagaacgaggactaccaccacgagctgagcgacggcgacctggacctggacctggtgtacgaggacgaggtgaaccagctggacggcagcagcagcagcgccagcagcaccgccaccagcaacaccgaggagaacgacatcgacgaggagaccatgagcggcgagaacgacgtggagtacaacaacatggagctggaggagggcgagctgatggaggacgccgccgccgccggccccgccggcagcagccacggctacgtgggcagcagcagcagaatcagcagaagaacccacctgtgcagcgccgccaccagcagcctgctggacatcgaccccctgatcctgatccacctgctggacctgaaggacagaagcagcatcgagaacctgtggggcctgcagcccagaccccccgccagcctgctgcagcccaccgccagctacagcagaaaggacaaggaccagagaaagcagcaggccatgtggagagtgcccagcgacctgaagatgctgaagagactgaagacccagatggccgaggtgagatgcatgaagaccgacgtgaagaacaccctgagcgagatcaagagcagcagcgccgccagcggcgacatgcagaccagcctgttcagcgccgaccaggccgccctggccgcctgcggcaccgagaacagcggcagactgcaggacctgggcatggagctgctggccaagagcagcgtggccaactgctacatcagaaacagcaccaacaagaagagcaacagccccaagcccgccagaagcagcgtggccggcagcctgagcctgagaagagccgtggaccccggcgagaacagcagaagcaagggcgactgccagaccctgagcgagggcagccccggcagcagccagagcggcagcagacacagcagccccagagccctgatccacggcagcatcggcgacatcctgcccaagaccgaggacagacagtgcaaggccctggacagcgacgccgtggtggtggccgtgttcagcggcctgcccgccgtggagaagagaagaaagatggtgaccctgggcgccaacgccaagggcggccacctggagggcctgcagatgaccgacctggagaacaacagcgagaccggcgagctgcagcccgtgctgcccgagggcgccagcgccgcccccgaggagggcatgagcagcgacagcgacatcgagtgcgacaccgagaacgaggagcaggaggagcacaccagcgtgggcggcttccacgacagcttcatggtgatgacccagccccccgacgaggacacccacagcagcttccccgacggcgagcagatcggccccgaggacctgagcttcaacaccgacgagaacagcggcagatag

SEQ ID NO: 275116 - DNA, 2793 bp, Artificial Sequence
  derived and/or modified sequence
atggacgaacagtctgtcgagcgctggttaaccgagcaaagagcccagtgcccccactgtagagcccccctccagctcagagaactggttaactgccggtgggccgaggaggtaacacagcaacttgatacacttcagctatgctccctaacaaagcacgaggagaatgaaaaagacaaatgcgaaaaccaccacgagaagctttcagtgttctgttggacctgtaagaagtgcatttgtcaccaatgcgccctgtggggcgggatgcatgggggacacacttttaagcccttagcagagatctacgagcaacacgttacaaaggttaacgaagaagtggcaaagctacgaaggagactcatggaactgatttccctcgtacaagaggttgaacggaacgttgaagccgtccggaatgcaaaagatgaaagagttcgtgagatcagaaacgcggtggagatgatgattgctcggctcgatactcagctgaagaacaagctcattacgctcatgggccagaaaacatccctcacccaggagacagagctgttggagagtctcctgcaggaagtggagcatcagctccgaagttgctcgaaaagtgaactgatttccaagtcaagtgagatcctgatgatgttccagcaagtgcatcggaagcccatggcctcttttgtcacaacccctgtgccccctgacttcacaagtgaactggtgccttcttacgacagcgctacatttgtgttagaaaacttttccacactacggcagcgggctgatcccgtttatagcccacctctgcaggtgtctgggctctgctggcgcctgaaagtttaccccgatggcaacggggtggtgcggggatattacctgagtgtctttctggagcttagcgccggactgcctgaaacctcaaagtacgaatatcgggtggaaatggtccaccagtcttgcaatgatccaacaaaaaacatcatacgcgagttcgcctccgatttcgaagtcggtgagtgctggggctacaatagattcttccggctcgacctcctggccaatgaggggtacctaaatccccagaacgacacagtaattctgcgatttcaagtccgctcacctacgttcttccaaaagtcccgggaccagcattggtatatcacccaactcgaggccgcacaaactagctacatccaacagatcaacaatttgaaagaacgccttaccattgagctgagtagaacgcagaaatccagagacctgtcgcccccagataaccatttgagccctcagaacgacgacgctcttgaaacgcgcgcgaagaagtctgcatgcagtgatatgctgcttgaaggggggccaactacagcatctgtacgggaggcaaaagaggacgaggaagacgaggaaaagatacagaatgaggattaccaccatgaactgagcgatggagatctggaccttgaccttgtctatgaggatgaggtaaatcagctcgacgggagcagttcatcagcgtcttccaccgccacatctaataccgaggagaatgatatcgacgaggaaaccatgtcaggtgaaaacgacgtggagtacaataacatggagctcgaggaaggtgagctgatggaagacgcagctgcagcagggccagccggatccagccacgggtacgtgggcagttcctcccgaatttcaaggcggacacacctatgctccgccgccactagctccctgctagatatcgatcccctgatactgatccacttactcgacctaaaggacaggagctccatagagaacctgtggggcctacaaccaaggcctccagcgtccctgctgcagccgaccgcttcttactctagaaaggataaggatcagcgcaagcagcaggccatgtggagggtgccttcagacctcaaaatgcttaagcggctgaagacacagatggccgaggtgcgatgtatgaaaaccgacgttaagaacaccctgagcgaaattaaatccagcagcgccgccagcggcgacatgcagacatctctattttccgccgaccaggctgcattagcagcatgcgggaccgagaattccggcaggctgcaagaccttggaatggaactgctggcgaaatccagcgttgccaattgttatatacggaatagtaccaacaagaagtccaacagtcccaagcctgccagatcctcagtggccggttctttatcgttgcgccgggccgtggaccccggcgagaattcacggtctaagggtgactgccagacactttctgaaggttcgccgggttcatcacagtccgggtcacgccactcctctccaagggcactgatccacggctccatcggcgacatcctgcctaaaaccgaagacaggcagtgtaaggcgcttgattctgacgccgtggtcgtcgctgtgttctctgggttgccagcggtagaaaaaagacggaagatggtgacattgggagccaacgcgaagggggggcatctggaaggtctccagatgactgacctggagaacaactcagagacaggcgaactgcagcctgtccttcccgagggggcctcagcagctccggaggaaggcatgtcttccgatagtgacatagagtgcgacacagagaatgaagagcaagaggagcatacaagcgtaggagggtttcacgacagcttcatggtaatgacacagccacccgatgaggacactcactcctcttttcctgatggcgagcaaattgggcctgaagacctgtcgttcaatacagatgagaactctgggcggtag

SEQ ID NO: 275117 - DNA, 2793 bp, Artificial Sequence
  derived and/or modified sequence
atggatgagcagagcgtggagcgctggctgacagagcagagggcccagtgcccccactgccgggcccccctgcagctgcgggagctggtgaactgccgctgggccgaggaggtgacccagcagctggacaccctgcagctgtgcagcctgaccaagcatgaagaaaatgagaaggacaagtgtgagaaccaccacgagaagctgtctgtgttctgctggacctgcaagaagtgcatctgccaccagtgtgccctgtggggcggcatgcacggcggccacaccttcaagcccctggccgagatctatgagcagcacgtgaccaaggtgaatgaggaggtggccaagctgcggcggcggctgatggagctgatcagcctggtgcaggaggtggagagaaatgtggaggccgtgagaaatgccaaggatgagcgggtgcgggagatcagaaatgctgtggagatgatgattgcccggctggacacccagctgaagaacaagctgatcaccctgatgggccagaagaccagcctgacccaggagacagagctgctggagagcctgctgcaggaggtggagcaccagctgcggagctgcagcaagtctgagctgatcagcaagagcagcgagatcctgatgatgttccagcaggtgcacaggaagcccatggccagctttgtgaccacccctgtgcccccagacttcaccagcgagctggtgcccagctatgacagcgccacctttgtgctggagaacttcagcaccctgcggcagagagctgaccctgtgtacagcccccccctgcaggtgtctggcctgtgctggaggctgaaggtgtacccagatggaaatggagtggtgcggggctactacctgagcgtcttcctggagctgtctgctggcctgcctgagaccagcaaatatgagtacagagtggagatggtgcaccagagctgcaatgaccccaccaagaacatcatccgggagtttgccagtgactttgaggtgggggagtgctggggctacaaccgcttcttccggctggacctgctggccaatgaaggctacctgaacccccagaatgacaccgtcatcctgcgcttccaggtgcgcagccccaccttcttccagaagagccgggaccagcactggtacatcacccagctggaggccgcccagaccagctacatccagcagatcaacaacctgaaggagcggctgaccatcgagctgagcaggacccagaagagccgggacctgagccccccagacaaccacctgagcccccagaatgatgatgccctggagacccgggccaagaagagcgcctgcagcgacatgctgctggagggcggccccaccacagcctctgtgcgggaggccaaggaggatgaagaagatgaggagaagatccagaatgaagactaccaccacgagctgagtgatggagacctggacctggacctggtgtatgaagatgaggtgaaccagctggatggcagcagcagcagcgccagcagcacagccaccagcaacacagaggagaatgacattgatgaggagaccatgtctggagaaaatgatgtggagtacaacaacatggagctggaggagggggagctgatggaggatgctgctgctgctggccctgctggcagcagccacggctacgtgggcagcagcagccgcatcagcaggaggacccacctgtgcagcgctgccaccagcagcctgctggacatcgaccccctcatcctgatccacctgctggacctgaaggacaggagcagcattgagaacctgtggggcctgcagccccggcccccagccagcctgctgcagcccacagccagctacagcaggaaggacaaggaccagaggaagcagcaggccatgtggagggtgcccagcgacctgaagatgctgaagaggctgaagacccagatggccgaggtgcgctgcatgaagacagatgtgaagaacaccctgtctgagatcaagagcagcagcgctgccagcggggacatgcagaccagcctcttctctgctgaccaggccgccctggccgcctgtggcacagaaaattctggccgcctgcaggacctgggcatggagctgctggccaagagctctgtggccaactgctacatccggaacagcaccaacaagaagagcaacagccccaagccagcccggagctctgtggccggcagcctgagcctgcggcgggctgtggaccccggggagaacagccgcagcaaaggagactgccagaccctgtctgagggcagccctggcagcagccagagcggcagccgccacagcagcccccgggccctgattcatggcagcatcggggacatcctgcccaagacagaggaccggcagtgcaaggccctggacagtgatgctgtggtggtggccgtgttcagcggcctgcctgctgtggagaagaggaggaagatggtgaccctgggcgccaatgccaagggcggccacctggagggcctgcagatgacagacctggagaacaacagcgagactggagagctgcagcctgtgctgcctgagggcgccagcgctgcccctgaggagggcatgagcagtgacagcgacattgaatgtgacacagaaaatgaggagcaggaggagcacacctctgtgggcggcttccatgacagcttcatggtgatgacccagcccccagatgaggacacccacagcagcttcccagatggagagcagatcggccctgaggacctgtccttcaacacagatgagaacagcggccgctag

SEQ ID NO: 275118 - DNA, 2793 bp, Artificial Sequence
  derived and/or modified sequence
atggacgagcagagcgtggagcggtggctgaccgagcagcgggcccagtgcccccactgtcgtgccccactccagctcagggagctggtgaattgtaggtgggcggaggaggtgacccagcagcttgatacactgcagctgtgctctctgacaaagcatgaggaaaatgagaaggacaagtgcgaaaatcatcacgaaaaactctccgtgttttgctggacctgcaagaaatgcatctgtcaccaatgtgccctgtggggtggtatgcacggaggacatacattcaagcctttggctgagatttacgagcaacacgtgacaaaggtcaacgaggaagtagccaagctgcgacggagactcatggaactgatctcactcgttcaggaagtggagcgaaacgtcgaggcagtccgaaacgccaaggatgagcgggtcagggagatccggaatgccgtcgagatgatgattgccaggttggatactcagctgaaaaacaaactgatcaccctcatgggtcagaaaacaagcctcacgcaggaaaccgagctgctagagagtttgcttcaggaggtggaacaccagctccgatcatgtagcaagagtgaactgatcagcaaatcctcggagatactgatgatgttccagcaggtgcatcgtaagccaatggcgtccttcgtgactacaccagtgccccctgactttacaagcgagctggtgccaagctatgactcagccacatttgtgctcgagaattttagcaccctgaggcagcgtgctgatcctgtctatagccccccgctacaggtgtccggactgtgttggagactcaaggtgtaccccgacgggaacggagtggtgagaggttattacctttctgtgttcctggaattatctgccggacttcctgaaacctctaagtacgagtacagggtggaaatggtccaccagagctgcaatgatcccacgaaaaatatcataagagagttcgcgagtgactttgaagtaggcgagtgctgggggtataaccggttctttaggctcgatctgctcgcaaacgaaggatacctgaatccacagaacgatacagtgattctcaggttccaagtcaggtcccctaccttctttcagaagtccagggaccagcactggtatataacgcagttagaagcagctcaaacctcctatattcaacaaatcaataacctcaaggaacggctaacaattgaactctctcgtacccaaaagagcagggacctctccccccccgacaaccacctgtctcctcagaacgatgacgctcttgaaacaagggccaagaagagtgcctgctccgacatgctgctggagggaggacccacgaccgcgtcagtacgggaggctaaggaagacgaagaagatgaagaaaagatccagaacgaggactatcatcatgaactgtcggatggcgatctcgatcttgatctggtctacgaagacgaagttaatcaacttgacggctccagcagcagtgccagttccaccgccacctccaatacggaggaaaacgacatcgacgaggagaccatgtctggggaaaatgacgttgaatataataacatggagctcgaagaaggagaactgatggaggatgcggcagcagcagggccagctggcagcagccacgggtacgtgggaagttcctccagaatttctcggaggacccacctgtgcagtgccgcaacttcctccttacttgatattgatccacttatcctgatccatttactggatctgaaagacagaagcagcatcgagaacctctggggactgcagcctaggcctccagcgtcccttctccaacccaccgcctcatactcacgaaaggacaaggatcagagaaagcagcaggctatgtggcgcgtgcccagtgacctgaaaatgctgaaacgtttaaaaacccaaatggctgaggtgcgctgcatgaagactgacgtgaagaacacgctgtccgagattaagagcagcagcgccgctagcggcgatatgcagactagcctattcagcgccgaccaggctgctctcgccgcttgcgggacagagaatagcggccgtttgcaggatcttggaatggaactcctggctaagtcttcggtggcaaactgttacattaggaacagcaccaataagaaaagcaacagccccaaacctgcgcgcagctcagtcgctgggagtctgtccttacgtcgggcagtggaccccggtgagaatagtagatccaagggggattgtcaaacgctgtccgaaggctctccaggcagttctcagagcggcagtaggcattcttcaccccgtgccctgatccacggatctattggagacattctgcctaaaacagaagatagacagtgtaaagccttggattctgacgccgtcgtggtggccgttttctcaggccttcctgcggtcgaaaagaggcgcaagatggtgacattgggcgccaatgcgaagggcggccacttagagggactgcagatgaccgatctggaaaacaatagtgaaaccggcgagctacagccagtgctgcccgagggagcgtccgccgctccggaggaaggcatgtcatccgattccgacatcgaatgtgatacggagaatgaggagcaagaggagcataccagtgttggcggatttcacgattcttttatggtgatgacgcagccgcccgatgaggacacccactcctcgttcccggatggcgaacagatcggtccggaagatcttagttttaatactgatgaaaattctggtcggtag

SEQ ID NO: 275119 - DNA, 2793 bp, Artificial Sequence
  derived and/or modified sequence
atggatgaacagtcagtggagcggtggctaaccgagcagagggctcagtgtccacattgtcgagctcccctgcagctgagagagctggtgaactgtcgttgggccgaagaggtgactcaacagctggacaccttgcagttgtgcagcctgactaagcatgaagagaacgaaaaggacaaatgtgaaaaccatcatgaaaaactctctgtgttctgttggacatgcaaaaagtgtatatgccaccagtgcgctttatggggcggaatgcacgggggtcacacctttaagcccctagccgaaatctatgaacagcacgtgactaaagttaacgaggaagttgctaagctacgtcgtaggctcatggaactgatctctctagttcaagaggtagagaggaatgtcgaggctgtccggaacgccaaagacgagcgggtgagggaaatacggaacgcagtagagatgatgatagcacggttagacactcagctgaagaacaaattaattacattgatggggcagaagacttccctgacacaggagaccgagctgcttgagtccctgctacaggaggttgagcatcagctgagaagttgcagtaagtcggagctcatctctaagagctctgagattctcatgatgttccaacaggtgcatcgaaagcctatggccagtttcgtgacaacgcctgtccctccggactttacgagtgaactggtgccttcatacgattccgccacatttgtgcttgagaattttagtactctgaggcagcgggcagacccagtatattcacctcctctccaggtgtccggcctttgctggcgactgaaagtgtatcccgacggcaacggagtcgtacgaggctattacctgtccgtttttctcgagctatcagcaggcctgccagagacctccaaatacgagtatagggtggaaatggtgcaccaatcctgcaacgaccctacgaaaaatatcatacgggaatttgcaagcgattttgaggttggagagtgctggggatataatagattttttcgcctggaccttctggctaacgaaggatatctgaacccccagaacgatacagttatcctgcgatttcaggtgagatcacccaccttcttccaaaagagtagagaccagcactggtacatcacacagctcgaggccgcacagacctcatacattcaacagattaataatctcaaagagcggttaacgattgaactgtcacgaactcagaagtcccgagatctgagccccccagacaatcacctttctcctcagaatgatgacgccctggagactcgcgcaaaaaagtccgcatgttccgacatgttgctggagggcggtccgacgacggctagcgtgagagaagcgaaggaggatgaagaagacgaagagaagatccagaatgaagattatcaccatgaactgagcgacggtgacctggacctcgaccttgtctacgaggacgaagtgaatcagctggatggttcgtcctctagcgcttcgagcaccgctacaagcaacactgaggagaacgatatcgatgaggagacgatgtcgggcgagaacgacgtagagtataacaatatggaactcgaagagggagaactgatggaggatgccgcagctgcgggaccagctgggagtagtcatgggtatgttggttcctcaagcagaatttcccggaggacacacctctgctctgccgctacgtccagcctcctcgatattgatcccctcatcctaattcatctactggatctcaaggacagatcctcaattgaaaacttgtggggcctccagccgagaccccctgcttccctgctccaaccaactgcttcttacagtcgaaaagataaagaccaaaggaaacagcaagcaatgtggagggtgccgtcagatctgaagatgctcaagcgcctgaagactcagatggcagaggtccgctgtatgaagaccgatgtcaaaaacacactctccgagatcaaatcaagttccgcagccagtggagacatgcagacctccctgttttccgctgatcaagctgccctggccgcttgcgggaccgagaattctggtcgattacaagatctcggcatggagctgttggctaaaagctccgtggcaaactgctacattcgtaactccactaacaaaaagtctaactccccaaagccagccaggagtagtgtggccggttccctgtccttgcgacgcgctgtggatcccggtgagaacagtagatcaaagggcgactgtcagacactctcagaaggctctcccggaagctcccagtccgggtcccgccattcctcaccaagagccttgatccacgggtctattggcgatattcttcctaaaaccgaggatcggcagtgtaaagcacttgatagcgacgctgtggtggtcgctgtctttagtggattgcctgccgtggagaaacgacggaaaatggtgactttgggagctaatgcaaaggggggacatctagaagggctgcagatgactgatctggaaaataactccgaaactggggagcttcagcccgtgcttccagagggcgctagtgcggctcccgaggaaggaatgtcctcagacagcgacattgagtgcgatacagaaaatgaagaacaggaggaacatacatcagttgggggatttcatgactcctttatggtaatgacacagccgccagatgaagacacacactcttcctttcctgatggggaacagatcggacctgaggatctttccttcaacacagacgagaattccgggcgatag

SEQ ID NO: 275120 - DNA, 3548 bp, Artificial Sequence
  derived and/or modified sequence
gaattctctgcggcaccttcttcgctgaactccaccgtcagttccataggcgcgcgcccgcgtcacgtgggccgaggttccggcgcggctgctggccggcggctgagccgggagaaaggagctgcggccaccgttcgccctacttctgcgcctcggggcgggcgcgccggtaaaaatggcgaaatgggggtaggcggcgctggacctgaagagatggggcgcgcaggtggggcggttgtcagagccccctgacgtgggcgccgggcttttatcggcgatttgatctggcgacctcgggccggcgcctaagaggtcagactgcggagcctgcgggtcgccagcggccccgccgagagccggaggcaatggatgaacagagcgtggagcgctggctgacagagcagagagctcaatgtcctcattgccgtgctccactccagctacgagaactagtaaattgtcgttgggcagaagaagtaacacaacagcttgatactcttcaactctgcagtctcaccaaacatgaagaaaatgaaaaggacaaatgtgaaaatcaccatgaaaaacttagtgtattttgctggacttgtaagaagtgtatctgccatcagtgtgcactttggggaggaatgcatggcggacatacctttaaacctttggcagaaatttatgagcaacacgtcactaaagtgaatgaagaggtagccaaacttcgtcggcgtctcatggaactgatcagcttagttcaagaagtggaaaggaatgtagaagctgtaagaaatgcaaaagatgagcgtgttcgggaaattaggaatgcagtggagatgatgattgcacggttagacacacagctgaagaataagcttataacactgatgggtcagaagacatctctaacccaagaaacagagcttttggaatccttacttcaggaggtggagcaccagttgcggtcttgtagtaagagtgagttgatatctaagagctcagagatccttatgatgtttcagcaagttcatcggaagcccatggcatcttttgttaccactcctgttccaccagactttaccagtgaattagtgccatcttacgattcagctacttttgttttagagaatttcagcactttgcgtcagagagcagatcctgtttacagtccacctcttcaagtttcaggactttgctggaggttaaaagtttacccagatggaaatggagttgtgcgaggttactacttatctgtgtttctggagctctcagctggcttgcctgaaacttctaaatatgaatatcgtgtagagatggttcaccagtcctgtaatgatcctacaaaaaatatcattcgagaatttgcatctgactttgaagttggagaatgctggggctataatagatttttccgtttggacttactcgcaaatgaaggatacttgaatccacaaaatgatacagtgattttaaggtttcaggtacgttcaccaactttctttcaaaaatcccgggaccagcattggtacattactcagttggaagctgcacagactagttatatccaacaaataaacaaccttaaagagagacttactattgagctgtctcgaactcagaagtcaagagatttgtcaccaccagataaccatcttagcccccaaaatgatgatgctctggagacacgagctaagaagtctgcatgctctgacatgcttctcgaaggtggtcctactacagcttctgtaagagaggccaaagaggatgaagaagatgaggagaagattcagaatgaagattatcatcacgagctttcagatggagatctggatctggatcttgtttatgaggatgaagtaaatcagctcgatggcagcagttcctctgctagttccacagcaacaagtaatacagaagaaaatgatattgatgaagaaactatgtctggagaaaatgatgtggaatataacaacatggaattagaagagggagaactcatggaagatgcagctgctgcaggacccgcaggtagtagccatggttatgtgggttccagtagtagaatatcaagaagaacacatttatgctccgctgctaccagtagtttactagacattgatccattaattttaatacatttgttggaccttaaggaccggagcagtatagaaaatttgtggggcttacagcctcgcccacctgcttcacttctgcagcccacagcatcatattctcgaaaagataaagaccaaaggaagcaacaggcaatgtggcgagtgccctctgatttaaagatgctaaaaagactcaaaactcaaatggccgaagttcgatgtatgaaaactgatgtaaagaatacactttcagaaataaaaagcagcagtgctgcttctggagacatgcagacaagccttttttctgctgaccaggcagctctggctgcatgtggaactgaaaactctggcagattgcaggatttgggaatggaactcctggcaaagtcatcagttgccaattgttacatacgaaactccacaaataagaagagtaattcgcccaagccagctcgatccagtgtagcaggtagtctatcacttcgaagagcagtggaccctggagaaaatagtcgttcaaagggagactgtcagactctgtctgaaggctccccaggaagctctcagtctgggagcaggcacagttctccccgagccttgatacatggcagtatcggtgatattctgccaaaaactgaagaccggcagtgtaaagctttggattcagatgctgttgtggttgcagttttcagtggcttgcctgcggttgagaaaaggaggaaaatggtcaccttgggggctaatgctaaaggaggtcatctggaaggactgcagatgactgatttggaaaataattctgaaactggagagttacagcctgtactacctgaaggagcttcagctgcccctgaagaaggaatgagtagcgacagtgacattgaatgtgacactgagaatgaggagcaggaagagcataccagtgtgggcgggtttcacgactccttcatggtcatgacacagcccccggatgaagatacacattccagttttcctgatggtgaacaaataggccctgaagatctcagcttcaatacagatgaaaatagtggaaggtaattgccaaatcaagagaactgacttgcaagctaccttgaccctgaattttgctgtagttggtgctcaaatttgtcatcagtcagataatcagatttggtcttatttcttcattatctcgacctgaaatagtaatttggaaactgttggaaggtggcacagtttagtctaagacagcagtagtacatgggaaaaacagtatgggaagagttctttgtaatgtaaggaaataacaatgtagttctctattaatttagcaaatttgtacattcacaaaaggcagtttgtctactacagcagaaggctggttaactgccagaaaatgtacctccaggccctgcatgccgtcagtaacccgcccggcattggtgctctactgtctttggctagagc

SEQ ID NO: 275121 - protein, 803 aa, Artificial Sequence
  derived and/or modified sequence
MHGGHTFKPLAEIYEQHVTKVNEEVAKLRRRLMELISLVQEVERNVEAVRNAKDERVREIRNAVEMMIARLDTQLKNKLITLMGQKTSLTQETELLESLLQEVEHQLRSCSKSELISKSSEILMMFQQVHRKPMASFVTTPVPPDFTSELVPSYDSATFVLENFSTLRQRADPVYSPPLQVSGLCWRLKVYPDGNGVVRGYYLSVFLELSAGLPETSKYEYRVEMVHQSCNDPTKNIIREFASDFEVGECWGYNRFFRLDLLANEGYLNPQNDTVILRFQVRSPTFFQKSRDQHWYITQLEAAQTSYIQQINNLKERLTIELSRTQKSRDLSPPDNHLSPQNDDALETRAKKSACSDMLLEGGPTTASVREAKEDEEDEEKIQNEDYHHELSDGDLDLDLVYEDEVNQLDGSSSSASSTATSNTEENDIDEETMSGENDVEYNNMELEEGELMEDAAAAGPAGSSHGYVGSSSRISRRTHLCSAATSSLLDIDPLILIHLLDLKDRSSIENLWGLQPRPPASLLQPTASYSRKDKDQRKQQAMWRVPSDLKMLKRLKTQMAEVRCMKTDVKNTLSEIKSSSAASGDMQTSLFSADQAALAACGTENSGRLQDLGMELLAKSSVANCYIRNSTNKKSNSPKPARSSVAGSLSLRRAVDPGENSRSKGDCQTLSEGSPGSSQSGSRHSSPRALIHGSIGDILPKTEDRQCKALDSDAVVVAVFSGLPAVEKRRKMVTLGANAKGGHLEGLQMTDLENNSETGELQPVLPEGASAAPEEDTHSSFPDGEQIGPEDLSFNTDENSGR

SEQ ID NO: 275122 - DNA, 2412 bp, Artificial Sequence
  derived and/or modified sequence
atgcacggcggccacaccttcaagcccctggccgagatctacgagcagcacgtgaccaaggtgaacgaggaggtggccaagctgagaagaagactgatggagctgatcagcctggtgcaggaggtggagagaaacgtggaggccgtgagaaacgccaaggacgagagagtgagagagatcagaaacgccgtggagatgatgatcgccagactggacacccagctgaagaacaagctgatcaccctgatgggccagaagaccagcctgacccaggagaccgagctgctggagagcctgctgcaggaggtggagcaccagctgagaagctgcagcaagagcgagctgatcagcaagagcagcgagatcctgatgatgttccagcaggtgcacagaaagcccatggccagcttcgtgaccacccccgtgccccccgacttcaccagcgagctggtgcccagctacgacagcgccaccttcgtgctggagaacttcagcaccctgagacagagagccgaccccgtgtacagcccccccctgcaggtgagcggcctgtgctggagactgaaggtgtaccccgacggcaacggcgtggtgagaggctactacctgagcgtgttcctggagctgagcgccggcctgcccgagaccagcaagtacgagtacagagtggagatggtgcaccagagctgcaacgaccccaccaagaacatcatcagagagttcgccagcgacttcgaggtgggcgagtgctggggctacaacagattcttcagactggacctgctggccaacgagggctacctgaacccccagaacgacaccgtgatcctgagattccaggtgagaagccccaccttcttccagaagagcagagaccagcactggtacatcacccagctggaggccgcccagaccagctacatccagcagatcaacaacctgaaggagagactgaccatcgagctgagcagaacccagaagagcagagacctgagcccccccgacaaccacctgagcccccagaacgacgacgccctggagaccagagccaagaagagcgcctgcagcgacatgctgctggagggcggccccaccaccgccagcgtgagagaggccaaggaggacgaggaggacgaggagaagatccagaacgaggactaccaccacgagctgagcgacggcgacctggacctggacctggtgtacgaggacgaggtgaaccagctggacggcagcagcagcagcgccagcagcaccgccaccagcaacaccgaggagaacgacatcgacgaggagaccatgagcggcgagaacgacgtggagtacaacaacatggagctggaggagggcgagctgatggaggacgccgccgccgccggccccgccggcagcagccacggctacgtgggcagcagcagcagaatcagcagaagaacccacctgtgcagcgccgccaccagcagcctgctggacatcgaccccctgatcctgatccacctgctggacctgaaggacagaagcagcatcgagaacctgtggggcctgcagcccagaccccccgccagcctgctgcagcccaccgccagctacagcagaaaggacaaggaccagagaaagcagcaggccatgtggagagtgcccagcgacctgaagatgctgaagagactgaagacccagatggccgaggtgagatgcatgaagaccgacgtgaagaacaccctgagcgagatcaagagcagcagcgccgccagcggcgacatgcagaccagcctgttcagcgccgaccaggccgccctggccgcctgcggcaccgagaacagcggcagactgcaggacctgggcatggagctgctggccaagagcagcgtggccaactgctacatcagaaacagcaccaacaagaagagcaacagccccaagcccgccagaagcagcgtggccggcagcctgagcctgagaagagccgtggaccccggcgagaacagcagaagcaagggcgactgccagaccctgagcgagggcagccccggcagcagccagagcggcagcagacacagcagccccagagccctgatccacggcagcatcggcgacatcctgcccaagaccgaggacagacagtgcaaggccctggacagcgacgccgtggtggtggccgtgttcagcggcctgcccgccgtggagaagagaagaaagatggtgaccctgggcgccaacgccaagggcggccacctggagggcctgcagatgaccgacctggagaacaacagcgagaccggcgagctgcagcccgtgctgcccgagggcgccagcgccgcccccgaggaggacacccacagcagcttccccgacggcgagcagatcggccccgaggacctgagcttcaacaccgacgagaacagcggcagatag

SEQ ID NO: 275123 - DNA, 2412 bp, Artificial Sequence
  derived and/or modified sequence
atgcacggcggccacacctttaagccgctggccgagatctacgagcaacatgttacaaaggttaacgaggaggttgcaaagctgaggagacgcctgatggagctcatttctcttgtgcaagaggttgaaagaaacgttgaggctgttcgaaacgccaaggacgagagggttcgtgagatcagaaacgccgtcgagatgatgattgcgcgcctcgatacccaactcaaaaacaaattaatcacactgatgggacagaaaacttctcttacgcaggagacggaattgctcgaaagcctgctccaggaggtcgagcatcaactcagaagctgctcaaagagtgaactgataagcaaatcctcggaaattctaatgatgttccagcaggtacaccgaaaacccatggcttcatttgtgaccacccccgtgcccccggatttcaccagcgagttagtcccctcctatgatagcgccacctttgttctggagaatttcagcaccctgagacagagagccgacccagtttattcaccacccctgcaggtgtccggtttatgttggaggttaaaggtgtaccccgacggcaatggcgtggtgcgcggctactacctctcagttttcctggagctgtcagcaggactccccgagaccagcaagtatgaatatagggttgagatggtgcaccagagctgtaacgacccaacaaagaatatcatccgagagttcgccagcgatttcgaggtgggagagtgctggggctataaccgtttctttcggctggacctgctcgcgaatgaaggataccttaacccacagaatgataccgtcattctgcgcttccaagtaaggtcgccgacatttttccagaagtctcgagatcagcactggtatattacacagctcgaagccgcacagaccagttacatccaacagatcaacaatctaaaagaacggctgacaattgagctctccagaacacaaaaatctagggatctgagccccccagataatcacttatccccgcagaacgatgacgccctggagacacgcgcgaagaagagtgcatgcagcgatatgttgcttgagggcgggcctacgaccgcatcagttagggaagcaaaagaggacgaggaggacgaagagaagatccaaaacgaagactaccatcatgagcttagcgatggtgaccttgacctggacctggtctacgaagacgaggtcaatcagcttgacggctcttcatcaagcgcaagcagcaccgccacctctaataccgaagaaaatgatatcgatgaggagaccatgagcggggaaaatgatgtcgagtacaataatatggagctggaggagggagaactcatggaggatgctgctgcagcgggaccagctggatccagccacggttatgtgggcagcagctcccgcatatcccgcaggacccacttgtgctctgcagctacctcaagtctgttggacatcgaccccctcatcctgatccacctcctcgaccttaaggaccgatcatctatagagaacctgtgggggcttcagcctcgacctccggcgtccctgctacagccaactgctagctacagtagaaaggataaagatcaaagaaaacagcaggctatgtggcgggtgcctagtgacttaaaaatgctgaaacggctgaagacacaaatggctgaggtgaggtgtatgaaaacagacgtgaagaatacgctgtccgagattaagagctcctcagcagcgtcaggcgatatgcaaacgtcattattctctgctgaccaggcagctctcgcagcctgcggcactgagaactcaggcaggctacaggatctgggaatggagctcctcgcaaaatctagtgtcgcgaactgctacattcgaaactccacaaacaagaaatctaattcccctaagcctgccagatcgagcgtcgctggctccctcagtttgcggagggctgtggacccgggagaaaatagtaggtccaaaggagactgtcagacactgtcagaggggtcccccggcagctctcagagcggatccaggcacagctcgcctagggctttgatccatggttcaatcggagatatcctacctaagactgaggataggcaatgtaaggctcttgattcggatgcagtcgtcgtcgctgtattttcaggcttgccagcagtggaaaagaggaggaaaatggtgaccttgggcgcgaacgccaagggcggccacttagaagggctgcagatgacggacctcgagaacaacagtgagaccggcgagctccagcccgtgttgcccgagggagcctcagccgccccagaggaggatactcactccagctttccggacggcgagcagattggcccagaggacctgtcgttcaatactgacgagaactcagggaggtag

SEQ ID NO: 275124 - DNA, 2412 bp, Artificial Sequence
  derived and/or modified sequence
atgcacggcggccacaccttcaagcccctggccgagatctatgagcagcacgtgaccaaggtgaatgaggaggtggccaagctgcggcggcggctgatggagctgatcagcctggtgcaggaggtggagagaaatgtggaggccgtgagaaatgccaaggatgagcgggtgcgggagatcagaaatgctgtggagatgatgattgcccggctggacacccagctgaagaacaagctgatcaccctgatgggccagaagaccagcctgacccaggagacagagctgctggagagcctgctgcaggaggtggagcaccagctgcggagctgcagcaagtctgagctgatcagcaagagcagcgagatcctgatgatgttccagcaggtgcacaggaagcccatggccagctttgtgaccacccctgtgcccccagacttcaccagcgagctggtgcccagctatgacagcgccacctttgtgctggagaacttcagcaccctgcggcagagagctgaccctgtgtacagcccccccctgcaggtgtctggcctgtgctggaggctgaaggtgtacccagatggaaatggagtggtgcggggctactacctgagcgtcttcctggagctgtctgctggcctgcctgagaccagcaaatatgagtacagagtggagatggtgcaccagagctgcaatgaccccaccaagaacatcatccgggagtttgccagtgactttgaggtgggggagtgctggggctacaaccgcttcttccggctggacctgctggccaatgaaggctacctgaacccccagaatgacaccgtcatcctgcgcttccaggtgcgcagccccaccttcttccagaagagccgggaccagcactggtacatcacccagctggaggccgcccagaccagctacatccagcagatcaacaacctgaaggagcggctgaccatcgagctgagcaggacccagaagagccgggacctgagccccccagacaaccacctgagcccccagaatgatgatgccctggagacccgggccaagaagagcgcctgcagcgacatgctgctggagggcggccccaccacagcctctgtgcgggaggccaaggaggatgaagaagatgaggagaagatccagaatgaagactaccaccacgagctgagtgatggagacctggacctggacctggtgtatgaagatgaggtgaaccagctggatggcagcagcagcagcgccagcagcacagccaccagcaacacagaggagaatgacattgatgaggagaccatgtctggagaaaatgatgtggagtacaacaacatggagctggaggagggggagctgatggaggatgctgctgctgctggccctgctggcagcagccacggctacgtgggcagcagcagccgcatcagcaggaggacccacctgtgcagcgctgccaccagcagcctgctggacatcgaccccctcatcctgatccacctgctggacctgaaggacaggagcagcattgagaacctgtggggcctgcagccccggcccccagccagcctgctgcagcccacagccagctacagcaggaaggacaaggaccagaggaagcagcaggccatgtggagggtgcccagcgacctgaagatgctgaagaggctgaagacccagatggccgaggtgcgctgcatgaagacagatgtgaagaacaccctgtctgagatcaagagcagcagcgctgccagcggggacatgcagaccagcctcttctctgctgaccaggccgccctggccgcctgtggcacagaaaattctggccgcctgcaggacctgggcatggagctgctggccaagagctctgtggccaactgctacatccggaacagcaccaacaagaagagcaacagccccaagccagcccggagctctgtggccggcagcctgagcctgcggcgggctgtggaccccggggagaacagccgcagcaaaggagactgccagaccctgtctgagggcagccctggcagcagccagagcggcagccgccacagcagcccccgggccctgattcatggcagcatcggggacatcctgcccaagacagaggaccggcagtgcaaggccctggacagtgatgctgtggtggtggccgtgttcagcggcctgcctgctgtggagaagaggaggaagatggtgaccctgggcgccaatgccaagggcggccacctggagggcctgcagatgacagacctggagaacaacagcgagactggagagctgcagcctgtgctgcctgagggcgccagcgctgcccctgaggaggacacccacagcagcttcccagatggagagcagatcggccctgaggacctgtccttcaacacagatgaaaattctggaagatag

SEQ ID NO: 275125 - DNA, 2412 bp, Artificial Sequence
  derived and/or modified sequence
atgcacggcggccacaccttcaagcccctggccgagatctacgagcagcatgtcacgaaggttaatgaggaagtcgccaagctgcgtcgtaggcttatggagctgatcagcctggtgcaagaggtagaaaggaacgttgaggctgtgaggaacgctaaagatgagagagttcgggagattagaaacgccgtcgagatgatgatcgccaggctcgatacacaattgaaaaataaactcataactctgatgggacaaaagacctcacttactcaggagaccgagctgctcgaaagtctgctgcaagaggtggaacaccaattacggagctgtagcaaatcggaattgatcagcaagtcttcagagatcctaatgatgttccagcaggttcatcggaagcccatggccagcttcgttaccactcctgtcccgccggacttcacaagcgagctggtaccctcttatgacagcgccacatttgtgctggaaaacttttccacccttcggcagcgtgcggaccctgtgtattccccacccctccaggtgtcaggactttgctggcgtctcaaagtctaccccgacggcaatggggttgtgaggggatactatctgagtgttttcctcgaactgagtgcggggttgccagaaacatctaagtatgagtaccgggtggaaatggtgcatcaatcctgtaacgacccgactaaaaatattatcagggaattcgcctcagacttcgaggtgggggaatgttgggggtacaaccgcttcttcagactggatctcctggcaaacgaggggtatctgaacccacagaacgatacggtgatcttgagattccaggttagatctcctacattctttcagaagtcaagggatcagcactggtatatcacacagctcgaagctgctcagacatcttacattcagcaaattaacaatctgaaggaacggttaactatcgagctgtcaagaactcagaaatcccgggatctctcacctcctgataaccacctaagtcctcagaacgacgacgccctggagacaagagccaagaagagcgcctgttcagacatgttattggaaggtggtccaaccacggcaagcgtgcgcgaagcaaaagaggacgaggaagacgaagaaaaaatacagaatgaagactaccaccatgaactcagtgacggggatctagatttggacctggtgtacgaggatgaggttaaccagttagatggctcttcctcctctgcctcttccactgccaccagcaacacagaggaaaatgacattgacgaggagacaatgagcggggaaaatgacgtagagtataataacatggaactcgaggagggcgagctcatggaagatgctgccgccgccgggcccgccggttcttctcacggctacgtcggttccagcagtcggatctcaaggagaacccacctctgtagcgcagccaccagctccctgctggatattgaccctctgatcctgattcacttgctcgacttaaaagaccgtagttccattgagaacttgtggggtctgcagccccggccacccgcctccctgctgcaaccaacagccagctactcaaggaaggacaaggatcagcgcaaacagcaggcgatgtggagggttccgtccgatctgaaaatgttgaaaaggctcaagacacagatggccgaagttcggtgcatgaagactgatgtcaaaaatactctatcggagattaagtcctcgagtgcagcgtctggcgatatgcagacatcactgttttctgctgaccaggccgccctcgccgcttgtgggacagaaaacagcggccgcctgcaggacttagggatggagttgcttgccaagtcatccgtggctaattgctacatcagaaattccacaaataaaaagtcgaatagtcccaagcccgcccgatccagtgtggctggcagtctcagtctcaggagagctgtggaccctggagagaatagcaggagcaagggagattgtcaaaccttatccgaggggagtcctggctcttcccagtccggatccagacattcgagtccaagagccctcatccacgggtcgataggagacatcctccctaaaacagaggatcggcagtgcaaagcactggacagcgacgccgttgtagttgcagttttctcagggctgccagcagtggagaagcggcgaaagatggtgaccctgggcgcgaatgcgaagggtggacaccttgaaggtctgcagatgacggacctggagaacaactcggagaccggcgagttgcaacccgtccttccagagggagcaagcgccgctcctgaggaggacacccacagctcctttccggacggtgaacaaatcggtccagaggatctgagcttcaacactgacgagaactccggtcgttag

SEQ ID NO: 275126 - DNA, 2412 bp, Artificial Sequence
  derived and/or modified sequence
atgcacggaggccacacttttaagccattggccgagatctacgagcagcatgtcaccaaagtcaacgaagaagttgctaaattaagaaggcgcctcatggaactgatatcccttgtccaagaggtggagcggaatgtcgaagccgtcagaaatgccaaagatgagcgagtgcgtgaaatcagaaacgccgtggagatgatgatcgctagactagacactcagttgaaaaacaagctgatcaccttaatggggcagaaaaccagcttgacacaggagacagagcttctggagtccttattacaagaggtcgagcatcagctcaggagctgttcgaaatccgagctgatctctaagtcctcggagattctgatgatgtttcagcaggtgcacaggaagcccatggcgagcttcgtaaccacccctgtccctcccgatttcacttcagagctcgtccctagctatgactcggctacatttgtgcttgagaatttctctaccttgagacagcgcgcagacccagtatattctcctcccctccaggtgtctggtctctgctggcgcttgaaggtttatccggacggcaatggcgtcgttcgtggttattacctaagcgtgtttcttgagctgagtgcaggactgccagaaacgagcaagtatgaatatcgagtcgaaatggtgcatcaatcttgtaacgatccgaccaaaaatattatccgggagtttgcaagcgatttcgaggtgggggagtgctggggctacaataggtttttccgactagatctcctggccaacgaggggtatctgaatccccagaacgacaccgtgatactacgattccaggtaaggtctcctaccttcttccagaaatctagggaccagcactggtatatcacacagctggaggccgcacagacatcttacatccagcagataaataatcttaaggaacggctgacgatcgagctcagccgcacccagaagtcccgggatttgtctccgcctgataaccacttgtccccacagaacgatgacgcactggagactcgcgcaaaaaaaagcgcttgcagtgacatgttgctggaaggcggacccacaaccgcctcggtcagggaagctaaggaagatgaggaggacgaagaaaaaatccaaaatgaagactatcatcacgagctgtcagatggtgacctcgatctggatttggtgtacgaggacgaggtgaaccagctagacgggagctcctcctcagcttccagtaccgcaacatccaacactgaggagaatgatattgatgaggagaccatgtcaggagaaaacgacgtcgagtataataacatggagctggaagagggcgagctcatggaagacgccgctgcagctggccctgcaggctcgagtcacggatatgtcggatcaagcagtcggattagcaggcggacccacctctgttcagccgctactagtagccttctggatattgaccccctaattttgatccatctactcgatctgaaggaccgctccagtatagagaatctctggggtctccagcctagaccccctgcctcactccttcagccaaccgcttcctatagcaggaaagataaggatcaacgcaagcagcaggcaatgtggagagtgccctctgatctgaagatgctcaagagactgaagacacaaatggctgaggtgcggtgtatgaagaccgacgtcaagaacactttaagcgaaataaaatctagttctgctgcatccggtgatatgcaaactagtttgttcagcgctgaccaagctgcccttgcagcctgcggtacggagaactcgggacgtttgcaggacctgggcatggaactgctggcaaaatcttccgtcgctaattgttacatcaggaattctaccaacaaaaaatctaatagtcctaagccggctagaagttctgtagcgggaagccttagcctccgacgtgccgtagatcccggagaaaacagtcggtctaaaggagactgccagaccctgagtgaaggcagcccgggttcctctcaaagcgggagtcgacactcctccccaagggccctgatccatggttccatcggtgacatcttacccaagacagaagaccggcagtgtaaggcattggacagcgatgccgtggttgtggccgttttctcaggcctgcctgcagtggagaaacggcgtaagatggtgactctgggggcaaatgccaaggggggtcaccttgaaggcctgcaaatgaccgacctagagaacaacagcgagacgggtgaactgcagcctgtgctcccagagggcgctagcgcagcaccggaagaagacacacacagttcctttccggacggcgagcagattggaccggaagacctgagcttcaatactgacgagaattctggtagatag

SEQ ID NO: 275127 - protein, 1101 aa, Artificial Sequence
  derived and/or modified sequence
MSAKAISEQTGKELLYKFICTTSAIQNRFKYARVTPDTDWARLLQDHPWLLSQNLVVKPDQLIKRRGKLGLVGVNLTLDGVKSWLKPRLGQEATVGKATGFLKNFLIEPFVPHSQAEEFYVCIYATREGDYVLFHHEGGVDVGDVDAKAQKLLVGVDEKLNPEDIKKHLLVHAPEDKKEILASFISGLFNFYEDLYFTYLEINPLVVTKDGVYVLDLAAKVDATADYICKVKWGDIEFPPPFGREAYPEEAYIADLDAKSGASLKLTLLNPKGRIWTMVAGGGASVVYSDTICDLGGVNELANYGEYSGAPSEQQTYDYAKTILSLMTREKHPDGKILIIGGSIANFTNVAATFKGIVRAIRDYQGPLKEHEVTIFVRRGGPNYQEGLRVMGEVGKTTGIPIHVFGTETHMTAIVGMALGHRPIPNQPPTAAHTANFLLNASGSTSTPAPSRTASFSESRADEVAPAKKAKPAMPQDSVPSPRSLQGKSTTLFSRHTKAIVWGMQTRAVQGMLDFDYVCSRDEPSVAAMVYPFTGDHKQKFYWGHKEILIPVFKNMADAMRKHPEVDVLINFASLRSAYDSTMETMNYAQIRTIAIIAEGIPEALTRKLIKKADQKGVTIIGPATVGGIKPGCFKIGNTGGMLDNILASKLYRPGSVAYVSRSGGMSNELNNIISRTTDGVYEGVAIGGDRYPGSTFMDHVLRYQDTPGVKMIVVLGEIGGTEEYKICRGIKEGRLTKPIVCWCIGTCATMFSSEVQFGHAGACANQASETAVAKNQALKEAGVFVPRSFDELGEIIQSVYEDLVANGVIVPAQEVPPPTVPMDYSWARELGLIRKPASFMTSICDERGQELIYAGMPITEVFKEEMGIGGVLGLLWFQKRLPKYSCQFIEMCLMVTADHGPAVSGAHNTIICARAGKDLVSSLTSGLLTIGDRFGGALDAAAKMFSKAFDSGIIPMEFVNKMKKEGKLIMGIGHRVKSINNPDMRVQILKDYVRQHFPATPLLDYALEVEKITTSKKPNLILNVDGLIGVAFVDMLRNCGSFTREEADEYIDIGALNGIFVLGRSMGFIGHYLDQKRLKQGLYRHPWDDISYVLPEHMSM

SEQ ID NO: 275128 - DNA, 3306 bp, Artificial Sequence
  derived and/or modified sequence
atgagcgctaaggccattagtgaacagactggaaaggaacttctgtataagttcatttgtacaacctccgctatacagaatcgatttaagtacgcgagagtgacacctgacaccgactgggctcgacttctccaggatcacccctggctcctgtcgcaaaaccttgtggttaagcccgaccagctcatcaaacggaggggcaagttgggactggtaggcgtaaatctgaccttagacggtgtcaagagttggctgaagccacgacttggccaagaagcgacagttgggaaagccacaggctttctgaaaaacttcctcattgaacccttcgttccccattcccaggctgaggagttttacgtgtgcatatacgccaccagagagggggattatgtgctgtttcatcacgagggtggcgttgacgtcggcgacgtggacgccaaagcccaaaagctgctcgtaggcgtagatgagaagctcaaccccgaggatataaaaaagcacctgctcgtgcatgctcctgaggacaagaaggaaatattggcctcgtttatctccgggctattcaacttttacgaggatctctactttacctatctcgaaatcaatcctttagtagtgaccaaggacggcgtatatgttctagatctcgcagccaaggtcgacgctacagcagattatatttgcaaggtcaaatggggggacatcgaatttcctcccccgttcggccgagaagcttatcccgaggaggcgtatatagccgaccttgatgcaaagtccggagctagccttaagcttaccctgctgaatccaaagggccgcatctggacaatggtagctggcggcggagcctcagtcgtgtattcagacacaatctgcgatttggggggtgtcaacgagctcgccaattatggagaatacagtggcgcccctagcgaacagcagacgtatgattatgcgaagaccattcttagcctgatgacgcgtgagaaacatccagacggcaaaattcttattatcggtggctcaattgccaactttaccaatgtggcagccaccttcaaaggcatcgtgagggccatccgggattaccaagggccactcaaggaacatgaagtcaccatcttcgtgaggcggggtggaccaaattatcaggaaggactacgcgtgatgggggaagtcggaaagacaacgggcatccccatccatgtgtttggaacggaaacacacatgaccgcgattgtcgggatggctttaggacaccggcctattccaaatcaaccgcccaccgcagcccacacagcgaattttctgctcaatgcctctggctctaccagtactccagctccgtctcgtacagcctcgttctccgagtcaagggctgatgaggtcgctcccgccaagaaagcaaagccagctatgccccaggacagtgtaccctctccccggtcactccagggtaaaagcaccaccctgttctcaagacacacaaaagcgatcgtctggggcatgcagactcgcgccgtacaaggcatgctcgattttgattacgtctgctctcgagatgagccctctgtggctgctatggtgtacccatttacgggcgaccacaagcaaaagttttattgggggcacaaggagatattaatacctgtgttcaagaacatggctgacgccatgagaaagcaccccgaggttgatgtcttgatcaactttgctagcctgaggtctgcatacgacagtacaatggagaccatgaattatgcccaaatccgaactattgctataattgctgaaggcatacctgaggctttaacaaggaaattaattaaaaaggccgaccaaaagggcgtcaccatcattggaccagccacagtgggcgggattaagcctgggtgctttaagataggtaatacaggtggcatgcttgacaatatcctggctagcaagctctataggcccggtagcgtagcctacgtttcccgcagtggaggaatgtcgaatgaactcaacaatatcattagtagaaccactgacggggtatacgagggtgtggccattggtggggatcggtacccgggcagcactttcatggatcatgttctgagataccaagatacgcccggggtgaagatgatcgtggtgcttggggaaattggcggtacggaggagtacaaaatatgcaggggcatcaaagagggaagactgacaaaaccaatcgtctgttggtgtataggcacttgcgcaactatgttctctagcgaggtacagtttggacatgccggcgcatgcgcaaatcaggcctccgagactgccgtggccaaaaatcaggccctaaaggaggccggcgttttcgtgccaaggtccttcgacgagttaggggagatcatccagtctgtgtacgaagacctggttgcaaatggcgttatcgtgcccgcccaggaagtgcccccgccgaccgtgcccatggattactcctgggccagagaactcggtttgattcgcaagcccgcttcattcatgaccagtatctgcgacgaacgtggacaggaactgatatatgctggaatgccaatcaccgaggtcttcaaggaagagatgggcattggtggcgtgctgggtctgctgtggttccaaaaacgcctgcccaagtattcatgtcagtttattgaaatgtgtctgatggttacagccgaccacgggcctgccgtctctggagcacacaatactattatttgcgcaagagccggaaaagatcttgttagtagcctgacttccgggcttctgacaattggcgatcgattcggcggcgctttggatgcagccgcaaagatgttttcaaaagctttcgacagtggcattatcccaatggaatttgtgaataagatgaaaaaggagggcaagttgatcatggggattggtcatagggttaaaagcatcaacaatcctgacatgcgagtgcaaattctaaaggactatgtgcgccagcactttccagcgactcctctgcttgattacgcacttgaggtggagaaaatcacaacatctaaaaaacccaacctgatcctgaacgtcgacggactgataggagtggccttcgtggacatgttacggaattgcggatccttcacccgcgaggaggcggacgaatacattgatatcggggcactcaacgggatcttcgttctggggcgttccatggggtttatcggccactacctggaccagaaaaggctcaagcaaggcttatatcgtcatccctgggacgatatctcctacgttttgcccgagcacatgtccatgtag

SEQ ID NO: 275129 - DNA, 3306 bp, Artificial Sequence
  derived and/or modified sequence
atgtctgccaaggccatcagcgagcagacaggcaaggagctgctgtacaagttcatctgcaccaccagcgccatccagaaccgcttcaagtatgcccgggtgaccccagacacagactgggcccggctgctgcaggaccacccctggctgctgagccagaacctggtggtgaagccagaccagctgatcaagagaagaggcaagctgggcctggtgggcgtgaacctgaccctggatggagtgaagtcctggctgaagccccggctgggccaggaggccaccgtgggcaaggccaccggcttcctgaagaacttcctgattgagccctttgtgccccacagccaggccgaggagttctacgtgtgcatctatgccacccgggagggggactatgtgctcttccaccacgagggcggcgtggatgtgggagatgtggatgccaaggcccagaagctgctggtgggcgtggatgagaagctgaaccctgaggacatcaagaagcacctgctggtgcacgcccctgaggacaagaaggagatcctggccagcttcatcagcggcctcttcaacttctatgaagatctctacttcacctacctggagatcaaccccctggtggtgaccaaggatggagtgtatgtgctggacctggccgccaaggtggatgccacagctgactacatctgcaaggtgaagtggggagacatcgagttccccccacccttcggccgggaggcctacccagaggaggcctacatcgctgacctggatgccaagagcggggccagcctgaagctgaccctgctgaaccccaagggccgcatctggaccatggtggccggcggcggggcctctgtggtgtacagcgacaccatctgtgacctgggcggcgtgaatgagctggccaactacggggagtacagcggggcccccagcgagcagcagacctatgactatgccaagaccatcctgagcctgatgacccgggagaagcacccagatggcaagatcctgatcatcggcggcagcatcgccaacttcaccaacgtggccgccaccttcaagggcatcgtgcgggccatccgggactaccagggccccctgaaggagcacgaggtgaccatctttgtgcggcggggcggccccaactaccaggagggcctgcgggtgatgggagaggtgggcaagaccaccggcatccccatccacgtgtttggaacagagacccacatgacagccatcgtgggcatggccctgggccaccggcccatccccaaccagcccccaacagctgcccacacagccaacttcctgctgaatgccagcggcagcaccagcaccccagcccccagcaggacagccagcttcagcgagagcagagcagatgaggtggccccagccaagaaggccaagccagccatgccccaggacagcgtgcccagccccaggagcctgcagggcaagagcaccaccctcttcagccgccacaccaaggccatcgtgtggggcatgcagaccagggctgtgcagggcatgctggactttgattatgtgtgcagcagagatgagcccagcgtggccgccatggtgtaccccttcaccggggaccacaagcagaagttctactggggccacaaggagatcctgatccctgtgttcaagaacatggctgatgccatgaggaagcaccctgaggtggatgtgctgatcaactttgccagcctgcggagcgcctatgacagcaccatggagaccatgaactatgcccagatccgcaccatcgccatcatcgccgagggcatccctgaggccctgaccaggaagctgatcaagaaggctgaccagaagggcgtgaccatcatcggccctgccaccgtgggcggcatcaagccaggctgcttcaagattggcaacacaggaggcatgctggacaacatcctggccagcaagctgtaccggcccggctctgtggcctacgtgagccgcagcggcggcatgagcaatgagctgaacaacatcatcagcaggaccacagatggagtgtatgagggcgtggccatcggcggggaccgctacccaggcagcaccttcatggaccacgtgctgcgctaccaggacaccccaggagtgaagatgattgtggtgctgggggagattggaggaacagaggagtacaagatctgccggggcatcaaggagggccgcctgaccaagcccatcgtgtgctggtgcatcggcacctgtgccaccatgttcagcagcgaggtgcagtttggacatgctggggcctgtgccaaccaggccagcgagacagctgtggccaagaaccaggccctgaaggaggccggcgtgtttgtgcccaggagctttgatgagctgggggagatcatccagagcgtgtatgaggacctggtggccaatggagtcatcgtgcctgcccaggaggtgcccccacccaccgtgcccatggactacagctgggcccgggagctgggcctcatcaggaagccagccagcttcatgaccagcatctgtgatgagcggggccaggagctgatctatgccggcatgcccatcacagaggtgttcaaggaggagatgggcattggaggagtgctgggcctgctgtggttccagaagaggctgcccaagtacagctgccagttcatcgagatgtgcctgatggtgacagctgaccacggccctgctgtgtctggggcccacaacaccatcatctgtgcccgggccggcaaggacctggtgagcagcctgaccagcggcctgctgaccatcggggacagatttggaggagccctggatgctgctgccaagatgttcagcaaggcctttgacagcggcatcatccccatggagtttgtgaacaagatgaagaaggagggcaagctgatcatgggcatcggccaccgggtgaagagcatcaacaacccagacatgagggtgcagatcctgaaggactatgtgcggcagcacttccctgccacccccctgctggactatgccctggaggtggagaagatcaccaccagcaagaagcccaacctgatcctgaatgtggatggcctgattggagtggcctttgtggacatgctgaggaactgtggcagcttcacccgggaggaggctgatgagtacatcgacatcggggccctgaatggcatctttgtgctgggccgctccatgggcttcatcggccactacctggaccagaagaggctgaagcagggcctgtaccgccacccctgggatgacatctcctatgtgctgcctgagcacatgtccatgtag

SEQ ID NO: 275130 - DNA, 3306 bp, Artificial Sequence
  derived and/or modified sequence
atgagcgccaaggccatcagcgagcagaccggcaaggagctgctgtacaagttcatctgtaccacgagcgccattcagaatcgtttcaaatacgcacgggtcacccctgacacagactgggctagactcctgcaggatcacccctggcttctgtctcagaatctggtggtgaagccagaccaactaatcaaaaggagaggcaagttaggccttgtaggtgtgaatctgaccctggatggcgtgaaaagttggctcaaacccaggctgggccaagaggctaccgtgggcaaagcaacaggtttcctcaaaaattttttaatcgagcccttcgtgcctcattctcaggcagaggagttttacgtgtgtatttatgcaacacgggaaggggactacgttttgtttcatcatgaaggaggcgttgacgtcggagacgttgatgccaaggcccagaaactgctggtgggcgtggatgaaaagttgaatcccgaagatattaagaagcaccttctggtgcatgcacccgaagataagaaggagatcctggcctccttcattagtggtctgtttaacttctatgaagacttgtatttcacgtacctggagatcaatcctctagtcgttactaaagacggggtttacgttctagacctggccgccaaggttgatgccacagccgactacatatgtaaggtgaaatggggagacattgaattcccccctcccttcggccgtgaagcttatcccgaagaggcctacatcgccgacctggacgccaaatctggggccagcttgaagctgaccttgctgaacccaaagggtcggatttggaccatggtggccggcggcggagcatcagtggtgtactctgatacaatctgcgaccttggaggggtgaatgaattggctaattacggcgagtatagcggcgctccctcagaacagcagacctacgattacgccaagacaatcctgagcctgatgaccagggaaaagcatcctgacgggaaaattctgatcatcggcggtagtatcgccaatttcaccaacgtggccgccacctttaaggggattgtgagagcaattcgagactatcagggaccccttaaggagcacgaggtgacaatcttcgtgaggcgcggcggccccaactatcaggaaggtctacgagtcatgggagaggttggtaaaacaacgggcatcccaattcatgtctttggcacagaaacccacatgaccgccatagtcgggatggccttggggcatcgtcccatacccaatcagcccccgaccgctgctcacacggcgaattttctcctgaatgcctcagggtcgacctccacccccgccccatcacggacagcctccttcagtgagtctagagctgatgaagtggcccccgccaagaaagctaaaccagccatgcctcaggatagcgtcccatccccacgaagccttcagggtaaatcaactacactcttctcacgacacacaaaagccatcgtgtggggcatgcagactagagctgtgcaggggatgctcgattttgactatgtgtgctcccgcgatgagccatccgttgctgctatggtttacccattcaccggcgaccacaaacaaaagttctattggggacataaggaaatcctgattcccgtcttcaaaaacatggcagacgccatgcggaagcaccctgaggtcgatgtgttgataaatttcgcctctctgcgaagcgcttatgacagcacaatggaaacgatgaattatgctcagatccggacaatagctataattgctgaggggatacctgaagccctcacaaggaaactgattaagaaagctgaccagaaaggagtgacaatcatcggccctgctacggttggaggtatcaaaccaggttgtttcaaaatcggcaatacaggtggtatgttagataacattctggcaagtaaactctatcggcctggcagcgttgcctacgtgagtcgaagtggggggatgtccaacgagctcaataatattatcagcaggaccactgacggcgtttacgaaggggtcgccattggaggggacagataccctggatctactttcatggaccatgttctcagatatcaagatacgcccggcgtaaagatgattgtagtgttaggggagatcggagggaccgaggagtacaagatctgtcgcggaatcaaggaagggaggctgacaaaaccgattgtctgctggtgcattggcacctgtgccacaatgttcagctctgaagtgcaattcgggcacgccggcgcctgcgcgaatcaggcgtctgaaacggcggtcgctaaaaatcaagccctgaaagaggcaggagtctttgtgccaaggagtttcgatgagctcggcgaaattattcagagtgtttatgaagaccttgtggccaacggcgtgatcgtcccggctcaagaggtgccgcctcccactgtgcccatggattatagctgggctagggagctcggcctcattcggaaaccggccagttttatgacctctatttgtgacgagagaggccaggagctgatctacgcaggtatgccaattacagaagtgttcaaggaggagatgggcataggcggtgtcctgggattgctgtggttccagaagcggctccctaaatacagctgtcagttcatcgagatgtgtctgatggtcacggccgaccacgggcctgcggtcagcggagcacacaataccataatttgtgcacgagctggcaaggatctggtgagttccctgacatcgggcctacttaccataggcgatcggttcgggggcgctctcgatgcagccgcaaaaatgtttagtaaggccttcgattcagggattatcccgatggagttcgtaaataagatgaagaaggaaggaaagctgatcatggggattgggcacagggtaaaatcgatcaacaacccagatatgagggtccagatcctgaaggactacgtgcggcagcacttccctgctacacctctgctcgactatgctctggaggttgagaaaattacaaccagcaaaaaaccgaatctcatactgaacgtggacggactgatcggggtcgcgttcgtggacatgctgcggaattgcggctccttcacccgagaagaagctgacgaatacattgacatcggtgcactgaacgggatctttgttctcggacgctccatgggcttcattggacattatctggaccagaagcggttaaagcaggggctctaccgtcacccatgggacgatatatcttatgtgctgcccgagcacatgtcgatgtag

SEQ ID NO: 275131 - DNA, 3306 bp, Artificial Sequence
  derived and/or modified sequence
atgtcagctaaggctatttcagagcagaccggaaaggaactcctatacaagtttatctgcacaacaagcgccatacaaaaccggtttaagtacgctcgtgtgacacctgataccgattgggctcgccttctgcaggatcacccgtggctgctcagccagaatctggtagtgaaaccagaccagctgattaaaagacgtggtaagctgggactcgtgggagtgaacctcaccctggacggggtgaaatcatggctcaaaccccgtctggggcaggaggctacagtcggtaaagctaccggctttctgaaaaacttcttaatagaacctttcgtccctcactcgcaagccgaggagttctacgtgtgcatctacgccaccagggagggagattatgtgctatttcatcatgaaggcggagtggacgtcggcgacgtggatgcaaaagcacagaaattactagtgggggtagatgagaagctgaatccagaggacataaaaaaacacttactcgtccacgcccctgaggataaaaaagagattctggcttcgtttatcagtggattatttaacttctacgaagatctgtatttcacatatttggagatcaatcctctggtggtgacaaaggatggagtttatgtgcttgatctcgccgcaaaagtggatgctacggccgattacatttgtaaggtgaagtggggcgatattgagtttccgccaccatttgggagagaagcctaccccgaagaggcgtatatcgcagatctggatgccaagagcggcgcaagcctcaagctaacactcctgaatcccaaaggacggatttggacaatggtcgctggagggggagccagcgtagtgtactcagacacaatatgcgacctcggcggagtgaacgagctggccaattacggggaatattccggagcgccaagtgagcagcaaacatacgactacgccaagacgatcctgagtctgatgactcgggagaaacacccggacggaaaaatcctgataatagggggatccatcgccaatttcacaaatgtcgccgcaacctttaagggcatagtacgagctatcagggattaccagggaccacttaaggagcatgaagtgacaatattcgtgaggcgcggagggccaaactaccaagaaggtctacgagttatgggagaggtcggaaagaccactggtatccccatccatgtgtttgggacagagacacacatgacagcaatagtgggaatggccctgggccacaggcccattcctaaccaacctcctacagcagcccataccgctaatttcctgctgaacgcttctggcagcacgtccacccccgctcccagtcgcaccgcctccttcagtgagtcacgggctgacgaagtagcccctgccaagaaggctaaaccggcaatgccccaggactctgttccctctcctaggtcgctgcagggcaagtctaccacactgttctcgcgtcatactaaagccatcgtctgggggatgcaaacacgtgctgtccagggtatgttggatttcgactacgtgtgttcacgcgatgagcccagcgtggctgcaatggtttatccttttaccggcgatcacaagcagaagttttactggggtcacaaggagattttaatacccgtctttaagaacatggcagatgctatgcggaagcacccagaggtggatgtactcattaactttgcaagcctgcgaagcgcctacgattctactatggagacaatgaattacgcacagattagaacaattgcaatcatcgccgagggtatcccagaagcccttacccgtaaattaattaagaaggctgatcagaaaggcgtgactataatcggcccagccaccgtggggggtattaaaccaggatgcttcaaaataggaaacactggaggcatgctggacaacattctagccagcaagctgtatcgtcctgggtccgtggcctatgtttccagatctggcggtatgtcaaatgagcttaacaacataattagccggacaacggatggagtttatgagggcgttgctattggcggtgacagatacccaggatctacatttatggaccatgtgctgcgctaccaggacacccccggtgtaaaaatgattgtcgttcttggagaaatagggggaactgaagagtacaagatttgtcgtggaataaaggaggggcgtctgacaaagcccattgtctgctggtgtattggaacatgtgccaccatgttcagttcggaagttcaattcggacacgcaggggcatgtgctaatcaggccagcgagacagctgtagcgaaaaaccaggccttaaaggaagccggagtctttgtccctcggtcctttgacgaactaggcgaaattatccaatcagtgtacgaggaccttgtggcgaatggcgtaatcgtgcctgcacaggaggtcccgccacccactgttccaatggactatagctgggccagagagctggggttgattaggaaaccagcaagcttcatgacctccatttgcgatgagcggggacaggagctgatatatgcgggtatgcccattaccgaagtgtttaaggaagaaatgggcataggaggcgttctcggcctactgtggtttcaaaaaagactgccaaagtattcctgtcagttcatagagatgtgtctcatggtcactgctgaccatggacccgcagtgtcaggggctcataatacgattatctgtgccagagccggtaaagatttagtaagcagtcttacctctgggctactaaccattggggaccggtttgggggagcactcgacgccgcagctaagatgttttctaaagcattcgactctggcataatcccgatggaatttgtaaataaaatgaagaaggagggcaaactgattatgggcattgggcatagggtgaagagcataaacaatcctgacatgagggtccaaatcctcaaagactacgtgcgtcaacactttcctgccacaccattactggattatgctcttgaagtcgagaagatcaccacgagcaaaaagcccaatctaattcttaatgtcgatgggctgatcggcgtggcattcgtggatatgttgagaaattgtggctcgttcacgagggaggaggcagatgagtacatcgacattggcgctttgaatggaatttttgtgctgggccgttccatggggttcattggacattacctagatcaaaagcgattgaagcaagggctgtaccgccatccctgggatgatatatcgtacgtgctgccggaacacatgtcaatgtag

SEQ ID NO: 275132 - DNA, 3306 bp, Artificial Sequence
  derived and/or modified sequence
atgagcgccaaggccatcagcgagcagaccggcaaggagctgctgtacaagttcatctgcaccaccagcgccatccagaacagattcaagtacgccagagtgacccccgacaccgactgggccagactgctgcaggaccacccctggctgctgagccagaacctggtggtgaagcccgaccagctgatcaagagaagaggcaagctgggcctggtgggcgtgaacctgaccctggacggcgtgaagagctggctgaagcccagactgggccaggaggccaccgtgggcaaggccaccggcttcctgaagaacttcctgatcgagcccttcgtgccccacagccaggccgaggagttctacgtgtgcatctacgccaccagagagggcgactacgtgctgttccaccacgagggcggcgtggacgtgggcgacgtggacgccaaggcccagaagctgctggtgggcgtggacgagaagctgaaccccgaggacatcaagaagcacctgctggtgcacgcccccgaggacaagaaggagatcctggccagcttcatcagcggcctgttcaacttctacgaggacctgtacttcacctacctggagatcaaccccctggtggtgaccaaggacggcgtgtacgtgctggacctggccgccaaggtggacgccaccgccgactacatctgcaaggtgaagtggggcgacatcgagttccccccccccttcggcagagaggcctaccccgaggaggcctacatcgccgacctggacgccaagagcggcgccagcctgaagctgaccctgctgaaccccaagggcagaatctggaccatggtggccggcggcggcgccagcgtggtgtacagcgacaccatctgcgacctgggcggcgtgaacgagctggccaactacggcgagtacagcggcgcccccagcgagcagcagacctacgactacgccaagaccatcctgagcctgatgaccagagagaagcaccccgacggcaagatcctgatcatcggcggcagcatcgccaacttcaccaacgtggccgccaccttcaagggcatcgtgagagccatcagagactaccagggccccctgaaggagcacgaggtgaccatcttcgtgagaagaggcggccccaactaccaggagggcctgagagtgatgggcgaggtgggcaagaccaccggcatccccatccacgtgttcggcaccgagacccacatgaccgccatcgtgggcatggccctgggccacagacccatccccaaccagccccccaccgccgcccacaccgccaacttcctgctgaacgccagcggcagcaccagcacccccgcccccagcagaaccgccagcttcagcgagagcagagccgacgaggtggcccccgccaagaaggccaagcccgccatgccccaggacagcgtgcccagccccagaagcctgcagggcaagagcaccaccctgttcagcagacacaccaaggccatcgtgtggggcatgcagaccagagccgtgcagggcatgctggacttcgactacgtgtgcagcagagacgagcccagcgtggccgccatggtgtaccccttcaccggcgaccacaagcagaagttctactggggccacaaggagatcctgatccccgtgttcaagaacatggccgacgccatgagaaagcaccccgaggtggacgtgctgatcaacttcgccagcctgagaagcgcctacgacagcaccatggagaccatgaactacgcccagatcagaaccatcgccatcatcgccgagggcatccccgaggccctgaccagaaagctgatcaagaaggccgaccagaagggcgtgaccatcatcggccccgccaccgtgggcggcatcaagcccggctgcttcaagatcggcaacaccggcggcatgctggacaacatcctggccagcaagctgtacagacccggcagcgtggcctacgtgagcagaagcggcggcatgagcaacgagctgaacaacatcatcagcagaaccaccgacggcgtgtacgagggcgtggccatcggcggcgacagataccccggcagcaccttcatggaccacgtgctgagataccaggacacccccggcgtgaagatgatcgtggtgctgggcgagatcggcggcaccgaggagtacaagatctgcagaggcatcaaggagggcagactgaccaagcccatcgtgtgctggtgcatcggcacctgcgccaccatgttcagcagcgaggtgcagttcggccacgccggcgcctgcgccaaccaggccagcgagaccgccgtggccaagaaccaggccctgaaggaggccggcgtgttcgtgcccagaagcttcgacgagctgggcgagatcatccagagcgtgtacgaggacctggtggccaacggcgtgatcgtgcccgcccaggaggtgcccccccccaccgtgcccatggactacagctgggccagagagctgggcctgatcagaaagcccgccagcttcatgaccagcatctgcgacgagagaggccaggagctgatctacgccggcatgcccatcaccgaggtgttcaaggaggagatgggcatcggcggcgtgctgggcctgctgtggttccagaagagactgcccaagtacagctgccagttcatcgagatgtgcctgatggtgaccgccgaccacggccccgccgtgagcggcgcccacaacaccatcatctgcgccagagccggcaaggacctggtgagcagcctgaccagcggcctgctgaccatcggcgacagattcggcggcgccctggacgccgccgccaagatgttcagcaaggccttcgacagcggcatcatccccatggagttcgtgaacaagatgaagaaggagggcaagctgatcatgggcatcggccacagagtgaagagcatcaacaaccccgacatgagagtgcagatcctgaaggactacgtgagacagcacttccccgccacccccctgctggactacgccctggaggtggagaagatcaccaccagcaagaagcccaacctgatcctgaacgtggacggcctgatcggcgtggccttcgtggacatgctgagaaactgcggcagcttcaccagagaggaggccgacgagtacatcgacatcggcgccctgaacggcatcttcgtgctgggcagaagcatgggcttcatcggccactacctggaccagaagagactgaagcagggcctgtacagacacccctgggacgacatcagctacgtgctgcccgagcacatgagcatgtag

SEQ ID NO: 275133 - DNA, 3306 bp, Artificial Sequence
  derived and/or modified sequence
atgtccgcgaaggccatctctgaacagaccggcaaagaactcctgtacaagttcatctgcacgacatcggctattcagaatcgtttcaaatatgcgcgcgtgaccccggacacagattgggctcggttgcttcaggatcacccctggctcctgtcccagaatcttgtggtcaaacctgaccagctgattaagagaaggggaaaactcggtcttgttggtgtcaacctgacccttgacggtgtgaaatcatggcttaagccccgcctaggtcaggaagcaacggtggggaaggcaacaggatttctgaagaacttcctgatcgaaccatttgtgccccattcccaagcagaggagttctatgtctgcatctatgccacccgcgaaggagattatgtgctgtttcaccacgagggaggagtggacgttggggatgtggacgcaaaggctcaaaagctcttggtgggtgtggatgaaaagttgaatcccgaagacataaaaaagcacctgctcgtccatgcaccagaagacaaaaaagagatcctcgcatctttcatcagcggtctgttcaatttttacgaggacctttacttcacctatcttgaaattaaccccttggttgtcactaaggacggagtgtatgtgttagaccttgccgctaaagtcgatgcaaccgcggattatatatgtaaggtcaaatggggtgacatcgagttcccaccaccgtttggacgggaggcatatccggaagaagcctacatcgccgatctggacgctaaatcaggggcatcgctcaaactgacacttcttaatccaaaaggcagaatttggacaatggttgccggtgggggagccagtgtcgtgtacagtgacaccatctgcgacctagggggtgtgaacgaactggctaattacggagagtactccggtgcacctagtgaacaacagacctatgactacgctaaaacaatactttccttgatgacacgggaaaagcaccccgacggtaaaatacttataattggaggctcaatcgcaaatttcacaaacgtagccgccacattcaaaggcattgtacgggccattcgagactaccaagggcctttgaaggagcacgaggtaactattttcgtgagacgaggcgggcccaactatcaggaaggcctgagagtcatgggtgaagtgggtaaaacaacagggatacctattcacgtatttggaaccgaaacccatatgaccgccattgtgggtatggccctgggacataggcctataccaaaccagccaccaaccgcagcgcatacagctaactttctattgaatgcctctggtagcacttcgacacctgctccctcccgtacggcctcgtttagcgaatcccgtgcagatgaggtggctccagcaaaaaaagccaagccagctatgccacaagattccgtgccaagtcctcggagcctgcagggaaagtcaactacactgttctcacgccatacaaaggccatcgtatggggcatgcagacgcgcgctgtgcagggcatgctggacttcgactacgtctgttccagagacgaaccgtccgtagctgccatggtatatcctttcactggcgatcataagcagaaattctattggggccacaaggagatcctcattccagtgttcaaaaatatggcagacgctatgcgcaagcacccagaggtagacgttctgatcaactttgcctcactgcggagtgcttatgacagtactatggaaaccatgaactatgctcagattcgcaccattgccattatcgcagaaggtatacccgaggcactgacccgaaagctgatcaaaaaggccgatcagaagggcgtgactatcattgggcccgccaccgtaggcggtatcaagcctgggtgttttaaaatcgggaataccggtggcatgctggacaacatcctagcctctaaattataccgccccggctctgtggcttatgtgtcacgcagtggaggtatgtccaacgagctcaataatatcatttctaggacaaccgacggggtctacgaaggcgttgctatcggtggtgacaggtacccaggttccaccttcatggatcatgtgctgcgataccaggatacaccaggcgtgaagatgatcgtggttctgggtgaaattggagggaccgaagaatacaagatctgcagaggtattaaggagggcagactgacaaaacccatcgtctgctggtgcataggcacctgtgcaacgatgttttcttctgaagttcagtttggccacgccggggcctgcgcaaatcaggctagcgaaaccgcggttgctaagaaccaagccctcaaagaagccggtgtgttcgtcccccggagcttcgacgaattaggggagatcatccagagcgtctacgaggatctggttgccaacggggtgattgttccagctcaggaggtgcctcctccgacggtacctatggactactcttgggcccgggaacttggcttgatcagaaaacccgcaagctttatgacgagcatctgtgatgaacgcgggcaggagctgatttacgctggcatgcccattaccgaggtattcaaagaggagatgggcatcggaggcgtactgggtctgttgtggttccagaaacgcctcccaaagtacagttgtcagtttatcgaaatgtgcctgatggttacggctgaccacgggcccgcagtatcaggggcgcacaacacaatcatatgtgctcgggcaggaaaggatctggttagcagcctgacaagcggactgctcaccataggcgatcgctttgggggtgctctagacgccgcagctaagatgttttccaaggctttcgacagcgggataatccccatggagtttgtcaataagatgaagaaggagggaaagctgattatgggcattgggcacagggttaagagtataaataatccggacatgcgcgttcagattctgaaagattacgtacgacagcactttcccgccacgccgttgcttgattatgcactagaggtagagaaaattacaactagcaaaaaacccaacttgatcctgaatgtggatgggctcattggagtggcattcgtcgacatgctgaggaactgtggaagcttcacccgagaggaggctgacgagtacattgatatcggagcccttaacggaatattcgtgctcggccggtccatgggtttcatcggccattatctcgaccagaagaggctgaaacagggcctctatagacacccatgggatgacatatcttatgtgctgccggaacacatgtcaatgtag

SEQ ID NO: 275134 - DNA, 3306 bp, Artificial Sequence
  derived and/or modified sequence
atgagcgccaaggccatcagcgagcagaccggcaaggagctgctgtataagtttatctgcactacatctgctatccagaatagattcaagtatgcccgagttacccctgacactgattgggcgaggctgctgcaagaccacccctggctgcttagtcaaaatctggttgtgaaacccgaccagctgatcaaacgcagaggaaagttaggactagtgggggtgaacctgacgctcgacggggttaaatcctggctgaaaccgagactcggtcaggaggctactgtaggcaaagctactggctttctgaagaatttcctgatagaaccgttcgtcccacatagtcaggccgaggagttctatgtctgtatctatgcaacacgggagggagactacgttctctttcaccacgaaggtggcgtcgacgttggggacgtcgatgccaaggcccagaaattattggtcggcgtggacgagaagttaaatcctgaagacataaaaaagcatttgttagtccacgcaccggaagataaaaaagagattctcgcctcattcatttcaggtctctttaatttttatgaggacttatatttcacctatttggagatcaacccactcgtggtaaccaaggacggcgtctacgttctggacctggcagccaaggtagatgcaacagctgactatatctgcaaggtgaagtggggtgatatagaattccctccaccatttggtcgggaagcctaccctgaagaggcgtatatcgcggacctcgatgctaaaagcggcgcctccctgaagctgacactcctaaaccctaagggccgcatctggactatggtcgcagggggaggagcatcagtagtttatagcgacacaatatgcgacctgggaggggtgaatgagttggccaactacggcgaatatagcggggctcccagcgagcagcaaacgtatgattacgctaaaaccattctttctctcatgacaagggagaaacaccctgatggaaagatattaataataggcggctcgatcgccaatttcaccaacgtagccgcaacctttaagggcattgtcagagcaatcagagattaccagggccctctgaaagagcacgaggtgaccattttcgttcggcgcggcggtcccaactatcaggagggcttacgggtaatgggcgaagtgggcaaaaccaccggaatccccattcacgtgttcggcacagaaacccacatgacggctattgtgggaatggccctcggccaccgacccattccaaatcaaccacctaccgcggcccatactgcaaattttctcctcaacgccagtggatccaccagcactcctgccccatccaggacagctagtttctctgagtcacgcgccgacgaagtggcgcctgctaaaaaggcaaagccagccatgccacaggattccgttccctctccacggtccctgcaggggaaaagtactacactcttctcccgacacactaaagctattgtgtggggcatgcagacacgcgcagttcagggaatgctggatttcgactacgtgtgctctcgcgatgagccctctgtggccgcaatggtatatccatttactggggatcacaagcaaaaattctattgggggcacaaggagattttgattccagtctttaaaaacatggctgatgcaatgaggaagcatccggaagtcgacgtgctgattaatttcgcctctttgagatccgcctacgacagcacaatggagaccatgaactacgctcaaatcaggacgattgccatcattgcagaaggaatccccgaagcactgaccaggaagctgattaagaaggccgatcagaagggcgtcacgatcatcggacccgccactgtgggcggcattaagcccggctgttttaaaatcggtaacacaggcggcatgctagataacattttagcatctaagttatacagacctggctcggtggcatacgtgtcccggagcggcggaatgtctaacgaactgaacaacatcatatccagaaccaccgacggcgtttacgagggcgtagctattggcggcgaccgctatcccggctctacgttcatggaccacgtgctcaggtatcaagacactcctggtgtgaagatgatcgtggttcttggcgagattggcggtaccgaggaatataagatctgcaggggaatcaaagagggtaggctaactaaacctattgtgtgctggtgcatcggcacttgcgctaccatgtttagcagcgaagtccagtttgggcatgctggcgcctgtgccaaccaagccagcgaaacggccgttgctaagaatcaggccctcaaggaggctggcgttttcgtcccacggtccttcgatgaattaggtgaaatcatccagtcagtgtacgaagatttagtcgctaatggcgtgatagtcccggctcaagaagttccaccccctactgtaccaatggactacagctgggccagggagcttggccttatacgaaaacccgcctcatttatgacatctatatgcgatgagcgagggcaggagctcatctacgctggaatgcccatcaccgaggtctttaaggaagaaatggggatcggaggtgtgctcggattattatggttccagaagagactccctaagtactcatgtcaattcattgaaatgtgtctaatggtgaccgccgaccacggacccgccgtgtctggggcccataacaccatcatttgtgcgagggcaggaaaagacctggtgtcatctctgacatctggcctgctaaccattggcgaccgtttcggcggagccctggacgctgcagccaagatgttctccaaggccttcgatagtggaataatccctatggaatttgtaaacaagatgaagaaggaggggaagctaatcatgggcatcggacatcgcgtgaaatccattaacaatcccgacatgcgagttcaaatccttaaagactacgtgcggcagcactttccagccaccccccttctcgactatgccctggaggtcgagaagatcactaccagtaagaaaccgaacctgattcttaacgtcgatgggttaatcggggtggcatttgtcgatatgctgcggaactgcgggagctttacacgggaggaggccgatgagtatatagacattggcgcactcaatgggatcttcgtgctgggtaggtcaatgggtttcattggacattacttagatcagaagaggctgaagcagggcctctacaggcacccttgggacgacatatcgtacgtgctccctgagcacatgagcatgtag

SEQ ID NO: 275135 - DNA, 3306 bp, Artificial Sequence
  derived and/or modified sequence
atgtctgcaaaggccattagtgagcaaacaggtaaagaactgctctataaatttatctgcaccacttccgctattcagaatcgattcaaatacgcaagggtcacacctgacacggattgggcgagactgctccaggaccatccttggctgctatctcagaatcttgttgtgaagccagaccagcttatcaagagacgcggaaagctaggccttgtcggcgtgaacttgaccctagacggagttaagagttggctgaaaccacgacttggccaggaggccacagtagggaaggccaccggcttcctgaagaactttctcatcgagcccttcgtcccacactcgcaagctgaagagttctacgtctgcatttacgcaacccgcgaaggagattatgttctgtttcaccatgaagggggagtcgacgttggtgatgttgatgcgaaagcccagaaactcctggtaggcgtagatgagaaactaaaccccgaggacatcaagaaacacctgcttgttcacgcccctgaagataagaaagaaatcctggcgtcttttatttccggcttatttaatttttatgaagatttatattttacctatctagaaattaacccactcgtagtaaccaaagatggcgtctatgtcctcgatctcgcggcaaaggtcgacgccactgcagactacatttgtaaagttaagtggggcgatatagaatttcctcctccttttggtcgcgaagcctaccctgaagaagcctacatcgccgatctcgatgctaagtccggtgcatcactgaagctgaccctgcttaatcctaagggtagaatctggacaatggtagcaggagggggagcttctgtggtgtactccgacaccatatgtgacctgggcggagtaaatgagcttgccaattacggcgagtactcaggagcaccaagcgagcagcagacgtatgactatgctaagacaattctgtcattgatgacgcgggaaaagcatcccgacggcaagatcctaattattggaggctctattgccaatttcaccaacgtggctgcgacgttcaaaggaatagtgagggccatccgtgattaccagggacctctgaaggagcacgaagttacaatatttgtgcgacgcggtgggccaaattatcaggagggtttgcgcgtcatgggcgaagtgggaaagactactggcatccccattcacgtctttggcacagagacccacatgaccgcaattgtggggatggcactgggccaccggcctatcccaaaccagccccctacagcagcccatacagccaatttcctgctgaatgctagcggatctacgtctacccctgcaccttcacggacggcatccttctcggagagcagggccgacgaggtggctccagcaaaaaaagctaaacctgctatgccccaggactcagtgccttcccctcgaagcctgcaggggaagtccacaaccctgttcagccgccacactaaggccatagtttggggcatgcagacacgcgcagtacagggaatgctggacttcgattacgtttgtagtcgcgatgaaccatctgtagccgcaatggtttatccattcactggcgatcacaagcagaaattttattggggacataaggaaatcttaataccagttttcaagaacatggccgatgctatgcgcaagcaccccgaggtggatgtgctgattaactttgccagcttacgcagtgcttatgacagtacaatggaaaccatgaactacgcacagataagaacaattgccatcatcgctgaaggaattcctgaggcactgacaagaaagctcatcaagaaagcagatcagaaaggggtcaccatcatcggacctgctactgtagggggaattaaacctggatgcttcaagatagggaataccggaggaatgttggacaacatcctggcatcgaaactatatcgtcctgggagtgtcgcatacgtcagcagatcgggtggaatgtctaatgaattaaataacatcatctcccgcaccacagacggcgtgtatgaaggcgtagctatcgggggagatcggtacccaggttccacatttatggaccatgtcctccggtaccaggacaccccaggagtgaagatgattgtggtactcggagagatcggcggaacagaggagtacaaaatctgtaggggaatcaaggaaggtagacttaccaaacccatcgtgtgctggtgcattggaacatgtgctaccatgttctcaagcgaggtgcaatttggacatgccggagcctgcgctaaccaggcgtcagagactgcagttgcgaagaatcaggctctgaaggaggctggcgtctttgttccgaggtcctttgacgaactgggcgagatcattcagtctgtctacgaggatctggtggctaacggcgtgattgtgcccgctcaggaagtccccccacccaccgtgccaatggactacagctgggcacgagaactcgggttgataagaaagccagcctcttttatgactagtatctgcgacgaaagggggcaggagctcatttacgctggaatgcccatcacagaagtcttcaaagaggaaatgggaattgggggtgtcttgggactgctctggtttcagaaaaggctacccaagtattcctgtcagtttatcgagatgtgtctcatggtgactgctgaccatggccctgctgtttctggggctcacaataccatcatctgcgcacgggcaggcaaagacttggtatcaagtctgacgagcggactgcttaccataggcgatcggtttggaggggctctggacgccgctgctaagatgtttagcaaggcattcgactccggaataattccgatggaatttgtgaacaagatgaaaaaagaaggcaagctcatcatggggatcggtcaccgtgttaagagcatcaataaccccgatatgcgcgttcagattctgaaagattatgtcaggcagcacttccctgcaaccccattactggactatgcgctggaagtggagaagatcactaccagtaagaagcccaatctgattttaaacgtggacggtcttatcggcgtcgcttttgttgatatgctgaggaactgtggaagtttcacgagggaggaggccgacgagtatatagatatcggcgctctgaacggcatcttcgtgctcgggagaagtatggggtttattgggcactacctggaccagaagcgccttaagcagggcctatacagacatccctgggatgacatcagttacgtgctgcctgagcatatgtccatgtag

SEQ ID NO: 275136 - DNA, 3048 bp, Artificial Sequence
  derived and/or modified sequence
gtagagatgccacactcgctccgcggttcgcatggcgctctgaagacgccggcgcccgccgccttgaggagccgctgcccccgctccctgaagatgggggaacaatgaaataagcgagaagatccctcttctcccccctctctctcttgccccctccccccctcccctcccctctccccttgactcctctccgaggcaccatgctgacccgcctgttcagcgagcccggccttctctcggacgtgcccaagttcgccagctggggcgacggcgaagacgacgagccgaggagcgacaagggcgacgcgccgccaccgccaccgcctgcgcccgggccaggggctccggggccagcccgggcggccaagccagtccctctccgtggagaagaggggacggaggccacgttggccgaggtcaaggaggaaggcgagctggggggagaggaggaggaggaagaggaggaggaagaaggactggacgaggcggagggcgagcggcccaagaagcgcgggcccaagaagcgcaagatgaccaaggcgcgcttggagcgctccaagcttcggcggcagaaggcgaacgcgcgggagcgcaaccgcatgcacgacctgaacgcagccctggacaacctgcgcaaggtggtgccctgctactccaagacgcagaagctgtccaagatcgagacgctgcgcctagccaagaactatatctgggcgctctcggagatcctgcgctccggcaagcggccagacctagtgtcctacgtgcagactctgtgcaagggtctgtcgcagcccaccaccaatctggtggccggctgtctgcagctcaactctcgcaacttcctcacggagcaaggcgccgacggtgccggccgcttccacggctcgggcggcccgttcgccatgcacccctacccgtacccgtgctcgcgcctggcgggcgcacagtgccaggcggccggcggcctgggcggcggcgcggcgcacgccctgcggacccacggctactgcgccgcctacgagacgctgtatgcggcggcaggcggtggcggcgcgagcccggactacaacagctccgagtacgagggcccgctcagccccccgctctgtctcaatggcaacttctcactcaagcaggactcctcgcccgaccacgagaaaagctaccactactctatgcactactcggcgctgcccggttcgcggcccacgggccacgggctagtcttcggctcgtcggctgtgcgcgggggcgtccactcggagaatctcttgtcttacgatatgcaccttcaccacgaccggggccccatgtacgaggagctcaatgcgttttttcataactgagacttcgcgccggctcccttctttttcttttgcctttgcccgcccccctgtccccagcccccagagcgcagggacacccccatcctaccccggcgccgggcgcggggagcgggccaccggtcctgccgctctcctggggcagcgcagtcctgttacctgtgggtggcctgtcccaggggcctcgcttcccccaggggactcgccttctctctccccaaggggttccctcctcctctctcccaaggagtgcttctccagggacctctctccgggggctccctggaggcacccctcccccattcccaatatcttcgctgaggtttcctcctccccctcctccctgcaggcccaaggcgttggtaagggggcagctgagcaatggaacgcgtttccccctctcattattattttaaaaacagacacccagctgccgaggcaaaaaggagccaggcgctccctctttcttgaagagggtagaagttagggcgccggagcccgggcctggaacgccctcacccccaacctccagtctccgcgttttgcgattttaattttggcgggaggggaagtggattgagaggaaagagagaggccaagacaatttgtaactagaatccgtttttcccttttcctttttttaaacaaacaaacatacaaaaaaaaaaaaaaaaaaaaaaaaaaaaaaaaaaaaaaaagctaagaggcgacggaagccgaacgcagagtccggatcggagagaaaacgcagtaaggacttttagaagcaataaaaggcaaaaaaaacaaaaaacaaaaaaacaaacaaaaaaaaaccactactaccaataatcaaagacacaaatatctatgcaaggaggctccactgagcctcgcggcccggcccggccccgggatgccccgcccggcctgcgggccgccccgcccgagcgcggatctgtgcactttggtgaagtgggggcccgcgccgccccctccccctccccaggttcttacaatcagtgactcggagatttggggccccagtgccactgccctcccccgccccgtccccgttgtgcgtcatgctgttttttaaaaacctgtttccaaatttgtatggaatggcaaactgttggggggtcggtttggggagggagggtttgcatgaaagacacacgcacaccacaccgcacgcacaagcaggcccggcgccggcgtccggggggcagaaggaggtgagctcgccggctcctcctccccgcggccattctgtcccctcctggggtgaggggtggggatggagacctgggggcagccccacccctgcccggactgtgcctcggtgggtgccacctggcgatttccggtgtctggagagagtattttttggtccaaggagtcctcttggctttagctggtgggtgggcggggagaggtctgagggctcctactggaggttcccccaaaaaggggcaaaaggagaccctctgcccaccggaggcaggggatcaggcatccaaatacacgatgcaaaaatgcaatcccacaggcgacacacccacacactcacccacacacacgcaattttaccttcctcttgtagcgaagatgaaactcccgtcggacacccgaagtgcattgcgtgtttctgttcagtttaatgacgattaataaatatttatgtaaatgagatgcaaagccggaaaaaaaaaaaaaaaaa

SEQ ID NO: 275137 - DNA, 3053 bp, Artificial Sequence
  derived and/or modified sequence
tagaggctggtaccccgcctggtagagatgccacactcgctccgcggttcgcatggcgctctgaagacgccggcgcccgccgccttgaggagccgctgcccccgctccctgaagatgggggaacaatgaaataagcgagaagatccctcttctcccccctctctctcttgccccctccccccctcccctcccctctccccttgactcctctccgaggcaccatgctgacccgcctgttcagcgagcccggccttctctcggacgtgcccaagttcgccagctggggcgacggcgaagacgacgagccgaggagcgacaagggcgacgcgccgccaccgccaccgcctgcgcccgggccaggggctccggggccagcccgggcggccaagccagtccctctccgtggagaagaggggacggaggccacgttggccgaggtcaaggaggaaggcgagctggggggagaggaggaggaggaagaggaggaggaagaaggactggacgaggcggagggcgagcggcccaagaagcgcgggcccaagaagcgcaagatgaccaaggcgcgcttggagcgctccaagcttcggcggcagaaggcgaacgcgcgggagcgcaaccgcatgcacgacctgaacgcagccctggacaacctgcgcaaggtggtgccctgctactccaagacgcagaagctgtccaagatcgagacgctgcgcctagccaagaactatatctgggcgctctcggagatcctgcgctccggcaagcggccagacctagtgtcctacgtgcagactctgtgcaagggtctgtcgcagcccaccaccaatctggtggccggctgtctgcagctcaactctcgcaacttcctcacggagcaaggcgccgacggtgccggccgcttccacggctcgggcggcccgttcgccatgcacccctacccgtacccgtgctcgcgcctggcgggcgcacagtgccaggcggccggcggcctgggcggcggcgcggcgcacgccctgcggacccacggctactgcgccgcctacgagacgctgtatgcggcggcaggcggtggcggcgcgagcccggactacaacagctccgagtacgagggcccgctcagccccccgctctgtctcaatggcaacttctcactcaagcaggactcctcgcccgaccacgagaaaagctaccactactctatgcactactcggcgctgcccggttcgcggcccacgggccacgggctagtcttcggctcgtcggctgtgcgcgggggcgtccactcggagaatctcttgtcttacgatatgcaccttcaccacgaccggggccccatgtacgaggagctcaatgcgttttttcataactgagacttcgcgccggctcccttctttttcttttgcctttgcccgcccccctgtccccagcccccagagcgcagggacacccccatcctaccccggcgccgggcgcggggagcgggccaccggtcctgccgctctcctggggcagcgcagtcctgttacctgtgggtggcctgtcccaggggcctcgcttcccccaggggactcgccttctctctccccaaggggttccctcctcctctctcccaaggagtgcttctccagggacctctctccgggggctccctggaggcacccctcccccattcccaatatcttcgctgaggtttcctcctccccctcctccctgcaggcccaaggcgttggtaagggggcagctgagcaatggaacgcgtttccccctctcattattattttaaaaacagacacccagctgccgaggcaaaaaggagccaggcgctccctctttcttgaagagggtagaagttagggcgccggagcccgggcctggaacgccctcacccccaacctccagtctccgcgttttgcgattttaattttggcgggaggggaagtggattgagaggaaagagagaggccaagacaatttgtaactagaatccgtttttcccttttcctttttttaaacaaacaaacatacaaaaaaaaaaaaaaaaaaaaaaaaaaaaaaaaaaaaaaaagctaagaggcgacggaagccgaacgcagagtccggatcggagagaaaacgcagtaaggacttttagaagcaataaaaggcaaaaaaaacaaaaaacaaaaaaacaaacaaaaaaaaaccactactaccaataatcaaagacacaaatatctatgcaaggaggctccactgagcctcgcggcccggcccggccccgggatgccccgcccggcctgcgggccgccccgcccgagcgcggatctgtgcactttggtgaagtgggggcccgcgccgccccctccccctccccaggttcttacaatcagtgactcggagatttggggccccagtgccactgccctcccccgccccgtccccgttgtgcgtcatgctgttttttaaaaacctgtttccaaatttgtatggaatggcaaactgttggggggtcggtttggggagggagggtttgcatgaaagacacacgcacaccacaccgcacgcacaagcaggcccggcgccggcgtccggggggcagaaggaggtgagctcgccggctcctcctccccgcggccattctgtcccctcctggggtgaggggtggggatggagacctgggggcagccccacccctgcccggactgtgcctcggtgggtgccacctggcgatttccggtgtctggagagagtattttttggtccaaggagtcctcttggctttagctggtgggtgggcggggagaggtctgagggctcctactggaggttcccccaaaaaggggcaaaaggagaccctctgcccaccggaggcaggggatcaggcatccaaatacacgatgcaaaaatgcaatcccacaggcgacacacccacacactcacccacacacacgcaattttaccttcctcttgtagcgaagatgaaactcccgtcggacacccgaagtgcattgcgtgtttctgttcagtttaatgacgattaataaatatttatgtaaatgagatgcaaagccgga

SEQ ID NO: 275138 - protein, 742 aa, Artificial Sequence
  derived and/or modified sequence
MLSLKKYLTEGLLQFTILLSLIGVRVDVDTYLTSQLPPLREIILGPSSAYTQTQFHNLRNTLDGYGIHPKSIDLDNYFTARRLLSQVRALDRFQVPTTEVNAWLVHRDPEGSVSGSQPNSGLALESSSGLQDVTGPDNGVRESETEQGFGEDLEDLGAVAPPVSGDLTKEDIDLIDILWRQDIDLGAGREVFDYSHRQKEQDVEKELRDGGEQDTWAGEGAEALARNLLVDGETGESFPAQFPADISSITEAVPSESEPPALQNNLLSPLLTGTESPFDLEQQWQDLMSIMEMQAMEVNTSASEILYSAPPGDPLSTNYSLAPNTPINQNVSLHQASLGGCSQDFLLFSPEVESLPVASSSTLLPLAPSNSTSLNSTFGSTNLTGLFFPPQLNGTANDTAGPELPDPLGGLLDEAMLDEISLMDLAIEEGFNPVQASQLEEEFDSDSGLSLDSSHSPSSLSSSEGSSSSSSSSSSSSSSASSSASSSFSEEGAVGYSSDSETLDLEEAEGAVGYQPEYSKFCRMSYQDPAQLSCLPYLEHVGHNHTYNMAPSALDSADLPPPSALKKGSKEKQADFLDKQMSRDEHRARAMKIPFTNDKIINLPVEEFNELLSKYQLSEAQLSLIRDIRRRGKNKMAAQNCRKRKLDTILNLERDVEDLQRDKARLLREKVEFLRSLRQMKQKVQSLYQEVFGRLRDENGRPYSPSQYALQYAGDGSVLLIPRTMADQQARRQERKPKDRRK

SEQ ID NO: 275139 - DNA, 2229 bp, Artificial Sequence
  derived and/or modified sequence
atgttgagcctgaagaagtacctcacggagggcctcttacaatttaccattctgctgtccctcattggcgtgagggtggacgtcgacacctatctgacatcccagctgccccccctgcgcgaaataatattggggccatccagcgcctacacccagacacagttccataacttacgtaatacactggacggatacggcatccatcccaaaagtattgacttggacaactatttcacagcccgtcggctgctgagccaggtccgcgcattagacaggttccaggtgccaactacagaggtgaacgcctggttagtgcatagagacccagagggctccgtgtcaggatcacagccaaacagcggcctcgctcttgaatcatcttcaggactgcaggatgtgaccggcccagataatggcgttcgagagtctgagacggagcaggggtttggcgaagacctggaggatctcggcgctgtggccccccccgtatcaggcgatctgaccaaagaagacatagatctgatcgacatcctgtggagacaagacatcgatctcggcgctggaagggaagtgtttgattactcccaccgccagaaggagcaagacgtggagaaagagctgagggatgggggggaacaggacacatgggcaggcgaaggagcagaagcactggctcgaaaccttctggtggacggggagaccggcgaatcttttccagcccagtttcctgccgatatcagctccataacagaggctgttccctctgagtccgagcccccagccctccagaataatctactttcccccctgttgaccggcactgagtcaccgttcgacctcgaacaacagtggcaggacctgatgagcataatggagatgcaagcaatggaagtgaacacctctgcctccgagattctttacagcgcgccgccaggggatcctctttcgaccaactattctttggcccctaacactccaattaatcagaacgtgtccctacaccaggccagcctgggaggctgttcacaggacttccttcttttctcacctgaggttgaaagccttccagtcgcgtccagtagtactttgttgccattggctccctccaattcaaccagccttaattctacctttgggagcacaaacctgactggcctgttctttcctccacagctaaacggtaccgccaacgacaccgccggccctgagctccctgacccgctgggagggctattagacgaagcaatgctcgacgagatcagcttgatggatttggcgatcgaagagggctttaatcccgtgcaggcttcgcagctggaagaagagttcgacagcgactccggcctgagcctagattcatcccatagtccttccagcctttccagttctgaggggagctcttcctcaagcagttcctcctcatcctcatcatcttctgctagttcgtccgctagcagctcattcagcgaagagggcgccgtgggctacagctcagacagcgaaaccctggacctggaagaagccgaaggggcggtgggctatcagccggaatactcaaagttctgtcggatgtcataccaagaccccgcacagttgtcctgtctgccttatctcgagcacgttgggcacaaccacacctataacatggcaccctccgctctcgactcggcggatcttccccctccatcagctttgaagaaaggctctaaggagaaacaagccgacttcctcgataagcaaatgtcaagagatgaacatcgggcccgagccatgaagataccatttacgaacgacaagattattaacctcccagtggaggaattcaacgaattactgagtaaatatcagttatcagaggcacagctcagtttgataagggatattagacggcggggcaagaacaaaatggcagcccagaactgtagaaagcgtaaactcgacaccatcctcaacctggaacgggatgtggaggacctgcagagagacaaagcccggcttctccgggaaaaagtggagtttctcagaagtctgaggcaaatgaagcagaaggttcagagtctctaccaggaggtctttggacgtcttcgcgacgagaatggtcgtccttactctccttcacagtatgccttgcagtacgctggcgacggttcagtgttattgatccctcgcaccatggccgaccagcaggcccgacgccaggaacgcaagcctaaggatagaaggaaatag

SEQ ID NO: 275140 - DNA, 1851 bp, Artificial Sequence
  derived and/or modified sequence
atgacccgactggatcgctccagtcattctggcggcggacatgcaaaagggagccggcctctgaactcacttctggccggacatcgcgtggcgcaaccggcaagtgcaccaggctccagggcctccgtccaggatatcgacctaatcgatatattgtggcgacaggacatcgacttgggtgccggccgagaggtgttcgattattcccaccgacagaaagagcaagatgtggaaaaggagctccgcgatggaggagagcaagacacctgggcaggagaaggtgccgaggcgctggcacgcaatctgcttgtggatggagaaacaggggagtcttttcctgctcaattcccagccgatatctcttccatcactgaggccgtacccagcgagagtgaaccaccagccctgcagaacaatctgctaagtcccctactaacaggaactgagagcccctttgacttagaacaacaatggcaggatctcatgtccatcatggagatgcaagcaatggaagtgaacacgagcgcaagtgaaatcctgtacagcgctccccccggcgatccactgtctactaattactctctggcccctaatacacctataaaccagaatgtcagcctgcatcaggccagcctcggaggttgtagccaggatttccttctgttttccccagaggtggaatctctgcctgttgctagctcctccactctgttgcccctcgctcctagcaactctacatccctgaactcaacgtttggcagcacaaatttgacaggactattctttccgccccagctcaacggcaccgccaatgacacagccggcccagagttaccagatccactgggcgggttacttgacgaggcaatgcttgatgaaatttcgttaatggatttagccattgaagaggggtttaatcccgtgcaggcctcccaattggaagaagagttcgattcagatagcggactgagcctggactcgtcccactcaccatcaagcctcagttcttctgaaggctctagttccagctcttccagcagtagttcttcaagctcatccgccagcagctccgcctccagctcctttagtgaggagggcgccgtgggatactcttctgatagcgaaacgctggatcttgaggaggccgagggggccgttgggtaccagcccgagtactctaagttctgccgcatgtcctaccaggaccccgcacagctcagctgcctgccttacctggaacatgtgggacataaccacacctacaacatggcaccaagcgctctggactccgctgatcttccccccccctccgccctcaagaagggaagcaaagaaaagcaggcagattttttagataaacagatgtctcgtgacgagcacagggccagggcgatgaaaatcccatttaccaatgataaaatcatcaacttaccggtggaagagtttaatgaactcctgtctaaataccaattgtccgaagcccagctgtcactgattcgcgacattcgccgcagggggaaaaacaagatggccgctcagaactgccgtaaacgtaagctggacaccatcctgaacctggaaagggacgtggaagaccttcagcgggacaaagcaaggcttcttcgcgagaaggtggaatttctccgaagcctgcgacaaatgaagcaaaaagtacaatcactctatcaggaggtgttcgggcgcctcagagatgaaaacggccggccatatagcccgtcccaatacgctctccaatacgccggcgacgggtctgttctacttattccacggactatggcagatcagcaagccagaagacaagaaaggaaacctaaagaccggcggaagtag

SEQ ID NO: 275141 - DNA, 2229 bp, Artificial Sequence
  derived and/or modified sequence
atgctgagcctgaagaagtacctgacagagggcctgctgcagttcaccatcctgctgagcctcatcggcgtgcgggtggatgtggacacctacctgaccagccagctgccccccctgcgggagatcatcctgggccccagcagcgcctacacccagacccagttccacaacctgaggaacaccctggatggctacggcatccaccccaagagcattgacctggacaactacttcaccgcccggcggctgctgagccaggtgcgggccctggaccgcttccaggtgcccaccacagaggtgaatgcctggctggtgcaccgggaccctgagggctctgtgtctggcagccagcccaacagcggcctggccctggagagcagcagcggcctgcaggatgtgacaggccctgacaacggggtgcgggagagcgagacagagcagggctttggagaggacctggaggacctgggcgctgtggcccctcctgtgtctggggacctgaccaaggaggacatcgacctgattgacatcctgtggaggcaggacatcgacctgggcgccggccgggaggtgtttgactacagccaccggcagaaggagcaggatgtggagaaggagctgagagatggaggagagcaggacacctgggccggggagggcgctgaggccctggccaggaacctgctggtggatggagagaccggggagagcttccctgcccagtttcctgctgacatcagcagcatcacagaggccgtgcccagcgagagcgagcccccagccctgcagaacaacctgctgagccccctgctgaccggcacagagagcccctttgacctggagcagcagtggcaggacctgatgagcatcatggagatgcaggccatggaggtgaacaccagcgccagcgagatcctgtacagcgcccctcctggggaccccctgagcaccaactacagcctggcccccaacacccccatcaaccagaatgtgtccctgcaccaggccagcctgggcggctgcagccaggacttcctgctcttcagccctgaggtggagagcctgcctgtggccagcagcagcaccctgctgcccctggcccccagcaacagcaccagcctgaacagcaccttcggcagcaccaacctgaccggcctcttcttccccccccagctgaatggaacagccaatgacacagctggccctgagctgcctgaccccctgggcggcctgctggatgaggccatgctggatgagatcagcctgatggacctggccatcgaggagggcttcaaccctgtgcaggccagccagctggaggaggagtttgacagcgacagcggcctgagcctggacagcagccacagccccagcagcctgagcagcagcgagggcagcagcagcagcagcagcagcagcagcagcagcagcagcagcgccagcagcagcgccagcagcagcttcagcgaggagggcgctgtgggctacagcagtgacagcgagaccctggacctggaggaggccgagggcgctgtgggctaccagcctgagtacagcaagttctgcaggatgagctaccaggaccctgcccagctgagctgcctgccctacctggagcacgtgggccacaaccacacctacaacatggcccccagcgccctggacagcgctgacctgcccccaccttctgccctgaagaagggcagcaaggagaagcaggccgacttcctggacaagcagatgagcagagatgagcaccgggcccgggccatgaagatccccttcaccaatgacaagatcatcaacctgcctgtggaggagttcaatgagctgctgagcaagtaccagctgtctgaggcccagctgagcctcatccgggacatcagaagaagaggcaagaacaagatggccgcccagaactgcaggaagaggaagctggacaccatcctgaacctggagagagatgtggaggacctgcagagggacaaggcccggctgctgcgggagaaggtggagttcctgcggagcctgcggcagatgaagcagaaggtgcagagcctgtaccaggaggtgtttggccgcctgagagatgaaaatggccggccctacagccccagccagtatgccctgcagtatgctggagatggctctgtgctgctgatccccaggaccatggctgaccagcaggcccggcggcaggagaggaagcccaaggacaggaggaagtag

SEQ ID NO: 275142 - DNA, 1851 bp, Artificial Sequence
  derived and/or modified sequence
atgacccggctggacaggagcagccacagcggcggcggccacgccaagggcagccggcccctgaacagcctgctggccggccaccgggtggcccagcctgccagcgcccctggcagccgggcctctgtgcaggacatcgacctgattgacatcctgtggaggcaggacatcgacctgggcgccggccgggaggtgtttgactacagccaccggcagaaggagcaggatgtggagaaggagctgagagatggaggagagcaggacacctgggccggggagggcgctgaggccctggccaggaacctgctggtggatggagagaccggggagagcttccctgcccagtttcctgctgacatcagcagcatcacagaggccgtgcccagcgagagcgagcccccagccctgcagaacaacctgctgagccccctgctgaccggcacagagagcccctttgacctggagcagcagtggcaggacctgatgagcatcatggagatgcaggccatggaggtgaacaccagcgccagcgagatcctgtacagcgcccctcctggggaccccctgagcaccaactacagcctggcccccaacacccccatcaaccagaatgtgtccctgcaccaggccagcctgggcggctgcagccaggacttcctgctcttcagccctgaggtggagagcctgcctgtggccagcagcagcaccctgctgcccctggcccccagcaacagcaccagcctgaacagcaccttcggcagcaccaacctgaccggcctcttcttccccccccagctgaatggaacagccaatgacacagctggccctgagctgcctgaccccctgggcggcctgctggatgaggccatgctggatgagatcagcctgatggacctggccatcgaggagggcttcaaccctgtgcaggccagccagctggaggaggagtttgacagcgacagcggcctgagcctggacagcagccacagccccagcagcctgagcagcagcgagggcagcagcagcagcagcagcagcagcagcagcagcagcagcagcgccagcagcagcgccagcagcagcttcagcgaggagggcgctgtgggctacagcagtgacagcgagaccctggacctggaggaggccgagggcgctgtgggctaccagcctgagtacagcaagttctgcaggatgagctaccaggaccctgcccagctgagctgcctgccctacctggagcacgtgggccacaaccacacctacaacatggcccccagcgccctggacagcgctgacctgcccccaccttctgccctgaagaagggcagcaaggagaagcaggccgacttcctggacaagcagatgagcagagatgagcaccgggcccgggccatgaagatccccttcaccaatgacaagatcatcaacctgcctgtggaggagttcaatgagctgctgagcaagtaccagctgtctgaggcccagctgagcctcatccgggacatcagaagaagaggcaagaacaagatggccgcccagaactgcaggaagaggaagctggacaccatcctgaacctggagagagatgtggaggacctgcagagggacaaggcccggctgctgcgggagaaggtggagttcctgcggagcctgcggcagatgaagcagaaggtgcagagcctgtaccaggaggtgtttggccgcctgagagatgaaaatggccggccctacagccccagccagtatgccctgcagtatgctggagatggctctgtgctgctgatccccaggaccatggctgaccagcaggcccggcggcaggagaggaagcccaaggacaggaggaagtag

SEQ ID NO: 275143 - DNA, 2229 bp, Artificial Sequence
  derived and/or modified sequence
atgctgagcctgaagaagtacctgaccgagggcctgctgcagttcacgatcttgctgagcttgattggggtcagagtggatgttgacacatatctgactagccagctacctccactccgagaaattattctgggtccatcctccgcgtacactcaaactcagttccacaacctgcggaacactctggatggctatggaatccacccaaagtctatagatctggataactatttcacggcccggagattgcttagtcaggtacgcgccttggacagatttcaggtgcctactactgaggtcaacgcctggctggtccaccgcgatcccgagggaagtgtttctggctctcaacccaactccgggctagcactcgaatcctcctccgggttgcaagatgtgaccggcccagacaatggcgtccgtgagtctgagacagaacaggggttcggcgaagatctggaggacctgggagccgtcgcccctcctgtctctggcgatctgaccaaggaagatattgatctgatcgacattctgtggaggcaagatattgatctgggtgccgggcgagaggtgtttgattattcccaccgccagaaagaacaagacgtggaaaaagaattaagggacggtggagagcaggatacttgggctggtgagggggccgaggccctagcccgaaatcttctggtggacggtgaaaccggtgagtcattccccgcccaatttcccgccgacatttcgtccataaccgaggctgtcccttcagagagtgaaccgcccgcactacagaacaatctcctaagccccttgctcaccggaactgaatcccctttcgacctcgaacaacagtggcaagaccttatgtcgattatggagatgcaagcaatggaggtgaatacaagcgcctccgaaatcctctattcggctcctcccggagatcccctctccaccaattactctctggcgcctaacacaccaattaaccagaacgtgtcactccatcaggcctccctgggaggttgttcacaagatttcttactttttagtcccgaagtggagtctctccctgtcgccagctcgtcaaccctgttgcccctggctccctccaactcaacctcactcaacagcacttttggttctactaatctcacgggcctgttttttccaccacagctgaacggaactgctaacgacactgccggaccagagctgcctgatcctctgggcggcctgcttgacgaagccatgcttgatgagatctccctgatggacctggcaatcgaagagggctttaacccagtgcaggcgtcccagttagaagaggaatttgattcagactcaggattgtcactggactcctctcactcgccgagcagtctctcaagctcagagggctcttcctccagttcttctagctcttcaagttcaagcagctccgcctcttcttcagcatcctcttccttttctgaggagggagcagtgggatattcatcggactccgagactctggatttggaagaggctgagggtgcagtcggataccagcctgagtacagcaagttttgcagaatgtcatatcaagacccggcacaactgtcctgcctgccatacctggaacatgtgggccataaccatacctataatatggccccctctgccttggattccgccgacttaccccctccttctgccttgaaaaaggggtccaaagagaagcaggctgacttcctggacaaacagatgtctcgggatgaacatcgagcacgggctatgaagataccatttactaacgataagatcataaatctccccgttgaggaattcaatgagctgctgagtaagtaccagctgtcagaggctcagttatccctgattcgagatattaggcggagggggaaaaataagatggcagctcagaattgcaggaagagaaagcttgacacaatcctgaatttggagcgcgacgtggaagatctacagagagataaggcacgactgcttagagagaaagtggaattcctgcggtctctcaggcagatgaagcagaaggtgcagtccctttaccaggaagttttcgggcgcctgcgggacgaaaatgggaggccatactcaccttctcagtatgccctgcagtatgctggtgacggctcggtactacttatacccaggactatggccgatcagcaggcccggagacaggaacggaaacctaaggaccgacgtaagtag

SEQ ID NO: 275144 - DNA, 1851 bp, Artificial Sequence
  derived and/or modified sequence
atgacccggctggaccggagcagccacagcggcggcggccacgccaaggggtcccggcccctgaatagtctgctggccggtcatcgggtcgcacagcccgcaagcgctcccggctcacgagcatctgttcaagacatagacctgatcgacatcctttggagacaggatattgatctcggcgcagggagggaggtgtttgactactctcatcgccaaaaagaacaggatgtggaaaaagagctgcgggatggtggagagcaggatacctgggcaggggagggtgcagaggctcttgcccgcaacctgttagtggacggagagaccggcgagtcgttcccagcccagttcccagccgatataagctctataacagaggcggttcctagcgagtccgagcccccggcgctgcagaacaatctattatctcccttactgaccggcacagagtcacctttcgaccttgaacagcagtggcaggatttaatgtccattatggagatgcaggccatggaagtgaatactagtgcatctgaaatcttgtattctgccccacccggcgaccctctgtctaccaactacagcttagctccaaacaccccaataaaccagaacgtgagtctgcaccaggcatctctgggaggttgctctcaagatttcttgctgttcagccccgaggtggagtcactgcctgttgctagcagcagcaccctgctgccactggccccttcgaatagtacttcccttaacagtacgtttgggagcactaatctgacagggcttttctttccgccccagttgaacgggaccgccaatgataccgccggtccggagcttcccgaccctctcggtggactcctggacgaagcaatgctggatgaaatcagtctgatggatctagccatagaggagggtttcaatccagtgcaggcctctcagctcgaggaggagttcgattctgacagtggtctgtcactggattccagccatagtccttctagcctttccagctccgaagggtcaagtagttctagctctagttcatcatcttcgagtagcagcgcatcttcatccgcgtcgtctagcttctcagaagaaggagcggtcggatacagttccgatagtgagacactggatctcgaggaggcggaaggggcagttgggtaccagccagagtattctaaattctgtcggatgagttatcaggatcctgcgcagctgtcctgcttaccgtacctggagcacgtcggccataaccacacatacaacatggcccctagtgctctggatagtgcagacctacccccaccctctgctctgaagaagggctccaaagaaaagcaggcggatttcctggataagcagatgagcagagacgagcaccgagcccgagccatgaaaatcccttttactaatgacaagatcattaatttgcctgtggaagaatttaatgagctcctaagcaagtatcaactaagcgaagctcagctctctctgattagagacattcggcgacgagggaaaaacaagatggctgctcagaattgtcggaagcggaagctggacacaatactgaacctcgaacgtgacgttgaggatctgcagcgcgataaggctcgactgcttcgggagaaggtcgagttcctccgatcccttcgtcagatgaaacagaaggtgcaatctctgtaccaggaagtgtttggccgcctgcgcgatgagaatggtagaccttacagccctagtcagtacgccctgcagtatgcaggagatggtagcgtgctgctgattcctcggacgatggctgatcagcaggcccgcagacaggaaagaaagcccaaagataggcggaagtag

SEQ ID NO: 275145 - DNA, 4783 bp, Artificial Sequence
  derived and/or modified sequence
tttccgagtgcggtagcaggagggggcggggaggtaagcggaggctccgagctctaggccggccggcggtggcggcggcgaggccgggactcgggcttagggcctgctgtggaggcagcggcggacgccgagctaagcagtttctctggaaacccccctggtaagtgtggaggaggcgggacactctgacccaagacgaaaggcctgtagctccagccaaagaaaataaaccttaggagggagaaggaaaaaaaaaatccatcagctgttcctgagaacagcctgcattggaatctacagagaggacaactaatgtgagtgaggaagtgactgtatgtggactgtggagaaagtaagtcacgtgggcccttgaggacctggactgggttaggaacagttgtactttcagaggtgaggtgtcgagaagggaaagtgaatgtggtctggagtgtgtccttggccttggctccacagggtgtgctttcctctggggccgtcagggagctcatcccttgtgttctgccagggtggggtacggggtttgacactgaggagggtaacctgctggctggagcggcagagcagtggccttgatttgtcttttggaagattttaaaaaccaaaaagcataaacattctggtccttcagcaatgctttctctgaagaaatacttaacggaaggacttctccagttcaccattctgctgagtttgattggggtacgggtggacgtggatacttacctgacctcacagcttcccccactccgggagatcatcctggggcccagttctgcctatactcagacccagttccacaacctgaggaataccttggatggctatggtatccaccccaagagcatagacctggacaattacttcactgcccggcggctcctcagtcaggtgagggccctggacaggttccaggtgccaaccactgaggtaaatgcctggctggttcaccgagacccagaggggtctgtctctggcagtcagcccaactcaggcctcgccctcgagagttccagtggcctccaagatgtgacaggcccagacaacggggtgcgagaaagcgaaacggagcagggattcggtgaagatttggaggatttgggggctgtagcccccccagtcagtggagacttaaccaaagaggacatagatctgattgacatcctttggcgacaggatattgatctgggggctgggcgtgaggtttttgactatagtcaccgccagaaggagcaggatgtggagaaggagctgcgagatggaggcgagcaggacacctgggcaggcgagggcgcggaagctctggcacggaacctgctagtggatggagagactggggagagcttccctgcacagtttccagcagacatttccagcataacagaagcagtgcctagtgagagtgagccccctgctcttcaaaacaacctcttgtctcctcttctgaccgggacagagtcaccatttgatttggaacagcagtggcaagatctcatgtccatcatggaaatgcaggccatggaagtgaacacatcagcaagtgaaatcctgtacagtgcccctcctggagacccactgagcaccaactacagccttgcccccaacactcccatcaatcagaatgtcagcctgcatcaggcgtccctggggggctgcagccaggacttcttactcttcagccccgaggtggaaagcctgcctgtggccagtagctccacgctgctcccgttggcccccagcaattctaccagcctcaactccaccttcggctccaccaacctgacagggctcttctttccaccccagctcaatggcacagccaatgacacagcaggcccagagctgcctgaccctttggggggtctgttagatgaagctatgttggatgagatcagccttatggacctggccattgaagaaggctttaaccctgtgcaggcctcccagctggaggaggaatttgactctgactcaggcctttccttagactcgagccatagcccttcttccctaagcagctctgaaggcagttcttcctcttcttcctcctcctcttcctcttcttcctctgcttcttcctctgcctcttcctccttttctgaggaaggtgcggttggctacagctctgactctgagaccctggatctggaagaggccgagggtgctgtgggctaccagcctgagtattccaagttctgccgcatgagctaccaggatccagctcagctctcatgcctgccctacctggagcacgtgggccacaaccacacatacaacatggcacccagtgccctggactcagccgacctgccaccacccagtgccctcaagaaaggcagcaaggagaagcaggctgacttcctggacaagcagatgagccgggatgagcaccgagcccgagccatgaagatccctttcaccaatgacaaaatcatcaacctgcctgtggaggagttcaatgaactgctgtccaaataccagttgagtgaagcccagctgagcctcatccgagacatccggcgccggggcaagaacaagatggcggcgcagaactgccgcaagcgcaagctggacaccatcctgaatctggagcgtgatgtggaggacctgcagcgtgacaaagcccggctgctgcgggagaaagtggagttcctgcgctccctgcgacagatgaagcagaaggtccagagcctgtaccaggaggtgtttgggcggctgcgagatgagaacggacgaccctactcgcccagtcagtatgcgctccagtacgccggggacggcagtgtcctcctcatcccccgcacgatggccgaccagcaggcccggcggcaggagaggaagccaaaggaccggagaaagtgagcctggggaagaagggggtttgaagcccaccaagaccgaaactggagaagggctggacctggacctggacctggacctacagcggggacttaaatgccttcttatccaatatatcttctcagatgggatgactgcgggtcagtgtacaggaagaggcaggcactggctggctcagctccactcgggtggagtggaagtggccagaccatttagacggacagggtcctcaccctacccctttcctgtgaggcaggggtggtggtggagttgctggaggtagaggagctatgtggagcaaaggccgacagaggggaaggaatggacctgtgagaggaagggaaggtggcagaaagtctcatttcaggaaggagggatagaaggaaggaaggaaggaacccccccccccccgaaaaaaaaatcaaagcgggaagaaaatcagagggaaggttaaggttggctctggccaggattccaggcagcaggttggagtgactggtgggcctagatcactggtgtgataaaccccaattttcaccccggggggggtggggtacacagacacagggtgggggtggggagggacggtgttaactctttctgctccttgcattttgacatccctgaaggggagctcttggatatcattggccatgtttcaatcgaatggagccactgggccccaacactggctttgagatttagagtcaaagggtagagtgaacaggaaagggtcacgtggtcccatgttgcaacagccccaacatcacgcatgtcattcactgccttgccactccatctccctccgtgctccagccacccctgagctgaggctcccattgtctccatcagagcctgcatgtgtatgccgtcctcccctggtccggtgtttgtgttccccacccctcacagactgcctgagctcttctgtaagctggggtagggtgatggcagtgctccgggaactgggcctgcagccttcctcttctgggactgctgtgaggcagaggaatgatggagaatctagtgtagcagcctccaggcaggattcagcacaacactggggagtcacccttccctcgggcctctgcctaccaacaactgggcttatcactgggaaaacacaaaaaattacacaacccagcaacaacaaaagaactagtcctcttagaatttcttgcgctttgatttttttagggcttgtgccctgtttcacttatagggtctagaatgcttgtgttgagtaaaaaggagatgcccaatattcaaagctgctaaatgttctctttgccataaagactccgtgtaactgtgtgaacacttgggatttttctcctctgtcccgaggtcgtcgtctgctttcttttttgggtttctttctagaagattgagaagtgcatatgacaggctgagagcacctccccaaacacacaagctctcagccacaggcagcttctccacagccccagcttcgcacaggctcctggagggctgcctgggggaggcagacatgggagtgccaaggtggccagatggttccaggactacaatgtctttatttttaactgtttgccactgctgccctcacccctgcccggctctggagtaccgtctgccccagacaagtgggagtgaaatgggggtggggggaagcactgattcccagttagggggtgcctaactgagcagtagggatagaaggtgtgaacctgggagtgcttttataaattattttccttgtagattttatttttaatttatctctgtgacctgccagggagaggggagagagagagagatgctgttgagcacatgacaaaataaaataaaatggatgattcattcttaagtgcactttttccccactttgaatttaaattgagaataaaggaaatggactcattgt

SEQ ID NO: 275146 - DNA, 2172 bp, Artificial Sequence
  derived and/or modified sequence
agcttgagcacggagcatggggtgggagtcccatctcactgcagcctctgcggtgagctcagggtgggggcagctgggcgcctgagtggaactggggttgtgaggtgggagggggctgctcaaggatggaggaagggggctggctgggccgcccaggcagcagcacgggcggggcaccctcctcaggcccctcggagctagcaaggggccacccttccagcctggtgtgctccctgaaagccaagagctccttgcagccccctgtccggcttcccggcaccggctgccctggggctcatctcgcagaccatgacccgcctggaccgcagctctcacagtggtgggggccatgccaaaggcagccggccccttaactctttgctggctggtcaccgggtggcccagcccgcctctgctcctgggtccagggcttctgttcaggacatagatctgattgacatcctttggcgacaggatattgatctgggggctgggcgtgaggtttttgactatagtcaccgccagaaggagcaggatgtggagaaggagctgcgagatggaggcgagcaggacacctgggcaggcgagggcgcggaagctctggcacggaacctgctagtggatggagagactggggagagcttccctgcacagtttccagcagacatttccagcataacagaagcagtgcctagtgagagtgagccccctgctcttcaaaacaacctcttgtctcctcttctgaccgggacagagtcaccatttgatttggaacagcagtggcaagatctcatgtccatcatggaaatgcaggccatggaagtgaacacatcagcaagtgaaatcctgtacagtgcccctcctggagacccactgagcaccaactacagccttgcccccaacactcccatcaatcagaatgtcagcctgcatcaggcgtccctggggggctgcagccaggacttcttactcttcagccccgaggtggaaagcctgcctgtggccagtagctccacgctgctcccgttggcccccagcaattctaccagcctcaactccaccttcggctccaccaacctgacagggctcttctttccaccccagctcaatggcacagccaatgacacagcaggcccagagctgcctgaccctttggggggtctgttagatgaagctatgttggatgagatcagccttatggacctggccattgaagaaggctttaaccctgtgcaggcctcccagctggaggaggaatttgactctgactcaggcctttccttagactcgagccatagcccttcttccctaagcagctctgaaggcagttcttcctcttcttcctcctcctcttcctcttcttcctctgcttcttcctctgcctcttcctccttttctgaggaaggtgcggttggctacagctctgactctgagaccctggatctggaagaggccgagggtgctgtgggctaccagcctgagtattccaagttctgccgcatgagctaccaggatccagctcagctctcatgcctgccctacctggagcacgtgggccacaaccacacatacaacatggcacccagtgccctggactcagccgacctgccaccacccagtgccctcaagaaaggcagcaaggagaagcaggctgacttcctggacaagcagatgagccgggatgagcaccgagcccgagccatgaagatccctttcaccaatgacaaaatcatcaacctgcctgtggaggagttcaatgaactgctgtccaaataccagttgagtgaagcccagctgagcctcatccgagacatccggcgccggggcaagaacaagatggcggcgcagaactgccgcaagcgcaagctggacaccatcctgaatctggagcgtgatgtggaggacctgcagcgtgacaaagcccggctgctgcgggagaaagtggagttcctgcgctccctgcgacagatgaagcagaaggtccagagcctgtaccaggaggtgtttgggcggctgcgagatgagaacggacgaccctactcgcccagtcagtatgcgctccagtacgccggggacggcagtgtcctcctcatcccccgcacgatggccgaccagcaggcccggcggcaggagaggaagccaaaggaccggagaaagtgagcctggggaaga

SEQ ID NO: 275147 - DNA, 2229 bp, Artificial Sequence
  derived and/or modified sequence
atgctgagtcttaaaaaatacctcactgaaggtcttctgcagttcacaattttgctaagcctgatcggcgtacgtgttgatgttgacacctaccttacctcacaacttcccccattgcgtgaaattatactgggtcccagctcagcctatactcagacacagttccataacttgagaaacaccctcgatggttacggtatccaccccaagagtatcgatctggacaattatttcactgctcggagactccttagccaggttagggctttggataggttccaggtccccaccactgaggttaacgcctggttggtgcacagggaccctgaagggagtgtgtctggctcccagccaaatagcgggctggcactggagagtagctccggtcttcaggatgtcactggaccggataatggcgttagagaatccgaaactgaacaggggtttggcgaagatctcgaggacctgggagccgtggcacccccagtgtcaggggacctgacaaaggaggacatcgacttgatcgacattttgtggcggcaggacatagatcttggtgctggcagagaagtttttgactactcacaccgccagaaggagcaggacgtcgagaaagagttgcgtgacggaggcgagcaggatacttgggctggcgagggagccgaagccttggctcgtaatctgctggtggacggagaaacaggagaatccttccccgcacaattccccgcagacatcagcagtattactgaagccgtgccaagtgagagtgagccccctgcattacagaacaacttgctgtctcctctcttaacaggcacggagagcccttttgatctggagcagcagtggcaggacctgatgtctatcatggaaatgcaggccatggaggttaacacatcagcgagcgaaatcttgtacagtgcacctccaggtgaccctctgagcaccaattattcattggccccaaacacgccaataaaccagaatgtgagcttacaccaggctagtctgggaggctgcagccaggatttcttactcttctcgccggaggtagaatctctgccagtggcgtcttcctcaactctactgcctctggctccctccaactctacctccctgaattcaaccttcggttctacgaatcttaccggcttatttttcccacctcagctcaacgggaccgccaatgatacagctggaccggaacttccagaccctctgggaggcttgctcgacgaggcgatgctggatgagatttccctgatggacctcgccatcgaggaaggcttcaaccctgtacaggcctcacagttagaagaagaatttgatagtgattctggactgtcgctggactcgagtcacagcccatcgagcctttcctctagcgaggggagtagtagcagcagttcaagctcgtcaagctcttcatcctccgcatccagcagcgcgtcctcctcattttcggaggagggtgccgtcggttactcgagcgatagtgaaacattggacctggaggaagcagagggagccgttggttatcagcccgagtatagcaagttttgcagaatgtcatatcaggaccccgctcagctgtcctgcttgccataccttgaacatgttggtcacaatcacacgtacaatatggccccttcggctctggactccgccgatctgccgccaccgagcgctttaaagaagggcagcaaggagaagcaggccgacttcctggataaacagatgagtagggacgaacatcgtgcacgggcaatgaagattcccttcaccaatgataagattatcaatctgcctgtggaggagtttaatgaactgctgtctaaataccagctctcagaggcccaactcagtctgatccgcgatatccgccgtcgtggcaaaaataagatggccgctcagaactgtcggaagcggaaactggacaccatcttgaacctcgaaagagatgtcgaagacctccagagggacaaggctcggctgttacgcgaaaaggtagaattcttaaggtcccttcgccagatgaagcagaaggttcaaagcctttatcaggaggtgtttggtaggctgcgtgacgagaatggtcgtccttatagcccttctcagtacgccctgcaatacgctggggacggatccgtattgctgatccctcgaacgatggcagaccagcaggctaggagacaggagaggaaaccaaaagatagacggaaatag

SEQ ID NO: 275148 - DNA, 1851 bp, Artificial Sequence
  derived and/or modified sequence
atgactaggttagacaggtcaagccactcaggtggtggccacgccaaaggatcccggcctctcaactcactgctcgccggacatagagtggcacagcctgcaagcgccccagggagtcgcgcttctgtgcaggatattgacctgattgatattttgtggagacaggatatcgatctcggtgctggcagagaggtcttcgactattctcaccgtcagaaggagcaagatgtcgaaaaggaacttcgagatggtggcgagcaggacacgtgggcaggagaaggcgcagaagcgctggccagaaatctgcttgtggatggagagaccggtgaatccttccccgctcagtttccggctgatatcagcagcattacagaggcggtgcctagcgaatcagagcctccagccctccagaataatttgctgagccctctgcttacaggcacggagagccctttcgacctcgagcagcagtggcaggatttgatgtccatcatggagatgcaggcaatggaagtgaatacaagcgcgtcggagattctatacagtgcaccacctggagacccactctcaaccaattattctttggctccgaatactccaattaaccagaatgtctccctgcaccaagcaagcctgggtggctgtagccaagactttctgctgttctcccccgaagtggaatctctgccagtggctagttcttcgacgttgctgcctctggctccatccaattctacttccctaaattcaactttcgggtctacaaatctaaccggacttttttttcctccacagctgaacggcacagctaacgacacagctggtcccgaactccccgacccactggggggactattagacgaggctatgctggatgaaatcagtttgatggacctcgccatcgaggaggggtttaacccagtacaagcctcccagctggaggaagagttcgacagtgatagtgggctgagcctggacagcagtcatagtcccagctcgttatcctcatccgaaggttcaagcagcagctcttctagcagcagctcatccagtagctctgccagcagtagtgccagctcatctttctctgaagagggagctgtgggctattcaagcgattcagagacactcgacctggaggaggccgagggggcagtgggttatcagccagaatattctaagttctgcaggatgtcttaccaggacccggcacaactgtcctgcctaccttatctggagcacgtcgggcacaaccatacctataacatggctccatcggctctcgatagcgcagatctccctcccccttctgccctcaaaaaagggtcaaaggagaaacaggcagacttccttgacaagcagatgtctcgggacgagcaccgagcacgggctatgaaaatccccttcactaacgacaagatcatcaacctgcccgtcgaggagtttaatgagcttctgagtaagtaccagttgagcgaagcacagctttcattaatacgagacattcgcaggaggggaaaaaataagatggcagcacagaattgccggaaaagaaagctggatacaattctcaatctggagcgtgacgtggaggatctgcagcgtgataaagcccgactcctccgcgagaaggtggagttccttcgaagtctgagacagatgaaacagaaggttcagtctctgtatcaggaggtgttcgggcgactgcgcgacgagaacggccgaccttattcaccttcccagtacgcactgcagtatgctggtgacgggtctgtgctcctcatacctcgcacgatggccgatcaacaggcacgccgacaggagcgcaagcccaaggatcgcaggaaatag

SEQ ID NO: 275149 - DNA, 2229 bp, Artificial Sequence
  derived and/or modified sequence
atgctgagcctgaagaagtacctgaccgagggcctgctgcagttcaccatcctgctgagcctgatcggcgtgagagtggacgtggacacctacctgaccagccagctgccccccctgagagagatcatcctgggccccagcagcgcctacacccagacccagttccacaacctgagaaacaccctggacggctacggcatccaccccaagagcatcgacctggacaactacttcaccgccagaagactgctgagccaggtgagagccctggacagattccaggtgcccaccaccgaggtgaacgcctggctggtgcacagagaccccgagggcagcgtgagcggcagccagcccaacagcggcctggccctggagagcagcagcggcctgcaggacgtgaccggccccgacaacggcgtgagagagagcgagaccgagcagggcttcggcgaggacctggaggacctgggcgccgtggccccccccgtgagcggcgacctgaccaaggaggacatcgacctgatcgacatcctgtggagacaggacatcgacctgggcgccggcagagaggtgttcgactacagccacagacagaaggagcaggacgtggagaaggagctgagagacggcggcgagcaggacacctgggccggcgagggcgccgaggccctggccagaaacctgctggtggacggcgagaccggcgagagcttccccgcccagttccccgccgacatcagcagcatcaccgaggccgtgcccagcgagagcgagccccccgccctgcagaacaacctgctgagccccctgctgaccggcaccgagagccccttcgacctggagcagcagtggcaggacctgatgagcatcatggagatgcaggccatggaggtgaacaccagcgccagcgagatcctgtacagcgccccccccggcgaccccctgagcaccaactacagcctggcccccaacacccccatcaaccagaacgtgagcctgcaccaggccagcctgggcggctgcagccaggacttcctgctgttcagccccgaggtggagagcctgcccgtggccagcagcagcaccctgctgcccctggcccccagcaacagcaccagcctgaacagcaccttcggcagcaccaacctgaccggcctgttcttccccccccagctgaacggcaccgccaacgacaccgccggccccgagctgcccgaccccctgggcggcctgctggacgaggccatgctggacgagatcagcctgatggacctggccatcgaggagggcttcaaccccgtgcaggccagccagctggaggaggagttcgacagcgacagcggcctgagcctggacagcagccacagccccagcagcctgagcagcagcgagggcagcagcagcagcagcagcagcagcagcagcagcagcagcagcgccagcagcagcgccagcagcagcttcagcgaggagggcgccgtgggctacagcagcgacagcgagaccctggacctggaggaggccgagggcgccgtgggctaccagcccgagtacagcaagttctgcagaatgagctaccaggaccccgcccagctgagctgcctgccctacctggagcacgtgggccacaaccacacctacaacatggcccccagcgccctggacagcgccgacctgcccccccccagcgccctgaagaagggcagcaaggagaagcaggccgacttcctggacaagcagatgagcagagacgagcacagagccagagccatgaagatccccttcaccaacgacaagatcatcaacctgcccgtggaggagttcaacgagctgctgagcaagtaccagctgagcgaggcccagctgagcctgatcagagacatcagaagaagaggcaagaacaagatggccgcccagaactgcagaaagagaaagctggacaccatcctgaacctggagagagacgtggaggacctgcagagagacaaggccagactgctgagagagaaggtggagttcctgagaagcctgagacagatgaagcagaaggtgcagagcctgtaccaggaggtgttcggcagactgagagacgagaacggcagaccctacagccccagccagtacgccctgcagtacgccggcgacggcagcgtgctgctgatccccagaaccatggccgaccagcaggccagaagacaggagagaaagcccaaggacagaagaaagtag

SEQ ID NO: 275150 - DNA, 1851 bp, Artificial Sequence
  derived and/or modified sequence
atgaccagactggacagaagcagccacagcggcggcggccacgccaagggcagcagacccctgaacagcctgctggccggccacagagtggcccagcccgccagcgcccccggcagcagagccagcgtgcaggacatcgacctgatcgacatcctgtggagacaggacatcgacctgggcgccggcagagaggtgttcgactacagccacagacagaaggagcaggacgtggagaaggagctgagagacggcggcgagcaggacacctgggccggcgagggcgccgaggccctggccagaaacctgctggtggacggcgagaccggcgagagcttccccgcccagttccccgccgacatcagcagcatcaccgaggccgtgcccagcgagagcgagccccccgccctgcagaacaacctgctgagccccctgctgaccggcaccgagagccccttcgacctggagcagcagtggcaggacctgatgagcatcatggagatgcaggccatggaggtgaacaccagcgccagcgagatcctgtacagcgccccccccggcgaccccctgagcaccaactacagcctggcccccaacacccccatcaaccagaacgtgagcctgcaccaggccagcctgggcggctgcagccaggacttcctgctgttcagccccgaggtggagagcctgcccgtggccagcagcagcaccctgctgcccctggcccccagcaacagcaccagcctgaacagcaccttcggcagcaccaacctgaccggcctgttcttccccccccagctgaacggcaccgccaacgacaccgccggccccgagctgcccgaccccctgggcggcctgctggacgaggccatgctggacgagatcagcctgatggacctggccatcgaggagggcttcaaccccgtgcaggccagccagctggaggaggagttcgacagcgacagcggcctgagcctggacagcagccacagccccagcagcctgagcagcagcgagggcagcagcagcagcagcagcagcagcagcagcagcagcagcagcgccagcagcagcgccagcagcagcttcagcgaggagggcgccgtgggctacagcagcgacagcgagaccctggacctggaggaggccgagggcgccgtgggctaccagcccgagtacagcaagttctgcagaatgagctaccaggaccccgcccagctgagctgcctgccctacctggagcacgtgggccacaaccacacctacaacatggcccccagcgccctggacagcgccgacctgcccccccccagcgccctgaagaagggcagcaaggagaagcaggccgacttcctggacaagcagatgagcagagacgagcacagagccagagccatgaagatccccttcaccaacgacaagatcatcaacctgcccgtggaggagttcaacgagctgctgagcaagtaccagctgagcgaggcccagctgagcctgatcagagacatcagaagaagaggcaagaacaagatggccgcccagaactgcagaaagagaaagctggacaccatcctgaacctggagagagacgtggaggacctgcagagagacaaggccagactgctgagagagaaggtggagttcctgagaagcctgagacagatgaagcagaaggtgcagagcctgtaccaggaggtgttcggcagactgagagacgagaacggcagaccctacagccccagccagtacgccctgcagtacgccggcgacggcagcgtgctgctgatccccagaaccatggccgaccagcaggccagaagacaggagagaaagcccaaggacagaagaaagtag

SEQ ID NO: 275151 - protein, 616 aa, Artificial Sequence
  derived and/or modified sequence
MTRLDRSSHSGGGHAKGSRPLNSLLAGHRVAQPASAPGSRASVQDIDLIDILWRQDIDLGAGREVFDYSHRQKEQDVEKELRDGGEQDTWAGEGAEALARNLLVDGETGESFPAQFPADISSITEAVPSESEPPALQNNLLSPLLTGTESPFDLEQQWQDLMSIMEMQAMEVNTSASEILYSAPPGDPLSTNYSLAPNTPINQNVSLHQASLGGCSQDFLLFSPEVESLPVASSSTLLPLAPSNSTSLNSTFGSTNLTGLFFPPQLNGTANDTAGPELPDPLGGLLDEAMLDEISLMDLAIEEGFNPVQASQLEEEFDSDSGLSLDSSHSPSSLSSSEGSSSSSSSSSSSSSSASSSASSSFSEEGAVGYSSDSETLDLEEAEGAVGYQPEYSKFCRMSYQDPAQLSCLPYLEHVGHNHTYNMAPSALDSADLPPPSALKKGSKEKQADFLDKQMSRDEHRARAMKIPFTNDKIINLPVEEFNELLSKYQLSEAQLSLIRDIRRRGKNKMAAQNCRKRKLDTILNLERDVEDLQRDKARLLREKVEFLRSLRQMKQKVQSLYQEVFGRLRDENGRPYSPSQYALQYAGDGSVLLIPRTMADQQARRQERKPKDRRK

SEQ ID NO: 275152 - DNA, 1027 bp, Artificial Sequence
  derived and/or modified sequence
gaagttcgtaaattgaaattgaacatgcgtaattaatctttctgaataggaaaaaatatatacacaacaaaactctccgtttatggaacatgcgcatttgttctcagtaagtttttcgttttgaaagtgagcatgcgcatggtgagtaggttggtccgaagtttgaaccggacagaagcgctggtcggcgtctggcggttattgttcaaaactacaactccattttgacactttctcacttgtaccgatcttcagacgccctccttcttcatgagaatgatgccatccataagatctgtgcaaaactgatgaatatcaagcagatctcctttagtgatatcaatcaagtcctcgcacatcagctgggaagtgtgttccagcctacttattctgcagaaagctcatttcactacagacgaaatccactaggagacttaatggagcatttagttccccatcctgaattcaagatgctgagtgttcgtaacattcctcacatgtctgagaattcattggcatacaccacatttacttgggctggcctcctcaagcatttgagacagatgctcatttctaatgcaaagatggaagaaggtattgataggcatgtatggcctcctttatcaggacttcctcctcttagtaaaatgtctctcaacaaggacctgcattttaacacttccattgctaacttggtcattcttcgtgggaaagatgtgcaaagtgcagatgtggagggatttaaagatccagctctgtatacttcctggttgaagcctgttaatgctttcaacgtgtggaaaacccagcgggcctttagcaaatatgagaagtctgcagtgttggtcagcaacagccagttcttagtaaaaccacttgatatgattgttgggaaggcatggaatatgtttgcttcaaaagcctacattcatcagtacacaaaatttggaatcgaagaagaggactttttagacagtttcacgtcattagagcaggttgttgccagttactgtaatctctgatcttg

SEQ ID NO: 275153 - protein, 79 aa, Artificial Sequence
  derived and/or modified sequence
MISAAQLLDELMGRDRNLAPDEKRSNVRWDHESVCKYYLCGFCPAELFTNTRSDLDVFGRGDNIRDVSKFLEDDKWMEE

SEQ ID NO: 275154 - protein, 236 aa, Artificial Sequence
  derived and/or modified sequence
MISAAQLLDELMGRDRNLAPDEKRSNVRWDHESVCKYYLCGFCPAELFTNTRSDLGPCEKIHDENLRKQYEKSSRFMKVGYERDFLRYLQSLLAEVERRIRRGHARLALSQNQQSSGAAGPTGKNEEKIQVLTDKIDVLLQQIEELGSEGKVEEAQGMMKLVEQLKEERELLRSTTSTIESFAAQEKQMEVCEVCGAFLIVGDAQSRVDDHLMGKQHMGYAKIKATVEEKKKKKKK

SEQ ID NO: 275155 - DNA, 717 bp, Artificial Sequence
  derived and/or modified sequence
atggggtgcagtgggtgcagcggaggatgtggctcttcctgtggcggatgtggctctagctgcggcgggtgtggctccgggtacggaggttgcgggagcgggtgttgcgtgcctgtgtgctgctgtaagcccgtttgctgctgtgtccccgcctgctcttgcagcagctgcgggtcctgtggcggcagcaagggtgtatgcggcagttgtggcggctgcaaaggcggctgtggaagttgcggaggcagcaagggcggatgcgggagttcctgctgtgttccagtttgctgtagctcctcttgcggatcatgcggtggttctaaaggtgtctgtggcttcagaggaggctcaaaaggtgggtgcggctcatgtggatgttcacagtgtagctgctataagccctgttgttgctcttctggttgtggttcatcatgctgtcaatcttcctgttgcaagccaagctgtagtcagagctcatgctgtaagccctgttgttctcagtcttcgtgctgtaagccgtgttgttgctcatcagggtgtgggtcttcatgttgccagtcttcctgctgcaagccgtgttgcagtcaaagtagctgttgtaagccatgctgctgctcatcaggttgtggcagcagctgttgccagtctagctgttgcaagccatgcagtagtcagagttcttgctgtgtgcctatttgctgccaatgcaaaatttag

SEQ ID NO: 275156 - DNA, 717 bp, Artificial Sequence
  derived and/or modified sequence
atgggctgcagcggctgcagcggcggctgcggcagcagctgcggcggctgcgggtccagttgcggcggttgtggctccgggtacggcgggtgcggatcaggctgctgtgtgccggtatgttgttgtaagcctgtctgttgctgcgtacccgcttgctcttgctcaagttgtggatcctgcggggggagtaaaggcgtttgtggttcctgtggcggctgcaaaggtgggtgcggcagttgtggcggatccaaaggtggctgcggcagcagctgctgcgttcccgtatgttgttctagctcttgcgggagctgcggtggttcaaagggagtgtgcgggttccgcggcgggagcaagggcgggtgtggtagctgcggctgctcccaatgctcgtgctacaagccgtgctgctgttcctcagggtgtggctcctcctgttgtcaatcttcttgctgcaaaccaagctgcagccagagctcatgctgcaagccatgctgctcccagtccagctgctgcaagccatgttgctgctcctctggttgcggctctagctgctgtcagtcttcctgttgtaagccctgttgctcccaatctagttgttgtaagccttgttgctgcagtagcggttgtggcagtagctgctgtcagtcgtcctgctgcaaaccttgctcttcccagtctagctgctgtgtgcccatatgctgtcagtgtaaaatctag

SEQ ID NO: 275157 - DNA, 1299 bp, Artificial Sequence
  derived and/or modified sequence
atgatcagtgcagcacaactgttggacgagcttatgggtcgagatcgcaatctcgctcccgatgaaaaacgctctaatgtccgctgggaccacgaatccgtgtgtaagtactacctttgtggcttttgccctgcagaattatttacaaacaccaggtctgatctgggcccttgcgagaagattcatgacgaaaacctgcggaaacaatatgagaaatcctctagattcatgaaggtcgggtatgagagagattttttgcggtacctgcagagcctgttggccgaggtggagaggcgaatccggagaggccacgcacgcctggctctttcccagaaccagcaaagcagcggagccgcaggccccaccggcaaaaacgaagagaaaattcaagtgctgactgataagatcgatgtgctgttacagcagattgaggaactcgggagtgaaggcaaagttgaggaggcccagggaatgatgaagctggtggagcagctaaaggaagaaagagagctactcagatctaccacttctacaattgagtcgtttgccgcgcaagaaaagcagatggaagtttgtgaggtgtgcggcgcgttcctaatagtgggggacgcccaatcccgggtcgacgatcatctcatgggcaagcaacacatgggatacgcgaagattaaggcgacagtagaagaattgaaggagaagttgagaaaacgcacagaggaacccgatcgtgacgagagactgaagaaggaaaaacaagaaagagaggaacgcgagaaggagcgggagagagaacgcgaagaacgagagcggaaaaggcggcgggaagaagaggagagggaaaaagaacgcgccagggatcgcgagcgaagaaagcggagcaggagtcgctcccggcacagtagtcgtacctctgatcggaggtgctcaaggtcacgcgaccacaagcgctcaagaagccgggaaaggaggagaagtcggtctagagaccgcaggcggtcccggagtcacgatcgaagcgaacgcaaacaccgttcccggagcagggacaggcggaggagtaaaagtagagaccgcaagagctataagcacagatctaaatcacgagatagggaacaggataggaaatccaaagaaaaggagaaaaggggatctgacgataagaaatcatccgtaaagagcggctcaagagagaaacagtcggaggacacgaataccgagagcaaggagtccgacaccaagaatgaagtgaacgggaccagcgaggacattaaatcagaaggcgatacgcagtctaactag

SEQ ID NO: 275158 - DNA, 240 bp, Artificial Sequence
  derived and/or modified sequence
atgatttcggccgcccagctactggacgagctaatgggccgggatcggaaccttgcgcctgatgaaaagcgtagcaacgtgaggtgggaccacgaatcagtctgcaagtattatttgtgtgggttttgccctgcggagctgttcaccaacacccggagcgacttggacgtgttcggcagaggcgataacataagggatgttagcaagtttctggaggacgataagtggatggaagagtag

SEQ ID NO: 275159 - DNA, 1299 bp, Artificial Sequence
  derived and/or modified sequence
atgatcagtgcagcccagttgttggacgagctcatgggcagagaccgcaatctcgcccctgatgaaaaaaggagtaacgtccggtgggatcatgaaagcgtgtgtaaatactatctgtgcggtttctgccccgcggagctcttcaccaacacacgcagtgatttgggaccatgtgaaaaaatccatgatgaaaacctccgtaaacagtatgagaagtcatccagatttatgaaagtgggctatgagcgggactttctcagatatctccagagtcttctcgcagaggtggaacgcaggatcaggaggggccacgcccgcttggctctttctcagaaccagcagagtagtggtgcggccggccctactggcaaaaacgaggagaagatacaggtgctcactgacaaaattgacgtactcctgcagcagatagaagagctggggagtgagggtaaggttgaggaggctcaggggatgatgaaactggttgagcagctaaaggaggaaagggagttgctccggagcacgactagcacgatcgagagtttcgctgctcaggaaaagcagatggaggtctgcgaagtttgcggcgcctttctgattgtcggcgatgcccagtctcgggttgacgatcacctgatgggtaaacagcatatggggtacgcaaagataaaggctaccgtcgaggagttgaaagagaaacttagaaagaggactgaggagccagatagggacgaacggctgaaaaaagaaaagcaagaaagagaggagagggaaaaggagcgggagcgtgagcgagaggagcgggagcgtaaaaggaggcgggaggaagaggaaagggagaaagagcgcgctagagacagagagcgtaggaagcggtcacggagccggagtcggcattcttctcggacatcagaccgtcggtgttcccggtccagggatcacaaacggagcaggagccgtgaacgacgacgcagtcggagccgggaccgccgccggagcaggagtcacgaccggagtgagaggaaacatcgatctcggagccgagatcggaggcgcagtaaaagtagggacagaaaatcttacaaacacaggagtaagtctagggatcgcgaacaggatagaaagtccaaagagaaggagaaaagagggagcgacgacaaaaaatcctccgtcaaaagtggcagccgagaaaagcagagtgaagacaccaacaccgaatctaaagagagcgacaccaaaaatgaggtgaacggaacttcagaggatatcaagagcgaaggggacacccagagcaactag

SEQ ID NO: 275160 - DNA, 711 bp, Artificial Sequence
  derived and/or modified sequence
atgatttccgcagcacaactcctagatgagttgatgggccgggataggaacttggctccggatgagaaacgatctaacgtgaggtgggaccatgagagtgtgtgcaaatactatctgtgtgggttctgtccagcagaactgttcactaacacccgaagtgatctcggcccttgtgagaagatacacgacgaaaaccttaggaagcagtatgagaagtcttcacgttttatgaaggtgggctatgagcgcgacttcctaagatacttacagagcctgcttgccgaagtggaaagacgaataagacgcggccacgctcgactcgccttatctcagaaccagcagagcagtggggccgctggccctactggtaagaacgaggagaaaatccaggtgctcaccgataagatcgatgtcttactacaacagatcgaagaattaggctctgagggcaaggtggaggaggcacagggaatgatgaaattggtggagcagctgaaggaggagcgtgaactcctgcggagtaccacatctacaatcgaatcgtttgccgcacaagagaaacagatggaggtttgcgaggtgtgcggagccttcctgatcgtaggcgatgcccaaagtagggttgatgatcatctgatggggaaacagcatatgggttacgccaaaattaaggcaaccgtcgaggagaaaaagaagaagaaaaagaagtag

SEQ ID NO: 275161 - DNA, 1071 bp, Artificial Sequence
  derived and/or modified sequence
atgaaagtgggctacgaacgggactttctgaggtatctccagtctctgctcgctgaggtcgagcggcgcatccggagggggcatgctaggttggcactcagtcagaatcaacagtcatctggagcagccgggccaaccggaaaaaacgaggaaaagatccaggtcctgacagataaaatcgacgtacttctgcaacaaatcgaggagctgggctcggagggtaaggtcgaagaggcacaggggatgatgaaactggttgagcagctgaaggaggagcgggagctgctacgtagcaccacgtccacaatcgagagtttcgccgcccaggaaaaacagatggaagtgtgcgaggtttgtggtgcatttctgattgtgggggatgctcagtctagggtcgacgaccacttgatgggcaagcagcacatgggttacgcaaaaataaaagccacagtagaagagctgaaagaaaaactgcggaagaggaccgaggagcccgacagggatgaacggctcaagaaggaaaagcaggagcgtgaagagcgggagaaggaaagggaaagggagcgggaagagagggagcggaagcgcagacgggaggaagaagaacgggagaaagaacgcgcccgggaccgggaacgaagaaaacgtagccgctcccggtcccgccacagctctcggacatcagacagacggtgctcccggtcccgcgaccacaaaaggtcccgttccagagaacgtagaaggagccgctcacgggatagacgaagatcaagatctcacgaccgctccgagagaaagcataggtcccgatcgcgtgaccggaggcgtagcaaatcacgagacagaaaaagctacaagcacaggtccaagtccagagatcgggagcaggaccgcaagagcaaagaaaaggagaagagaggctcggacgataaaaaatcgtcggtgaaatcaggaagtcgcgagaaacagtcagaagatactaatacggaatcaaaggaaagcgacactaaaaatgaggttaacggtacaagtgaggacatcaagtccgagggcttgtttgtcacagtgtag

SEQ ID NO: 275162 - DNA, 1299 bp, Artificial Sequence
  derived and/or modified sequence
atgatctctgctgcccagctgctggatgagctgatgggccgggacaggaacctggccccagatgagaagaggagcaatgtgcgctgggaccatgaatctgtgtgcaagtactacctgtgtggcttctgcccagctgagctgttcaccaacaccaggagtgacctgggcccctgtgagaagatccatgatgagaacctgaggaagcagtatgagaagagcagccgcttcatgaaggtgggctatgagcgggacttcctgcgctacctgcagagcctgctggccgaggtggagcggcgcatcagaagaggccacgcccggctggccctgagccagaaccagcagagcagcggggctgctggccccaccgggaagaatgaggagaagatccaggtgctgacagacaagattgatgtgctgctgcagcagatcgaggagctgggcagcgagggcaaggtggaggaggcccagggcatgatgaagctggtggagcagctgaaggaggagcgggagctgctgcggagcaccaccagcaccatcgagagctttgctgcccaggagaagcagatggaggtgtgtgaggtgtgtggggccttcctgattgtgggagatgcccagagccgggtggatgaccacctgatgggcaagcagcacatgggctacgccaagatcaaggccaccgtggaggagctgaaggagaagctgaggaagaggacagaggagccagacagagatgagcggctgaagaaggagaagcaggagcgggaggagcgggagaaggagcgggagcgggagcgggaggagcgggagaggaagagaagaagagaggaggaggagcgggagaaggagcgggcccgggaccgggagaggaggaagaggagccgcagccgcagccgccacagcagcaggaccagtgaccggcgctgcagccgcagccgggaccacaagaggagccgcagccgggagaggagaagaagccgcagccgggacagaagaagaagccgcagccatgacagaagtgagaggaagcacaggagccgcagccgggacagaagaagaagcaagagccgggacaggaagagctacaagcacaggagcaagagccgggaccgggagcaggacaggaagagcaaggagaaggagaagaggggcagtgatgacaagaagagctctgtgaagagcggcagccgggagaagcagagcgaggacaccaacacagagagcaaggagagtgacaccaagaatgaggtgaatggcaccagcgaggacatcaagtctgagggggacacccagagcaactag

SEQ ID NO: 275163 - DNA, 240 bp, Artificial Sequence
  derived and/or modified sequence
atgatctctgctgcccagctgctggatgagctgatgggccgggacaggaacctggccccagatgagaagaggagcaatgtgcgctgggaccatgaatctgtgtgcaagtactacctgtgtggcttctgcccagctgagctgttcaccaacaccaggagtgacctggatgtgtttggccgcggggacaacatcagagatgtgtccaagttcctggaggatgacaagtggatggaggagtag

SEQ ID NO: 275164 - DNA, 711 bp, Artificial Sequence
  derived and/or modified sequence
atgatctctgctgcccagctgctggatgagctgatgggccgggacaggaacctggccccagatgagaagaggagcaatgtgcgctgggaccatgaatctgtgtgcaagtactacctgtgtggcttctgcccagctgagctgttcaccaacaccaggagtgacctgggcccctgtgagaagatccatgatgagaacctgaggaagcagtatgagaagagcagccgcttcatgaaggtgggctatgagcgggacttcctgcgctacctgcagagcctgctggccgaggtggagcggcgcatcagaagaggccacgcccggctggccctgagccagaaccagcagagcagcggggctgctggccccaccgggaagaatgaggagaagatccaggtgctgacagacaagattgatgtgctgctgcagcagatcgaggagctgggcagcgagggcaaggtggaggaggcccagggcatgatgaagctggtggagcagctgaaggaggagcgggagctgctgcggagcaccaccagcaccatcgagagctttgctgcccaggagaagcagatggaggtgtgtgaggtgtgtggggccttcctgattgtgggagatgcccagagccgggtggatgaccacctgatgggcaagcagcacatgggctacgccaagatcaaggccaccgtggaggagaagaagaagaagaagaagaagtag

SEQ ID NO: 275165 - DNA, 1071 bp, Artificial Sequence
  derived and/or modified sequence
atgaaggtgggctatgagcgggacttcctgcgctacctgcagagcctgctggccgaggtggagcggcgcatcagaagaggccacgcccggctggccctgagccagaaccagcagagcagcggggctgctggccccaccgggaagaatgaggagaagatccaggtgctgacagacaagattgatgtgctgctgcagcagatcgaggagctgggcagcgagggcaaggtggaggaggcccagggcatgatgaagctggtggagcagctgaaggaggagcgggagctgctgcggagcaccaccagcaccatcgagagctttgctgcccaggagaagcagatggaggtgtgtgaggtgtgtggggccttcctgattgtgggagatgcccagagccgggtggatgaccacctgatgggcaagcagcacatgggctacgccaagatcaaggccaccgtggaggagctgaaggagaagctgaggaagaggacagaggagccagacagagatgagcggctgaagaaggagaagcaggagcgggaggagcgggagaaggagcgggagcgggagcgggaggagcgggagaggaagagaagaagagaggaggaggagcgggagaaggagcgggcccgggaccgggagaggaggaagaggagccgcagccgcagccgccacagcagcaggaccagtgaccggcgctgcagccgcagccgggaccacaagaggagccgcagccgggagaggagaagaagccgcagccgggacagaagaagaagccgcagccatgacagaagtgagaggaagcacaggagccgcagccgggacagaagaagaagcaagagccgggacaggaagagctacaagcacaggagcaagagccgggaccgggagcaggacaggaagagcaaggagaaggagaagaggggcagtgatgacaagaagagctctgtgaagagcggcagccgggagaagcagagcgaggacaccaacacagagagcaaggagagtgacaccaagaatgaggtgaatggcaccagcgaggacatcaagtctgagggcctgtttgtgacagtgtag

SEQ ID NO: 275166 - DNA, 1972 bp, Artificial Sequence
  derived and/or modified sequence
gtcttgtcggctcctgtgtgtaggagggatttcggcctgagagcgggccgaggagattggcgacggtgtcgcccgtgttttcgttggcgggtgcctgggctggtgggaacagccgcccgaaggaagcaccatgatttcggccgcgcagttgttggatgagttaatgggccgggaccgaaacctagccccggacgagaagcgcagcaacgtgcggtgggaccacgagagcgtttgtaaatattatctctgtggtttttgtcctgcggaattgttcacaaatacacgttctgatcttggtccgtgtgaaaaaattcatgatgaaaatctacgaaaacagtatgagaagagctctcgtttcatgaaagttggctatgagagagattttttgcgatacttacagagcttacttgcagaagtagaacgtaggatcagacgaggccatgctcgtttggcattatctcaaaaccagcagtcttctggggccgctggcccaacaggcaaaaatgaagaaaaaattcaggttctaacagacaaaattgatgtacttctgcaacagattgaagaattagggtctgaaggaaaagtagaagaagcccaggggatgatgaaattagttgagcaattaaaagaagagagagaactgctaaggtccacaacgtcgacaattgaaagctttgctgcacaagaaaaacaaatggaagtttgtgaagtatgtggagcctttttaatagtaggagatgcccagtcccgggtagatgaccatttgatgggaaaacaacacatgggctatgccaaaattaaagctactgtagaagaattaaaagaaaagttaaggaaaagaaccgaagaacctgatcgtgatgagcgtctaaaaaaggagaagcaagaaagagaagaaagagaaaaagaacgggagagagaaagggaagaaagagaaaggaaaagacgaagggaagaggaagaaagagaaaaagaaagggctcgtgacagagaaagaagaaagagaagtcgttcacgaagtagacactcaagccgaacatcagacagaagatgcagcaggtctcgggaccacaaaaggtcacgaagtagagaaagaaggcggagcagaagtagagatcgacgaagaagcagaagccatgatcgatcagaaagaaaacacagatctcgaagtcgggatcgaagaagatcaaaaagccgggatcgaaagtcatataagcacaggagcaaaagtcgggacagagaacaagatagaaaatccaaggagaaagaaaagaggggatctgatgataaaaaaagtagtgtgaagtccggtagtcgagaaaagcagagtgaagacacaaacactgaatcgaaggaaagtgatactaagaatgaggtcaatgggaccagtgaagacattaaatctgaaggtgacactcagtccaattaaaactgatctgataagacctcagatcagacagaggactactgttcgaagatttttggaagaatactgagaacggcataaagtgaagatcgacatttaaaaaatgaggtgaaagaaagctatagtggcatagaaaaagtataaagctcagttagtttttttattattattattattaaaagttaattcaggactgatgtgacctaccagatttcagaacatgtgttaatagtatatatgccactgaaaacttaggtcctgtatcatacttttttctttaagactttttaagaaatattacttaaacatgtggcttgctcagtgtttaattgcaagttttcaatcttggactttgaaaacaggattaaacgttagtattcgtgtgaatcagactaagtgggatttcatttttacaactctgctctacttagcctttggatttagaagtaaaaataaagtatctctgactttctgttacaaagttgattgtctctgtcattgaaaagttttagtattaatctttttctaataaagttattgactctg

SEQ ID NO: 275167 - DNA, 370 bp, Artificial Sequence
  derived and/or modified sequence
gtcttgtcggctcctgtgtgtaggagggatttcggcctgagagcgggccgaggagattggcgacggtgtcgcccgtgttttcgttggcgggtgcctgggctggtgggaacagccgcccgaaggaagcaccatgatttcggccgcgcagttgttggatgagttaatgggccgggaccgaaacctagccccggacgagaagcgcagcaacgtgcggtgggaccacgagagcgtttgtaaatattatctctgtggtttttgtcctgcggaattgttcacaaatacacgttctgatcttgatgtatttggaagaggagataacattagagatgtcagcaaatttttggaagatgacaagtggatggaggagtag

SEQ ID NO: 275168 - DNA, 7040 bp, Artificial Sequence
  derived and/or modified sequence
ctgggcgtgtcccacgggcgcacggcatgctgggaaggcgtccgcgcggcggccattttgtcttgtcggctcctgtgtgtaggagggatttcggcctgagagcgggccgaggagattggcgacggtgtcgcccgtgttttcgttggcgggtgcctgggctggtgggaacagccgcccgaaggaagcaccatgatttcggccgcgcagttgttggatgagttaatgggccgggaccgaaacctagccccggacgagaagcgcagcaacgtgcggtgggaccacgagagcgtttgtaaatattatctctgtggtttttgtcctgcggaattgttcacaaatacacgttctgatcttggtccgtgtgaaaaaattcatgatgaaaatctacgaaaacagtatgagaagagctctcgtttcatgaaagttggctatgagagagattttttgcgatacttacagagcttacttgcagaagtagaacgtaggatcagacgaggccatgctcgtttggcattatctcaaaaccagcagtcttctggggccgctggcccaacaggcaaaaatgaagaaaaaattcaggttctaacagacaaaattgatgtacttctgcaacagattgaagaattagggtctgaaggaaaagtagaagaagcccaggggatgatgaaattagttgagcaattaaaagaagagagagaactgctaaggtccacaacgtcgacaattgaaagctttgctgcacaagaaaaacaaatggaagtttgtgaagtatgtggagcctttttaatagtaggagatgcccagtcccgggtagatgaccatttgatgggaaaacaacacatgggctatgccaaaattaaagctactgtagaagaattaaaagaaaagttaaggaaaagaaccgaagaacctgatcgtgatgagcgtctaaaaaaggagaagcaagaaagagaagaaagagaaaaagaacgggagagagaaagggaagaaagagaaaggaaaagacgaagggaagaggaagaaagagaaaaagaaagggctcgtgacagagaaagaagaaagagaagtcgttcacgaagtagacactcaagccgaacatcagacagaagatgcagcaggtctcgggaccacaaaaggtcacgaagtagagaaagaaggcggagcagaagtagagatcgacgaagaagcagaagccatgatcgatcagaaagaaaacacagatctcgaagtcgggatcgaagaagatcaaaaagccgggatcgaaagtcatataagcacaggagcaaaagtcgggacagagaacaagatagaaaatccaaggagaaagaaaagaggggatctgatgataaaaaaagtagtgtgaagtccggtagtcgagaaaagcagagtgaagacacaaacactgaatcgaaggaaagtgatactaagaatgaggtcaatgggaccagtgaagacattaaatctgaaggtgacactcagtccaattaaaactgatctgataagacctcagatcagacagaggtaagtgtattgtttctcactttgattagggctttttgttactgtttgacagtgcagcgtaagtatgcacagatgaagatggaactaagccgagtaagaagacatacaaaagcctcttctgaaggaaaagacagtgtagtcctgcaaaacattttgaggtacattgttttgtctcagctattttgtagcagactcgtgcccccattagtgtgcctctttggaaattatcgcccacatttgtaatatagtcgccattgaaaagttaattatcctttttttagggattttgatgtcatttcttttttttttttaataaaaaggttgaactgtttttttttttctttttggtattaagtccatcttgtgttggtacattggcagagacatatgctttaaaaacttaaatatttcggaggcacatgttggactactttgttttaattaaactgctagtatttctttgtcaaggatgtttctagttttttgctttattgccttgcattctaatgcagtttgttctgtaactcgagagccagtagcattggattgatggaagtgtagggtttatgaattattgcagctgactaccatacctcacacagcgttggtgttgtgagcggcccatgaaaagccaaattaaaaatcaaggattcagtcaaactaagcaggtactcatgccaggtactcctttctctacccacatccatgtttgaatgctattgcctgtgatctttacgcttaactgttgtgtatcttttttgttctttacaagaagtgcagaggggttttttgtgtattgcgtgaaaacttataaaacaaatgttaacagaatggaattttttttcaactgtatgtagggctgcagtggtggccagaattagatatctttaaagaattttaaatacaataaacacttcatattattcgccttgttacactcaatgcaattctcaagtctataagaggtatgtgcttaatatttcctactgtgtaggagaatttgcagtcagccataggtatgtaggaatagtcactcactggctgatacatttaaagcagcagtgtgaatagcaaggacagacaccttcaatttgtgaaatcaaagaactgatgcactatatagaacgaatttgggtttttaaagaaatattaaaagttaggtactgtaagtgttcttaaaacctgtaaacttcattctgtgggctagtggtgtgggacaaaatattcctaatgaaaggaagtaccaattagttgatttgttggtggcattccccttttgggaaagcaatgtaaggttatgtctgtgtatgtcattcacacttaggcaagcatacacaggcacatggctttaagaaccacactgatgccttgataattaaaaagaatacaagcattccatgtacacatgttaattagcagttagtgactgggccaacactttctcataaaaattggccttttacatgttgtctaattatcatttttccccaaattttgcgttgtaggactactgttcgaagatttttggaagaatactgagaacggcataaagtgaagatcgacatttaaaaaatgaggtgaaagaaagctatagtggcatagaaaaagtataaagctcagttagtttttttattattattattattaaaagttaattcaggactgatgtgacctaccagatttcagaacatgtgttaatagtatatatgccactgaaaacttaggtcctgtatcatacttttttctttaagactttttaagaaatattacttaaacatgtggcttgctcagtgtttaattgcaagttttcaatcttggactttgaaaacaggattaaacgttagtattcgtgtgaatcagactaagtgggatttcatttttacaactctgctctacttagcctttggatttagaagtaaaaataaagtatctctgactttctgttacaaagttgattgtctctgtcattgaaaagttttagtattaatctttttctaataaagttattgactctgaactagtcccctgttttaaatacaagagttacactattactagaggtgttggtgtacagttttatctgatttgttctgtttaagactaatttttatagactttctaatgttttaaataatggtgcttcaattttaggtggttatgaataaatttgaattttgcttttaatagcaaagatgtgcagtgaactagaatatatttttacatccctgagagattcatttagtagaaaattccaagtatcctgacaagcactctttagctggctagctatgggatgatgtagaaaagcattcaagagctagtttttgttaagtcctgtatcaagattaacccagctgtgtcagtttataaatgtatttgtgtatagggtgtgtagtatatatggcaagggttttttccccccacttaagtgattatttttgtgtcacatctaggaaaaccggcagcatgtttctatctatagccagcttcttcgactgtataaaagtattctctccagctacgtatatacacacatacatatatatcatagcaattccttgtggtttataacttgcaaatactgctatcagtttataggtaaagaaacagtgtgttaaatgacttatccagggagggtcctgtggcttcatgtttatggagttgctaggtctctgcctcatggtccagtgcctgttaagccactgtgttcattctaataggcataatgaattgttaaagaatttactaaaatctcttccaccaaactttgaaaaataatgaagccgcccccactttagaggctctgtatgaaaaaatgctgtggagacagagccctcctggctccctagctgatcctggagatgcagcaatagatgaatgggttatctctgaatttgtaagagataattcacatgaggattaagataaaatgggaagtaaaatctaacaaacacaaagatagctcccaggcactgctttgtgtagtttgacagcattgtggttgtagcagcaaaggacttaaagtgatagtttttaaaccatattctgtccctaagtaataaaaaatctaggaagttactaaaataccagatttgttctgctctgcctcatctagaatcaacgtctaactaacttaaatgaagtataataaatgagttcatatgaaaaggcttcctctatggacacttagatatattgtaactattgaagttacctgggatgtgggggtggtgggaggaggacctgcctccccaggacatctatgactaaggcctggctttagttatggagagagacgtagaagttgaattttacacccaaaattgatgtgactgaagaggaactgattgttgctaaccagctcacaagaatccagtattgagaccagttcactagaagaaacaaacatttctgccatgcagaccaaaaagttattagttggtgaatatgtattttctctttggaaggtctttaaggggagcaaaccagttttaatcaatcagattgcttggtaagtttggaatctgcaatcagttggtcttaaaaaaaaaaaaactttattttggaaatttaaagacatacacaaaagaggaacaatataattaacctctgttaactcatcaccaacaagactcatgaccacttttatacttcatgagtgattgtatttgtatccactgttttctattattttcgagcaagtctcagacacaccatttaatctgtaaataattcagcatgtatctctaaaagacaaagacctcttaaataacagttcattagtataaaacaaattgggtaaacttttgttggtcatcaaactatattagcactggtccaatagtttaattttcattgagcctttcaagaggaccgaccagtctgctgctcaagacatcctctcctctggaatgtagagataatacatatcatgctcctttttgttaaaacgtttttttttccccttcaaacacagtccattcatttttcagtttgggttgaaacatccttttcttgatcttgagcttataataacctagtcatattgctcagctcagatatttttactccctctccttaggcattctggttccttaaatatagttagtgtcacagaggataaataaccaaccttatttctaaggtctgagaacacttggaccacatattggttgagctcagccaccttctgattaaagttttcagacttgtaagaactgaaaatttttatggtggaagttctctgagccctcatccattctgtttttaaaaatgcattgcagatgggctatgtgaatatgtttttaaacatctgatatgtgcatgaaacaaaaaacacttgaagttattatgtatacaattctgtgggatgggacttcatgcaggattggttttcaagtttgatttcctgagggattttttagttgtttgtgaaagaaccccaggtctacttttgaaattttgtattataattgtaatgttgcccatggttaaaaaaaaaaagtgttcagtgatctatgtctcctactactcctatttctctgtttttcctctgcaggagcttgctgctgttaacagttattcttccaagttgttttctttgtggggagatgggaggtgggaggaaatataaacatatatgtatagatctttcaaaatatatgacggtatacccgtatgttctgagtcttgctgtttttacctggtaatatttagaaacatttattttgagataaaggagagcacttttaagttgaacctgtagttttaaaaagtacatttcaagtaagccaaagcagagaagtaaatgtatttttcattgttgtatcagaattttgaatttactattttaaaaattcaagagttttgtagctgatctatttcttcccctcagccatcccaaataggtcatttgtcaacagatttaagaatgtttagaaacaacaactttgggaaacgggaaacaatttggtataagtgggtgtgccataacctctctcgtagccattcattcccggatacataccctagagaaactcttacacatgcgtaccaggggatggatttaagcatttgtgtgtaataggaagaaaagaagaaaaaacccgggaagatcccaagtgtccaccaacagtgtgttggataaatactgtggtatattccaacagtggaattccacagaagtgaaactgaactgcagctgtgtatgtgaacatggacaaaactcaacaatagaaggatcaaaaaaagcaagtcacagaagaatacatcactatggttccatttcaatgaaagtcaaaaacaggctgtcaaatacatgataaaaggaaacgattaagacaaaatttaatgttagccgttttgatggagggagaggtgatcatgagggcacaggggtcttcagaagaactggtgagggtctgtttctgaagcctgtgggcatttccttttttaatctgtatgtttatgtgcttttgtatgtatgatatttcttaataaaatttaaaaagaagaatggg

SEQ ID NO: 275169 - DNA, 838 bp, Artificial Sequence
  derived and/or modified sequence
gtcttgtcggctcctgtgtgtaggagggatttcggcctgagagcgggccgaggagattggcgacggtgtcgcccgtgttttcgttggcgggtgcctgggctggtgggaacagccgcccgaaggaagcaccatgatttcggccgcgcagttgttggatgagttaatgggccgggaccgaaacctagccccggacgagaagcgcagcaacgtgcggtgggaccacgagagcgtttgtaaatattatctctgtggtttttgtcctgcggaattgttcacaaatacacgttctgatcttggtccgtgtgaaaaaattcatgatgaaaatctacgaaaacagtatgagaagagctctcgtttcatgaaagttggctatgagagagattttttgcgatacttacagagcttacttgcagaagtagaacgtaggatcagacgaggccatgctcgtttggcattatctcaaaaccagcagtcttctggggccgctggcccaacaggcaaaaatgaagaaaaaattcaggttctaacagacaaaattgatgtacttctgcaacagattgaagaattagggtctgaaggaaaagtagaagaagcccaggggatgatgaaattagttgagcaattaaaagaagagagagaactgctaaggtccacaacgtcgacaattgaaagctttgctgcacaagaaaaacaaatggaagtttgtgaagtatgtggagcctttttaatagtaggagatgcccagtcccgggtagatgaccatttgatgggaaaacaacacatgggctatgccaaaattaaagctactgtagaagaaaaaaaaaaaaaaaaaaaaaaa

SEQ ID NO: 275170 - DNA, 1597 bp, Artificial Sequence
  derived and/or modified sequence
ggatttcggcctgagagcgggccgaggagattggcgacggtgtcgcccgtgttttcgttggcgggtgcctgggctggtgggaacagccgcccgaaggaagcaccatgatttcggccgcgcagttgttggatgagttaatgggccgggaccgaaacctagccccggacgagaagcgcagcaacgtgcggtgggaccacgagagcgtccgtgtgaaaaaattcatgatgaaaatctacgaaaacagtatgagaagagctctcgtttcatgaaagttggctatgagagagattttttgcgatacttacagagcttacttgcagaagtagaacgtaggatcagacgaggccatgctcgtttggcattatctcaaaaccagcagtcttctggggccgctggcccaacaggcaaaaatgaagaaaaaattcaggttctaacagacaaaattgatgtacttctgcaacagattgaagaattagggtctgaaggaaaagtagaagaagcccaggggatgatgaaattagttgagcaattaaaagaagagagagaactgctaaggtccacaacgtcgacaattgaaagctttgctgcacaagaaaaacaaatggaagtttgtgaagtatgtggagcctttttaatagtaggagatgcccagtcccgggtagatgaccatttgatgggaaaacaacacatgggctatgccaaaattaaagctactgtagaagaattaaaagaaaagttaaggaaaagaaccgaagaacctgatcgtgatgagcgtctaaaaaaggagaagcaagaaagagaagaaagagaaaaagaacgggagagagaaagggaagaaagagaaaggaaaagacgaagggaagaggaagaaagagaaaaagaaagggctcgtgacagagaaagaagaaagagaagtcgttcacgaagtagacactcaagccgaacatcagacagaagatgcagcaggtctcgggaccacaaaaggtcacgaagtagagaaagaaggcggagcagaagtagagatcgacgaagaagcagaagccatgatcgatcagaaagaaaacacagatctcgaagtcgggatcgaagaagatcaaaaagccgggatcgaaagtcatataagcacaggagcaaaagtcgggacagagaacaagatagaaaatccaaggagaaagaaaagaggggatctgatgataaaaaaagtagtgtgaagtccggtagtcgagaaaagcagagtgaagacacaaacactgaatcgaaggaaagtgatactaagaatgaggtcaatgggaccagtgaagacattaaatctgaagggctttttgttactgtttgacagtgcagcgtaagtatgcacagatgaagatggaactaagccgagtaagaagacatacaaaagcctcttctgaaggaaaagacagtgtagtcctgcaaaacattttgaggtacattgttttgtctcagctattttgtagcagactcgtgcccccattagtgtgcctctttggaaattatcgcccacatttgtaatatagtcgccattgaaaagttaattatcctttttttagggattttgatgtcatttcttttttttttt

SEQ ID NO: 275171 - DNA, 1299 bp, Artificial Sequence
  derived and/or modified sequence
atgatcagcgccgcccagctgctggacgagctgatgggccgggaccggaacctggcccccgatgagaagcgcagtaacgttcgctgggatcacgagtcagtctgtaagtattacctgtgcggcttctgcccggccgagctctttaccaatactcgcagcgaccttggcccatgcgagaagatccacgatgagaacctcagaaaacagtatgaaaaatcttcccggttcatgaaagtaggatacgagagggattttttacgctatctgcagtccctcctagccgaagtcgaaagaaggatcagaagaggacacgcacgcctggccctatcacagaaccagcagtcttcaggcgctgcgggcccgacaggaaaaaatgaagagaaaatacaagttttgactgacaagattgatgtgttgcttcagcaaatcgaagaattaggttcagagggaaaggtggaagaagcgcaggggatgatgaagttggtggagcagctgaaggaagaacgtgagttgttgagatccaccactagtactatcgagtcatttgcagctcaggaaaaacagatggaagtttgtgaggtttgtggggcattcttgatcgtcggggatgcgcaatctcgcgtggatgaccatttaatgggcaagcaacacatgggctacgctaagattaaagccacagtggaagagctgaaagaaaaactccggaagagaaccgaggaaccagatagagacgagcgcctcaaaaaagaaaagcaggagagagaagagagagagaaggagagggaaagagagagagaggaacgggagaggaagcgtagaagagaggaggaggagcgggaaaaagagagagcacgggatcgcgagcgtcggaaacgatccaggtcccgttcacgacactcctctagaactagcgatcgacggtgctctaggagccgcgatcacaaacggtctagatccagagaaagacgtcggagtcggagtcgggacaggcgacgatcacgatctcatgacagaagcgaaagaaagcacaggagtaggtctcgggatcgccggcgatctaaatcccgcgaccgcaagtcatacaaacatcgcagcaagagtcgcgacagggagcaggatcggaaatctaaggaaaaggagaagcgcgggtcagacgataagaaaagttctgtcaaaagcggctcacgggaaaaacagagcgaagacactaatactgagagtaaagagtctgatactaaaaacgaggtgaacggaacaagcgaggacatcaagtcggagggcgatacacagagcaactag

SEQ ID NO: 275172 - DNA, 240 bp, Artificial Sequence
  derived and/or modified sequence
atgatcagcgccgcccagctgctggacgagctgatgggccgggaccgcaacctcgctcccgacgagaagcggtccaacgtgaggtgggatcacgagagcgtgtgtaaatattacttgtgcgggttttgcccggccgagctattcaccaacactcgtagcgacttagacgtcttcggcaggggagacaacattcgagacgtctctaaatttttagaggacgataaatggatggaggaatag

SEQ ID NO: 275173 - DNA, 1299 bp, Artificial Sequence
  derived and/or modified sequence
atgatcagcgccgcccagctgctggacgagctgatgggccgggaccgcaacctggccccggatgaaaagcgcagtaatgttcgttgggatcacgagtcagtttgcaagtactacctgtgtggattttgtccggccgagctctttaccaatacgcgcagtgaccttggaccttgcgaaaagatccacgatgagaatctacgcaagcagtacgaaaaatccagccggtttatgaaggtcggctacgagcgcgattttctcagatacctccagtcactcctggctgaggtcgaacgccgcatccggagaggccacgcacgtctggccctgtctcagaatcagcagtcctccggagccgctggccctactggaaagaatgaggagaagatacaggttcttaccgacaaaatcgatgtcttgctgcaacagatcgaggaattaggcagtgaggggaaggtagaggaggcccagggcatgatgaagctggtagagcagttgaaagaagaacgcgaattattacggtccaccacttccaccatcgagagttttgctgctcaggagaaacagatggaagtatgtgaggtgtgcggcgcgttcctaattgttggtgatgcccaatccagagtagatgaccatctcatgggaaaacagcacatgggttatgccaaaatcaaagctaccgtggaggaactcaaggagaagctgagaaagaggactgaggaacccgaccgtgacgaaagattaaaaaaggaaaagcaggaacgcgaggagcgcgagaaagaaagggagagagaacgggaagagcgcgagagaaaacgcagacgggaggaagaggaaagagagaaggagcgagccagggatcgtgaaagacggaaaagatcaagaagcaggtcacgtcactcttcccgcacatctgaccggcggtgctctcggtctcgcgaccataagaggtcaaggtccagggaacgcaggcgatcaagaagtcgtgacaggcgcagatctagatctcatgacaggagcgaacgaaaacacagatcacgcagcagagatagacggcgcagcaagtcccgggatagaaaaagttacaagcacaggtcaaagtccagagacagagagcaggatcggaaaagcaaagagaaggaaaagagggggtctgatgataaaaagtcatccgtgaagagcggtagccgggaaaaacagtccgaagacacaaacacagaatcaaaagagtcagacactaagaacgaagtgaacggtacgtcggaagacataaaatccgaaggcgacacccagtccaattag

SEQ ID NO: 275174 - DNA, 711 bp, Artificial Sequence
  derived and/or modified sequence
atgatcagcgccgcccagctgctggacgagctgatgggccgggacagaaatctggctcccgacgagaagcgcagcaacgtgcgctgggaccatgaatctgtgtgtaaatattatctttgtgggttctgccccgctgaacttttcaccaacaccaggtctgatctgggtccttgcgagaaaatccacgacgagaacctgcgcaagcagtacgagaagtcttcccggtttatgaaagttgggtatgaacgagattttctcagatacctgcaaagcttgctcgcagaggtcgagagaaggattagacgcggccacgctaggctcgcactgtctcaaaatcagcaatcttctggcgcagctggccctactggaaaaaacgaggagaagattcaggtccttactgacaaaatagacgtgctgctccagcagatcgaagagctgggctccgaaggcaaagttgaggaggcacaggggatgatgaaattagtggaacagttaaaggaagagcgcgagctgctgagatccacaacttccaccatcgagagctttgccgcacaggaaaaacagatggaggtgtgtgaggtttgtggcgcctttctcattgtgggtgatgctcagagccgggtggatgaccaccttatgggaaagcagcatatggggtacgctaagattaaagccacagttgaagagaagaagaagaagaaaaagaaatag

SEQ ID NO: 275175 - DNA, 1071 bp, Artificial Sequence
  derived and/or modified sequence
atgaaggtgggctacgagcgggacttcctgcggtacctgcagagcttgctggctgaggtcgaaagacggattcggcgtggacacgcccgccttgccctgtctcagaatcagcaaagcagcggggccgccggtcccacaggaaagaacgaagaaaaaatccaggtcttgacagacaaaattgatgttttactgcagcagatcgaagagctgggctcagaagggaaagtcgaagaggcgcaggggatgatgaaactggttgaacaattgaaagaggaacgggagctcctgagaagcaccacctccacaatcgaaagcttcgcggctcaggagaaacaaatggaagtttgcgaggtttgtggcgctttcttgattgtgggggatgctcagtcccgggtcgatgatcatctcatgggaaagcagcacatgggctatgccaagatcaaggcgactgttgaagagctgaaggaaaaactgcgcaaacgcacagaggaacctgaccgcgacgaaagactgaagaaggaaaagcaggaaagagaggagcgggagaaagaacgggaaagagagagggaagagcgtgagagaaaaagaaggagagaggaagaggagagagagaaagagcgtgctcgagacagggagaggcggaaaaggtcaagatccaggtctagacactcatcacggacctcggacagacgatgcagccggtcacgtgatcacaagagatcgagatctagagaacggagacgatcacggagccgcgacagacgacggagcaggtcacatgatcggtcagagaggaaacacagatcccggtctcgggacaggcgacggtccaagtccagggaccgcaagagctataagcatcggtccaaatcacgggatagagaacaggaccggaagtctaaggaaaaagagaagcgcgggagcgacgacaaaaagtctagtgtgaagtcaggctccagggagaagcagtcggaagacaccaatactgaatcaaaggaatcagataccaaaaatgaggttaacggcaccagcgaagacattaaaagcgaaggactgttcgtcaccgtgtag

SEQ ID NO: 275176 - DNA, 1299 bp, Artificial Sequence
  derived and/or modified sequence
atgatttcagcagcgcagttgttagatgaactcatggggcgagataggaatctggcccctgacgagaaaaggtcaaacgtgaggtgggaccacgagtccgtctgtaaatactacctgtgtggcttttgccctgccgagttgtttaccaacactcgtagcgacctcggtccatgcgaaaaaatccacgatgagaatctgaggaagcaatacgaaaaaagtagtcggttcatgaaggtgggttacgagcgggactttctgagatacctccagagtcttctcgccgaagtagagcgacggatacggcgaggtcatgctcggttggccttgagccagaatcaacagtcctccggggctgccggtccaaccggtaaaaatgaagaaaagattcaggtgttaaccgataagatagacgtgctgttgcagcagatcgaagagctggggtcggaagggaaggtcgaggaagcccagggcatgatgaaactcgtggaacagcttaaagaggaaagagagctgctgcgttccaccaccagtacaatagagagcttcgccgcacaagaaaagcagatggaggtctgtgaggtgtgcggtgcatttctgatcgttggcgacgcgcaaagcagagttgatgaccacctgatgggaaagcagcatatggggtatgccaagataaaagccaccgttgaggaactgaaggaaaagctcaggaagcgcaccgaggaacccgacagggacgagagacttaagaaagaaaagcaggagagagaggaaagggaaaaggagcgggaaagagaaagggaggagcgagaacgaaagaggcgtcgcgaagaggaggaacgggagaaggagcgcgcaagggacagagagcgacggaagcggagccgctcccgcagtcgtcacagctcaaggacttcagaccgaagatgcagccgctcccgtgaccataagagatccagatcacgagagcgacgccgaagccgcagtcgggataggcggcgttcgcgaagccacgatcgcagcgaaagaaagcatcgatccagaagccgagacaggagacggagcaagtcaagagaccgcaaatcctataagcatcgcagtaaatcccgggatcgggagcaagacaggaagtccaaagaaaaagagaagcgcggaagcgatgacaaaaagtcgtcagtgaaaagcggaagtagagagaagcaatccgaagacaccaacactgagtctaaagagagcgacacaaaaaatgaggtcaacgggacatcagaggacatcaagtctgagggagatacacaatcaaattag

SEQ ID NO: 275177 - DNA, 240 bp, Artificial Sequence
  derived and/or modified sequence
atgatctcagccgcacaactacttgacgagctcatgggcagggaccgtaaccttgctcccgacgaaaagcggtctaacgtacgatgggatcacgagtctgtttgcaaatattacctctgcggtttctgtccagccgagttgttcacaaatactaggtcggatcttgacgtatttggcagaggtgacaacattcgagacgtgagcaagttcctcgaagacgacaagtggatggaagagtag

SEQ ID NO: 275178 - DNA, 1299 bp, Artificial Sequence
  derived and/or modified sequence
atgatttccgccgcacagctgttggatgagctgatgggcagagacaggaacttagcccctgatgaaaagaggtctaacgtacgttgggatcacgaatcagtgtgtaaatattacctgtgcgggttctgtcctgctgaactgttcaccaatacgaggtccgatctgggtccgtgtgagaaaatccacgacgaaaacctgcggaaacagtacgagaaatcctccaggtttatgaaagtcggctacgaaagggactttttacgctatttgcagtcattgctggcagaggttgaaaggagaattcggagagggcatgccagactcgctctgagccagaaccagcagagttcaggagcagccggaccaaccgggaaaaacgaagaaaagatacaagtgctgactgataaaatagacgttctcctccagcagatcgaagagctgggcagcgaggggaaggtcgaagaggcgcagggcatgatgaagctggttgagcagcttaaagaggagcgagagctgctcagaagtactaccagtacaattgaaagctttgctgcccaggagaagcagatggaagtgtgtgaagtatgtggagctttcctgatagttggagatgcacaatctagggtggacgaccacctcatgggcaagcagcatatgggctacgccaaaataaaggccacagtggaagagcttaaggaaaagctcaggaaaaggacagaagaacctgatcgagatgaaaggttgaaaaaggaaaaacaagagcgggaagagcgagaaaaggagcgcgagagagagcgtgaagagcgggaacgtaaaagacgcagagaggaggaagaacgggagaaggagcgggcacgcgacagggagaggaggaaaaggagccggtcaaggagtagacactcctcaaggacaagcgatcgacggtgttcaagaagtcgcgatcataagcgcagccgatctagagagcggaggcggtccagaagccgggacagacgacggtcccggagtcacgacaggagcgagaggaagcacagatcccgtagccgggacagacggagatctaaatctcgcgatcgtaagtcttataagcaccgatcaaaatctagagaccgcgagcaggaccggaaatctaaagaaaaggagaagaggggctcggatgataagaaatccagcgtaaagtctgggagtcgcgagaagcagagtgaagatactaacacggagtccaaagagagtgacacgaaaaatgaggtgaatggtacttctgaggacatcaagtctgagggcgatacacagtccaattag

SEQ ID NO: 275179 - DNA, 711 bp, Artificial Sequence
  derived and/or modified sequence
atgatcagtgccgctcagctgctggacgagctgatgggcagagatcgtaacctagcccctgacgaaaaaagatctaatgtgagatgggaccatgagtcagtctgcaagtattatttatgcggtttctgccccgctgagctgtttacaaacacacgatctgacctgggaccatgtgaaaagattcacgatgagaacttacggaaacaatatgagaaaagcagtaggttcatgaaagtggggtacgaacgcgatttcctgagatacctccagtctctgctggcagaagtggagaggcgcattcggagaggacatgcgaggctcgccctgagccagaaccagcagagctcgggtgccgcaggacccacaggtaagaatgaagagaagatacaggtgctcacggacaaaattgatgtactcctgcaacaaatagaagagctggggtctgagggtaaggtggaggaagcccaggggatgatgaagctcgttgagcaattaaaagaggagagagagctgctgcgctcgactactagtactatcgagtctttcgcggctcaagagaagcaaatggaggtgtgtgaggtctgcggagcattcctaattgtgggagacgcacagtcccgggtcgatgatcaccttatgggtaaacagcacatgggctacgccaagattaaggcaacagtcgaggagaaaaagaagaagaagaaaaagtag

SEQ ID NO: 275180 - DNA, 1071 bp, Artificial Sequence
  derived and/or modified sequence
atgaaagtcggctacgagcgggattttctgcgctacctgcagtcactgcttgcagaagtggagagacgcatacggaggggccatgccaggctggctttgtcccagaatcagcagtcgtcaggcgctgcaggacccaccggaaagaacgaggaaaagatacaggtactcacggataaaatcgatgtgcttctgcagcagattgaggaactgggctctgaaggcaaagtcgaggaagcccagggtatgatgaagctggtagaacaactcaaggaggaacgcgaactgctccggagcactacctctactattgagtctttcgccgctcaagaaaaacagatggaagtctgcgaggtgtgtggcgctttcctgattgtaggcgatgcacagagtcgagtcgatgatcatctgatgggcaagcagcacatgggctacgcgaagattaaggcaacggtcgaggaacttaaagaaaagctgcggaagcggacggaagagccagaccgcgacgagagactgaaaaaggagaagcaggaacgggaggagagagagaaagagagggagagggaacgcgaggaacgcgagcgaaaaagaaggagggaagaggaggagagagagaaagaacgtgcacgtgacagagaaagacggaagagatcccggagcaggtcccggcattcttcccggacaagtgacagacgctgctccagatctcgggatcataaacgaagccgaagtcgcgagcggcgacgttcacgaagcagagatagacgcagatctcgttcccatgatcgaagcgaaaggaagcatagaagcagatctcgggatcgtcggagaagtaagagtagggaccgcaagagctataagcaccgaagtaagtcccgggatcgcgagcaggatcggaagagtaaggagaaggagaagaggggaagtgatgacaagaaatcaagtgtgaagagcggctcacgtgaaaagcagtcagaggataccaacaccgagtctaaggagtccgataccaagaatgaggtcaatggaacatcagaagacattaagagtgagggcctgtttgtgacagtgtag

SEQ ID NO: 275181 - DNA, 1299 bp, Artificial Sequence
  derived and/or modified sequence
atgatcagcgccgcccagctgctggacgagctgatgggcagagacagaaacctggcccccgacgagaagagaagcaacgtgagatgggaccacgagagcgtgtgcaagtactacctgtgcggcttctgccccgccgagctgttcaccaacaccagaagcgacctgggcccctgcgagaagatccacgacgagaacctgagaaagcagtacgagaagagcagcagattcatgaaggtgggctacgagagagacttcctgagatacctgcagagcctgctggccgaggtggagagaagaatcagaagaggccacgccagactggccctgagccagaaccagcagagcagcggcgccgccggccccaccggcaagaacgaggagaagatccaggtgctgaccgacaagatcgacgtgctgctgcagcagatcgaggagctgggcagcgagggcaaggtggaggaggcccagggcatgatgaagctggtggagcagctgaaggaggagagagagctgctgagaagcaccaccagcaccatcgagagcttcgccgcccaggagaagcagatggaggtgtgcgaggtgtgcggcgccttcctgatcgtgggcgacgcccagagcagagtggacgaccacctgatgggcaagcagcacatgggctacgccaagatcaaggccaccgtggaggagctgaaggagaagctgagaaagagaaccgaggagcccgacagagacgagagactgaagaaggagaagcaggagagagaggagagagagaaggagagagagagagagagagaggagagagagagaaagagaagaagagaggaggaggagagagagaaggagagagccagagacagagagagaagaaagagaagcagaagcagaagcagacacagcagcagaaccagcgacagaagatgcagcagaagcagagaccacaagagaagcagaagcagagagagaagaagaagcagaagcagagacagaagaagaagcagaagccacgacagaagcgagagaaagcacagaagcagaagcagagacagaagaagaagcaagagcagagacagaaagagctacaagcacagaagcaagagcagagacagagagcaggacagaaagagcaaggagaaggagaagagaggcagcgacgacaagaagagcagcgtgaagagcggcagcagagagaagcagagcgaggacaccaacaccgagagcaaggagagcgacaccaagaacgaggtgaacggcaccagcgaggacatcaagagcgagggcgacacccagagcaactag

SEQ ID NO: 275182 - DNA, 240 bp, Artificial Sequence
  derived and/or modified sequence
atgatcagcgccgcccagctgctggacgagctgatgggcagagacagaaacctggcccccgacgagaagagaagcaacgtgagatgggaccacgagagcgtgtgcaagtactacctgtgcggcttctgccccgccgagctgttcaccaacaccagaagcgacctggacgtgttcggcagaggcgacaacatcagagacgtgagcaagttcctggaggacgacaagtggatggaggagtag

SEQ ID NO: 275183 - DNA, 711 bp, Artificial Sequence
  derived and/or modified sequence
atgatcagcgccgcccagctgctggacgagctgatgggcagagacagaaacctggcccccgacgagaagagaagcaacgtgagatgggaccacgagagcgtgtgcaagtactacctgtgcggcttctgccccgccgagctgttcaccaacaccagaagcgacctgggcccctgcgagaagatccacgacgagaacctgagaaagcagtacgagaagagcagcagattcatgaaggtgggctacgagagagacttcctgagatacctgcagagcctgctggccgaggtggagagaagaatcagaagaggccacgccagactggccctgagccagaaccagcagagcagcggcgccgccggccccaccggcaagaacgaggagaagatccaggtgctgaccgacaagatcgacgtgctgctgcagcagatcgaggagctgggcagcgagggcaaggtggaggaggcccagggcatgatgaagctggtggagcagctgaaggaggagagagagctgctgagaagcaccaccagcaccatcgagagcttcgccgcccaggagaagcagatggaggtgtgcgaggtgtgcggcgccttcctgatcgtgggcgacgcccagagcagagtggacgaccacctgatgggcaagcagcacatgggctacgccaagatcaaggccaccgtggaggagaagaagaagaagaagaagaagtag

SEQ ID NO: 275184 - DNA, 1071 bp, Artificial Sequence
  derived and/or modified sequence
atgaaggtgggctacgagagagacttcctgagatacctgcagagcctgctggccgaggtggagagaagaatcagaagaggccacgccagactggccctgagccagaaccagcagagcagcggcgccgccggccccaccggcaagaacgaggagaagatccaggtgctgaccgacaagatcgacgtgctgctgcagcagatcgaggagctgggcagcgagggcaaggtggaggaggcccagggcatgatgaagctggtggagcagctgaaggaggagagagagctgctgagaagcaccaccagcaccatcgagagcttcgccgcccaggagaagcagatggaggtgtgcgaggtgtgcggcgccttcctgatcgtgggcgacgcccagagcagagtggacgaccacctgatgggcaagcagcacatgggctacgccaagatcaaggccaccgtggaggagctgaaggagaagctgagaaagagaaccgaggagcccgacagagacgagagactgaagaaggagaagcaggagagagaggagagagagaaggagagagagagagagagagaggagagagagagaaagagaagaagagaggaggaggagagagagaaggagagagccagagacagagagagaagaaagagaagcagaagcagaagcagacacagcagcagaaccagcgacagaagatgcagcagaagcagagaccacaagagaagcagaagcagagagagaagaagaagcagaagcagagacagaagaagaagcagaagccacgacagaagcgagagaaagcacagaagcagaagcagagacagaagaagaagcaagagcagagacagaaagagctacaagcacagaagcaagagcagagacagagagcaggacagaaagagcaaggagaaggagaagagaggcagcgacgacaagaagagcagcgtgaagagcggcagcagagagaagcagagcgaggacaccaacaccgagagcaaggagagcgacaccaagaacgaggtgaacggcaccagcgaggacatcaagagcgagggcctgttcgtgaccgtgtag

SEQ ID NO: 275185 - DNA, 4473 bp, Artificial Sequence
  derived and/or modified sequence
atgcctaacagtgaaaggcacggtggcaaaaaagacggatctggcggggcctccgggacactgcagccaagttccgggggcggcagctcaaattctcgagaaagacacaggttggtgagtaagcataaacgacacaagagcaaacactctaaggacatgggccttgtgacgcccgaggcagcgagtctgggaacagtgattaagccccttgttgagtacgatgatatctcctcagactccgacaccttctcagacgacatggcttttaagttggaccgtagagagaatgacgagcggagggggtcggatagatctgacaggcttcataagcatcggcaccatcaacacaggcgcagtcgtgacctgctcaaggcgaagcaaacagaaaaagaaaagtctcaggaggtaagtagcaaatcaggctccatgaaagatagaatctctggttcaagcaagcgatctaacgaagaaaccgacgattatggtaaagcccaagtggccaaatcgtcatcaaaagagagtcgctcctccaagctgcacaaagaaaaaacacgcaaggaacgggagctgaaaagcggccataaggacagatccaagtctcaccgtaaacgagaaacaccaaaatcctacaaaactgttgactcaccaaagcgtagatcacgtagtccgcaccggaaatggtctgactccagtaaacaggacgacagtccatccggggcctcatacggccaggactacgacctctctccctcaaggagtcacacaagttccaactacgattcatataagaagagtcccggaagcactagcaggcgccaaagcgtctcaccgccttacaaggaaccaagcgcttaccagtcctctacaaggagtccgagtccttactcgaggaggcaacgcagcgtgagtccctattccagaaggagaagtagctcctacgagcggtccggctcttattctgggaggtcaccatccccatacggtagacgccgcagctcgagtccgtttttgagcaagcgctctctgagccgatcccctctaccaagtagaaagagtatgaaatccagatctcgaagccctgcctattcccgccactcctccagccacagcaagaagaaacgtagctcgtcacgatccagacatagctccatcagccccgtgcgactgcccttgaattcaagcctgggcgccgagctgagcagaaagaaaaaagagagggcggccgcagccgcagccgctaaaatggatggcaaggagtctaaaggaagccctgtttttctccctagaaaagagaattcttcagtggaggccaaagactctgggctggagtctaagaaactcccgcggtcagtgaagctggaaaagtctgcaccagataccgagttggtgaatgtgactcaccttaatacagaggtaaagaattcatctgacacaggaaaagtcaagctagacgaaaactccgagaagcatctagtgaaagacctgaaggcccaggggacacgggactccaagcctattgcgctcaaggaagaaattgtcaccccgaaagagacagaaacaagtgagaaggaaactcctccccccctgcccaccattgcctctccgccgccacctctgcccaccacaactcccccaccgcagactccgccgctgcctcccctccctccgatccctgcgctcccccagcagcccccgttgccccccagccagccggcttttagccaggtgcccgcctcctccacttctacccttccaccttcgactcactcaaagacaagcgcagtcagctctcaagcgaacagccagccccctgtgcaagtcagcgtgaaaacgcaggtgtccgttaccgcagcaataccccacttgaaaacctcaaccctaccccccttgcctttacctcccctactgcctggagatgacgacatggattctcccaaggagaccctgcctagcaaacccgtgaaaaaggaaaaggagcagaggactcgtcatctccttaccgacctgcctttgccccccgaactccctggcggggacctgtccccaccagactctcccgagcccaaggccattactcctcctcaacagccttacaaaaagcggccaaaaatatgttgtccgcggtatggggagcggcggcagacagagtcggactggggcaaaagatgtgtggacaaatttgacattatcggtatcattggagaagggacatacggccaagtctacaaggcgaaggataaggacaccggcgaactggtggcacttaaaaaggtccgtcttgataatgagaaagaagggttccccataactgctattcgggaaattaagatcctgaggcagttaattcaccgcagcgtggtgaatatgaaggagatagtaaccgataagcaggacgccctagatttcaagaaggacaagggagctttctacctcgttttcgagtatatggaccatgatctgatgggtttactcgagagtgggctggtgcacttctcagaagaccacatcaaaagcttcatgaagcagttaatggagggactcgaatactgccataaaaagaacttccttcatcgcgacatcaagtgttccaatattttactcaataattccggccagattaagctcgctgacttcgggctggcgcgactgtataactcggaggaatctagaccttatacaaacaaagtgattactctgtggtatcgaccgccagagctgctattgggggaagaaagatatacgccggccatcgatgtgtggtcctgtggatgcatcctgggggaactgtttacaaagaagccaatatttcaggcaaacttggaactggcacagctggaactgatttctcggttatgtgggagtccctgtccagctgtgtggcctgacgtgattaagcttccatacttcaataccatgaagccaaagaagcagtatagacgtcgcctgcgggaggagttcagctttattccaagcgctgccttggaccttttggaccatatgctgacattggacccctcaaagcggtgtaccgctgaacaaactctgcagagtgactttctaaaagatgtggagctgtctaaaatggccccacctgacctcccgcattggcaggattgccacgagctgtggtcaaagaaacgccgccgtcaaagacagtcgggtgtggtggtggaagagcctccaccgtccaaaaccagtagaaaagaaacaacatctggaacgtctacggagccagtgaagaactcttcgcctgcccctccgcaaccggccccggggaaggtcgaatctggagcaggcgatgccataggactggccgatatcactcaacagctgaatcaaagcgagctggctgtcctgctgaatctacttcagtctcaaactgacctgagcatccctcagatggctcagctgctaaatatccactcgaacccagagatgcaacagcaattggaagctttaaatcagtcaatttctgcactgaccgaggccacaagtcagcagcaagattccgaaactatggcccccgaggaatcattgaaagaggccccctctgcgcctgtgattctgccatccgctgaacaaaccaccctggaggcctcatcgacccctgccgatatgcaaaacattctggcagtgttattaagtcagctgatgaaaacacaggagccagctggttcgctggaagagaataactccgataagaattctgggccacagggcccccgtaggaccccaactatgcctcaagaggaagccgctgcatgccctccacacattcttccccctgagaaaagaccacctgaacctccaggtccacctcctcctccgcccccaccacctcttgttgaaggggatctgagtagcgctccacaggaacttaatcccgccgtgacagccgcgctcttgcaactcctctcccagcccgaagcagagccccctggtcacttgccgcatgaacaccaggcactccggcctatggagtattccacccggccacgtcctaatcgcacatacggcaataccgatggcccagagactggcttttccgcgatcgacaccgacgaacggaattccggtcccgccctcaccgaatcactggtccagacactggtcaaaaaccgaacattttcaggttcgctctcacatttgggtgagagcagtagctaccaagggaccggcagcgtccagtttcctggtgaccaggacctgaggtttgctagggtgcccctggccttgcaccctgtagtcggccagcctttcttgaaagccgagggaagcagtaacagtgttgtacacgccgagaccaagcttcaaaactatggagagctcggacccgggactaccggtgcctcaagttcaggggccggcctgcactggggcggtccaacccagtcgtccgcctatgggaaactctaccggggcccaaccagagttccgccacggggaggtcgcggccggggcgtcccttattag

SEQ ID NO: 275186 - DNA, 4473 bp, Artificial Sequence
  derived and/or modified sequence
atgcccaacagcgagagacatggaggcaagaaggatggcagcggcggggccagcggcaccctgcagcccagcagcggcggcggcagcagcaacagccgggagcggcaccggctggtgtccaagcacaagaggcacaagagcaagcacagcaaggacatgggcctggtgaccccagaggccgccagcctgggcaccgtcatcaagcccctggtggagtatgatgacatcagcagtgacagcgacaccttcagtgatgacatggccttcaagctggacagaagagaaaatgatgaaagaagaggaagtgacagaagtgaccggctgcacaagcaccgccaccaccagcacagaagaagccgggacctgctgaaggccaagcagacagagaaggagaagagccaggaggtgagcagcaagagcggctccatgaaggaccgcatcagcggcagcagcaagaggagcaatgaggagacagatgattatggcaaggcccaggtggccaagagcagcagcaaggagagccgcagcagcaagctgcacaaggagaagaccaggaaggagcgggagctgaagagcggccacaaggacaggagcaagagccacaggaagcgggagacccccaagagctacaagacagtggacagccccaagaggaggagccgcagcccccacaggaagtggagcgacagcagcaagcaggatgacagccccagcggggccagctatggccaggactatgacctgagccccagccgcagccacaccagcagcaactatgacagctacaagaagagccctggcagcaccagccggcggcagagcgtgtccccaccctacaaggagcccagcgcctaccagagcagcaccaggagccccagcccctacagccggcggcagaggtctgtgagcccctacagcagaagaagaagcagcagctatgaaagaagtggcagctacagcggccgcagccccagcccctatggaagaagaagaagcagcagccccttcctgagcaagaggagcctgagccgcagccccctgcccagcaggaagtccatgaagagccgcagccgcagccctgcctacagccgccacagcagcagccacagcaagaagaagaggagcagcagccgcagccgccacagcagcatcagccctgtgcggctgcccctgaacagcagcctgggcgctgagctgagcaggaagaagaaggagagagctgctgctgctgctgctgccaagatggatggcaaggagagcaagggcagccctgtgttcctgcccaggaaagaaaacagctctgtggaggccaaggacagcggcctggagagcaagaagctgcccaggtctgtgaagctggagaagagcgccccagacacagagctggtgaatgtgacccacctgaacacagaggtgaagaacagcagtgacaccgggaaggtgaagctggatgaaaattctgagaagcacctggtgaaggacctgaaggcccagggcacccgggacagcaagcccatcgccctgaaggaggagatcgtgacccccaaggagacagagaccagcgagaaggagaccccaccacccctgcccaccatcgccagccccccaccacccctgcccaccaccaccccaccaccccagaccccacccctgccccccctgccccccatcccagccctgccccagcagccccccctgccccccagccagcctgccttcagccaggtgcctgccagcagcaccagcaccctgccccccagcacccacagcaagaccagcgctgtgagcagccaggccaacagccagccccctgtgcaggtgtctgtgaagacccaggtgtctgtgacagctgccatcccccacctgaagaccagcaccctgccccccctgcccctgccccccctgctgcctggagatgatgacatggacagccccaaggagaccctgcccagcaagcctgtgaagaaggagaaggagcagaggaccaggcacctgctgacagacctgcccctgcccccagagctgcccggcggggacctgagccccccagacagccctgagcccaaggccatcaccccaccccagcagccctacaagaagaggcccaagatctgctgccccaggtatggagagcggcggcagacagaaagtgactggggcaagagatgtgtggacaagtttgacatcatcggcatcattggagagggcacctacggccaggtgtacaaggccaaggacaaggacacaggagagctggtggccctgaagaaggtgcggctggacaatgagaaggagggcttccccatcacagccatccgggagatcaagatcctgcggcagctgatccacaggtctgtggtgaacatgaaggagatcgtgacagacaagcaggatgccctggacttcaagaaggacaagggggccttctacctggtgtttgagtacatggaccatgacctgatgggcctgctggagagcggcctggtgcacttcagcgaggaccacatcaagagcttcatgaagcagctgatggagggcctggagtactgccacaagaagaacttcctgcaccgggacatcaagtgcagcaacatcctgctgaacaacagcggccagatcaagctggccgactttggcctggcccggctgtacaacagcgaggagagccggccctacaccaacaaggtgatcaccctgtggtacagacctcctgagctgctgctgggggaggagcgctacaccccagccattgatgtgtggagctgtggctgcatcctgggggagctgttcaccaagaagcccatcttccaggccaacctggagctggcccagctggagctgatcagccggctgtgtggcagcccctgcccagctgtgtggccagatgtgatcaagctgccctacttcaacaccatgaagcccaagaagcagtacagaagaaggctgcgggaggagttctccttcatccccagcgctgccctggacctgctggaccacatgctgaccctggaccccagcaagcgctgcacagctgagcagaccctgcagagcgacttcctgaaggatgtggagctgagcaagatggcccccccagacctgccccactggcaggactgccacgagctgtggagcaagaagagaagacggcagaggcagagcggcgtggtggtggaggagcccccacccagcaagaccagcaggaaggagaccaccagcggcaccagcacagagcctgtgaagaacagcagccctgccccaccccagcctgcccctgggaaggtggagagcggggctggagatgccatcggcctggccgacatcacccagcagctgaaccagagcgagctggccgtgctgctgaacctgctgcagagccagacagacctgagcatcccccagatggcccagctgctgaacatccacagcaaccctgagatgcagcagcagctggaggccctgaaccagagcatcagcgccctgacagaggccaccagccagcagcaggacagcgagaccatggcccctgaggagagcctgaaggaggcccccagcgcccctgtgatcctgcccagcgctgagcagaccaccctggaggccagcagcaccccagctgacatgcagaacatcctggccgtgctgctgagccagctgatgaagacccaggagcccgccggcagcctggaggagaacaacagcgacaagaacagcggcccccagggccccaggaggacccccaccatgccccaggaggaggccgccgcctgccccccccacatcctgcccccagagaagaggcctcctgagcccccaggccccccacctcctcctcctcctccacccctggtggagggggacctgagcagcgccccccaggagctgaacccagctgtgacagctgccctgctgcagctgctgagccagcctgaggccgagcccccaggccacctgccccatgagcaccaggccctgcggcccatggagtacagcacccggccccggcccaacagaacctacggcaacacagatggccctgagaccggcttcagcgccatcgacacagatgagaggaacagcggccctgccctgacagagagcctggtgcagaccctggtgaagaacagaaccttcagcggcagcctgagccacctgggggagagcagcagctaccagggcaccggctctgtgcagtttcctggggaccaggacctgcgctttgcccgggtgcccctggccctgcaccctgtggtgggccagcccttcctgaaggccgagggcagcagcaacagcgtggtgcatgctgagaccaagctgcagaactacggggagctgggccctggcaccaccggggccagcagcagtggagctggcctgcactggggcggccccacccagagcagcgcctacggcaagctgtaccggggccccaccagggtgcccccccggggcggccggggccggggcgtgccctactag

SEQ ID NO: 275187 - DNA, 4473 bp, Artificial Sequence
  derived and/or modified sequence
atgcccaacagcgagcggcacggcggcaagaaggacggcagcggcggcgctagcggaacactacaaccaagttccggtggaggcagctcaaattctcgggagagacaccggctggtgagcaagcacaagagacacaagagcaaacatagcaaggatatggggctggtgacacctgaggccgcttctctcggtaccgtgatcaagcctttggtagagtatgacgacattagcagcgatagcgacaccttttctgatgatatggccttcaaactggatcgtcgtgaaaatgacgaacggcgaggatctgatcgctcggacaggttgcacaaacaccggcaccaccaacacagacgatctcgggacttgcttaaggccaagcaaacagaaaaggagaaaagccaggaggtgtcctccaagagcgggtctatgaaagacagaatctcaggctcctctaaacgtagcaacgaagagaccgacgactacggcaaggcccaggtggcgaaaagtagttccaaggaatctcgcagttctaagttacacaaagaaaagacaagaaaggaacgcgagctcaagagtggacataaggacaggtctaagtctcataggaagagggaaactcccaagtcctataagactgtcgactctcctaagaggcggtctcggagcccacatcgtaagtggagtgactcgagcaagcaagacgacagcccttcgggtgcttcatatggtcaagactacgatttatctccctctagatcgcacacatcaagtaactatgactcctacaagaagagtcccgggtctacctcccggcggcagagcgtgtcacccccctataaggaaccttcagcataccagtcttcaactagatcaccttcaccctatagtagacgccagcggtctgtgtctccctatagcaggcgtagaagttcgagctacgaaagatcagggtcttatagcgggagaagcccctccccgtacggcaggaggagaagttcgagcccatttctgtccaaacgatctctcagtcggagcccactgccgagtcggaaaagcatgaagagccggtctaggtctcctgcatacagccgccactctagttctcatagcaaaaagaaaagatctagtagcagatctcggcactcatcaatttcacccgtgagactacccctgaatagcagtctgggagcggagctcagcagaaagaaaaaggagcgagctgccgccgctgccgcagctaagatggacggaaaggagagtaaaggatcccctgtgtttctccctaggaaagagaattcctccgtggaagctaaagactccgggttagagagtaaaaagctgccacggtccgttaaattagagaaaagcgctcccgacacagagttggttaacgtgacccacctgaatacggaagtcaaaaacagttccgacaccggaaaggtgaagttggatgagaactcagaaaaacacctggttaaggacctaaaggctcagggtacgagggacagtaaacccatcgcactcaaggaggaaatcgtgacccccaaagaaaccgagacctcagagaaagaaacccctcctcctctgcctacaattgcatcaccacctccccccctgcctactactacccctccacctcagacccctcctctgccacccctaccacctatccctgcccttcctcaacagccgcccctgccaccctcgcagcccgcattctcccaagtgcctgccagcagtacttccaccctgcctccttcaacgcattccaagacctcggcagtgtccagccaagccaacagccagccgcccgtgcaggtgagtgtgaaaacgcaggtctccgtgaccgccgccatccctcatttgaagacttcaaccctaccaccgcttccccttccccctctcctgcccggggatgatgatatggactcccccaaagagaccttaccctcaaaaccagtgaagaaggagaaagaacagagaacacgccaccttctgacagacctgcctcttccccctgagttacccggcggcgacctgtcaccaccggacagtccagagccaaaggcaattacacctccacagcaaccatataagaagcggcccaaaatttgctgcccacgctacggagaaaggagacagacagagagcgactggggcaaaagatgcgtggacaaatttgatatcatcggcatcataggggaaggcacttacggtcaggtgtataaggccaaggacaaggacaccggagagctggtcgcccttaaaaaggtgaggctcgacaacgaaaaggaaggattccctatcactgccataagggagataaagatactgcgccagctgatacatcgatctgtggtgaacatgaaagagatcgtaacagataaacaggacgctctggacttcaagaaagacaaaggggctttttacctggtatttgagtacatggaccacgatttgatgggactgctggaaagcgggctggttcactttagtgaagatcacatcaagtcctttatgaagcagctgatggagggacttgaatactgccataagaaaaatttcctgcacagagacatcaaatgcagcaatatccttctgaacaactctggccagatcaagctggcagactttggcttggcaaggctttataattcagaggagtcccgcccttatactaataaagttattacactgtggtataggccccctgagctcctccttggagaggagcgatatacccccgcgatcgatgtctggagctgtggatgcatcctaggcgaactcttcaccaagaaacctatttttcaagctaatcttgagttagctcagttggagctgatatcacggctttgtgggtcaccctgtcccgccgtttggccggatgttattaagttaccatactttaacactatgaagccaaagaaacagtaccgtcggaggcttagggaagaattctctttcattccatctgccgcactagatctcctggaccatatgctgacacttgacccttcaaagaggtgcaccgccgagcagactttacagtctgactttttaaaagatgtcgaattgtccaaaatggctcctcctgacctgccccactggcaggattgccacgagctgtggtcaaaaaagcggagaaggcagagacagtcaggtgtggtggtcgaggagcctcctccgtcaaagacttcacggaaagagacgacctccggaacttctactgagcccgttaagaattcctctcctgccccaccacagcccgctcctggaaaggtagagtcaggagcaggtgacgctattggcctcgctgacataactcagcagctgaaccaaagcgaactggcggtcctgctgaacctgctgcagtctcagaccgacctttccatcccacaaatggcacaacttctgaatatccattccaacccagaaatgcagcaacagcttgaggctctaaaccagagcatctctgccttgacggaggctacgagtcagcagcaggacagtgagactatggcgcccgaagaatctcttaaagaagctccctccgccccagtaattctgccctccgctgaacagaccaccttagaggccagcagcactccagctgacatgcagaacatcctagcggtcctcctctcgcagcttatgaagacgcaggaacctgctggaagtcttgaagagaacaattccgacaagaatagtggcccacaagggccccgaaggacacctaccatgccccaggaggaggcggcagcctgtcctccccacattctcccccctgaaaagcgacctcccgagccccctggcccaccccccccgccgcccccaccacccctcgtggaaggagatttgtcttcggccccccaagagttaaatcctgcagtgacagctgcattactccagcttctatcccaacctgaggcagaacccccaggccacctgccccatgaacatcaggccctgcggcctatggaatacagtaccagacctcggccgaaccggacctacggaaataccgatggtccagagaccggattctcagccatcgatacagatgaaaggaactcaggcccagccctcaccgagagcctggtgcagacactggtgaaaaaccggacattttcgggttccctgtcccatctcggcgagtcctcaagctatcagggcacagggtcggttcaatttccaggtgaccaggatctgaggtttgcacgagtccccttggcgcttcatcccgtggtgggacagccctttctgaaagcagaaggttcatcaaattccgtggtgcatgctgaaactaaactacaaaactacggagagctcggacctggcaccactggcgcaagcagctccggagcaggtctgcattggggcggaccaacacagagtagcgcatacgggaaattgtatcggggccctacccgcgtcccccccaggggcggcagaggtcgaggggtgccctactag

SEQ ID NO: 275188 - DNA, 4473 bp, Artificial Sequence
  derived and/or modified sequence
atgccaaatagtgagcggcatggagggaagaaggatggaagcggtggcgcttctggcacactccaacctagttccggaggcggatcaagcaactccagagaaaggcaccgcttagtttcgaaacacaagcggcacaagtcgaaacactctaaggatatgggcctcgttacacccgaggctgccagccttggaaccgtgatcaagccactagtggagtatgacgatatctccagtgacagcgataccttttccgatgatatggcatttaaacttgatagaagagaaaatgatgagaggcgtggttctgatagatcggatagactgcacaaacaccgacatcaccagcaccggcgatcacgcgacctactgaaggctaaacagacggagaaggaaaagagccaagaggttagcagcaagtctggcagtatgaaagaccggatcagtggttcttccaaaaggagcaatgaagaaactgacgactacggcaaggcacaggtggccaagtcaagctctaaagagtctagatcttctaaactgcacaaggagaagacacgcaaggagcgcgagctcaaatcaggtcacaaggacaggtccaaatcccaccggaagagagagactcccaaaagttacaaaactgtagatagcccgaagcgaagaagtagatcgccccaccggaaatggtctgatagttcgaaacaggacgactcccctagcggagcttcatacggacaagactatgacctaagtccaagtcgctcacatacgtcgagcaactatgacagctacaaaaaatctcctgggagtacttccagacgccagagtgtctctcccccatataaggagccatccgcctaccagtcaagcacccgcagtccctccccgtattccagaagacagcggtctgtgagcccctattctcggaggcgatcgtcttcctatgaacgctcgggatcctactctggtcgctcgccatcaccctatggccgaagacggtcttccagtccatttctcagtaaaaggtctctttcaaggagtccacttccaagtcgaaaatctatgaagtctcggtcaagaagtcccgcttatagtagacatagcagtagtcactcaaaaaaaaagagaagtagcagccgaagtagacacagctctatatcccctgttcgcttgcccctgaacagctctctcggcgctgaactaagtcgcaagaagaaggaacgagctgccgcagcagcggctgccaaaatggacggcaaggagtctaaagggagccccgtttttctgccacgtaaagagaattcgtctgttgaagccaaggacagcggactggagtcaaaaaagcttcccagatctgtaaaacttgagaagtctgcccctgacaccgagctagtgaacgtaacccatctaaataccgaagtcaagaactccagtgacactggaaaggtgaaactggatgaaaatagcgaaaaacaccttgtgaaagacttaaaggcacagggaactagagatagcaaaccaatagccttaaaggaggagattgtgactccgaaggagaccgagaccagcgagaaagaaactccccctcctcttcccactatagcctcaccgcctccccctcttccaacgacaacaccaccccctcagacccccccattacctcctctccctcccattccagccttgccccagcagccaccccttcctcctagccaacctgccttctcacaggtgcctgccagctccaccagcaccttaccccctagcacacactccaagacgagcgcagtttcgtcccaggctaactcccagcctcccgttcaagttagcgtcaaaactcaggttagtgtcacagcagcaatccctcatttgaagacatcaacacttcccccattgcccttgccccctctactgcccggtgacgacgatatggattcgcccaaggagactcttccaagtaagcccgtgaagaaggaaaaagaacaaagaacacggcacctactgaccgatctgcccctacctccagagctgccaggcggagacctgtctcccccagattctcctgaacctaaggcaatcacgccccctcagcaaccatataaaaagcgccctaaaatctgttgtccacgatatggggagagacggcagacagagagcgactggggtaaacggtgcgtggataagtttgacataattgggatcattggcgaaggcacctacgggcaggtatacaaagcaaaagacaaggataccggcgagctggtggccttgaagaaggtgagactggataatgaaaaggaggggttccctattaccgctattagagaaatcaaaatccttcgccagttgatccaccgcagtgtcgtcaatatgaaggagatcgttacagacaaacaggatgccctcgattttaaaaaagacaagggggctttctatctggtgttcgagtatatggaccacgacttaatgggcctgctggagagtggcttggtacactttagcgaagatcacatcaaaagcttcatgaagcagttgatggagggccttgagtattgccacaagaagaattttttgcatagggatattaaatgttccaatatacttctgaataattcaggccagatcaagctcgccgactttggtttggccaggctgtataactcagaggaatcgcggccatacactaacaaagtcatcacgctgtggtaccgtccccctgaactgctgctgggcgaggagcgatacacaccagcaatcgatgtttggagctgcggctgtatacttggtgagctctttaccaagaagcccatttttcaagccaatctggagctcgcccaacttgagctgatatccaggctgtgtgggtctccctgccccgctgtgtggcccgacgtgattaagttgccatacttcaacaccatgaagccgaagaagcagtaccgacggcgtttgcgcgaggaattctcctttattcctagcgccgcattagatcttctcgatcatatgctgactctggaccctagcaagcggtgtacagcagaacaaacgttacagagcgactttctcaaggatgtggaactgagcaagatggccccaccagacctgccccactggcaggattgtcatgaactctggtcaaagaagcgtagacgccagagacagtcaggtgtggtcgtggaggaacctccaccatccaagactagtaggaaggaaaccaccagcggaacatctacagaacccgtcaagaattcctccccagcccctccgcagcctgctccgggaaaagtggaatcgggagcgggtgacgctatcggcttagccgacataactcagcagttgaaccaaagtgaactcgccgtgctccttaatttgttgcaaagccagacagatctctcaatcccacagatggcacaactgttaaatatccactccaatccagagatgcaacaacagcttgaagccttaaatcagagcatttcagctctcaccgaggctacatcacagcagcaagactccgaaacgatggcaccagaagaaagcctcaaggaagcaccttcagctccggttatccttcccagcgccgagcaaactacactggaggcctcgagtacacctgccgacatgcagaacatccttgctgttctgctgtctcagcttatgaaaacacaggagcccgctggttctctcgaggaaaataattccgacaagaactcaggcccacagggcccacgcagaacccctacaatgcctcaggaggaagcggcagcctgtccaccacatatcctgcctcctgagaaaagacctccggaacctccagggcctcccccaccgccacctccccctcccctcgtggagggggacctctcttcagcccctcaggaactgaatccggctgtcactgccgctttgctgcagctgctgagccagcctgaggctgaaccacctggccacttaccacacgagcaccaagccttaaggcccatggaatactccacccgtcccaggcctaatcgcacctacgggaacactgatggcccagaaacagggttctcagctattgacacggacgaacggaacagtgggcctgcccttacggagagcctggtccagacactcgtgaaaaatagaactttctctggttcgttatctcacctaggagaatcttcctcctaccaagggaccggctctgttcaatttcctggagaccaggatctgagatttgccagggtccctctggcgctgcaccccgtggtcggtcagcctttcttgaaggctgagggcagctcaaattcagtcgtgcacgcggaaacaaagctccagaattatggagagctcggcccaggcacgactggcgctagctccagtggcgcaggtttgcactggggcggtcctacacagtccagcgcatacggcaagctgtaccgcggaccaacccgggtgcctcctaggggcggtcgcggacgcggagttccttattag

SEQ ID NO: 275189 - DNA, 8015 bp, Artificial Sequence
  derived and/or modified sequence
cccggcgcccgggcctgaggactggctcggcggagggagaagaggaaacagacttgagcagctccccgttgtctcgcaactccactgccgaggaactctcatttcttccctcgctccttcaccccccacctcatgtagaagggtgctgaggcgtcgggagggaggaggagcctgggctaccgtccctgccctccccacccccttcccggggcgctttggtgggcgtggagttggggttgggggggtgggtgggggttgctttttggagtgctggggaacttttttcccttcttcaggtcaggggaaagggaatgcccaattcagagagacatgggggcaagaaggacgggagtggaggagcttctggaactttgcagccgtcatcgggaggcggcagctctaacagcagagagcgtcaccgcttggtatcgaagcacaagcggcataagtccaaacactccaaagacatggggttggtgacccccgaagcagcatccctgggcacagttatcaaacctttggtggagtatgatgatatcagctctgattccgacaccttctccgatgacatggccttcaaactagaccgaagggagaacgacgaacgtcgtggatcagatcggagcgaccgcctgcacaaacatcgtcaccaccagcacaggcgttcccgggacttactaaaagctaaacagaccgaaaaagaaaaaagccaagaagtctccagcaagtcgggatcgatgaaggaccggatatcgggaagttcaaagcgttcgaatgaggagactgatgactatgggaaggcgcaggtagccaaaagcagcagcaaggaatccaggtcatccaagctccacaaggagaagaccaggaaagaacgggagctgaagtctgggcacaaagaccggagtaaaagtcatcgaaaaagggaaacacccaaaagttacaaaacagtggacagcccaaaacggagatccaggagcccccacaggaagtggtctgacagctccaaacaagatgatagcccctcgggagcttcttatggccaagattatgaccttagtccctcacgatctcatacctcgagcaattatgactcctacaagaaaagtcctggaagtacctcgagaaggcagtcggtcagtcccccttacaaggagccttcggcctaccagtccagcacccggtcaccgagcccctacagtaggcgacagagatctgtcagtccctatagcaggagacggtcgtccagctacgaaagaagtggctcttacagcgggcgatcgcccagtccctatggtcgaaggcggtccagcagccctttcctgagcaagcggtctctgagtcggagtccactccccagtaggaaatccatgaagtccagaagtagaagtcctgcatattcaagacattcatcttctcatagtaaaaagaagagatccagttcacgcagtcgtcattccagtatctcacctgtcaggcttccacttaattccagtctgggagctgaactcagtaggaaaaagaaggaaagagcagctgctgctgctgcagcaaagatggatggaaaggagtccaagggttcacctgtatttttgcctagaaaagagaacagttcagtagaggctaaggattcaggtttggagtctaaaaagttacccagaagtgtaaaattggaaaaatctgccccagatactgaactggtgaatgtaacacatctaaacacagaggtaaaaaattcttcagatacagggaaagtaaagttggatgagaactccgagaagcatcttgttaaagatttgaaagcacagggaacaagagactctaaacccatagcactgaaagaggagattgttactccaaaggagacagaaacatcagaaaaggagacccctccacctcttcccacaattgcttctcccccaccccctctaccaactactacccctccacctcagacaccccctttgccacctttgcctccaataccagctcttccacagcaaccacctctgcctccttctcagccagcatttagtcaggttcctgcttccagtacttcaactttgcccccttctactcactcaaagacatctgctgtgtcctctcaggcaaattctcagccccctgtacaggtttctgtgaagactcaagtatctgtaacagctgctattccacacctgaaaacttcaacgttgcctcctttgcccctcccacccttattacctggagatgatgacatggatagtccaaaagaaactcttccttcaaaacctgtgaagaaagagaaggaacagaggacacgtcacttactcacagaccttcctctccctccagagctccctggtggagatctgtctcccccagactctccagaaccaaaggcaatcacaccacctcagcaaccatataaaaagagaccaaaaatttgttgtcctcgttatggagaaagaagacaaacagaaagcgactgggggaaacgctgtgtggacaagtttgacattattgggattattggagaaggaacctatggccaagtatataaagccaaggacaaagacacaggagaactagtggctctgaagaaggtgagactagacaatgagaaagagggcttcccaatcacagccattcgtgaaatcaaaatccttcgtcagttaatccaccgaagtgttgttaacatgaaggaaattgtcacagataaacaagatgcactggatttcaagaaggacaaaggtgccttttaccttgtatttgagtatatggaccatgacttaatgggactgctagaatctggtttggtgcacttttctgaggaccatatcaagtcgttcatgaaacagctaatggaaggattggaatactgtcacaaaaagaatttcctgcatcgggatattaagtgttctaacattttgctgaataacagtgggcaaatcaaactagcagattttggacttgctcggctctataactctgaagagagtcgcccttacacaaacaaagtcattactttgtggtaccgacctccagaactactgctaggagaggaacgttacacaccagccatagatgtttggagctgtggatgtattcttggggaactattcacaaagaagcctatttttcaagccaatctggaactggctcagctagaactgatcagccgactttgtggtagcccttgtccagctgtgtggcctgatgttatcaaactgccctacttcaacaccatgaaaccgaagaagcaatatcgaaggcgtctacgagaagaattctctttcattccttctgcagcacttgatttattggaccacatgctgacactagatcctagtaagcggtgcacagctgaacagaccctacagagcgacttccttaaagatgtcgaactcagcaaaatggctcctccagacctcccccactggcaggattgccatgagttgtggagtaagaaacggcgacgtcagcgacaaagtggtgttgtagtcgaagagccacctccatccaaaacttctcgaaaagaaactacctcagggacaagtactgagcctgtgaagaacagcagcccagcaccacctcagcctgctcctggcaaggtggagtctggggctggggatgcaataggccttgctgacatcacacaacagctgaatcaaagtgaattggcagtgttattaaacctgctgcagagccaaaccgacctgagcatccctcaaatggcacagctgcttaacatccactccaacccagagatgcagcagcagctggaagccctgaaccaatccatcagtgccctgacggaagctacttcccagcagcaggactcagagaccatggccccagaggagtctttgaaggaagcaccctctgccccagtgatcctgccttcagcagaacagacgacccttgaagcttcaagcacaccagctgacatgcagaatatattggcagttctcttgagtcagctgatgaaaacccaagagccagcaggcagtctggaggaaaacaacagtgacaagaacagtgggccacaggggccccgaagaactcccacaatgccacaggaggaggcagcagcatgtcctcctcacattcttccaccagagaagaggccccctgagccccccggacctccaccgccgccacctccaccccctctggttgaaggcgatctttccagcgccccccaggagttgaacccagccgtgacagccgccttgctgcaacttttatcccagcctgaagcagagcctcctggccacctgccacatgagcaccaggccttgagaccaatggagtactccacccgaccccgtccaaacaggacttatggaaacactgatgggcctgaaacagggttcagtgccattgacactgatgaacgaaactctggtccagccttgacagaatccttggtccagaccctggtgaagaacaggaccttctcaggctctctgagccaccttggggagtccagcagttaccagggcacagggtcagtgcagtttccaggggaccaggacctccgttttgccagggtccccttagcgttacacccggtggtcgggcaaccattcctgaaggctgagggaagcagcaattctgtggtacatgcagagaccaaattgcaaaactatggggagctggggccaggaaccactggggccagcagctcaggagcaggccttcactgggggggcccaactcagtcttctgcttatggaaaactctatcgggggcctacaagagtcccaccaagagggggaagagggagaggagttccttactaacccagagacttcagtgtcctgaaagattcctttcctatccatccttccatccagttctctgaatctttaatgaaatcatttgccagagcgaggtaatcatctgcatttggctactgcaaagctgtccgttgtattccttgctcacttgctactagcaggcgacttacgaaataatgatgttggcaccagttccccctggatgggctatagccagaacatttacttcaactctaccttagtagatacaagtagagaatatggagaggatcattacattgaaaagtaaatgttttattagttcattgcctgcacttactgatcggaagagagaaagaacagtttcagtattgagatggctcaggagaggctctttgatttttaaagttttggggtgggggattgtgtgtggtttctttcttttgaattttaatttaggtgttttgggtttttttcctttaaagagaatagtgttcacaaaatttgagctgctctttggcttttgctataagggaaacagagtggcctggctgatttgaataaatgtttctttcctctccaccatctcacattttgcttttaagtgaacactttttccccattgagcatcttgaacatactttttttccaaataaattactcatccttaaagtttactccactttgacaaaagatacgcccttctccctgcacataaagcaggttgtagaacgtggcattcttgggcaagtaggtagactttacccagtctctttccttttttgctgatgtgtgctctctctctctctttctctctctctctctctctctctctctctctctctctctctgtctcgcttgctcgctctcgctgtttctctctctttgaggcatttgtttggaaaaaatcgttgagatgcccaagaacctgggataattctttactttttttgaaataaaggaaaggaaattcagactcttacattgttctctgtaactcttcaattctaaaatgttttgttttttaaaccatgttctgatggggaagttgatttgtaagtgtggacagcttggacattgctgctgagctgtggttagagatgatgcctccattcctagagggctaataacagcatttagcatattgtttacacatatatttttatgtcaaaaaaaaaacaaaaacctttcaaacagagcattgtgatattgtcaaagagaaaaacaaatcctgaagatacatggaaatgtaacctagtttagggtgggtatttttctgaagatacatcaatacctgaccttttttaaaaaaataattttaaaacagcatactgtgaggaagaacagtattgacatacccacatcccagcatgtgtaccctgccagttcttttagggatttttcctccaaagagatttggatttggttttggtaaaaggggttaaattgtgcttccaggcaagaactttgccttatcataaacaggaaatgaaaaagggaagggctgtcaggatgggataatttgggaggcttctcattctggcttctatttctatgtgagtaccagcatatagagtgttttaaaaacagatacatgtcatataatttatctgcacagacttagaccttcaggaaacataggttaagcccccttttacaaagaaaaagtaaacatacttcagcatcttggagggtagttttcaaaactcaagtttcatgtttcaatgccaagttcttattttaaaaaataaaatctacttataagagaaaggtgcattacttaaaaaaaaaaaactttaaagaaatgaaagaagaaccctcttcagatacttacttgaagactgttttcccctgttaatgagatatagctagatatcggtgtgtgtatttctttattattctctggtttttgatctggccttgcctccagggccaaacactgatttagaaagagagccttctagctattttggcattgatggctttttataccagtgtgtccagttagatttactaggcttactgacatgctattggtaaatcgcattaaagttcatctgaaccttctgtctgttgacttcttagtcctcagacatgggcctttgtgttttagaatatttgaatttgagttattgggccccactccctgttttttattaaagaacgtgagcctgggatactttcagaagtatctgttcaatgaaaaaaagttggtttcccatcaaatatgaataaaattctctatatatttcattgtattttggttatcagcagtcatcaataatgtttttccctcccctctcccacctcttatttttaattatgccaaatatcctaaataatatacttaagcctccattccctcatccctactagggaagggggtgagtgtatgtgtgagtgtatgtgtatgtatgatcccatctcacccccacccccattttgggagtcttttaaaatgaaaacaaagtttggtagttttgactatttctaaaagcagaggagaaaaaaaaacttatttaaatatcctggaatctgtatggaggaagaaaaggtatttgttaatttttcagttacgttatctataaacatgatggaagtaaaggtttggcagaatttcaccttgactatttgaaaattacagacccaattaattccattcaaaagtggttttcgttttgttttaattattgtacaatgagagatattgtctattaaatacattattttgaacagatgagaaatctgattctgttcatgagtgggaggcaaaactggtttgaccgtgatcatttttgtggttttgaaaacaaatatacttgacccagtttccttagttttttcttcaactgtccataggaacgataagtatttgaaagcaacatcaaatctatacgtttaaagcagggcagttagcacaaatttgcaagtagaacttctattagcttatgccatagacatcacccaaccacttgtatgtgtgtgtgtatatataatatgcatatatagttaccgtgctaaaatggttaccagcaggttttgagagagaatgctgcatcagaaaagtgtcagttgccacctcattctccctgatttaggttcctgacactgattcctttctctctcgtttttgacccccattgggtgtatcttgtctatgtacagatattttgtaatatattaaatttttttctttcagtttataaaaatggaaagtggagattggaaaattaaatatttcctgttactatacca

SEQ ID NO: 275190 - DNA, 4473 bp, Artificial Sequence
  derived and/or modified sequence
atgcccaacagcgagagacacggcggcaagaaggacggcagcggcggcgccagcggcaccctgcagcccagcagcggcggcggcagcagcaacagcagagagagacacagactggtgagcaagcacaagagacacaagagcaagcacagcaaggacatgggcctggtgacccccgaggccgccagcctgggcaccgtgatcaagcccctggtggagtacgacgacatcagcagcgacagcgacaccttcagcgacgacatggccttcaagctggacagaagagagaacgacgagagaagaggcagcgacagaagcgacagactgcacaagcacagacaccaccagcacagaagaagcagagacctgctgaaggccaagcagaccgagaaggagaagagccaggaggtgagcagcaagagcggcagcatgaaggacagaatcagcggcagcagcaagagaagcaacgaggagaccgacgactacggcaaggcccaggtggccaagagcagcagcaaggagagcagaagcagcaagctgcacaaggagaagaccagaaaggagagagagctgaagagcggccacaaggacagaagcaagagccacagaaagagagagacccccaagagctacaagaccgtggacagccccaagagaagaagcagaagcccccacagaaagtggagcgacagcagcaagcaggacgacagccccagcggcgccagctacggccaggactacgacctgagccccagcagaagccacaccagcagcaactacgacagctacaagaagagccccggcagcaccagcagaagacagagcgtgagccccccctacaaggagcccagcgcctaccagagcagcaccagaagccccagcccctacagcagaagacagagaagcgtgagcccctacagcagaagaagaagcagcagctacgagagaagcggcagctacagcggcagaagccccagcccctacggcagaagaagaagcagcagccccttcctgagcaagagaagcctgagcagaagccccctgcccagcagaaagagcatgaagagcagaagcagaagccccgcctacagcagacacagcagcagccacagcaagaagaagagaagcagcagcagaagcagacacagcagcatcagccccgtgagactgcccctgaacagcagcctgggcgccgagctgagcagaaagaagaaggagagagccgccgccgccgccgccgccaagatggacggcaaggagagcaagggcagccccgtgttcctgcccagaaaggagaacagcagcgtggaggccaaggacagcggcctggagagcaagaagctgcccagaagcgtgaagctggagaagagcgcccccgacaccgagctggtgaacgtgacccacctgaacaccgaggtgaagaacagcagcgacaccggcaaggtgaagctggacgagaacagcgagaagcacctggtgaaggacctgaaggcccagggcaccagagacagcaagcccatcgccctgaaggaggagatcgtgacccccaaggagaccgagaccagcgagaaggagacccccccccccctgcccaccatcgccagcccccccccccccctgcccaccaccaccccccccccccagaccccccccctgccccccctgccccccatccccgccctgccccagcagccccccctgccccccagccagcccgccttcagccaggtgcccgccagcagcaccagcaccctgccccccagcacccacagcaagaccagcgccgtgagcagccaggccaacagccagccccccgtgcaggtgagcgtgaagacccaggtgagcgtgaccgccgccatcccccacctgaagaccagcaccctgccccccctgcccctgccccccctgctgcccggcgacgacgacatggacagccccaaggagaccctgcccagcaagcccgtgaagaaggagaaggagcagagaaccagacacctgctgaccgacctgcccctgccccccgagctgcccggcggcgacctgagcccccccgacagccccgagcccaaggccatcacccccccccagcagccctacaagaagagacccaagatctgctgccccagatacggcgagagaagacagaccgagagcgactggggcaagagatgcgtggacaagttcgacatcatcggcatcatcggcgagggcacctacggccaggtgtacaaggccaaggacaaggacaccggcgagctggtggccctgaagaaggtgagactggacaacgagaaggagggcttccccatcaccgccatcagagagatcaagatcctgagacagctgatccacagaagcgtggtgaacatgaaggagatcgtgaccgacaagcaggacgccctggacttcaagaaggacaagggcgccttctacctggtgttcgagtacatggaccacgacctgatgggcctgctggagagcggcctggtgcacttcagcgaggaccacatcaagagcttcatgaagcagctgatggagggcctggagtactgccacaagaagaacttcctgcacagagacatcaagtgcagcaacatcctgctgaacaacagcggccagatcaagctggccgacttcggcctggccagactgtacaacagcgaggagagcagaccctacaccaacaaggtgatcaccctgtggtacagaccccccgagctgctgctgggcgaggagagatacacccccgccatcgacgtgtggagctgcggctgcatcctgggcgagctgttcaccaagaagcccatcttccaggccaacctggagctggcccagctggagctgatcagcagactgtgcggcagcccctgccccgccgtgtggcccgacgtgatcaagctgccctacttcaacaccatgaagcccaagaagcagtacagaagaagactgagagaggagttcagcttcatccccagcgccgccctggacctgctggaccacatgctgaccctggaccccagcaagagatgcaccgccgagcagaccctgcagagcgacttcctgaaggacgtggagctgagcaagatggccccccccgacctgccccactggcaggactgccacgagctgtggagcaagaagagaagaagacagagacagagcggcgtggtggtggaggagcccccccccagcaagaccagcagaaaggagaccaccagcggcaccagcaccgagcccgtgaagaacagcagccccgcccccccccagcccgcccccggcaaggtggagagcggcgccggcgacgccatcggcctggccgacatcacccagcagctgaaccagagcgagctggccgtgctgctgaacctgctgcagagccagaccgacctgagcatcccccagatggcccagctgctgaacatccacagcaaccccgagatgcagcagcagctggaggccctgaaccagagcatcagcgccctgaccgaggccaccagccagcagcaggacagcgagaccatggcccccgaggagagcctgaaggaggcccccagcgcccccgtgatcctgcccagcgccgagcagaccaccctggaggccagcagcacccccgccgacatgcagaacatcctggccgtgctgctgagccagctgatgaagacccaggagcccgccggcagcctggaggagaacaacagcgacaagaacagcggcccccagggccccagaagaacccccaccatgccccaggaggaggccgccgcctgccccccccacatcctgccccccgagaagagaccccccgagccccccggccccccccccccccccccccccccccccctggtggagggcgacctgagcagcgccccccaggagctgaaccccgccgtgaccgccgccctgctgcagctgctgagccagcccgaggccgagccccccggccacctgccccacgagcaccaggccctgagacccatggagtacagcaccagacccagacccaacagaacctacggcaacaccgacggccccgagaccggcttcagcgccatcgacaccgacgagagaaacagcggccccgccctgaccgagagcctggtgcagaccctggtgaagaacagaaccttcagcggcagcctgagccacctgggcgagagcagcagctaccagggcaccggcagcgtgcagttccccggcgaccaggacctgagattcgccagagtgcccctggccctgcaccccgtggtgggccagcccttcctgaaggccgagggcagcagcaacagcgtggtgcacgccgagaccaagctgcagaactacggcgagctgggccccggcaccaccggcgccagcagcagcggcgccggcctgcactggggcggccccacccagagcagcgcctacggcaagctgtacagaggccccaccagagtgccccccagaggcggcagaggcagaggcgtgccctactag

SEQ ID NO: 275191 - DNA, 609 bp, Artificial Sequence
  derived and/or modified sequence
atgacgtgtctgactgatgtgcctacaggatgtgctgccgtggaacctaccgcacgcctgccagcagctgcttgggcctctaccataactaccgggtgttgcccagccatgggacaagccggagccggcccagcggggcgcagagggggggaagcaggagggggagagggaagagcccatcatgcccatccatcgcccttacctcgcgaaccccgtgtgcgcaccgggcccccggcccactccccgacccctggatccatagatccaagtcccgaactgtcatggggcagcgcaggggtgacgcaggagagccccctcttagatcccgtggattttcttttgttcagaacgagagccgtcgacccgctccgacgggtgttttttttcttttatcagcacctgacgttcttctccatacaaccacagcctcccccgtgccacgcctttcaccccaaggaccctcccgctggctcccggagacagctcatcttagttcctttaaaaggccctcctatcctcgcgcccattctctccctcacccctatcttatcgcgctggagctgttatttcccacgaagccgaatagctcagggctggcacctcagctag

SEQ ID NO: 275192 - protein, 483 aa, Artificial Sequence
  derived and/or modified sequence
MQTNQTPPTYNKTNKFTYGFQNIVDAYGIGTYREINPAPYTIITFPFLFAVMFGDFGHGILMTLFAVWMVLRESRILSQKNENEMFSTVFSGRYIILLMGVFSMYTGLIYNDCFSKSLNIFGSSWSVRPMFTYNWTEETLRGNPVLQLNPALPGVFGGPYPFGIDPIWNIATNKLTFLNSFKMKMSVILGIIHMLFGVSLSLFNHIYFKKPLNIYFGFIPEIIFMTSLFGYLVILIFYKWTAYDAHTSENAPSLLIHFINMFLFSYPESGYSMLYSGQKGIQCFLVVVALLCVPWMLLFKPLVLRRQYLRRKHLGTLNFGGIRVGNGPTEEDAEIIQHDQLSTHSEDADEPSEDEVFDFGDTMVHQAIHTIEYCLGCISNTASYLRLWALSLAHAQLSEVLWTMVIHIGLSVKSLAGGLVLFFFFTAFATLTVAILLIMEGLSAFLHALRLHWVEFQNKFYSGTGFKFLPFSFEHIREGKFEE

SEQ ID NO: 275193 - DNA, 1452 bp, Artificial Sequence
  derived and/or modified sequence
atgcagaccaaccagacgccaccgacatataacaaaacaaacaaattcacttatggatttcaaaacatcgttgatgcctatgggatcgggacatacagggagattaaccccgccccttacacaattatcacgtttccattcttgtttgccgtgatgtttggcgactttggccacggcatcctgatgactctttttgcagtctggatggtcctgagagaatctcggatcctgtcacaaaagaatgagaacgagatgttctccactgtgtttagtggtagatacatcatcctgctcatgggtgtgttctctatgtatactggactgatttataatgattgcttttccaaatcccttaacattttcggctcctcctggtcggttcgacccatgtttacgtacaactggacggaggaaacccttagaggaaaccccgttctgcagctcaatccggctctgccgggggtcttcggaggcccctacccttttggaattgatcccatttggaacattgctacgaacaagctgacgttccttaactccttcaagatgaagatgagtgtaattctgggcattattcacatgctgttcggtgtgtccctgtcactgttcaaccacatatatttcaaaaagccgttaaatatctattttggcttcatccctgagatcattttcatgacgtccctcttcgggtacctggttatcctgatattctacaagtggactgcttatgatgcccatacgtctgaaaacgcaccatcacttctgattcactttataaatatgttcttgtttagctacccagagtcagggtattccatgctgtactccggccagaaagggatccagtgcttccttgttgtcgtcgccctcctttgcgttccgtggatgttgctctttaagccactcgtgctgcgtcgccaatatcttcgccgaaaacaccttggcacacttaactttggagggatccgcgttggcaatggtcccaccgaggaggacgccgagatcatccaacatgaccagctgtccacccactctgaggacgccgatgaacctagcgaggacgaggtcttcgactttggtgacaccatggtgcatcaagccatccatacgatcgagtactgcttgggctgcatctcaaacacagcatcctatctgcgcctgtgggctctgtcactcgcacacgcccagttatccgaggtgctctggaccatggtgattcacataggactgtcagttaaatcgctggctggagggctggtgttgttcttcttctttacagctttcgccacccttaccgtcgcaatcctgctgatcatggaaggcctctcggcattcttacacgctctgcgcttgcactgggtagaattccaaaataaattctacagcggcacagggttcaagtttctgcctttctcatttgaacacatcagagagggaaagtttgaggagtag

SEQ ID NO: 275194 - DNA, 1452 bp, Artificial Sequence
  derived and/or modified sequence
atgcagaccaaccagaccccacccacctacaacaagaccaacaagttcacctacggcttccagaacatcgtggatgcctatggaattggcacctaccgggagatcaacccagccccctacaccatcatcaccttccccttcctgtttgctgtgatgtttggagactttggccacggcatcctgatgaccctgtttgctgtgtggatggtgctgcgggagagccgcatcctgagccagaagaatgaaaatgagatgttcagcaccgtcttcagcggccgctacatcatcctgctgatgggcgtcttctccatgtacacaggcctcatctacaatgactgcttcagcaagagcctgaacatcttcggcagctcctggagcgtgcggcccatgttcacctacaactggacagaggagaccctgcggggcaaccctgtgctgcagctgaacccagccctgcccggggtgtttggaggcccctaccccttcggcatcgaccccatctggaacatcgccaccaacaagctgaccttcctgaacagcttcaagatgaagatgtctgtcatcctgggcatcatccacatgctgtttggagtgtccctgagcctcttcaaccacatctacttcaagaagcccctgaacatctacttcggcttcatccctgagatcatcttcatgaccagcctgtttggctacctggtgatcctgatcttctacaagtggacagcctatgatgcccacaccagtgaaaatgcccccagcctgctgatccacttcatcaacatgttcctgttctcctacccagagagcggctacagcatgctgtacagcggccagaagggcatccagtgcttcctggtggtggtggccctgctgtgtgtgccctggatgctgctcttcaagcccctggtgctgcggcggcagtacctgcggaggaagcacctgggcaccctgaactttggaggcatccgggtgggcaatggccccacagaagaagatgctgagatcatccagcacgaccagctgagcacccacagtgaagatgctgatgagcccagtgaagatgaggtgtttgattttggagacaccatggtgcaccaggccatccacaccatcgagtactgcctgggctgcatcagcaacacagccagctacctgcggctgtgggccctgagcctggcccacgcccagctgtctgaggtgctgtggaccatggtgatccacatcggcctgtctgtgaagagcctggccggcggcctggtgctcttcttcttcttcaccgcctttgccaccctgactgtggccatcctgctgatcatggagggcctgagcgccttcctgcacgccctgcggctgcactgggtggagttccagaacaagttctacagcggcaccggcttcaagttcctgcccttctcctttgagcacatccgggagggcaagtttgaggagtag

SEQ ID NO: 275195 - DNA, 1452 bp, Artificial Sequence
  derived and/or modified sequence
atgcagaccaaccagaccccccccacctacaacaagaccaacaagttcacatatgggttccagaatattgtggatgcctatggtattggaacttatcgcgagataaaccccgctccatacaccattataacatttccctttctattcgctgtgatgttcggggatttcggacatggcatcctaatgaccctgttcgctgtttggatggtgttgcgagaaagccgtattttgagtcagaaaaacgaaaatgagatgttttcaaccgtgttttctgggaggtacataattctgctgatgggcgtcttttcgatgtacactggcctcatttacaacgattgcttctcgaagtcacttaatatctttggcagttcctggtcagtgcgacctatgtttacatacaactggacggaagagacgctcagaggaaatcccgtactgcagctcaacccggccttgccaggagttttcggcgggccatacccctttggaatcgatcctatctggaacatcgcaacgaataagcttacctttcttaacagcttcaaaatgaagatgtccgtgattctgggcatcattcatatgctttttggcgtgtcacttagtctttttaatcatatatacttcaagaagccgctaaatatctattttggcttcataccagagattatcttcatgacgagcttattcggctacctggtgatcctcatcttctacaagtggacagcgtacgacgcccatacatccgagaatgcaccgtccttgctgattcattttataaatatgttcctgttcagctatccggaaagcgggtattctatgctctacagtgggcagaaagggatccagtgcttccttgtcgttgtggcattgctttgcgtgccttggatgctgctgtttaaaccactggttctgcgacgccaataccttcggcgaaagcatctgggaacgctcaacttcgggggtattcgggtgggaaatggcccgacagaagaagatgccgagatcatccaacacgatcaactgtccacccatagcgaagacgcagacgaaccctctgaggacgaagtctttgacttcggcgacacgatggtccaccaggcaatccacactattgagtactgcctcggatgcatctccaatactgcatcatacttgcgactctgggccctcagcctggcacacgctcagttgagcgaggttttgtggactatggtgatccacataggattatctgtcaagtccctcgccggcggactggtgctctttttcttttttactgctttcgcaactctgaccgtggcaatactgttgattatggagggcttgtccgcctttctgcacgccttgcgactccactgggttgagtttcagaacaaattctacagtgggaccgggttcaagttcctgccttttagtttcgaacacatccgagagggaaagttcgaagaatag

SEQ ID NO: 275196 - DNA, 1452 bp, Artificial Sequence
  derived and/or modified sequence
atgcagaccaaccagacacccccaacatacaacaagacgaacaagtttacctacggtttccagaatatagttgatgcctatggcattggcacctatcgggaaattaaccctgcgccttataccattatcactttccccttcctctttgcggtcatgtttggggactttggccacggcatcttaatgaccctatttgctgtatggatggttttgagagaatcccgtattctcagtcagaaaaatgaaaacgaaatgttctccacagtcttctctggcagatatattatactgcttatgggcgtgttttctatgtatactgggctgatatataatgactgttttagcaaaagcctcaatatctttggtagctcctggtctgtgaggcctatgtttacgtacaattggaccgaggagactcttcggggaaatcccgtactgcaactgaatccagctcttcccggagtattcgggggaccctaccccttcgggattgatcctatttggaacatagctacaaacaaacttactttcctcaatagtttcaaaatgaaaatgtcagttatcttgggtattattcatatgctgttcggtgtgtctttgtctcttttcaatcacatctatttcaagaagccgctcaacatttatttcggcttcatccctgaaatcattttcatgacttccctttttgggtatctcgtgatccttatcttctacaaatggaccgcctatgacgcccacacatctgagaacgccccttccctgctgatccattttatcaacatgttcctgttctcatatcctgaatctgggtattctatgctgtacagcggacaaaagggcattcaatgtttcctggtcgtggtggctctgctgtgcgttccctggatgttactattcaagccacttgtgctgcggcgtcagtacctccggaggaaacatctgggcacacttaatttcggcggaatccgcgtgggcaatggaccaactgaagaagacgccgagattattcagcacgaccagctgtctacacatagcgaggacgcggatgagccttcggaggacgaagtcttcgacttcggcgacactatggtgcatcaggcaatccacacaatcgaatactgtctcggctgtatctccaacactgcctcgtacttgcgactgtgggccttgagcctggctcatgcacagctgtctgaggtgctgtggaccatggtgatacatataggtctgagcgtgaagtccctggccggtgggctggtgttgttcttttttttcacggctttcgccactcttaccgttgccatcctgctgatcatggaaggcctgtcagcatttctgcacgccctccgattgcattgggtcgagttccagaacaaattttactcaggtacgggcttcaagttcctccccttctcttttgagcacattagagagggcaagttcgaagagtag

SEQ ID NO: 275197 - DNA, 3047 bp, Artificial Sequence
  derived and/or modified sequence
cggagggtgcgggtttggctgcggtggtttctgtggcggttgctgtggcggagtttggaggttggagagaaatccagtttgcactcagaaggggcacggaacacagtggttccactgtaccttccattttgaacaggatgcagacaaaccagactcccccaacctataacaaaaccaacaagtttacctatggctttcagaacatagtagatgcttatggaattggaacttaccgagagataaatccagctccgtatactattatcacgttcccttttctatttgctgtgatgtttggagacttcggtcatggcattttaatgaccctttttgctgtgtggatggtactgagggagagccggatcctttcccagaagaatgagaatgagatgtttagcactgtgttcagtggtcgatacattattttattgatgggtgtgttctccatgtacactggcctcatctacaatgattgcttttccaagtctcttaatatctttgggtcatcctggagtgtacggccgatgtttacttataattggactgaagagacgcttcgggggaaccctgttctacagctgaacccagccctccctggagtgtttggtggaccatacccttttggcattgatccaatttggaacattgctaccaataaactgacgttcttgaactcctttaagatgaagatgtctgttatccttggtatcatccatatgctgtttggagtcagcctgagtctgttcaaccatatctatttcaagaagcccctgaatatctactttggatttattcctgaaataatcttcatgacctctttgtttggctatttggttatccttattttttacaagtggacggcctatgatgctcatacctctgagaatgcaccaagccttctgatccatttcataaacatgttcctcttttcctacccagagtctggttattcaatgttgtattctggacagaaaggaattcagtgtttcctggtagtggttgcactactgtgtgtaccttggatgctgctgtttaaaccattggtccttcgccgtcagtatttgaggagaaagcatttgggaactctcaactttggtgggatcagggtgggcaacggaccgacagaggaggatgctgagattattcagcatgaccagctctccacccactcagaggacgcagacgagccttccgaggacgaagtgtttgactttggggacaccatggtccaccaggccatccacaccatcgagtactgcctgggctgcatctccaacactgcctcctacttgcggctctgggccctcagcctcgctcatgcgcagctgtctgaggtgctttggaccatggtgatccacatcggcctgagcgtgaagagcttggcgggaggtttggtgctgttcttcttcttcactgcctttgccaccctgaccgtggccatcctcctgatcatggagggcctctcggcctttctccacgcactgcgcttacactgggttgagttccagaataaattctacagcgggaccggtttcaagttcttacccttctccttcgagcatattcgggaagggaagtttgaagagtgagtccctgtgagggccgtgtgccccatgctaccctccccgcctccctccacagtgatcagctgtgcctctctgcctgttggttgtgatctgtgggcaccagctcattcgtgtcaccctgtctgtgagtcatttagatagaatagtcctccttgggtctcccaccacccctagctttgtgtgtagtgtagtgattttctggctgtcactcatactcactgggcaccagccttgccctcttagcctccatccatccagacagcccttcccacctcctggtggtgagccagtctgcattcccacgccatcccaaagccctttcatcttccccgtgcattgtagatggaaggagcacccatgccattcacatctagactttgagttccctgcatctgccaccgtagtttctagcaggagtagtggggggagtaatacagattcttccctagaaggggacactggtaacatgtcccactcttggattagcaggggtgggtccaggaagatgatatttgcgtcttttgcccacccccctggcattcagctggacccaactaggccatcatgagtggcttctccctgtcatccccaggggtcataggatatctacaccgcctttctgaccccaccctgcactcccatcctttcctctctccccgttcatgccctgcactacatagcacagccgggatgcttggaacagaggccttggctgctccgcagtgcacagggcttccctctctcggggttggcttcttcccaggccttgcatgggccctgcccacaagcacaccctcaggccgagggtgcagactgatgctcttccctgatggagaccctgagatcttccccacccccaatcatgatgtcttcagtgtgggactggggtcctcttggttctgcctgcagcctgcctggctccgcccctagtgccccctcctcaccacactggccccaggtctcaggaggggtgtcctgggcagggaaggtcagtgtcactgatggtttgctgtttggaagccattggcagggctgccgtgcatgtggctgtgagggctgcacagtcctgccaaggggcttcctccttgtcaccccgaaccttgtaatcgtgtgctggcgtggcagccctggctaagttaatccccaccgctttcagtggtagaaagaattccctgagtgggccaggctggtgccctcctcctaccctggcttttctgagtgagctgcctggagccctcatcccctctcccaggctgggctggccctgggcggggccactgtgtgctggcccactgtgacctgacccgaccttgtgcagcccccctgccctggtgtcctgggttttcgtgatgatctttgctctgtttccagtggggtttgaagcagagttcagggaaccctgcccaaggtcctcctgttcagacattcctatgttgaataaagtatgtttgacttccccgg

SEQ ID NO: 275198 - DNA, 1452 bp, Artificial Sequence
  derived and/or modified sequence
atgcagaccaaccagaccccccccacctacaacaagaccaacaagttcacctacggcttccagaacatcgtggacgcctacggcatcggcacctacagagagatcaaccccgccccctacaccatcatcaccttccccttcctgttcgccgtgatgttcggcgacttcggccacggcatcctgatgaccctgttcgccgtgtggatggtgctgagagagagcagaatcctgagccagaagaacgagaacgagatgttcagcaccgtgttcagcggcagatacatcatcctgctgatgggcgtgttcagcatgtacaccggcctgatctacaacgactgcttcagcaagagcctgaacatcttcggcagcagctggagcgtgagacccatgttcacctacaactggaccgaggagaccctgagaggcaaccccgtgctgcagctgaaccccgccctgcccggcgtgttcggcggcccctaccccttcggcatcgaccccatctggaacatcgccaccaacaagctgaccttcctgaacagcttcaagatgaagatgagcgtgatcctgggcatcatccacatgctgttcggcgtgagcctgagcctgttcaaccacatctacttcaagaagcccctgaacatctacttcggcttcatccccgagatcatcttcatgaccagcctgttcggctacctggtgatcctgatcttctacaagtggaccgcctacgacgcccacaccagcgagaacgcccccagcctgctgatccacttcatcaacatgttcctgttcagctaccccgagagcggctacagcatgctgtacagcggccagaagggcatccagtgcttcctggtggtggtggccctgctgtgcgtgccctggatgctgctgttcaagcccctggtgctgagaagacagtacctgagaagaaagcacctgggcaccctgaacttcggcggcatcagagtgggcaacggccccaccgaggaggacgccgagatcatccagcacgaccagctgagcacccacagcgaggacgccgacgagcccagcgaggacgaggtgttcgacttcggcgacaccatggtgcaccaggccatccacaccatcgagtactgcctgggctgcatcagcaacaccgccagctacctgagactgtgggccctgagcctggcccacgcccagctgagcgaggtgctgtggaccatggtgatccacatcggcctgagcgtgaagagcctggccggcggcctggtgctgttcttcttcttcaccgccttcgccaccctgaccgtggccatcctgctgatcatggagggcctgagcgccttcctgcacgccctgagactgcactgggtggagttccagaacaagttctacagcggcaccggcttcaagttcctgcccttcagcttcgagcacatcagagagggcaagttcgaggagtag

SEQ ID NO: 275199 - protein, 628 aa, Artificial Sequence
  derived and/or modified sequence
MFDGYDSCSEDTSSSSSSEESEEEVAPLPSNLPIIKNNGQVYTYPDGKSGMATCEMCGMVGVRDAFYSKTKRFCSVSCSRSYSSNSKKASILARLQGKPPTKKAKVLQKQPLVAKLAAYAQYQATLQNQAKTKAAVSMEGFSWGNYINSNSFIAAPVTCFKHAPMGTCWGDISENVRVEVPNTDCSLPTKVFWIAGIVKLAGYNALLRYEGFENDSGLDFWCNICGSDIHPVGWCAASGKPLVPPRTIQHKYTNWKAFLVKRLTGAKTLPPDFSQKVSESMQYPFKPCMRVEVVDKRHLCRTRVAVVESVIGGRLRLVYEESEDRTDDFWCHMHSPLIHHIGWSRSIGHRFKRSDITKKQDGHFDTPPHLFAKVKEVDQSGEWFKEGMKLEAIDPLNLSTICVATIRKVLADGFLMIGIDGSEAADGSDWFCYHATSPSIFPVGFCEINMIELTPPRGYTKLPFKWFDYLRETGSIAAPVKLFNKDVPNHGFRVGMKLEAVDLMEPRLICVATVTRIIHRLLRIHFDGWEEEYDQWVDCESPDLYPVGWCQLTGYQLQPPASQSSRENQSASSKQKKKAKSQQYKGHKKMTTLQLKEELLDGEDYNFLQGASDQESNGSANFYIKQEP

SEQ ID NO: 275200 - DNA, 5382 bp, Artificial Sequence
  derived and/or modified sequence
ggagggagggctatgctaatgttgttgatatcctggggccacccgagttaaaggggggaaatccgggggctgctgcacccgccaccggtctgggcccagccgggggccccctgtagtcgccgcagtcccggggagaggcacctgcccccagcccggggagggggcgccgcgggctcggggagcacggacaacccctacccatgaggccctgatggaaaacacaaaggatctgagtcggaagagacattagaggtcatccaaagcagccgtcccctctgcagcctctctgacaagtgactgaacattcttcacgatctgaaaggaaaagaagagattctttcgggatgtttgacggttatgatagctgcagtgaggacacaagcagcagctccagctccgaagagagtgaggaagaagtcgctcctttaccttctaatctcccgattatcaaaaacaatgggcaagtctacacatacccagatggtaaatctggcatggctacctgtgagatgtgtgggatggttggcgtccgagatgctttttactctaaaacaaagcgtttctgtagcgtttcatgttcaagaagttactcgtcaaactccaagaaggcaagcattttggccagacttcagggtaagcctccaacaaagaaagcaaaagttcttcagaaacaacctttagttgctaagctagccgcatatgctcagtatcaagctaccttgcaaaatcaagcaaagacaaaagcagcagtctccatggaaggtttcagctggggtaactacatcaatagcaatagctttatagcagctccggttacctgttttaaacatgcacctatggggacctgctggggtgatatctcagaaaatgtgagagtagaagttcccaatacagactgcagcctacctaccaaagtcttctggattgctggaattgtaaaattagcaggttacaatgcccttttaagatatgaaggatttgaaaatgactctggtctggacttctggtgcaatatatgtggttctgatatccatccagttggttggtgtgcagccagcggaaaacctcttgttcctcctagaactattcagcataaatatacaaactggaaagcttttctagtgaaacgacttactggtgccaaaacactgcctcctgatttctcccaaaaggtttcagagagtatgcagtatcctttcaaaccttgcatgagagtagaagtggttgacaagaggcatttgtgtcgaacacgagtagcagtggtggaaagtgtaattggaggaagattaagactagtgtatgaagaaagcgaagatagaacagatgacttctggtgccatatgcacagcccattaatacatcatattggttggtctcgaagcataggtcatcgattcaaaagatctgatattacaaagaaacaggatggacattttgatacaccaccacatttatttgctaaggtaaaagaagtagaccagagtggggaatggttcaaggaaggaatgaaattggaagctatagacccattaaatctttctacaatatgtgtcgcaaccattagaaaggtgctagctgacggattcctgatgattgggatcgatggctcagaagcagcagacggatctgactggttctgttaccatgcaacctctccttctattttccctgtcggtttctgtgaaattaacatgattgaacttactccacccagaggttacacaaaacttccttttaaatggtttgactacctcagggaaactggctccattgcagcaccagtaaaactatttaataaggatgttccaaatcacggatttcgtgtaggaatgaaattagaagcagtagatctcatggagccacgtttaatatgtgtagccacagtaactcgaattattcatcgtctcttgaggatacattttgatggatgggaagaagagtatgatcagtgggtagactgtgagtcacctgacctctatcctgtagggtggtgtcagttaactggatatcaactacagcctccagcatcacagtcatcaagagaaaaccaatcagcttcatcaaaacagaagaaaaaggctaagtcccagcaatacaaaggacataagaaaatgacaacactgcagctgaaggaggagttgctggatggagaggattataatttccttcaaggagcgtctgatcaggaaagcaatggctctgccaacttctacatcaaacaagagccatgaggtggcttagaaactgagggcgggtggggaaggattttacacaggactgatttataatcaatccagctgtacagggggctactctactgggacattttgctaaacatagaagatttcagttccagatttttcaggtgggtgggggagctattttagtcgggggggcaggggggtgggaaattttcaatttataaagatggacaatttttgtgttgtatttgaagcttttgaaagaattttgtaatattttccaagtttggatttatgtgcattgttaacaagaactgaaattctaacttttttggtaacattaaagtttaggtagcaggattgaaggaaatgatttaagaaggatatagctgttaaatgcaaatgaactgtcattacaaatgaacctttttggtacctgttgggagattttgggatttttagaagttaggccagtcacatctccagcttcttttgctgcagaaatatgcaactgaactcctcatggaggggtcatcaccacaaaggtcatggaagggtcattatttctcttgttggcattttattgcagcccattttaaatgtttgtacagaaatatttttcattctgtgaaaatttatttggagttctgtatgaaactggaagaactctggatacttttatatgttctcttttaattaaaaaaatgattagaattatcctaacactaaagtgttaaactggaatggttgacaagatattcaggatctcagtctacacattgaggggttggggaaaatgtaatgttgtccttagtttattttcctttctaaaaaaaataccccacgaaagggattctgatcagttctctgccatttccctctatctgtgaaataacagcttcgtataaccacaaccaaaaacagatgttctgtattaggagaatcgaattgaaagttattcaaagccaaaataagtttagatttcaaaatcattccagctctgcttttatctatcctggatttggtagaaaactaatttgaaagagaatttaattttcttaaaattccatatatatatatatatatatatatatatatatatatatatatatatatatataaaattgtctttaattgtattcaggatttattttaataataaccgatttggaccattttgaacattccctgttttaaaattcatatgacttccttttaaaaaaaaaaaaaggatacaagggtaaactggtgaaaggtttgctctctgcattttctaactttctactgagttgtgactgaatgagagcgctctagcgtttaccagtgaggttcataaactaaactctcaggaattaattgcatctgttctagaagtgcttctgggtcttagcctggcctcttcagagtggtaatattgaccatctcctctggaatataggtagggctaattagaaattaatcaaaatgattaacctctacagtccttcagcctatggaatgctttaaaaaatgttaatggaaagccccaggagaccattttaggtaagacttttgtttgaattttaaaatgcatagaacgttaaaaaaaaccagcaatttattttctaaaatattgctctacttttgggaataatagcattggtaatacgcacaggtttacctcattctatgcaagaggggttaataacataaggttttataatagctactggaagtaaaatttgttactttatagtgtaagaatgtatggaatcgcatgtcaccatttcttaatactgactctttaggggcataaatgcagatcacatcaacgcaagttgattctcatgtgtcaaatatatgtgaattcagctgttaaattactggatatttatcttaacattgctgagagggacctactgtaaatgtgacatcctcacacttcccatatctttaactttgaaaaatcttcttgtaaacttaaagcctagaagtattccaaagcaagggttagagcagtctttattctcaggctcactgaattaaacccaggactaattccacagcacaggcacaagaagcctgttgtgtagtgtactctgccagtaccttggatttaggagctccatggggaactgactaaaccaggagagagaggatttggagctagtcagtcctggtaatctatgaaatgctcatttatacccaggtttcataagcttccaattctatagcaaacccaggctctgagtgttttagaatttcctaattcatgaagtgtttcttgtcttgatcccgtgaccaacagttgaaggttggtaaggacttttctacagtctgaacacaacctaaagccctctttcattgttcacacactaactcctactgccgacgaaccgaaaaataattaatgcagaggagatttatgtcttagccataactccagttgtacaactcaatcgccccattctcttttacggttcaaaatgtactgctgaccttgggtttgtttttgttttgttttgtttttcctgttaggatttatttggggacttttggtagtttaaactctttaaccttttccttgccgtgtatgaggaaagctaaagctgttatcaacttcttattctacgatactaacacgggttttcagtgtttgtttgtttttattattattattaattttgcgtgatgtgaataccctctcccatcaatatttgtattatggtgctatatattggtaatgatcctttaatattgggaagggattttaaaaatactgtgattaaactgggtttcttcctttgattttcatattttaaataaagccacagtcatttatacaaaagaaaagcatctgtccctgggcaaatcttttgaggacagaggtcaaagtaaactgcataaggtttttacatcatttctgtatgtatttgatatatagatcaatatctgtacaaatttaatcttttattttcttggtaactcgtgatcattgagaaagtgtttgaaactttctcatgaagtgtatatataatggcgtgaaaaattcctttggaaaaatttatgttcctttcatttttaccaaattgcaaattttcagcatggatgtgaaaagcattaaaattataactttgtgtacaagatgaaaataattcactaaatttgcccttttttacacaaaataaaatgttaaagttaa

SEQ ID NO: 275201 - DNA, 5099 bp, Artificial Sequence
  derived and/or modified sequence
tctcttacttcaaagactgaacattcttcacgatctgaaaggaaaagaagagattctttcgggatgtttgacggttatgatagctgcagtgaggacacaagcagcagctccagctccgaagagagtgaggaagaagtcgctcctttaccttctaatctcccgattatcaaaaacaatgggcaagtctacacatacccagatggtaaatctggcatggctacctgtgagatgtgtgggatggttggcgtccgagatgctttttactctaaaacaaagcgtttctgtagcgtttcatgttcaagaagttactcgtcaaactccaagaaggcaagcattttggccagacttcagggtaagcctccaacaaagaaagcaaaagttcttcagaaacaacctttagttgctaagctagccgcatatgctcagtatcaagctaccttgcaaaatcaagcaaagacaaaagcagcagtctccatggaaggtttcagctggggtaactacatcaatagcaatagctttatagcagctccggttacctgttttaaacatgcacctatggggacctgctggggtgatatctcagaaaatgtgagagtagaagttcccaatacagactgcagcctacctaccaaagtcttctggattgctggaattgtaaaattagcaggttacaatgcccttttaagatatgaaggatttgaaaatgactctggtctggacttctggtgcaatatatgtggttctgatatccatccagttggttggtgtgcagccagcggaaaacctcttgttcctcctagaactattcagcataaatatacaaactggaaagcttttctagtgaaacgacttactggtgccaaaacactgcctcctgatttctcccaaaaggtttcagagagtatgcagtatcctttcaaaccttgcatgagagtagaagtggttgacaagaggcatttgtgtcgaacacgagtagcagtggtggaaagtgtaattggaggaagattaagactagtgtatgaagaaagcgaagatagaacagatgacttctggtgccatatgcacagcccattaatacatcatattggttggtctcgaagcataggtcatcgattcaaaagatctgatattacaaagaaacaggatggacattttgatacaccaccacatttatttgctaaggtaaaagaagtagaccagagtggggaatggttcaaggaaggaatgaaattggaagctatagacccattaaatctttctacaatatgtgtcgcaaccattagaaaggtgctagctgacggattcctgatgattgggatcgatggctcagaagcagcagacggatctgactggttctgttaccatgcaacctctccttctattttccctgtcggtttctgtgaaattaacatgattgaacttactccacccagaggttacacaaaacttccttttaaatggtttgactacctcagggaaactggctccattgcagcaccagtaaaactatttaataaggatgttccaaatcacggatttcgtgtaggaatgaaattagaagcagtagatctcatggagccacgtttaatatgtgtagccacagtaactcgaattattcatcgtctcttgaggatacattttgatggatgggaagaagagtatgatcagtgggtagactgtgagtcacctgacctctatcctgtagggtggtgtcagttaactggatatcaactacagcctccagcatcacagtcatcaagagaaaaccaatcagcttcatcaaaacagaagaaaaaggctaagtcccagcaatacaaaggacataagaaaatgacaacactgcagctgaaggaggagttgctggatggagaggattataatttccttcaaggagcgtctgatcaggaaagcaatggctctgccaacttctacatcaaacaagagccatgaggtggcttagaaactgagggcgggtggggaaggattttacacaggactgatttataatcaatccagctgtacagggggctactctactgggacattttgctaaacatagaagatttcagttccagatttttcaggtgggtgggggagctattttagtcgggggggcaggggggtgggaaattttcaatttataaagatggacaatttttgtgttgtatttgaagcttttgaaagaattttgtaatattttccaagtttggatttatgtgcattgttaacaagaactgaaattctaacttttttggtaacattaaagtttaggtagcaggattgaaggaaatgatttaagaaggatatagctgttaaatgcaaatgaactgtcattacaaatgaacctttttggtacctgttgggagattttgggatttttagaagttaggccagtcacatctccagcttcttttgctgcagaaatatgcaactgaactcctcatggaggggtcatcaccacaaaggtcatggaagggtcattatttctcttgttggcattttattgcagcccattttaaatgtttgtacagaaatatttttcattctgtgaaaatttatttggagttctgtatgaaactggaagaactctggatacttttatatgttctcttttaattaaaaaaatgattagaattatcctaacactaaagtgttaaactggaatggttgacaagatattcaggatctcagtctacacattgaggggttggggaaaatgtaatgttgtccttagtttattttcctttctaaaaaaaataccccacgaaagggattctgatcagttctctgccatttccctctatctgtgaaataacagcttcgtataaccacaaccaaaaacagatgttctgtattaggagaatcgaattgaaagttattcaaagccaaaataagtttagatttcaaaatcattccagctctgcttttatctatcctggatttggtagaaaactaatttgaaagagaatttaattttcttaaaattccatatatatatatatatatatatatatatatatatatatatatatatatatataaaattgtctttaattgtattcaggatttattttaataataaccgatttggaccattttgaacattccctgttttaaaattcatatgacttccttttaaaaaaaaaaaaaggatacaagggtaaactggtgaaaggtttgctctctgcattttctaactttctactgagttgtgactgaatgagagcgctctagcgtttaccagtgaggttcataaactaaactctcaggaattaattgcatctgttctagaagtgcttctgggtcttagcctggcctcttcagagtggtaatattgaccatctcctctggaatataggtagggctaattagaaattaatcaaaatgattaacctctacagtccttcagcctatggaatgctttaaaaaatgttaatggaaagccccaggagaccattttaggtaagacttttgtttgaattttaaaatgcatagaacgttaaaaaaaaccagcaatttattttctaaaatattgctctacttttgggaataatagcattggtaatacgcacaggtttacctcattctatgcaagaggggttaataacataaggttttataatagctactggaagtaaaatttgttactttatagtgtaagaatgtatggaatcgcatgtcaccatttcttaatactgactctttaggggcataaatgcagatcacatcaacgcaagttgattctcatgtgtcaaatatatgtgaattcagctgttaaattactggatatttatcttaacattgctgagagggacctactgtaaatgtgacatcctcacacttcccatatctttaactttgaaaaatcttcttgtaaacttaaagcctagaagtattccaaagcaagggttagagcagtctttattctcaggctcactgaattaaacccaggactaattccacagcacaggcacaagaagcctgttgtgtagtgtactctgccagtaccttggatttaggagctccatggggaactgactaaaccaggagagagaggatttggagctagtcagtcctggtaatctatgaaatgctcatttatacccaggtttcataagcttccaattctatagcaaacccaggctctgagtgttttagaatttcctaattcatgaagtgtttcttgtcttgatcccgtgaccaacagttgaaggttggtaaggacttttctacagtctgaacacaacctaaagccctctttcattgttcacacactaactcctactgccgacgaaccgaaaaataattaatgcagaggagatttatgtcttagccataactccagttgtacaactcaatcgccccattctcttttacggttcaaaatgtactgctgaccttgggtttgtttttgttttgttttgtttttcctgttaggatttatttggggacttttggtagtttaaactctttaaccttttccttgccgtgtatgaggaaagctaaagctgttatcaacttcttattctacgatactaacacgggttttcagtgtttgtttgtttttattattattattaattttgcgtgatgtgaataccctctcccatcaatatttgtattatggtgctatatattggtaatgatcctttaatattgggaagggattttaaaaatactgtgattaaactgggtttcttcctttgattttcatattttaaataaagccacagtcatttatacaaaagaaaagcatctgtccctgggcaaatcttttgaggacagaggtcaaagtaaactgcataaggtttttacatcatttctgtatgtatttgatatatagatcaatatctgtacaaatttaatcttttattttcttggtaactcgtgatcattgagaaagtgtttgaaactttctcatgaagtgtatatataatggcgtgaaaaattcctttggaaaaatttatgttcctttcatttttaccaaattgcaaattttcagcatggatgtgaaaagcattaaaattataactttgtgtacaagatgaaaataattcactaaatttgcccttttttacacaaaataaaatgttaaagtt

SEQ ID NO: 275202 - DNA, 1887 bp, Artificial Sequence
  derived and/or modified sequence
atgttcgacggctatgactcatgcagtgaggatacaagttcgtccagttccagcgaggagagtgaggaggaagttgcaccactcccctcaaatctgcccattataaaaaacaacggccaagtgtacacatatcctgatggaaagtcggggatggctacctgtgagatgtgcggcatggtgggagtgcgcgacgccttttactcgaaaaccaagaggttttgctctgttagttgctctagatcttattccagcaattccaaaaaagcaagcattctggccagattacaggggaagcctccaactaagaaagctaaagtcctccagaagcaacctttagtcgctaaactggccgcatacgcccagtaccaagccaccctccagaatcaggccaagacaaaagctgcagtgtctatggaaggattctcctggggaaactatattaacagcaattccttcatcgccgcacccgtcacgtgctttaagcacgccccgatggggacgtgttggggcgacatctctgaaaatgtgcgagtagaggtgcccaatactgactgcagcctgcccacaaaggtgttctggattgctggtattgtgaagctggccggctacaacgctctgctgcgctatgaaggctttgaaaatgactccgggctcgatttctggtgcaacatatgtggctccgatatacaccctgtgggctggtgcgctgcttctggaaaacctctcgtcccaccccggacaatccaacataagtataccaactggaaggctttccttgtgaaacgactgaccggcgctaaaacattgcccccagatttttcccagaaggtgagtgaatctatgcagtatccattcaagccatgtatgagggttgaggtcgtagataaaagacatctgtgccgaaccagggtcgctgtcgtggagtctgtgatcggcggtaggctgaggctcgtgtatgaggaatctgaggaccggacagatgatttctggtgccacatgcactcacctctgattcatcacattgggtggagccgatccatcggccatcgcttcaaacggtccgatatcacaaagaagcaagatggccacttcgataccccaccgcatcttttcgccaaggtgaaagaggtagaccagagcggcgagtggtttaaagaggggatgaagctggaggccatcgatcccctgaacctgagtacaatttgtgttgccactatcaggaaagtgctggctgacggatttctaatgattggaatcgacggaagtgaggccgccgatggctccgattggttctgttatcacgcaacttcaccctccatttttccagttggcttctgtgagattaatatgattgagctcacaccccctcgtggctatacgaagctcccctttaaatggttcgactacctaagagaaacaggatctatcgctgcaccggtgaagctcttcaacaaggatgtgccgaatcacggatttagagtggggatgaagctcgaggccgtggatctcatggaaccacgactcatctgcgtggccactgtcaccagaattattcatcggctcctccgtatccattttgacggttgggaggaggagtatgaccagtgggtagattgtgagagccctgacctataccccgttggctggtgccagctcacaggttaccagcttcagcctcctgcatcacagagcagtagggagaaccagagcgcttcctcaaagcagaagaaaaaagcaaagtcacagcaatataaaggtcacaagaaaatgacaacactgcagctgaaagaagaacttctggatggggaagattacaatttccttcagggcgcctccgatcaggaaagtaatggctccgccaacttctacataaagcaggaaccctag

SEQ ID NO: 275203 - DNA, 1887 bp, Artificial Sequence
  derived and/or modified sequence
atgtttgacggctacgatagctgcagtgaagatactagttcctcaagctccagcgaggagagcgaggaggaagtggctcctttacccagcaacctgccaatcattaaaaataacggccaggtttacacttatccagatgggaaatccgggatggccacctgcgaaatgtgtggcatggtcggcgtaagagacgccttctatagcaaaactaaacggttttgtagcgtttcgtgttccagatcttatagttccaattctaagaaagcctcaattctcgcccgactccagggaaagcctcccactaagaaggcaaaggtgcttcagaagcagcccctcgtcgctaagctagccgcttatgctcaatatcaggcaactttacaaaaccaggccaagaccaaggccgccgtctctatggaaggcttttcctggggcaactatataaatagcaatagctttatagccgcccccgtgacctgctttaagcatgcaccaatgggaacgtgctggggcgacatctcagagaatgtacgggttgaggtccccaacacagattgtagcttgccaactaaggtcttctggattgccggtattgtgaagcttgcagggtacaatgccctgctgagatacgaagggtttgaaaacgattcaggtctcgatttctggtgcaacatttgtgggtctgacatccaccctgtgggctggtgtgccgccagtggaaagccactggtgcccccacgcactatacagcacaagtatactaattggaaggcgtttcttgtgaaaagactgacaggtgccaagacccttcctcccgacttctcacagaaagtaagcgaaagtatgcagtatcccttcaaaccctgcatgcgggtggaggtagtggataagcggcatctgtgcagaacccgcgtcgccgtcgtagagtctgtgattggcggacggctgcgccttgtgtacgaggagagcgaggatcgcacagatgatttttggtgtcacatgcattccccccttatacaccacattggctggagcaggtcgattgggcatcgcttcaaacgctctgacattactaaaaaacaggacggacacttcgatacccccccacacctattcgcaaaagtcaaggaggttgaccagtcaggcgaatggtttaaggaggggatgaaactcgaagccattgacccacttaatctgtcaaccatttgcgtggcaaccattaggaaagtgctcgccgatggcttcctgatgatcggtatcgatgggagcgaagcagccgacggatccgactggttctgttaccacgccactagccctagtattttcccagtgggcttctgtgagattaacatgatcgagctgacccccccgcgaggatacacaaaacttcctttcaagtggtttgactacctgagagaaacaggaagtatcgcggcacccgtaaaactttttaataaagacgttccaaaccacggctttagagtggggatgaagctggaggcagtggacctgatggaaccacgactgatctgcgtggcgacagtcactaggatcatccatagactgcttcgaatacattttgatggctgggaagaagaatacgaccaatgggttgactgcgaaagccccgatttgtatccggttggatggtgtcagctcacaggatatcagttgcagccaccagcatcccagagtagcagagagaaccagtctgctagctccaaacaaaagaagaaggctaagagtcagcagtacaaggggcacaagaagatgactacattgcagctgaaagaagagctgcttgacggagaagattacaatttcctgcagggcgcttctgaccaagagtctaacggctccgcgaatttctatataaaacaggagccctag

SEQ ID NO: 275204 - DNA, 1887 bp, Artificial Sequence
  derived and/or modified sequence
atgttcgacggctacgattcttgttcagaggatacatcctcttccagcagctcggaggagagtgaagaagaggtcgcccccctaccgagcaatctcccaattatcaaaaataatggacaggtgtatacctatcctgacggcaaatcaggcatggcaacctgcgagatgtgcggaatggtgggggtgcgggatgcgttttacagtaaaaccaaacggttttgttcggttagttgctcgcggtcatactccagcaacagtaagaaggcctccatcctggctcggctccagggaaaaccccctactaagaaagctaaggtgctgcagaaacagcctttggtggccaagttagcggcctacgcgcagtatcaggcaacactacagaatcaggcaaaaacaaaggcagccgtttctatggaaggattctcctggggaaactatatcaactcgaacagtttcatcgctgcccccgtcacctgcttcaagcatgctcccatgggcacttgctggggtgacattagcgagaacgtccgcgtagaagtccccaataccgactgctcattgcctaccaaggttttctggattgcaggaatcgtcaagctggctgggtacaacgcactcttaagatatgagggctttgagaatgactcaggcctggacttctggtgcaatatatgcggttcagacattcatcccgtgggctggtgcgccgcgtctggtaaacctcttgtacctccccgaactattcagcataagtacacgaattggaaagcctttcttgtgaaaaggctgacgggcgccaaaacactgccgccagactttagccagaaggtttctgaatctatgcagtatccttttaagccctgtatgcgcgtagaggtggtggacaagagacatctctgccggacccgggtagctgttgtggagtccgttatcggcggtaggttgaggctcgtatatgaggaaagcgaggatagaaccgatgacttctggtgtcacatgcactctcccctcatccaccatataggctggtcgaggtccatagggcataggttcaaaaggtctgatatcacgaaaaagcaggatgggcattttgacactccccctcatctgttcgctaaggtgaaggaggtagatcagtccggcgagtggttcaaagagggaatgaagctcgaggccatcgaccctctgaacctcagtacaatctgtgttgccactatcaggaaagtactcgctgatggctttctcatgatagggattgacgggagcgaggctgctgatggaagcgattggttttgctatcatgccactagcccatccatcttccctgtggggttttgtgagataaatatgatcgaactgacccccccacgaggctatacaaaacttccttttaaatggttcgactatctgcgggagaccggaagcattgcggctcccgtcaaacttttcaacaaggacgtcccaaaccacgggtttcgagtagggatgaaactggaagccgtggacctcatggagccgcggctgatctgcgttgccactgtcaccaggatcatacacagactgctcagaatacactttgacggttgggaagaagaatatgaccagtgggtcgattgcgaaagccctgatctgtacccagttggctggtgccagctgaccggctatcagctccagccacccgcaagccaaagttcaagagaaaatcagtctgctagctccaaacagaagaaaaaagccaaaagccaacaatacaaaggccacaaaaagatgacaactctgcaactaaaggaagagctgctggacggggaagattataacttcctgcagggagcatcagaccaggagtctaatgggagtgcaaacttctatataaaacaagagccctag

SEQ ID NO: 275205 - DNA, 1887 bp, Artificial Sequence
  derived and/or modified sequence
atgtttgatggctatgacagctgcagcgaggacaccagcagcagcagcagcagcgaggagagcgaggaggaggtggcccccctgcccagcaacctgcccatcatcaagaacaacggccaggtgtacacctacccagatggcaagagcggcatggccacctgtgagatgtgtggcatggtgggcgtgagagatgccttctacagcaagaccaagcgcttctgcagcgtgtcctgcagccgcagctacagcagcaacagcaagaaggccagcatcctggcccggctgcagggcaagccacccaccaagaaggccaaggtgctgcagaagcagcccctggtggccaagctggccgcctatgcccagtaccaggccaccctgcagaaccaggccaagaccaaggctgctgtgtccatggagggcttctcctggggcaactacatcaacagcaacagcttcatcgccgcccctgtgacctgcttcaagcacgcccccatgggcacctgctggggagacatcagtgaaaatgtgcgggtggaggtgcccaacacagactgcagcctgcccaccaaggtgttctggattgctggcatcgtgaagctggccggctacaatgccctgctgcgctatgagggctttgaaaatgacagcggcctggacttctggtgcaacatctgtggcagtgacatccaccctgtgggctggtgtgccgccagcggcaagcccctggtgccccccaggaccatccagcacaagtacaccaactggaaggccttcctggtgaagaggctgaccggggccaagaccctgcccccagacttcagccagaaggtgtctgagagcatgcagtaccccttcaagccctgcatgagggtggaggtggtggacaagaggcacctgtgcaggaccagggtggccgtggtggagagcgtgattggaggccgcctgcggctggtgtatgaggagagcgaggacagaacagatgacttctggtgccacatgcacagccccctcatccaccacatcggctggagccgcagcatcggccaccgcttcaagagaagtgacatcaccaagaagcaggacggccactttgacaccccaccccacctgtttgccaaggtgaaggaggtggaccagagcggggagtggttcaaggagggcatgaagctggaggccatcgaccccctgaacctgagcaccatctgtgtggccaccatcaggaaggtgctggctgatggcttcctgatgattggaattgatggcagcgaggccgcagatggcagtgactggttctgctaccacgccaccagccccagcatcttccctgtgggcttctgtgagatcaacatgattgagctgaccccaccccggggctacaccaagctgcccttcaagtggtttgactacctgcgggagaccggcagcattgctgcccctgtgaagctgttcaacaaggatgtgcccaaccacggcttccgggtgggcatgaagctggaggccgtggacctgatggagcccaggctcatctgtgtggccaccgtgacccgcatcatccaccggctgctgcgcatccactttgatggctgggaggaggagtatgaccagtgggtggactgtgagagcccagacctgtaccctgtgggctggtgccagctgaccggctaccagctgcagcccccagccagccagagcagccgggagaaccagagcgccagcagcaagcagaagaagaaggccaagagccagcagtacaagggccacaagaagatgaccaccctgcagctgaaggaggagctgctggatggagaggactacaacttcctgcagggcgccagtgaccaggagagcaatggaagtgccaacttctacatcaagcaggagccctag

SEQ ID NO: 275206 - DNA, 1887 bp, Artificial Sequence
  derived and/or modified sequence
atgttcgacggctacgacagctgcagcgaggacaccagcagcagcagttcatctgaggagagcgaggaggaggtagctcccctcccaagcaatctgcccatcatcaaaaataacggccaggtgtatacttaccccgacggcaaaagcggaatggccacctgcgaaatgtgcggaatggttggagtgagagacgcattctacagtaagacaaagaggttctgcagtgtttcttgttcccgatcatacagcagtaatagcaagaaagcgagtatcctggcacgccttcagggcaagccacctacaaaaaaggccaaagttctgcagaagcagcctctagtggctaaactggctgcctatgcgcaatatcaagcgactctgcagaatcaagcgaaaacaaaagcagcagtgtcgatggagggattctcttggggaaattatatcaactcaaacagtttcattgcagcacccgtcacgtgttttaagcacgccccaatgggaacctgctggggagacatctccgaaaatgtgcgggtggaggtcccaaacacagattgctccctgcctacgaaggttttttggattgcaggcatagtcaaacttgccgggtataacgcgctccttagatacgaagggttcgagaatgattcaggactggatttctggtgtaatatttgtggatcggacatccatccagtgggctggtgcgccgccagtgggaagcccttggtgccccctcggacgatccagcacaagtataccaattggaaggcttttctcgttaaacgactcacaggggccaaaaccctgccacctgacttttcgcagaaggtatccgaatctatgcagtacccctttaaaccttgcatgcgagtggaggtggtggataagcgacatctctgccgcacccgagtggcagtggtggagtcggtgattggagggaggttgcgtctcgtctatgaggagtcagaggatcgcaccgacgacttttggtgccatatgcacagcccacttatccaccacattggatggtctaggagcatcggacatcggtttaagcgcagcgatataactaagaagcaggatggccacttcgacactccaccgcacctgtttgcaaaagtgaaagaagtggaccagagtggcgaatggttcaaagagggcatgaagctggaagctatcgatcctttgaacctctcaaccatctgtgtggccaccatccgcaaagtgctagcagacggcttcctgatgattggcatagatggctccgaagccgccgacggttccgactggttttgttaccatgccacttctccgagtattttcccagtcgggttctgtgagattaatatgatcgagctcacgccaccacggggatataccaagctgcctttcaaatggttcgactaccttcgtgaaacggggagtatcgctgcccccgtcaagctcttcaacaaagatgtgcctaaccacggattccgagttggcatgaagctggaggctgtggacctcatggagccaagactcatttgcgtcgccaccgttactaggatcattcaccgactgctgcggatccacttcgatggatgggaggaggaatacgaccagtgggtagactgtgaatctcccgacctgtatcctgtgggatggtgccagctgacggggtaccagcttcagccccctgctagccagtcatccagagaaaaccagtccgcatctagtaaacaaaaaaagaaagccaaatctcagcaatacaaaggccataagaagatgacaacactacagctcaaggaggagttgcttgacggcgaggattataattttctgcagggggcctccgaccaggagagtaacggatcagccaacttctacataaagcaggagccttag

SEQ ID NO: 275207 - DNA, 1887 bp, Artificial Sequence
  derived and/or modified sequence
atgttcgacggctacgacagctgcagcgaggacaccagcagcagcagttcctcagaagagagcgaagaggaggtggcccccttgccaagcaacctgccgatcatcaagaacaacggacaggtgtacacctacccagacgggaagagtggcatggccacctgcgaaatgtgtgggatggtgggtgtgcgcgacgctttctatagcaaaacaaagcggttctgctccgttagctgttcccggtcatacagctctaatagcaaaaaagcatccatactcgcccgcctgcaagggaaacctcctactaagaaggctaaagtattgcagaaacaaccactcgtggccaagctggcagcttatgcacaatatcaggccacattacagaaccaagccaagacgaaggcagcagtgtccatggagggttttagctggggaaattatattaacagcaactctttcatcgcagcgcctgttacgtgttttaaacacgcccctatgggcacctgctggggagatatcagcgagaatgtgagggtggaagttcccaataccgattgcagcctgcccactaaggtgttctggatcgccggaattgtcaaactcgctggctacaacgcgttacttcgctatgaaggcttcgaaaatgactcaggtctggatttctggtgtaatatctgtggatctgacattcatccggtgggctggtgtgccgcttctggcaagcccctcgttcctcccaggacaattcagcacaagtacaccaactggaaggcgtttttggtcaagcggttaactggagctaagacgcttccacccgacttttcacagaaggtgtccgagagcatgcagtatccattcaagccatgtatgcgcgtagaagtcgtcgataagaggcacttgtgtagaacccgcgtggctgtggtcgagtcggtgatcggggggaggctgagactggtgtatgaagagtccgaggataggaccgacgacttttggtgccacatgcattctccactgatccaccacatcggctggagtagatcaatcgggcatcggttcaaacggagcgacatcactaaaaagcaagacggccacttcgatacccctccccacctcttcgccaaggtcaaggaggtagatcagagtggcgagtggtttaaagaaggaatgaaattagaggcaattgaccctcttaatctgtctaccatttgtgtggccacaataagaaaggtgctcgcagacggctttctcatgatcggaatcgatggatctgaagcagcggatggatccgactggttttgctatcatgccacctcaccctctatcttccccgtgggattttgcgaaattaacatgattgagcttaccccgcccagggggtacactaagctgccatttaaatggttcgactaccttcgcgaaactggcagtatcgctgcccccgtaaaactgtttaataaagatgtgcccaaccacggcttccgtgtggggatgaaacttgaggcagtggacctcatggagcccagactcatatgcgtggctaccgtcacaagaattattcacaggcttcttcgtatacacttcgacggatgggaagaagaatatgaccagtgggttgactgtgagtctcctgatctgtatccagtaggatggtgtcagcttactggctaccaactccagccaccggcctcgcaatctagtcgggagaaccagagcgcttccagcaaacagaagaaaaaagcgaagagccagcaatacaaggggcacaaaaagatgacaacactccagttgaaggaggagctcctggatggggaggactacaattttctccaaggagcgtcggaccaggagtcgaacggtagtgcgaatttttatatcaagcaggagccctag

SEQ ID NO: 275208 - DNA, 1887 bp, Artificial Sequence
  derived and/or modified sequence
atgttcgacggctacgacagctgcagcgaggacaccagcagcagcagctcatcagaggaatcagaagaagaggtagcaccactcccaagtaatttgccaattattaagaataatggccaggtgtacacctatccagacggcaaaagtggaatggccacttgtgaaatgtgtggcatggtcggggtacgagatgctttctacagcaagaccaaacgattctgttccgtttcatgcagccgatcttattcctcaaacagcaaaaaggctagtatactagctaggctccagggcaaacctccaaccaaaaaggcgaaggtccttcagaaacaacctctggtagccaagctggcggcttatgcccagtatcaggccacactccaaaaccaggcaaagacgaaggctgctgtgagcatggaaggattttcttggggtaattatattaactccaactcattcattgctgccccagtgacatgtttcaaacatgcccctatggggacctgttggggtgatatcagtgagaacgtgcgggtagaagttcctaacaccgactgcagtttacccaccaaggttttctggatcgctggaatcgtgaagctagctggttacaatgcactcctccgctacgagggtttcgaaaacgattcaggtctcgacttctggtgcaacatttgcggcagtgacattcaccccgtggggtggtgtgccgctagcggcaaacctctcgtcccaccgaggacgattcaacataaatatactaattggaaggcgttcctcgtaaagcggctgaccggagctaaaacactccccccggatttttcccagaaggtcagcgagagtatgcagtacccctttaaaccatgtatgagggttgaggtggtcgacaaacgccacctctgtaggacccgggtggccgttgtggagtcagtgatcggcggtcggcttcgactcgtgtatgaagagtctgaggacagaacagatgacttctggtgtcacatgcatagcccactgatccatcatattggatggtccaggagcatcggccaccggttcaagagaagcgacatcacaaaaaaacaggacggtcattttgacacacctcctcaccttttcgctaaagttaaggaggtggaccaaagcggagaatggttcaaggaggggatgaagttggaagcaatcgacccgctcaatctgagcaccatctgcgtcgcaacaatccggaaggtgctcgctgatggctttctgatgatcggaatcgacgggtctgaagccgcagacggtagcgactggttctgttatcatgccacaagtccatctatattcccggttggcttctgcgaaattaacatgatcgagctcaccccccctaggggttacacgaaacttcctttcaaatggtttgattatttgcgggaaactggctccattgcagctccagtcaagctgtttaataaagacgtcccgaaccatggctttcgagtgggcatgaagctggaggctgtggacttaatggaaccccggctaatatgcgtggcgacagttactcggatcatacaccgactgctgagaattcactttgacgggtgggaggaggaatacgaccaatgggttgattgcgaatcaccggacctctatccagtaggttggtgtcagttgaccggttaccagttacagccccccgcctcacagtcatcccgggagaaccagagtgcatctagcaagcagaagaaaaaggctaagagccaacagtataagggacacaagaagatgactacactgcagctaaaggaagaactgctggatggtgaggactacaacttcctccaaggcgcctctgatcaggagtccaatgggagcgccaatttctacatcaagcaggagccctag

SEQ ID NO: 275209 - DNA, 1887 bp, Artificial Sequence
  derived and/or modified sequence
atgttcgacggatacgactcttgttccgaggatacctcaagcagctcatcatccgaggaaagtgaggaagaagtggctcctttgccaagcaacttaccaattattaagaataatggccaggtgtatacatacccagatggcaagagtgggatggccacttgcgagatgtgtggaatggtaggagtgcgcgatgccttttattccaagaccaaacgattttgcagcgtctcgtgcagccgcagttactctagcaactccaaaaaagccagcattctggcaaggctgcaggggaaaccccctacaaagaaggctaaagtattgcagaagcagcccctcgtagctaaactggctgcgtacgctcagtaccaagctaccttacagaatcaggccaagacaaaggcggcagtttccatggagggatttagttgggggaattatataaacagcaacagttttatcgctgcccctgtgacctgctttaaacacgcgcctatgggaacctgttggggcgatatttctgaaaatgtccgcgtggaagtacctaataccgactgttccttgccaacaaaagtgttctggattgctgggatcgttaagctcgccggatacaatgcccttcttagatacgaagggtttgaaaacgattcaggattagacttttggtgtaacatctgtggcagtgacatccatccagtgggatggtgcgcagcatccggcaaaccactggtgcctccgaggacaatacaacacaagtatacaaactggaaagcattcctggtcaagcggctcaccggtgcgaagactctccctcccgactttagtcagaaggttagtgaaagcatgcagtatcccttcaagccctgtatgcgcgtggaagtagttgataagaggcacctgtgtagaactcgtgtagccgtcgtggaaagcgttatcggaggaaggttacggctcgtgtacgaggagagcgaggataggacagacgacttctggtgtcacatgcattctccgcttatacatcacattggctggtctcgtagcattggtcacaggttcaaaaggagcgacattaccaaaaagcaagacgggcacttcgatactcctccccatttgttcgctaaggtcaaggaggtagatcaaagtggagaatggtttaaggagggaatgaaactagaggccatcgatcctctgaatctctcaaccatctgcgtggctacgatccgaaaggtactggcggatggtttcctgatgattggaatcgatggatccgaggcggcagatggtagtgactggttctgctaccacgcaacttctccctcaatcttccctgtgggcttctgcgaaataaatatgatcgaactgaccccaccaagagggtatacaaaactgccatttaagtggtttgactacctccgcgaaacgggtagcattgccgcacccgtgaaactctttaacaaggacgttccaaatcatgggtttcgggttggtatgaagctggaagctgtagacttaatggaacccagactgatctgtgtggccaccgtgacacggattatacaccgcctgctgaggatccatttcgacggttgggaggaagaatatgatcagtgggttgattgcgaaagcccagatctgtatcctgtggggtggtgtcagttgacggggtaccagctgcaacctccagcttcacagtcatctagagaaaaccagtccgcttcgagtaagcagaaaaagaaggccaagtcccagcaatacaaagggcacaaaaaaatgacaacgctccaactcaaggaggagcttctggacggagaggattacaactttctgcagggggcatcagaccaggagtcgaatgggtcagctaacttctatattaagcaggaaccttag

SEQ ID NO: 275210 - DNA, 1887 bp, Artificial Sequence
  derived and/or modified sequence
atgtttgacgggtatgacagctgttctgaggatacgagcagttcgagtagctcggaggagtccgaggaagaggtggctcctctgccctctaatctgccgatcatcaagaataatggtcaagtctacacctacccggacgggaagtccggcatggccacatgcgagatgtgtggaatggtgggggtccgcgacgccttctacagtaagactaaaagattttgctccgttagttgttctaggtcatactccagcaattcgaagaaggcatcaattttggctcggctgcaaggaaaaccccctacaaagaaagccaaagtcctccagaagcaaccattagtagctaagctggcagcctacgcccagtatcaggctaccctccaaaaccaggcgaaaaccaaagctgcagtgagtatggaaggcttctcttggggcaactacataaattccaactcttttatcgccgcaccagtcacgtgtttcaaacacgcgccaatgggaacatgctggggtgacatcagcgagaacgttcgcgtcgaggtgcccaatacggactgtagcctgcctactaaggtcttctggatcgccggaattgtcaagcttgctggatacaatgcgctgctgcgttacgaaggctttgagaatgactcaggattggatttctggtgtaatatatgtggaagcgatatccacccagtgggatggtgcgctgccagtgggaaaccactggtgccaccacggaccatccagcacaagtacaccaattggaaagcctttttggtcaagcgcttgacaggtgctaagaccctgcctcctgatttttcccagaaagtgagtgagagcatgcagtaccccttcaaaccgtgcatgcgcgttgaggtggttgacaagaggcacctctgtcggacccgcgtagctgtggtggaaagcgtgataggcggacgacttcggcttgtgtacgaggaatcagaggataggactgacgacttttggtgccacatgcactcacccctgattcaccatatcgggtggtccaggagtatcgggcaccgcttcaaacggagcgatatcacaaagaagcaggacggccacttcgataccccaccacacttgtttgcaaaggtgaaggaagttgatcagtcgggagagtggtttaaagaggggatgaaattggaggctatagatcctctgaatttgagcacaatttgtgttgccaccattagaaaggtgcttgctgacggctttctgatgatcgggatagatgggagcgaggctgctgacggcagcgattggttttgctaccacgccactagtccatccatcttcccagttggattctgtgaaataaacatgatagagctgactcctcctagaggatataccaagttacccttcaagtggttcgactatctgagggagaccggtagtattgccgcacctgtgaagctcttcaacaaagatgtccccaaccatggatttcgagtggggatgaagttggaggccgtcgatctgatggagccaaggctgatttgtgtggcaactgttacccgaattatacatcggttgctacgcattcatttcgacggttgggaagaagagtacgatcagtgggtagattgtgagagccctgatttataccccgtaggatggtgtcaattgacagggtaccagttgcagcccccagcgtcccagagttcacgtgaaaaccaatcagctagttctaaacagaagaagaaagccaaatcccagcagtacaaaggtcataagaaaatgacaacgctccagctgaaagaggaactcctcgacggcgaggactacaacttcttacagggtgccagtgaccaagaatctaacggcagtgccaacttctacattaaacaggagccctag

SEQ ID NO: 275211 - DNA, 1887 bp, Artificial Sequence
  derived and/or modified sequence
atgttcgatggatacgacagttgcagtgaagacacctcaagctcctcttcctctgaagaaagtgaggaagaggtggcacctcttccgtcaaacctgccaattatcaagaataacggacaggtttatacttatccagatgggaagtccggtatggccacctgtgaaatgtgtggcatggtgggtgtccgtgacgcattctactcgaagactaagcggttctgctctgtctcttgctccaggtcctactcatctaattctaagaaagccagcattctcgcacggctccaggggaagcctccaactaaaaaggccaaagttctccaaaaacaacccttggttgctaagctcgccgcttacgcacagtaccaggcgactcttcaaaaccaggccaaaaccaaggcagccgtatctatggagggcttctcctgggggaactacattaatagtaactcctttattgccgctccagttacctgtttcaagcacgcacccatgggcacgtgctggggtgatatatctgagaacgtgcgagtagaggtaccaaacacggactgcagcctgcctacaaaggtattctggatcgccggtatcgtgaaacttgcagggtataacgcgctgctgaggtacgagggttttgagaacgactccggactggacttttggtgcaatatttgtggatcagacatccatcctgtgggctggtgcgccgcttctggcaagcccctcgttccacccaggacaattcaacacaagtatactaactggaaagctttcctcgttaagcgtctgacgggagccaagactctgcccccagacttctctcaaaaagtgagcgaaagcatgcagtatccctttaaaccatgcatgcgcgttgaggttgtagacaaaagacatctgtgtcgcactagggtagccgtggtcgaaagcgtgatcgggggaagactgagactggtatatgaggagagcgaagatagaaccgacgacttctggtgtcatatgcatagccctctcatccatcacatcggctggtccaggagtatcggtcatagattcaagcggtctgacataaccaaaaagcaagatggtcacttcgatactccccctcacttgtttgccaaggtaaaggaggtggatcagtccggggaatggtttaaggagggaatgaagctcgaggcaatcgatcctctgaatttgagcactatatgcgtcgctaccatccggaaagtgctggctgacgggtttctaatgattggcatcgatgggagtgaggcagccgatgggagcgactggttttgttatcacgcaacctctccctccatttttcccgtaggcttctgtgaaattaacatgatagaattgacaccccctcgcggttatactaaactcccattcaagtggtttgactatctacgcgaaaccggctcaattgcagcgcctgtgaagttatttaacaaggacgttcccaaccacggttttagagtggggatgaagctggaagccgttgacttgatggagccaaggttgatctgcgtggccaccgtaactcgtatcatccaccggttgctgcgcatacattttgatggatgggaggaagagtacgatcagtgggttgactgcgaatccccggatctgtaccctgtgggttggtgccaattgactggctatcaactgcagccacccgcatctcagagctcccgcgaaaaccagtcggcatcctccaaacagaagaagaaggctaagagtcagcagtacaagggacataagaagatgaccacacttcagctgaaagaagaacttctcgatggtgaggactataactttctacagggcgcatcggaccaagagtctaacggttctgcaaacttttatataaagcaagaaccttag

SEQ ID NO: 275212 - DNA, 1887 bp, Artificial Sequence
  derived and/or modified sequence
atgttcgacggctacgacagctgcagcgaggacaccagcagcagcagcagcagcgaggagagcgaggaggaggtggcccccctgcccagcaacctgcccatcatcaagaacaacggccaggtgtacacctaccccgacggcaagagcggcatggccacctgcgagatgtgcggcatggtgggcgtgagagacgccttctacagcaagaccaagagattctgcagcgtgagctgcagcagaagctacagcagcaacagcaagaaggccagcatcctggccagactgcagggcaagccccccaccaagaaggccaaggtgctgcagaagcagcccctggtggccaagctggccgcctacgcccagtaccaggccaccctgcagaaccaggccaagaccaaggccgccgtgagcatggagggcttcagctggggcaactacatcaacagcaacagcttcatcgccgcccccgtgacctgcttcaagcacgcccccatgggcacctgctggggcgacatcagcgagaacgtgagagtggaggtgcccaacaccgactgcagcctgcccaccaaggtgttctggatcgccggcatcgtgaagctggccggctacaacgccctgctgagatacgagggcttcgagaacgacagcggcctggacttctggtgcaacatctgcggcagcgacatccaccccgtgggctggtgcgccgccagcggcaagcccctggtgccccccagaaccatccagcacaagtacaccaactggaaggccttcctggtgaagagactgaccggcgccaagaccctgccccccgacttcagccagaaggtgagcgagagcatgcagtaccccttcaagccctgcatgagagtggaggtggtggacaagagacacctgtgcagaaccagagtggccgtggtggagagcgtgatcggcggcagactgagactggtgtacgaggagagcgaggacagaaccgacgacttctggtgccacatgcacagccccctgatccaccacatcggctggagcagaagcatcggccacagattcaagagaagcgacatcaccaagaagcaggacggccacttcgacacccccccccacctgttcgccaaggtgaaggaggtggaccagagcggcgagtggttcaaggagggcatgaagctggaggccatcgaccccctgaacctgagcaccatctgcgtggccaccatcagaaaggtgctggccgacggcttcctgatgatcggcatcgacggcagcgaggccgccgacggcagcgactggttctgctaccacgccaccagccccagcatcttccccgtgggcttctgcgagatcaacatgatcgagctgaccccccccagaggctacaccaagctgcccttcaagtggttcgactacctgagagagaccggcagcatcgccgcccccgtgaagctgttcaacaaggacgtgcccaaccacggcttcagagtgggcatgaagctggaggccgtggacctgatggagcccagactgatctgcgtggccaccgtgaccagaatcatccacagactgctgagaatccacttcgacggctgggaggaggagtacgaccagtgggtggactgcgagagccccgacctgtaccccgtgggctggtgccagctgaccggctaccagctgcagccccccgccagccagagcagcagagagaaccagagcgccagcagcaagcagaagaagaaggccaagagccagcagtacaagggccacaagaagatgaccaccctgcagctgaaggaggagctgctggacggcgaggactacaacttcctgcagggcgccagcgaccaggagagcaacggcagcgccaacttctacatcaagcaggagccctag

SEQ ID NO: 275213 - DNA, 300 bp, Artificial Sequence
  derived and/or modified sequence
gccctggacgtggccgtgaagaccttcccccccgagagacacgtggccgtgaagtgcttcggcaagaagaaggagaagaagaacaacgccaacagccccgccagcgtgagcaaccccaccgtgaccaagcacgccttcggcatggaggaggagctgcagagagagggcagcatcgagaccctgagcaacagcagcggcagcaccagcggcagcatccccagaaacttcgacggctacagaagccccctgcccaccaacgagagccagcccctgagcctgttccccaccggcttcccctag

SEQ ID NO: 275214 - DNA, 2121 bp, Artificial Sequence
  derived and/or modified sequence
atgaacgaggccatggccaccgacagccccagaagacccagcagatgcaccggcggcgtggtggtgagaccccaggccgtgaccgagcagagctacatggagagcgtggtgaccttcctgcaggacgtggtgccccaggcctacagcggcacccccctgaccgaggagaaggagaagatcgtgtgggtgagattcgagaacgccgacctgaacgacaccagcagaaacctggagttccacgagatccacagcaccggcaacgagccccccctgctgatcatgatcggctacagcgacggcatgcaggtgtggagcatccccatcagcggcgaggcccaggagctgttcagcgtgagacacggccccatcagagccgccagaatcctgcccgccccccagttcggcgcccagaagtgcgacaacttcgccgagaagagacccctgctgggcgtgtgcaagagcatcggcagcagcggcaccagccccccctactgctgcgtggacctgtacagcctgagaaccggcgagatggtgaagagcatccagttcaagacccccatctacgacctgcactgcaacaagagaatcctggtggtggtgctgcaggagaagatcgccgccttcgacagctgcaccttcaccaagaagttcttcgtgaccagctgctacccctgccccggccccaacatgaaccccatcgccctgggcagcagatggctggcctacgccgagaacaagctgatcagatgccaccagagcagaggcggcgcctgcggcgacaacatccagagctacaccgccaccgtgatcagcgccgccaagaccctgaagagcggcctgaccatggtgggcaaggtggtgacccagctgaccggcaccctgcccagcggcgtgaccgaggacgacgtggccatccacagcaacagcagaagaagccccctggtgcccggcatcatcaccgtgatcgacaccgagaccgtgggcgagggccaggtgctggtgagcgaggacagcgacagcgacggcatcgtggcccacttccccgcccacgagaagcccgtgtgctgcatggccttcaacaccagcggcatgctgctggtgaccaccgacaccctgggccacgacttccacgtgttccagatcctgacccacccctggagcagcagccagtgcgccgtgcaccacctgtacaccctgcacagaggcgagaccgaggccaaggtgcaggacatctgcttcagccacgactgcagatgggtggtggtgagcaccctgagaggcaccagccacgtgttccccatcaacccctacggcggccagccctgcgtgagaacccacatgagccccagagtggtgaacagaatgagcagattccagaagagcgccggcctggaggagatcgagcaggagctgaccagcaagcagggcggcagatgcagccccgtgcccggcctgagcagcagccccagcggcagccccctgcacggcaagctgaacagccaggacagctacaacaacttcaccaacaacaaccccggcaaccccagactgagccccctgcccagcctgatggtggtgatgcccctggcccagatcaagcagcccatgaccctgggcaccatcaccaagagaaccggcccctacctgttcggcgccggctgcttcagcatcaaggccccctggagctacatcatgaccaagtacatcttctacatcaagccccccaacaaggtgaagccccccccccagatcagccccagcaagagcatgggcggcgagttctgcgtggccgccatcttcggcaccagcagaagctggttcgccaacaacgccggcctgaagagagagaaggaccagagcaagcaggtggtggtggagagcctgtacatcatcagctgctacggcaccctggtggagcacatgatggagcccagacccctgagcaccgcccccaagatcagcgacgacacccccctggagatgatgaccagccccagagccagctggaccctggtgagaaccccccagtggaacgagctgcagccccccttcaacgccaaccaccccctgctgctggccgccgacgccgtgcagtactaccagttcctgctggccggctag

SEQ ID NO: 275215 - DNA, 2808 bp, Artificial Sequence
  derived and/or modified sequence
atgaacgaggccatggccaccgacagccccagaagacccagcagatgcaccggcggcgtggtggtgagaccccaggccgtgaccgagcagagctacatggagagcgtggtgaccttcctgcaggacgtggtgccccaggcctacagcggcacccccctgaccgaggagaaggagaagatcgtgtgggtgagattcgagaacgccgacctgaacgacaccagcagaaacctggagttccacgagatccacagcaccggcaacgagccccccctgctgatcatgatcggctacagcgacggcatgcaggtgtggagcatccccatcagcggcgaggcccaggagctgttcagcgtgagacacggccccatcagagccgccagaatcctgcccgccccccagttcggcgcccagaagtgcgacaacttcgccgagaagagacccctgctgggcgtgtgcaagagcatcggcagcagcggcaccagccccccctactgctgcgtggacctgtacagcctgagaaccggcgagatggtgaagagcatccagttcaagacccccatctacgacctgcactgcaacaagagaatcctggtggtggtgctgcaggagaagatcgccgccttcgacagctgcaccttcaccaagaagttcttcgtgaccagctgctacccctgccccggccccaacatgaaccccatcgccctgggcagcagatggctggcctacgccgagaacaagctgatcagatgccaccagagcagaggcggcgcctgcggcgacaacatccagagctacaccgccaccgtgatcagcgccgccaagaccctgaagagcggcctgaccatggtgggcaaggtggtgacccagctgaccggcaccctgcccagcggcgtgaccgaggacgacgtggccatccacagcaacagcagaagaagccccctggtgcccggcatcatcaccgtgatcgacaccgagaccgtgggcgagggccaggtgctggtgagcgaggacagcgacagcgacggcatcgtggcccacttccccgcccacgagaagcccgtgtgctgcatggccttcaacaccagcggcatgctgctggtgaccaccgacaccctgggccacgacttccacgtgttccagatcctgacccacccctggagcagcagccagtgcgccgtgcaccacctgtacaccctgcacagaggcgagaccgaggccaaggtgcaggacatctgcttcagccacgactgcagatgggtggtggtgagcaccctgagaggcaccagccacgtgttccccatcaacccctacggcggccagccctgcgtgagaacccacatgagccccagagtggtgaacagaatgagcagattccagaagagcgccggcctggaggagatcgagcaggagctgaccagcaagcagggcggcagatgcagccccgtgcccggcctgagcagcagccccagcggcagccccctgcacggcaagctgaacagccaggacagctacaacaacttcaccaacaacaaccccggcaaccccagactgagccccctgcccagcctgatggtggtgatgcccctggcccagatcaagcagcccatgaccctgggcaccatcaccaagagaaccggcaaggtgaagccccccccccagatcagccccagcaagagcatgggcggcgagttctgcgtggccgccatcttcggcaccagcagaagctggttcgccaacaacgccggcctgaagagagagaaggaccagagcaagcaggtggtggtggagagcctgtacatcatcagctgctacggcaccctggtggagcacatgatggagcccagacccctgagcaccgcccccaagatcagcgacgacacccccctggagatgatgaccagccccagagccagctggaccctggtgagaaccccccagtggaacgagctgcagccccccttcaacgccaaccaccccctgctgctggccgccgacgccgtgcagtactaccagttcctgctggccggcctggtgccccccggcagccccggccccatcaccagacacggcagctacgacagcctggccagcgaccacagcggccaggaggacgaggagtggctgagccaggtggagatcgtgacccacaccggcccccacagaagactgtggatgggcccccagttccagttcaagaccatccaccccagcggccagaccaccgtgatcagcagcagcagcagcgtgctgcagagccacggccccagcgacaccccccagcccctgctggacttcgacaccgacgacctggacctgaacagcctgagaatccagcccgtgagaagcgaccccgtgagcatgcccggcagcagcagacccgtgagcgacagaagaggcgtgagcaccgtgatcgacgccgccagcggcaccttcgacagaagcgtgaccctgctggaggtgtgcggcagctggcccgagggcttcggcctgagacacatgagcagcatggagcacaccgaggagggcctgagagagagactggccgacgccatggccgagagccccagcagagacgtggtgggcagcggcaccgacaccgccctggacgtggccgtgaagaccttcccccccgagagacacgtggccgtgaagtgcttcgagctgcagagagagggcagcatcgagaccctgagcaacagcagcggcagcaccagcggcagcatccccagaaacttcgacggctacagaagccccctgcccaccaacgagagccagcccctgagcctgttccccaccggcttcccctag

SEQ ID NO: 275216 - DNA, 986 bp, Artificial Sequence
  derived and/or modified sequence
gcccttgacgtagcagtaaaaaccttcccccctgagagacacgtggcagtgaagtgttttggaaaaaaaaaggaaaaaaaaaacaatgccaacagcccagcgtccgtgagcaacccaacagtaacaaagcatgcgttcgggatggaggaagaacttcagcgagagggaagcatcgagactctgagtaacagctcaggctccaccagcggcagcataccaagaaactttgatggctaccgatctccgctgcccaccaatgagagccagcccctcagcctcttcccgactggcttcccgtaggtaccagcaacctgcttctgactggccagccccctcccctgctggaggaggggagaagccccgctctggtcctacccttcagtctctgctcttccttcatcaaccaccttccccaagcttagtgacagcagccgcccatcctacctggatggagaagagacccttctccaagcacctcagcgcacttgccctctgccacacctgtcggtggaggctgtggccaggagagactgtagaagctcggtccctgtgtatgtttgcatatgacatcctgcattggatccgcttttgtattttttaaccatacccacggtggggcgggtggggggagcctggaacagtgaccagatctgggggcctgagtggggacagagttgatcgtccacctggccattttgaccctgagtggacagtcacagcctcagctcatgtctggctgtgacacacactgcccccagcttcccttggtcagccccactccagcacggggtgaacggaggcccagagtactagggaaggaggaagggaggacatgcctcttcttcctcctttctttccccatctgttcatgggaagagtttgtctttcttatctttaagcccctttaccctggtcctgtactgatcagtgaaggaaaccgtggttactgaggccctgttgaaaagtgcacgtcttgtccaataaat

SEQ ID NO: 275217 - DNA, 300 bp, Artificial Sequence
  derived and/or modified sequence
gccctcgacgtggcagtgaagaccttccctccagaacgtcacgtggccgtgaagtgctttgggaaaaagaaagagaaaaagaataacgctaacagtcccgcatcagtttcaaatcccactgtaaccaagcatgccttcggaatggaagaagaactgcagcgcgagggcagtatcgagacattgagcaattcaagcggttctactagcggatccattcccaggaactttgatggatatagaagtcctttacctacgaacgagtcccagccgttgtccctgttcccgacgggattcccgtag

SEQ ID NO: 275218 - DNA, 2121 bp, Artificial Sequence
  derived and/or modified sequence
atgaatgaggctatggccaccgattctcctcggaggcccagtcggtgtacaggcggggtggtcgtgaggccccaggctgttaccgaacagtcatatatggaatcagtggtgacattccttcaagatgtggtgccacaagcctattctggaactcctctgactgaggagaaagaaaagatcgtctgggtgaggttcgagaacgcagatctcaatgacacatctcgcaatttggagttccacgagatccattctactggaaacgagcctcctctgcttatcatgattgggtattccgacggcatgcaggtgtggtccattccgatttctggagaagcccaggaactattttctgtaagacacggccctatccgggccgcgcgaatcctcccagccccacagttcggtgcacagaagtgcgacaattttgccgagaaacgcccactgctgggggtctgcaaatcaattggctcttccggcacaagcccgccatactgttgcgtggacctgtatagcctgcgcaccggcgagatggtgaagtcgatacagtttaaaactcccatatacgatctccactgtaacaaacgtatcctcgttgttgtattgcaggaaaaaattgccgcattcgattcttgcacttttacgaaaaagttcttcgttacctcatgttacccatgtcccggcccaaatatgaaccctattgcccttgggagtcggtggctggcttatgccgaaaacaaactgattcgttgccaccaatccagaggcggcgcctgtggggataatatccagtcctacacagctacggttatctctgccgcaaaaacccttaaatcagggctgacgatggttggaaaagtggtgacccagctgacagggacactaccgtccggggtgacagaagacgatgtggctattcacagcaacagtagacgcagtccactcgtcccagggatcattactgtaattgataccgaaaccgtgggagagggccaggtgctggttagcgaggactccgattccgacggaatcgtggctcatttcccagcccacgaaaagcctgtgtgctgcatggcttttaacacctctggcatgcttctggtgaccacagacaccctgggccatgacttccacgtgtttcaaattctaactcacccatggtcaagctcccaatgcgccgtccatcacctgtacacactgcaccggggcgagaccgaagcgaaggtgcaggacatctgtttctcacatgactgtcgctgggtggtggttagcacgctgcgtggtactagccatgtgtttccaatcaatccatatggcggacagccttgtgtcaggacccacatgtccccgcgagtggtgaataggatgtccagatttcagaagagtgccggcctagaggagatcgagcaggagttaacgtcaaaacaggggggtcggtgttcgcccgtccccgggctaagtagttccccaagcggaagtcccctccacgggaaactaaatagtcaagattcatataacaatttcacaaacaataatcctggcaacccccgcttatctccgttacccagcctgatggtggtgatgcccctcgcacagattaaacagcccatgacgctgggaacgattaccaaacgcaccggaccgtacctgtttggagccggctgctttagtataaaggctccctggtcctacataatgaccaaatacatcttttacatcaagcccccgaataaagttaaacctccacctcagatttctcctagtaagtcaatgggcggagagttttgcgtcgcggccattttcggcacaagtcgatcttggtttgccaacaatgctggcctgaagcgagaaaaggaccaatccaagcaggtcgttgtggagagtctgtacattatcagctgctatggcactttggttgagcacatgatggagccaaggcccctgtcaacggctcccaagatctccgatgatacccctctcgaaatgatgacttcaccaagagcaagctggacattggtgaggacccctcaatggaacgaattacagccccccttcaacgccaaccacccgctactactagcagcagacgccgtacaatactaccaattcctacttgcaggctag

SEQ ID NO: 275219 - DNA, 2808 bp, Artificial Sequence
  derived and/or modified sequence
atgaatgaggcaatggccactgatagtcctagacgccctagccgctgcactggtggagtggttgtgagacctcaggctgtgacagaacaaagttacatggagtccgtagtgactttcctgcaggacgtcgtcccccaggcctatagcggaactcccctgactgaggagaaagaaaagatagtttgggttcgattcgaaaatgccgatctgaatgacacatccagaaaccttgagttccatgagatacactcgaccggtaatgagccacctctgcttataatgattggatactctgatggcatgcaggtctggagtattcccatttctggagaagcccaggagttattttcagtgaggcatgggcccatcagagccgcacgaattctgcccgcaccgcagtttggcgcccagaagtgtgacaacttcgctgaaaaaaggcccttactgggggtttgcaaaagtattggctcaagtggaacttctccaccctactgttgtgtggacctgtactccttgagaactggggagatggtaaaaagtatccagttcaagacccctatctatgaccttcactgcaataaacggatcttagtggtggttttgcaagaaaagattgctgccttcgactcctgtactttcactaagaaattctttgtgacctcctgctatccttgtcccgggcctaacatgaatccaattgctctcggaagcagatggctggcctatgcagagaacaaactgatccgctgccaccagagcagggggggcgcatgtggtgacaacatccagtcgtacacagccacagttatttccgctgctaagacacttaagagtggtttgactatggttggcaaggtggtgacccagctcacaggcacactaccaagcggggtcactgaagacgacgtggctatccatagtaactcccgtcgaagcccactggtgcctgggattattaccgtcatagacaccgagaccgtgggcgaaggccaggtgctggtgtccgaggattccgatagtgacggcatcgtcgcacacttccctgctcacgagaagcctgtgtgctgtatggcttttaacacctctgggatgctcctcgttactaccgacacactgggtcacgacttccatgttttccagatcctcacccatccctggagctcctcacaatgcgccgtgcaccacctgtatactcttcataggggcgaaactgaggcgaaagtgcaggacatttgcttcagtcacgattgtagatgggtcgtggtgagcaccctgagggggacttcgcacgtgttccctatcaatccctacggaggtcagccctgtgtgagaacacacatgtctcccagagtggttaatcgaatgtcacgtttccagaaaagcgctgggttggaagagatcgaacaggagctgacatccaaacaagggggcagatgttcacctgtgccaggattgagttcttcacctagcgggtcacctctccacggcaagctgaattctcaggattcttacaataatttcaccaataacaaccctggaaaccctcgccttagccccttgcccagcctgatggtcgtcatgccgttggcgcagattaaacagcccatgaccctgggaaccatcaccaagagaactggtaaagtgaagccacccccacagatttcaccctctaagagtatgggcggcgagttctgcgttgctgctatcttcgggacctcacggagctggttcgctaacaatgccggactgaagagggaaaaggatcagagcaagcaagttgtagtggagagtctgtatattatcagctgttacgggacactagtcgagcatatgatggagccaagacccctgagtactgcgcccaagatcagcgacgacacaccgttggagatgatgacctctccacgtgcatcttggacactggtgcgaacccctcaatggaacgagctgcagcctcctttcaacgcaaaccacccattactgctcgccgccgatgccgtgcagtattatcagttcctgctggccggactggttcctccgggatcaccgggccctattactagacatggatcttatgatagcctcgcaagcgaccatagcggtcaggaagacgaagaatggctgagtcaagttgaaattgttacccacactggcccacaccgacgcctatggatgggtccccagtttcagttcaagactatacacccatctgggcaaaccacagtcatttctagcagctcttccgtactccagtcgcatggcccaagcgatacgccgcagcctctgttggatttcgacacagacgatcttgacctcaatagtcttagaatccagcctgttagaagcgaccccgtgtcaatgccgggatcttccagacccgtctccgaccggcgcggtgtgtcaactgtgatagacgcagccagtgggacatttgaccgaagcgttacccttctggaggtgtgcggcagctggcccgaagggtttgggcttcgacatatgtcctctatggagcatacagaggagggcctgagagaaagattagcagatgccatggccgaatccccatccagagacgttgtcggtagcgggacagacaccgcattggatgtggcagtcaagactttcccccccgagcgccacgtggctgtgaagtgctttgaactccagcgagaagggtctattgaaacactgagcaatagcagtggttccacctctggtagcatccctagaaatttcgacggctaccgctctcctcttccgaccaacgagtcacagcctttgtcactgtttcccaccggttttccctag

SEQ ID NO: 275220 - DNA, 300 bp, Artificial Sequence
  derived and/or modified sequence
gccctggatgtggccgtgaagaccttccccccagagcggcacgtggccgtgaagtgcttcggcaagaagaaggagaagaagaacaatgccaacagccctgcctctgtgagcaaccccaccgtgaccaagcacgccttcggcatggaggaggagctgcagcgggagggcagcattgagaccctgagcaacagcagcggcagcaccagcggcagcatccccaggaactttgatggctaccgcagccccctgcccaccaatgaaagccagcccctgagcctcttccccaccggcttcccctag

SEQ ID NO: 275221 - DNA, 2121 bp, Artificial Sequence
  derived and/or modified sequence
atgaatgaggccatggccacagacagcccccggcggcccagccgctgcacaggaggagtggtggtgcggccccaggccgtgacagagcagagctacatggagagcgtggtgaccttcctgcaggatgtggtgccccaggcctacagcggcacccccctgacagaggagaaggagaagatcgtgtgggtgcgctttgaaaatgctgacctgaatgacaccagcaggaacctggagttccacgagatccacagcactggaaatgaaccacccctgctgatcatgattggctacagtgatggcatgcaggtgtggagcatccccatctctggagaggcccaggagctgttctctgtgcgccacggccccatccgggccgcccgcatcctgcctgccccccagtttggagcccagaagtgtgacaactttgctgagaagaggcccctgctgggcgtgtgcaagagcatcggcagcagcggcaccagccccccctactgctgcgtggacctgtacagcctgaggactggagagatggtgaagagcatccagttcaagacccccatctatgacctgcactgcaacaagaggatcctggtggtggtgctgcaggagaagattgctgcctttgacagctgcaccttcaccaagaagttctttgtgaccagctgctacccctgccccggccccaacatgaaccccatcgccctgggcagccgctggctggcctatgcagagaacaagctgatccgctgccaccagagcagaggaggagcctgtggggacaacatccagagctacacagccaccgtcatctctgctgccaagaccctgaagagcggcctgaccatggtgggcaaggtggtgacccagctgaccggcaccctgcccagcggcgtgacagaagatgatgtggccatccacagcaacagccgccgcagccccctggtgcccggcatcatcaccgtcatcgacacagagaccgtgggggagggccaggtgctggtgtctgaggacagcgacagtgatggcatcgtggcccacttccctgcccacgagaagcctgtgtgctgcatggccttcaacaccagcggcatgctgctggtgaccacagacaccctgggccatgacttccacgtgttccagatcctgacccacccctggagcagcagccagtgtgctgtgcaccacctgtacaccctgcacagaggagaaacagaggccaaggtgcaggacatctgcttcagccatgactgccgctgggtggtggtgtccaccctgcggggcaccagccacgtgttccccatcaacccctatggaggccagccctgtgtgaggacccacatgagcccccgggtggtgaacaggatgagccgcttccagaagtctgctggcctggaggagattgagcaggagctgaccagcaagcagggcggccgctgcagccctgtgcccggcctgagcagcagccccagcggcagccccctgcacggcaagctgaacagccaggacagctacaacaacttcaccaacaacaaccctggcaacccccggctgagccccctgcccagcctgatggtggtgatgcccctggcccagatcaagcagcccatgaccctgggcaccatcaccaagaggacaggcccctacctgtttggagctggctgcttcagcatcaaggccccctggagctacatcatgaccaagtacatcttctacatcaagccacccaacaaggtgaagcccccaccccagatcagccccagcaagtccatgggcggggagttctgtgtggccgccatcttcggcaccagccgctcctggtttgccaacaatgccggcctgaagcgggagaaggaccagagcaagcaggtggtggtggagagcctgtacatcatcagctgctacggcaccctggtggagcacatgatggagccccggcccctgagcacagcccccaagatcagtgatgacacccccctggagatgatgaccagcccccgggcctcctggaccctggtgaggaccccccagtggaatgagctgcagccccccttcaatgccaaccaccccctgctgctggccgcagatgctgtgcagtactaccagttcctgctggccggctag

SEQ ID NO: 275222 - DNA, 2808 bp, Artificial Sequence
  derived and/or modified sequence
atgaatgaggccatggccacagacagcccccggcggcccagccgctgcacaggaggagtggtggtgcggccccaggccgtgacagagcagagctacatggagagcgtggtgaccttcctgcaggatgtggtgccccaggcctacagcggcacccccctgacagaggagaaggagaagatcgtgtgggtgcgctttgaaaatgctgacctgaatgacaccagcaggaacctggagttccacgagatccacagcactggaaatgaaccacccctgctgatcatgattggctacagtgatggcatgcaggtgtggagcatccccatctctggagaggcccaggagctgttctctgtgcgccacggccccatccgggccgcccgcatcctgcctgccccccagtttggagcccagaagtgtgacaactttgctgagaagaggcccctgctgggcgtgtgcaagagcatcggcagcagcggcaccagccccccctactgctgcgtggacctgtacagcctgaggactggagagatggtgaagagcatccagttcaagacccccatctatgacctgcactgcaacaagaggatcctggtggtggtgctgcaggagaagattgctgcctttgacagctgcaccttcaccaagaagttctttgtgaccagctgctacccctgccccggccccaacatgaaccccatcgccctgggcagccgctggctggcctatgcagagaacaagctgatccgctgccaccagagcagaggaggagcctgtggggacaacatccagagctacacagccaccgtcatctctgctgccaagaccctgaagagcggcctgaccatggtgggcaaggtggtgacccagctgaccggcaccctgcccagcggcgtgacagaagatgatgtggccatccacagcaacagccgccgcagccccctggtgcccggcatcatcaccgtcatcgacacagagaccgtgggggagggccaggtgctggtgtctgaggacagcgacagtgatggcatcgtggcccacttccctgcccacgagaagcctgtgtgctgcatggccttcaacaccagcggcatgctgctggtgaccacagacaccctgggccatgacttccacgtgttccagatcctgacccacccctggagcagcagccagtgtgctgtgcaccacctgtacaccctgcacagaggagaaacagaggccaaggtgcaggacatctgcttcagccatgactgccgctgggtggtggtgtccaccctgcggggcaccagccacgtgttccccatcaacccctatggaggccagccctgtgtgaggacccacatgagcccccgggtggtgaacaggatgagccgcttccagaagtctgctggcctggaggagattgagcaggagctgaccagcaagcagggcggccgctgcagccctgtgcccggcctgagcagcagccccagcggcagccccctgcacggcaagctgaacagccaggacagctacaacaacttcaccaacaacaaccctggcaacccccggctgagccccctgcccagcctgatggtggtgatgcccctggcccagatcaagcagcccatgaccctgggcaccatcaccaagaggacaggcaaggtgaagcccccaccccagatcagccccagcaagtccatgggcggggagttctgtgtggccgccatcttcggcaccagccgctcctggtttgccaacaatgccggcctgaagcgggagaaggaccagagcaagcaggtggtggtggagagcctgtacatcatcagctgctacggcaccctggtggagcacatgatggagccccggcccctgagcacagcccccaagatcagtgatgacacccccctggagatgatgaccagcccccgggcctcctggaccctggtgaggaccccccagtggaatgagctgcagccccccttcaatgccaaccaccccctgctgctggccgcagatgctgtgcagtactaccagttcctgctggccggcctggtgcccccaggcagccctggccccatcaccaggcatggcagctatgacagcctggccagtgaccacagcggccaggaggatgaggagtggctgagccaggtggagatcgtgacccacacaggcccccaccggcggctgtggatgggcccccagttccagttcaagaccatccaccccagcggccagaccaccgtcatcagcagcagcagctctgtgctgcagagccacggccccagcgacaccccccagcccctgctggactttgacacagatgacctggacctgaacagcctgcgcatccagcctgtgcggagtgaccctgtgtccatgcctggcagcagcaggcctgtgtctgacagaagaggagtgtccacagtgattgatgctgccagcggcacctttgacagatctgtgaccctgctggaggtgtgtggctcctggccagagggcttcggcctgcggcacatgagctccatggagcacacagaggagggcctgcgggagcggctggctgatgccatggccgagagccccagcagagatgtggtgggcagcggcacagacacagccctggatgtggccgtgaagaccttccccccagagcggcacgtggccgtgaagtgctttgagctgcagcgggagggcagcattgagaccctgagcaacagcagcggcagcaccagcggcagcatccccaggaactttgatggctaccgcagccccctgcccaccaatgaaagccagcccctgagcctcttccccaccggcttcccctag

SEQ ID NO: 275223 - DNA, 300 bp, Artificial Sequence
  derived and/or modified sequence
gccctggacgtggccgtgaagaccttcccccccgagcggcacgtggctgtaaaatgttttgggaaaaaaaaggagaagaagaataacgctaactcccctgcttctgtgtctaacccaaccgtgaccaaacacgcgtttggaatggaggaggagttgcagagagagggaagcattgaaaccctttctaactccagtggcagtacgtcaggatccatcccacgaaactttgacggctacaggagcccactcccaacgaatgagtcccagcccctcagtctcttccctacaggatttccttag

SEQ ID NO: 275224 - DNA, 2121 bp, Artificial Sequence
  derived and/or modified sequence
atgaacgaggccatggccaccgacagcccccggcggcccagccggtgcaccgggggggtcgttgtccggccacaggcagtaacagaacagtcgtatatggagtcagtggtgacgttccttcaagatgtggttcctcaggcctactcaggcacaccattgacggaggaaaaagaaaagattgtgtgggtgcggttcgagaacgcggatctgaatgatacgagccgaaatctcgagtttcacgagatacatagtactggtaacgagccaccactgttgataatgattggctattccgacggtatgcaggtgtggtccatacctatcagtggagaggctcaggagttatttagcgtccgccatggccccatccgggccgcccggatacttcctgctccccagttcggggcccagaagtgtgataactttgccgagaagagacccctactgggcgtgtgcaaaagtatagggagttcaggtacatcacctccctattgctgcgtggacctatattcattgcggactggcgaaatggtgaagagtatacagtttaagacccccatttatgatttgcactgtaataaacggattcttgtggtggtccttcaggagaaaattgccgcattcgacagctgtacattcaccaaaaaattcttcgtgaccagttgctacccctgccccggtcctaacatgaaccctatcgccctgggttcccgatggctggcttacgccgaaaacaagttaatacgctgtcatcagagtcgtggaggcgcttgtggggacaatatccagtcctacaccgccacggtgatttccgccgccaagaccttgaaatcgggtctgactatggtggggaaggtcgtgacacagcttaccggtactttgccatcaggggtgactgaagatgatgtcgcaatccacagcaattctaggcgcagtcccctggtgcctggcatcattaccgtcattgatacagaaaccgttggtgaaggacaggtccttgtgagcgaagattcagactctgatggaatcgtggcccactttccagcccatgagaagcccgtgtgctgtatggccttcaataccagtggcatgctcctggtcactaccgatacactgggtcatgatttccatgtgtttcagattctcacccacccatggtccagtagccaatgtgcggtgcatcacctgtatacactgcatcgcggagagacggaagctaaagttcaggacatctgtttcagccacgactgtagatgggtggtggtatctaccctgcgcgggactagccatgtgtttccgataaatccatacggcggccagccttgcgtgaggacgcatatgtcacctagagtggtgaacagaatgagcagatttcagaagtctgccggcctcgaagaaatcgagcaggaacttacttcgaagcaagggggacgctgctctcccgtccccggcttaagctccagcccttcaggcagtccacttcatggcaaactgaactcacaagactcatacaataattttacaaacaataacccgggcaatcctaggctgtctcccctgcccagcctgatggtcgtcatgccactcgcccagattaaacagccgatgaccctcggtactattacaaaacgtaccggaccctacctctttggcgctggctgtttctccataaaagccccatggtcatatatcatgaccaagtatattttttacattaaacccccaaacaaggtcaagcctccacctcaaatttctccctcaaagtctatgggcggagaattttgcgtagcagctatattcggaacttcacgatcatggtttgccaataacgctggcttgaaacgagagaaggaccagtctaagcaagtggttgttgagtcactgtatattatttcctgttatggtacccttgtggaacatatgatggaaccccgtcccctgtcaacagcgccaaagatctcagacgatactccactggagatgatgacttccccacgggcatcttggaccctcgtgcgaactccacagtggaatgagctgcagcctccgttcaatgccaatcacccattgctgctggccgccgatgccgtccagtattaccagttcctactggccggctag

SEQ ID NO: 275225 - DNA, 2808 bp, Artificial Sequence
  derived and/or modified sequence
atgaacgaggccatggccaccgacagcccccggcggcccagccggtgtacagggggagtggtggtgcggccacaggcagttacggaacagagctacatggagtctgtagtcacattcctccaggatgtcgtgcctcaggcgtacagtggaactccactgaccgaggagaaagagaagatagtctgggtccgcttcgagaacgctgacttaaacgataccagccgcaatctagaattccatgagatccattctacaggaaatgaaccgcccctgctcatcatgatcggttactccgatggtatgcaggtgtggagtattccaattagcggagaagcacaggaattgttctcagtgagacatgggcctatcagagcagcaaggatcctgcctgccccccaatttggcgctcagaagtgtgacaacttcgccgagaaaagacccttgctgggcgtgtgcaagtccattgggtctagcggaacttctccaccatactgttgcgtggatttatacagcctgcgaactggtgagatggttaagagtatccaattcaagacgcctatttacgatcttcattgtaacaaacgcatcctggtggtggtcttgcaagaaaagatcgccgcctttgattcctgcacattcaccaagaagtttttcgttacgtcctgttatccatgccccggtcctaacatgaatcccattgctctggggagccggtggctcgcctatgctgaaaacaagctgatccgctgccaccagtctagaggcggagcctgcggcgacaacatccagtcatatacggccactgtcatttccgcagccaagacactcaaatcagggctcactatggttgggaaagttgtaacacagctgaccggcacgttgcctagtggtgtgactgaagatgacgtggcgatccatagcaactctaggcgctcaccgctggttcccggcatcatcacagtgattgatactgagacggtcggggaaggccaggtactggttagcgaagatagcgactctgatggtatcgtcgcccattttcccgcgcatgaaaaacctgtatgttgcatggcttttaatacttcaggaatgctgctggtcaccaccgacacactgggccacgatttccacgtctttcagatactaacccatccctggagctcatcacagtgcgcggtgcaccatttatacaccctgcaccggggggaaacggaagctaaagtgcaggacatttgttttagccatgactgccggtgggttgtcgtcagcacgttacgcgggacatcccatgtatttcctattaatccctatggagggcaaccgtgcgtcagaacgcacatgagcccgagggtggtcaatcgcatgtctaggttccagaaaagcgccggtttggaggagatagagcaggaactcacttctaaacagggtggccgttgctcccccgtgcccggattgtcttcatcaccttctggctctcctctgcacgggaaactaaattcacaggatagttacaacaacttcacaaataataaccccggcaatcccagattgagtccccttccatcgctgatggttgtgatgccactggcccaaattaaacagcccatgacacttggaacaattactaaacgaacgggaaaggttaagcctcccccacaaatttcaccaagcaagagcatggggggggagttttgtgtcgctgcaatcttcggaacctcccggagttggtttgcgaacaatgccgggttgaagagggagaaggaccagagcaaacaagtggtagtggagtccttgtacataatttcctgttatggcacactggtggagcatatgatggagcctagacccctttccactgcccccaagatcagtgacgatacgccgctcgagatgatgacctccccacgggcttcctggacactggtccggactcctcagtggaatgaattgcaaccaccttttaatgccaatcatcccctgctgctagccgccgacgccgtgcagtactaccaatttttactagctggacttgtgccacctggctctcccggccctatcacccggcatggaagctatgattctctggcttctgaccattctgggcaggaagacgaagagtggctgtctcaggtggaaatagtcacccacacgggacctcaccggaggctgtggatgggacctcaattccagttcaaaaccattcatcccagcgggcagacgactgtcataagttcgagctccagtgtgctccagagccatggcccaagcgataccccccagccccttctggactttgacaccgacgatctcgatcttaactctctacgcatccagcccgtgcgctctgatcccgtcagtatgcctggatcaagtcgacccgtgtccgacagacggggcgttagcacagtcattgatgccgcgtccggaacctttgaccgttcggtcacactattagaagtttgtggaagctggcccgaaggattcggcctccgacacatgtcttctatggagcatactgaggaaggactgcgggagcgcctggccgacgccatggcggagtctccatccagagatgtggtgggctccgggaccgacactgccttagatgtggccgtgaaaacattcccgcctgagagacacgttgcagtcaagtgctttgaactgcagagggaagggtcgatcgagacactttctaatagcagcgggtcaacatccggcagcatcccccgtaacttcgacggctacagaagtcctctgcccacaaatgaatctcagccactgtcattatttccgaccggcttcccttag

SEQ ID NO: 275226 - DNA, 2183 bp, Artificial Sequence
  derived and/or modified sequence
ggggagactccaaacagtgagcctagagctggagactagcgttaaccggcggggcggccggttttatgaatgaagctatggctacagattccccaagaagacccagtcgttgtactggtggagttgtggttcgcccccaggctgtcacagagcagtcctacatggaaagtgttgtgacttttctgcaggatgttgtgccacaggcttacagtggaacacctctaacagaagaaaaggagaaaatagtctgggtcagatttgaaaatgcagatttaaatgatacatcaagaaatctggaatttcatgaaatacatagtactgggaatgaaccgcctttgttgattatgattggctacagtgatggaatgcaggtctggagcatccctatcagtggtgaagcacaagagctcttctctgttcgacatggcccaattcgagcggctagaatcttgcctgctccacagtttggtgctcaaaaatgtgataactttgctgaaaaaagacccctccttggtgtttgtaagagcattggatcttctggcacaagcccaccgtactgttgtgtggatctgtattcacttcgtactggggagatggtcaagtccattcaatttaagacacctatttatgatctccattgcaataaacggatccttgtcgtagtcttgcaggagaaaattgctgcctttgatagctgtactttcacgaagaaattctttgttacaagctgctatccatgtccagggccaaacatgaatcctattgctcttgggagccgctggcttgcttatgcagaaaacaagttgattcgatgtcatcagtcccgtggtggagcctgtggagacaacattcagtcttatactgccacagtcattagtgctgctaaaacattgaaaagtggcctgacaatggtagggaaagtggtgactcagctgacaggcacactgccttcaggtgtgacagaagatgatgttgccatccacagtaattcacggcggagtcctttggtcccaggcatcatcacagttattgacaccgaaaccgttggagagggccaggtgcttgtgagtgaggattctgacagtgatggcattgtggcccacttccctgcccatgagaagccagtgtgctgcatggcttttaatacaagtggaatgcttctagtcacaacagacacccttggccatgactttcatgtcttccaaattctgactcatccttggtcctcatcacaatgtgctgtccaccatctgtatactcttcacaggggagaaactgaagccaaagtacaggacatctgcttcagccatgactgtcgctgggttgtggtcagtactctccggggtacttcccacgttttccccatcaacccttatggtggccagccttgtgttcgtacacatatgtcaccacgagtagtgaatcgcatgagccgtttccagaaaagtgctggactggaagagattgaacaagaactgacgtctaagcaaggaggtcgctgtagccctgttccaggtctatcaagcagcccttctgggtcacccttgcatgggaaactgaacagccaagactcctataacaattttaccaacaacaaccctggcaaccctcggctctctcctcttcccagcttgatggtagtgatgcctcttgcacaaatcaagcagccaatgacattggggaccatcaccaaacgaaccgggccttatctctttggagcggggtgtttttccataaaagccccatggagctacataatgacaaaatatatattttacataaaacctcctaacaaagttaaacctcctccacaaatttcacccagcaaatcgatgggcggagaattttgtgtggctgctatcttcggaacatccaggtcatggtttgcaaataatgcaggtctgaaaagagaaaaagatcagtccaaacaagttgtagttgagtccctgtacattatcagttgctatggcaccttagtggaacacatgatggagccgcgacccctcagcactgcacccaagattagtgacgacacaccactggaaatgatgacatcgcctcgagccagctggactctggttagaacccctcaatggaatgaattgcagccaccgtttaatgcaaaccaccctctgctcctcgctgcagatgcagtacagtattatcagttcctgcttgctggc

SEQ ID NO: 275227 - DNA, 2808 bp, Artificial Sequence
  derived and/or modified sequence
atgaatgaagctatggctacagattccccaagaagacccagtcgttgtactggtggagttgtggttcgcccccaggctgtcacagagcagtcctacatggaaagtgttgtgacttttctgcaggatgttgtgccacaggcttacagtggaacacctctaacagaagaaaaggagaaaatagtctgggtcagatttgaaaatgcagatttaaatgatacatcaagaaatctggaatttcatgaaatacatagtactgggaatgaaccgcctttgttgattatgattggctacagtgatggaatgcaggtctggagcatccctatcagtggtgaagcacaagagctcttctctgttcgacatggcccaattcgagcggctagaatcttgcctgctccacagtttggtgctcaaaaatgtgataactttgctgaaaaaagacccctccttggtgtttgtaagagcattggatcttctggcacaagcccaccgtactgttgtgtggatctgtattcacttcgtactggggagatggtcaagtccattcaatttaagacacctatttatgatctccattgcaataaacggatccttgtcgtagtcttgcaggagaaaattgctgcctttgatagctgtactttcacgaagaaattctttgttacaagctgctatccatgtccagggccaaacatgaatcctattgctcttgggagccgctggcttgcttatgcagaaaacaagttgattcgatgtcatcagtcccgtggtggagcctgtggagacaacattcagtcttatactgccacagtcattagtgctgctaaaacattgaaaagtggcctgacaatggtagggaaagtggtgactcagctgacaggcacactgccttcaggtgtgacagaagatgatgttgccatccacagtaattcacggcggagtcctttggtcccaggcatcatcacagttattgacaccgaaaccgttggagagggccaggtgcttgtgagtgaggattctgacagtgatggcattgtggcccacttccctgcccatgagaagccagtgtgctgcatggcttttaatacaagtggaatgcttctagtcacaacagacacccttggccatgactttcatgtcttccaaattctgactcatccttggtcctcatcacaatgtgctgtccaccatctgtatactcttcacaggggagaaactgaagccaaagtacaggacatctgcttcagccatgactgtcgctgggttgtggtcagtactctccggggtacttcccacgttttccccatcaacccttatggtggccagccttgtgttcgtacacatatgtcaccacgagtagtgaatcgcatgagccgtttccagaaaagtgctggactggaagagattgaacaagaactgacgtctaagcaaggaggtcgctgtagccctgttccaggtctatcaagcagcccttctgggtcacccttgcatgggaaactgaacagccaagactcctataacaattttaccaacaacaaccctggcaaccctcggctctctcctcttcccagcttgatggtagtgatgcctcttgcacaaatcaagcagccaatgacattggggaccatcaccaaacgaaccggcaaagttaaacctcctccacaaatttcacccagcaaatcgatgggcggagaattttgtgtggctgctatcttcggaacatccaggtcatggtttgcaaataatgcaggtctgaaaagagaaaaagatcagtccaaacaagttgtagttgagtccctgtacattatcagttgctatggcaccttagtggaacacatgatggagccgcgacccctcagcactgcacccaagattagtgacgacacaccactggaaatgatgacatcgcctcgagccagctggactctggttagaacccctcaatggaatgaattgcagccaccgtttaatgcaaaccaccctctgctcctcgctgcagatgcagtacagtattatcagttcctgcttgctggcctggttccccctggaagtcctgggcccattactcgacatgggtcttacgacagtttagcttctgaccatagtggacaggaagatgaagaatggctttcccaggttgaaattgtaacacacactggaccccatagacgtctgtggatgggtccacagttccagttcaaaaccatccatccctcaggccaaaccacagttatctcatccagttcatctgtgttgcagtctcatggtccgagtgacacgccacagcctcttttggattttgatacagatgatcttgatctcaacagtctcaggatccagccagtccgctctgaccccgtcagcatgccagggtcatcccgtccagtctctgatcgaaggggagtttccacagtgattgatgctgcctcaggtacctttgacaggagcgtgaccctgctggaggtgtgcgggagctggcctgagggcttcgggctgcggcacatgtcctccatggagcacacggaggagggcctccgggagcgacttgccgacgccatggccgagtcacctagccgggacgtcgtgggatccggaacagacacagcccttgacgtagcagtaaaaaccttcccccctgagagacacgtggcagtgaagtgttttgaacttcagcgagagggaagcatcgagactctgagtaacagctcaggctccaccagcggcagcataccaagaaactttgatggctaccgatctccgctgcccaccaatgagagccagcccctcagcctcttcccgactggcttcccgtag

SEQ ID NO: 275228 - DNA, 300 bp, Artificial Sequence
  derived and/or modified sequence
gcactggacgttgccgtaaaaacattccctccagagcgtcacgtggccgtaaaatgctttgggaaaaagaaggagaaaaagaataatgccaattcccccgcttctgttagcaatcctacagtgaccaagcatgcgttcgggatggaagaggagctccagagagagggatccatagagacattaagcaacagctccggaagtacgtcagggtccatcccacgtaacttcgatgggtatcgctcccccttaccaactaatgagagtcagcccctttccctgtttcctacagggttcccatag

SEQ ID NO: 275229 - DNA, 2121 bp, Artificial Sequence
  derived and/or modified sequence
atgaacgaggctatggctacagactcccctcggcgtccatcgagatgtacgggcggtgttgtcgtgagaccccaggctgtgacagagcagagctatatggaaagcgtcgtaaccttcctccaggatgtggttccccaggcctacagtggtacccctctgactgaagagaaggagaaaatcgtctgggttcgcttcgagaacgcagacttgaacgacactagccgcaatctggaattccatgaaattcattctacaggcaacgaacctcctttactgatcatgatcggctattcagacggcatgcaggtgtggagtatcccaatttccggtgaagcgcaagagctgttttccgtgcgtcatggacccattcgggcagctcgtattctgcctgcccctcagttcggcgcacagaagtgcgataatttcgccgagaaaaggcctcttcttggagtgtgcaagtccattggcagctcaggcacaagtccgccatattgctgtgttgatctctattctctgaggaccggggagatggtcaaatcaatccaattcaagacccccatttatgacctgcactgtaataagcggattctcgttgtggtcctgcaagaaaaaatcgcagccttcgattcatgcacatttactaaaaaattttttgtgacgagctgctatccttgcccagggccaaatatgaatcctatagctcttgggtccagatggctggcctacgcagaaaacaaactgatccggtgccaccaaagtcggggtggagcctgtggtgataacatccagagctataccgctacagtgatttccgccgctaagacactgaagagcggactaaccatggtcggcaaggtggtgacacaactgactggtacccttccatccggggtgacagaagacgacgtcgccatccactccaatagcagacgttcccctcttgttcctggtatcattactgttatcgacaccgagaccgtcggagagggccaggtgcttgttagcgaggactccgattcagacggcatcgtggcacactttccagcacacgagaaacccgtgtgttgtatggccttcaatacatccgggatgctacttgttaccaccgataccctgggccatgatttccatgtgtttcagattttgacacatccatggtccagctcccagtgtgctgtccaccacctctacaccttgcacaggggagagaccgaagctaaagttcaggacatctgctttagtcatgactgccgatgggtggtggtctccacactgcgagggacttcacacgtatttcctatcaatccctatggtggacagccgtgcgtgcggactcacatgagccccagagtggttaacaggatgtcacggttccaaaaatccgccggactagaggagatcgaacaggagcttacttctaaacaggggggtagatgctcccccgtcccaggactgagttccagccccagcggtagccccctgcacggtaagctgaattctcaagactcatacaacaacttcacaaacaacaacccgggaaacccacggctctctccgctgccgagcctaatggtagtcatgcctcttgcacagatcaaacaaccaatgactttgggaaccatcaccaagcggactggaccctatctgtttggcgctggctgcttctctattaaagctccttggtcgtatatcatgacaaagtatatattttatattaagccaccgaataaggttaagccccctccccaaatttctcccagcaagagcatgggaggagagttctgtgtggcagccatctttggcactagccggtcctggttcgccaacaacgccggactaaagcgggaaaaggatcaaagcaaacaggtcgtggttgaaagcctgtacattatctcgtgctacgggactctcgtggagcatatgatggagcctcgccctctttccaccgcaccgaaaattagcgatgatactccacttgaaatgatgacaagccccagggccagctggacactggttagaaccccgcagtggaacgagttgcaaccgccatttaatgctaatcaccctctccttcttgcagctgatgccgtgcaatattaccagtttttgctggcaggctag

SEQ ID NO: 275230 - DNA, 2808 bp, Artificial Sequence
  derived and/or modified sequence
atgaacgaggccatggctacggactcacctaggagaccctccaggtgtacaggaggggtcgtagtgcgtccccaggccgtaacagagcagagctacatggaatcggtagtgaccttcttgcaagatgttgtgccccaggcctactctggcactccgttgacggaagagaaagagaaaattgtgtgggtacggttcgagaatgccgacctcaatgatacatctcgcaacttggagtttcacgaaatccattccactgggaacgaacccccactgttaatcatgattgggtactctgatggtatgcaggtctggagcattcccatctcaggagaagctcaagagctcttttcagtacgccatggtcccatccgcgctgccagaatcctccctgcaccccagtttggcgcacagaaatgcgataatttcgcggagaagcgtcctctgctgggagtgtgtaagagtatcggaagctcaggaacttcccctccttactgctgcgtagatctgtacagcctgagaacaggagagatggtgaagtcaatacagtttaaaacacccatctatgatctgcattgtaataagcgcatcctggtcgtggtcctccaagaaaaaatagccgctttcgactcttgcactttcacaaagaaattttttgtgacaagctgttacccatgccccggtcctaatatgaatccgatcgctctgggaagccggtggctcgcttatgctgaaaacaaactcattcgatgccaccaaagcaggggtggggcatgcggcgacaatatccagagctacaccgccacagtcataagcgcagctaagactttgaagtccggtctgaccatggtgggtaaagtggtgacacaattgaccggcacccttccgtcaggtgtaaccgaggatgatgtagcaatccattccaactcccggaggtctccactagtgccaggcattattaccgtcatcgacactgagaccgtgggtgaaggccaggtcctggtgtcagaggattccgactccgacgggattgtggcccactttccagcgcatgagaaacccgtctgttgtatggcattcaatacttctggaatgctgctcgtgactaccgataccttgggtcacgactttcatgtgttccaaatcctgactcacccttggagctcatcccagtgcgcagtgcaccatctttacactctgcatcgcggagagacggaggcgaaggtccaggatatctgcttcagccacgattgtcgttgggtcgttgtctctacgcttcgaggtacctctcacgtgtttcctataaacccttatggaggtcagccatgtgttcgcacacacatgtccccgagagtggtcaataggatgtcccgcttccagaagagcgccggtttagaggaaattgagcaggaactcacctctaagcaaggcggtaggtgctctcccgtgccaggtctctccagttctccctcagggagtcctctccacggcaagctcaattctcaagatagctacaataattttacaaacaacaatccaggtaatcccaggctgagtcccctgcctagccttatggttgttatgcccctagcccagattaagcaaccaatgactctggggacgataactaagcggaccggaaaggtgaaacctcccccacagatcagtcccagcaagtcgatgggaggagagttctgcgttgcggcaatttttggtacaagcagatcttggtttgctaataatgcagggttaaagcgggagaaagaccagtccaagcaagtggtcgtggaatctctgtacatcatttcatgttacggtaccctggtggagcacatgatggagcctcgtcccttatccaccgcaccgaaaatatcagacgatacccccctggagatgatgacttcacccagggcttcttggaccctggtgagaactcctcagtggaatgagttgcagccaccatttaacgctaaccatcctttgctcctggccgctgatgcagtgcagtattaccagtttctgctggctggcctggttcctcctggttcacctggaccgatcacaaggcacggttcgtatgacagtctggccagcgatcacagcggacaggaggacgaggagtggctttcacaggtcgagatcgtcacccatacaggtccccataggcggctctggatggggccacagtttcagtttaagaccatccacccatccggacagactaccgtcatttctagcagtagctctgtactccagagccatggccctagtgatactccacagcctttgttagactttgacactgatgacctcgacctaaatagtttaagaatccaaccagtcaggtcagatccagtttctatgcctggaagcagcaggcctgttagcgaccgtaggggtgtctcgaccgttatcgatgctgcctctggtacctttgataggtccgtcactctgcttgaggtgtgcgggtcatggcctgagggcttcgggctaaggcatatgagcagcatggagcacacggaagaaggtctgcgggagaggctggctgacgccatggcagaaagtccttctagagatgtagtgggttccgggactgacaccgccttagatgtcgcagtgaagacttttccccctgaaagacacgtggccgttaagtgcttcgagctgcagcgcgagggcagcatagagaccctttctaattctagtggctctacctccggttctatcccacgaaattttgacggctatcgcagtccgctgcccactaatgagagccaaccactctcactattcccaacaggttttccctag

SEQ ID NO: 275231 - protein, 935 aa, Artificial Sequence
  derived and/or modified sequence
MNEAMATDSPRRPSRCTGGVVVRPQAVTEQSYMESVVTFLQDVVPQAYSGTPLTEEKEKIVWVRFENADLNDTSRNLEFHEIHSTGNEPPLLIMIGYSDGMQVWSIPISGEAQELFSVRHGPIRAARILPAPQFGAQKCDNFAEKRPLLGVCKSIGSSGTSPPYCCVDLYSLRTGEMVKSIQFKTPIYDLHCNKRILVVVLQEKIAAFDSCTFTKKFFVTSCYPCPGPNMNPIALGSRWLAYAENKLIRCHQSRGGACGDNIQSYTATVISAAKTLKSGLTMVGKVVTQLTGTLPSGVTEDDVAIHSNSRRSPLVPGIITVIDTETVGEGQVLVSEDSDSDGIVAHFPAHEKPVCCMAFNTSGMLLVTTDTLGHDFHVFQILTHPWSSSQCAVHHLYTLHRGETEAKVQDICFSHDCRWVVVSTLRGTSHVFPINPYGGQPCVRTHMSPRVVNRMSRFQKSAGLEEIEQELTSKQGGRCSPVPGLSSSPSGSPLHGKLNSQDSYNNFTNNNPGNPRLSPLPSLMVVMPLAQIKQPMTLGTITKRTGKVKPPPQISPSKSMGGEFCVAAIFGTSRSWFANNAGLKREKDQSKQVVVESLYIISCYGTLVEHMMEPRPLSTAPKISDDTPLEMMTSPRASWTLVRTPQWNELQPPFNANHPLLLAADAVQYYQFLLAGLVPPGSPGPITRHGSYDSLASDHSGQEDEEWLSQVEIVTHTGPHRRLWMGPQFQFKTIHPSGQTTVISSSSSVLQSHGPSDTPQPLLDFDTDDLDLNSLRIQPVRSDPVSMPGSSRPVSDRRGVSTVIDAASGTFDRSVTLLEVCGSWPEGFGLRHMSSMEHTEEGLRERLADAMAESPSRDVVGSGTDTALDVAVKTFPPERHVAVKCFELQREGSIETLSNSSGSTSGSIPRNFDGYRSPLPTNESQPLSLFPTGFP

SEQ ID NO: 275232 - DNA, 1566 bp, Artificial Sequence
  derived and/or modified sequence
atggccgagactgtgtggagtaccgataccggggaggctgtatacaggtcccgagaccccgttcgtaaccttaggctcagagttcaccttcaaagaattaccagctcaaattttcttcactatcagcctgctgctgagctgggtaaggatttgatagacttagctaccttcagaccacaacccaccgccagcggccacagacccgaggaggatgaagaggaggaaatcgtgatcggttggcaggaaaagctctttagccagttcgaagttgacctgtaccagaacgagacagcttgtcaaagtccattagactatcagtaccgccaggaaatcctgaagttggagaactctgggggcaaaaaaaatcgtagaattttcacttatactgactcagatcgctatacaaatctggaagagcactgtcaacgcatgaccacagcagcttcagaggtgccaagctttctggttgagcggatggcgaacgtgaggcgaagacggcaggatagacgagggatggagggtggcattctgaagagccgcattgtgacatgggaaccatctgaggagtttgtgcggaacaaccatgtgattaacacgcctctacaaaccatgcatatcatggcagatcttgggccctacaagaagctcggatacaagaagtacgaacacgtgctgtgcactctgaaagtggactccaacggagtgattaccgtcaaaccggacttcaccggtttgaaaggtccctaccgaatcgagactgagggagaaaaacaggagctgtggaaatacaccatagataatgtcagcccacacgcccagccagaggaggaagagcgcgagcgccgagtctttaaggacctctacggcagacacaaggagtacctttcctcgctggtcgggaccgatttcgaaatgactgtgccgggtgccctccgcctttttgtcaatggtgaggtggtgtcagcccagggatacgaatatgacaatctctatgtgcattttttcgtggaattgcctacagcacactggtctagccctgctttccagcagctgagcggagtaacgcagacctgtaccaccaagtctttggccatggacaaagtggcgcacttctcttacccgtttaccttcgaagctttcttcctgcacgaggacgagagtagtgatgccctgccagaatggccagtgttgtactgtgaggttctgagcttggatttctggcaacgctaccgcgtggaggggtacggggcagtagtgctccccgctacccctggttcccatacactcacggtatccacctggcgccccgtggagctcggcactgtggcggaactgaggcgcttcttcattggcggatcccttgaattagaagacctatcttatgtcagaattccaggttcgttcaaggccctcttaagctcaagtaagaccaaggaagggcgtaaagtggacggggagcgagtgctgaatccgcagcctgtcagcctctccctattccctggtaagcctcactccaccgcttggggccttttacgcctaaggtacgaactgtttttatcgaaatag

SEQ ID NO: 275233 - DNA, 1563 bp, Artificial Sequence
  derived and/or modified sequence
atggccgagactgtctggagtacagacacgggggaggccgtgtatcgctctagagatccggtgcggaatctccgccttcgtgtgcacttgcagcgcataacatcttcaaactttctccattatcaaccggctgccgaattgggtaaagacctcatcgacctggccacttttcgcccccagccaaccgcctccggtcacagacccgaggaagatgaagaggaagagattgtaatcggatggcaagagaaactgttctcccaatttgaggtggatctctatcagaacgaaacagcttgtcagtcacccttggattaccagtaccggcaagagatcctcaaactagagaattccggcgggaagaagaaccgcaggatctttacttatacagacagcgacaggtatactaatctcgaggaacattgtcaacgcatgacgaccgcagcatctgaggtaccatctttccttgttgaacgcatggccaatgttcgcaggaggcgacaggacagacggggtatggagggcgggatactgaagagtcggattgtgacttgggagccttctgaagagtttgtgaggaataatcacgtcattaatactcctttgcagactatgcatataatggcagacctgggaccctataaaaaactgggttataaaaagtacgaacacgtactttgtaccctgaaagtggactccaatggagtaatcaccgtcaagccagacttcacagggctgaagggaccatataggatagagactgagggcgaaaagcaggagttatggaaatacactattgataatgtatcccctcacgcccagccagaggaagaagaacgcgaacgccgggtattcaaggatctctacgggcggcataaagagtatttgtcctccctggtgggaactgactttgagatgaccgttccaggagcactgagactgttcgtgaacggcgaagtggtaagtgcccaagggtacgagtacgataatttgtacgtgcacttctttgtggaattaccaactgcacattggagttcaccagcattccagcagctgagcggggtgactcagacctgtactaccaagtccttggctatggataaggtcgcccacttttcttacccattcactttcgaggctttttttcttcacgaggacgaaagctccgatgcccttcccgagtggcccgtgctctattgcgaggtgctttccctggacttttggcaacgttaccgtgtggaaggctacggggcagtggtcctgcccgcaacaccaggatctcatacactgactgttagcacatggaggccagtcgagctgggcacagtggcagagctgaggagatttttcatcggaggatctctggaactggaagatctctcctatgttagaatccctggaagcttcaaagggttgtctagtagtaaaacgaaagagggtagaaaagtggacggagaaagagtactgaatcctcagccagttagcctgtccctttttcctggcaagccccacagtaccgcctggggcctgcttaggctgcggtacgaactgttcttgagcaaatag

SEQ ID NO: 275234 - DNA, 1566 bp, Artificial Sequence
  derived and/or modified sequence
atggccgagaccgtgtggagcacagacaccggggaggccgtgtaccgcagccgggaccctgtgaggaacctgcggctgcgggtgcacctgcagaggatcaccagcagcaacttcctgcactaccagcctgctgctgagctgggcaaggacctgattgacctggccaccttccggccccagcccacagccagcggccacaggcctgaggaggatgaggaggaggagatcgtcatcggctggcaggagaagctgttcagccagtttgaggtggacctgtaccagaatgaaacagcctgccagagccccctggactaccagtaccggcaggagatcctgaagctggagaacagcggcggcaagaagaacagacgcatcttcacctacacagacagcgaccgctacaccaacctggaggagcactgccagaggatgaccacagctgccagcgaggtgcccagcttcctggtggagaggatggccaacgtgagaagaagacggcaggacagaagaggcatggagggcggcatcctgaagagcagaattgtgacctgggagcccagcgaggagtttgtgaggaacaaccacgtgatcaacacccccctgcagaccatgcacatcatggctgacctgggcccctacaagaagctgggctacaagaagtatgaacatgtgctgtgcaccctgaaggtggacagcaatggagtcatcaccgtgaagccagacttcaccggcctgaagggcccctacagaattgaaacagaaggagagaagcaggagctgtggaagtacaccatcgacaacgtgagcccccacgcccagcctgaggaggaggagcgggagaggagggtcttcaaggacctgtatggccgccacaaggagtacctgagcagcctggtgggcacagactttgagatgacagtgcctggggccctgcggctgtttgtgaatggagaggtggtgtctgcccagggctatgaatatgacaacctgtatgtgcacttctttgtggagctgcccacagcccactggagcagccctgccttccagcagctgagcggcgtgacccagacctgcaccaccaagagcctggccatggacaaggtggcccacttctcctaccccttcacctttgaggccttcttcctgcatgaagatgagagcagtgatgccctgcctgagtggcctgtgctgtactgtgaggtgctgagcctggacttctggcagcgctacagagtggagggctatggagctgtggtgctgcctgccaccccaggcagccacaccctgactgtgtccacctggaggcctgtggagctgggcaccgtggccgagctgcggcgcttcttcatcggcggcagcctggagctggaggacctgtcctatgtgcgcatccctggcagcttcaaggccctgctgagcagcagcaagaccaaggagggcaggaaggtggatggagagcgggtgctgaacccccagcctgtgtccctgagcctcttccctgggaagccccacagcacagcctggggcctgctgcggctgcgctatgagctgttcctgagcaagtag

SEQ ID NO: 275235 - DNA, 1563 bp, Artificial Sequence
  derived and/or modified sequence
atggccgagaccgtgtggagcacagacaccggggaggccgtgtaccgcagccgggaccctgtgaggaacctgcggctgcgggtgcacctgcagaggatcaccagcagcaacttcctgcactaccagcctgctgctgagctgggcaaggacctgattgacctggccaccttccggccccagcccacagccagcggccacaggcctgaggaggatgaggaggaggagatcgtcatcggctggcaggagaagctgttcagccagtttgaggtggacctgtaccagaatgaaacagcctgccagagccccctggactaccagtaccggcaggagatcctgaagctggagaacagcggcggcaagaagaacagacgcatcttcacctacacagacagcgaccgctacaccaacctggaggagcactgccagaggatgaccacagctgccagcgaggtgcccagcttcctggtggagaggatggccaacgtgagaagaagacggcaggacagaagaggcatggagggcggcatcctgaagagcagaattgtgacctgggagcccagcgaggagtttgtgaggaacaaccacgtgatcaacacccccctgcagaccatgcacatcatggctgacctgggcccctacaagaagctgggctacaagaagtatgaacatgtgctgtgcaccctgaaggtggacagcaatggagtcatcaccgtgaagccagacttcaccggcctgaagggcccctacagaattgaaacagaaggagagaagcaggagctgtggaagtacaccatcgacaacgtgagcccccacgcccagcctgaggaggaggagcgggagaggagggtcttcaaggacctgtatggccgccacaaggagtacctgagcagcctggtgggcacagactttgagatgacagtgcctggggccctgcggctgtttgtgaatggagaggtggtgtctgcccagggctatgaatatgacaacctgtatgtgcacttctttgtggagctgcccacagcccactggagcagccctgccttccagcagctgagcggcgtgacccagacctgcaccaccaagagcctggccatggacaaggtggcccacttctcctaccccttcacctttgaggccttcttcctgcatgaagatgagagcagtgatgccctgcctgagtggcctgtgctgtactgtgaggtgctgagcctggacttctggcagcgctacagagtggagggctatggagctgtggtgctgcctgccaccccaggcagccacaccctgactgtgtccacctggaggcctgtggagctgggcaccgtggccgagctgcggcgcttcttcatcggcggcagcctggagctggaggacctgtcctatgtgcgcatccctggcagcttcaagggcctgagcagcagcaagaccaaggagggcaggaaggtggatggagagcgggtgctgaacccccagcctgtgtccctgagcctcttccctgggaagccccacagcacagcctggggcctgctgcggctgcgctatgagctgttcctgagcaagtag

SEQ ID NO: 275236 - DNA, 1576 bp, Artificial Sequence
  derived and/or modified sequence
cgcagctgtcatggcggagaccgtctggagcactgacaccggggaggcagtgtatcgctcccgggaccccgtgcgcaacttgcgcctccgagtccacctgcaaagaatcacatcaagcaactttcttcattatcagcctgctgccgagctcgggaaggacctcatagacttggccacttttaggcctcagccaactgccagtggacaccgcccagaggaagacgaagaggaggagattgtgattgggtggcaggagaagctctttagccagtttgaagtagatctgtaccaaaatgaaacagcctgtcagagtcctttggattatcagtaccgtcaggagatcctgaagctggagaattcgggtggcaagaaaaaccgacgaatctttacctacactgactctgatagatacaccaatttggaggagcactgtcagagaatgaccactgcagccagcgaggtgccttcattcttggtcgagcgaatggcaaatgtcaggcgtcgccggcaggacaggcgagggatggagggcggcatcctcaagtcacgcatcgtcacctgggagccctcagaagagtttgtcaggaacaaccacgtcattaacacccctcttcagacaatgcacatcatggcagacctggggccctataaaaagcttggctataagaagtatgaacatgtcctgtgtactctgaaggtggatagcaatggtgtgatcacagtaaagcctgacttcacgggcctcaaaggaccctacaggattgagacggagggggagaagcaggagctgtggaaatatacgatcgacaatgtttccccccacgcacagccggaggaggaggagcgggaacggcgagtgttcaaggatctttatggccggcacaaggagtatctcagcagcctcgtaggcaccgactttgagatgactgtcccaggtgccctccggctctttgtaaatggagaggtcgtttcagcccaaggctatgagtatgacaatctctacgtccacttctttgtagaattgccaactgctcactggtcaagcccagcattccagcagctctcaggagtaacacagacctgcaccaccaagtccctggcaatggacaaggtggctcacttctcctacccattcacgtttgaagccttcttcctccatgaggatgaatcttctgatgcactcccggagtggcctgtgctctactgtgaggtcctctcgctggacttctggcagaggtaccgtgtggaaggctatggggctgtggtgctgcctgccactccaggctcacacaccctgacagtctccacgtggagacctgtggagcttggcacggtggctgagctgaggaggtttttcattggcggttctctggaactggaggacctctcctatgtacggataccaggatccttcaaggcactcctttcatcttccaagaccaaagaaggaaggaaggtggacggtgagagggtcttaaatccccagcctgtgagtctcagcctctttccagggaagcctcattctactgcttggggcttgctgaggttgagatatgagttatttctgagtaagtga

SEQ ID NO: 275237 - DNA, 1748 bp, Artificial Sequence
  derived and/or modified sequence
ccgatccagcgtctccgttgccaggaaaacagagcggcgcgctttccggcgcagtcgcggcgcgtcgcagctgtcatggcggagaccgtctggagcactgacaccggggaggcagtgtatcgctcccgggaccccgtgcgcaacttgcgcctccgagtccacctgcaaagaatcacatcaagcaactttcttcattatcagcctgctgccgagctcgggaaggacctcatagacttggccacttttaggcctcagccaactgccagtggacaccgcccagaggaagacgaagaggaggagattgtgattgggtggcaggagaagctctttagccagtttgaagtagatctgtaccaaaatgaaacagcctgtcagagtcctttggattatcagtaccgtcaggagatcctgaagctggagaattcgggtggcaagaaaaaccgacgaatctttacctacactgactctgatagatacaccaatttggaggagcactgtcagagaatgaccactgcagccagcgaggtgccttcattcttggtcgagcgaatggcaaatgtcaggcgtcgccggcaggacaggcgagggatggagggcggcatcctcaagtcacgcatcgtcacctgggagccctcagaagagtttgtcaggaacaaccacgtcattaacacccctcttcagacaatgcacatcatggcagacctggggccctataaaaagcttggctataagaagtatgaacatgtcctgtgtactctgaaggtggatagcaatggtgtgatcacagtaaagcctgacttcacgggcctcaaaggaccctacaggattgagacggagggggagaagcaggagctgtggaaatatacgatcgacaatgtttccccccacgcacagccggaggaggaggagcgggaacggcgagtgttcaaggatctttatggccggcacaaggagtatctcagcagcctcgtaggcaccgactttgagatgactgtcccaggtgccctccggctctttgtaaatggagaggtcgtttcagcccaaggctatgagtatgacaatctctacgtccacttctttgtagaattgccaactgctcactggtcaagcccagcattccagcagctctcaggagtaacacagacctgcaccaccaagtccctggcaatggacaaggtggctcacttctcctacccattcacgtttgaagccttcttcctccatgaggatgaatcttctgatgcactcccggagtggcctgtgctctactgtgaggtcctctcgctggacttctggcagaggtaccgtgtggaaggctatggggctgtggtgctgcctgccactccaggctcacacaccctgacagtctccacgtggagacctgtggagcttggcacggtggctgagctgaggaggtttttcattggcggttctctggaactggaggacctctcctatgtacggataccaggatccttcaagggcctttcatcttccaagaccaaagaaggaaggaaggtggacggtgagagggtcttaaatccccagcctgtgagtctcagcctctttccagggaagcctcattctactgcttggggcttgctgaggttgagatatgagttatttctgagtaagtgaaggctgaaggcagtgctgagtcctttctgctagctgggtggtatcttttactgtgtttttttgtttgtttgtttttttgttttttgttacataaaccccttttattttga

SEQ ID NO: 275238 - DNA, 1566 bp, Artificial Sequence
  derived and/or modified sequence
atggccgagaccgtgtggagcaccgacaccggcgaggccgtgtaccgctcgcgggatcctgttcgcaacttacggctgagggttcacctgcagaggattacgtctagtaacttcttgcactaccaaccagcagccgagctgggaaaggatctaatcgatcttgcaacgtttagaccccagcctactgcctctggccaccgccccgaagaagatgaagaggaagaaattgtcatcggctggcaagaaaaattattttcacagtttgaggtagatttatatcaaaatgagaccgcttgtcaaagcccactcgattatcagtatagacaggagattctgaagttagaaaattccggcggcaagaaaaatcggagaatttttacctacacagactctgacaggtatactaacctagaggaacactgtcagaggatgactacggccgcctctgaggtgccgagttttttggtggaacggatggccaatgtgaggagacgccggcaagatcgacgcggtatggaaggaggtatcctgaaatcccgcatagtcacctgggagccctcggaggagttcgtgagaaacaatcacgttattaacaccccgctgcagacaatgcacataatggcggacctcgggccttacaagaaacttgggtacaagaagtatgaacacgtgttgtgtacactgaaggtggactcgaacggcgtgatcacggtgaagcctgactttactggacttaagggcccttacaggatcgaaactgaaggcgagaagcaggaactgtggaaatacacaatcgacaacgtcagccctcatgctcagccagaggaggaggagagagaaagacgggttttcaaggatctgtatgggagacacaaggagtacctgtcctccttggttggtacagactttgagatgaccgttcctggcgccttacggctattcgtcaacggtgaagtggtaagtgctcagggttacgagtacgataacctttatgtccatttcttcgtggagcttccgaccgctcactggagctcccccgcctttcagcaactgtctggagtgacacagacatgtaccaccaagagcctcgcaatggacaaggtcgcccatttctcatatccttttaccttcgaggcatttttcttgcacgaggacgagtcctccgatgcactgcccgagtggcccgtgctgtactgcgaggtgctgagtctggacttttggcagcgctacagagttgagggatatggcgccgtcgtgctgccagccactcctgggtcccacacacttactgtgtcaacttggagacccgtcgagctcggtacagtcgcggagctccgacgcttttttatcggaggttcattggagttggaggatctcagctacgtacgtatcccgggcagcttcaaggctcttctgtccagcagtaagacaaaagaaggccggaaggtcgatggggagagggttttgaatccccaacccgtaagtttgtcgctttttcccggcaagccacactctacagcatggggactactaaggcttcgctatgagttattcctaagcaagtag

SEQ ID NO: 275239 - DNA, 1563 bp, Artificial Sequence
  derived and/or modified sequence
atggccgagaccgtgtggagcaccgacaccggcgaggccgtgtaccggtcacgcgacccagtgagaaatttgcgtctgagagtgcacttgcaacgtatcaccagctcgaactttttacattaccaacctgccgccgagttgggcaaggatctgattgaccttgccaccttccgcccacagcctaccgctagcggacatcgccctgaggaggatgaagaggaagagatcgtaattggatggcaagagaagctttttagtcagttcgaagttgacctgtatcaaaacgagactgcctgccaaagtcctctcgactaccagtacaggcaggagatcctaaaacttgaaaattctggtgggaagaaaaaccgccggatattcacctacacagatagtgaccggtacactaacctagaggagcactgccaaaggatgacaacagccgccagcgaagttccttcctttctagttgaacgcatggctaacgtgaggcggcgccggcaggaccgtcgcggtatggaggggggcatcctgaagagcagaatagtgacatgggaacctagtgaagagttcgtacggaacaatcatgtcatcaatacacccctgcagaccatgcatattatggctgacctaggaccatacaaaaaattgggatataagaagtacgaacatgtgctctgcacgctgaaggtcgacagcaacggtgtgatcactgttaagcccgacttcaccgggctgaaagggccttaccgcatcgaaaccgagggtgagaagcaagaactctggaagtatactatagacaatgtttccccacacgcacagccagaggaggaagaacgcgaaagaagggttttcaaggatctgtatggacgccataaagagtacctcagctccctcgtgggtacagatttcgaaatgacagtgccgggcgccctgcggctgtttgtgaacggggaggttgtttcggctcagggatacgagtatgataacctgtacgtgcactttttcgtcgagctgcccacagcacactggtcttctccagccttccagcagctttccggcgtgacccagacatgtaccacaaaaagcctcgccatggataaggtcgctcacttttcatacccctttactttcgaggcttttttcctgcatgaagatgagagttctgatgcgctgcccgagtggcccgtgctgtattgtgaggttctttctcttgacttctggcagaggtaccgcgtcgagggttatggggcagtcgtgttgccagctacacccggctctcacaccctgacggtctccacctggagacctgtcgagctaggcacagtggccgagttaagaagattttttattgggggtagtcttgaactggaggaccttagctacgtccgaatcccaggatcattcaaaggtctctcttcctcaaagacaaaagagggcagaaaagtggacggggaacgggtgctcaacccccaacccgtatctctgagcctcttccccggtaaaccacactccacggcctggggactgcttcgtctgaggtacgagctgttcctgtctaaatag

SEQ ID NO: 275240 - DNA, 1566 bp, Artificial Sequence
  derived and/or modified sequence
atggctgaaaccgtttggtctacagataccggagaggctgtgtaccggtcccgcgacccagtacggaatctgagactgagggtgcatctccaacggataacctcttcaaatttcctccattatcagccggcagctgaactgggcaaagacctcatcgatcttgctaccttccgacctcagcctacagctagcgggcatcgtcctgaggaagacgaggaagaggagatcgtgatcgggtggcaggaaaagctgttttctcagtttgaggtggacctttatcagaatgagaccgcttgtcagtccccactggattaccagtaccgccaggagatactgaaactcgagaacagtgggggaaaaaagaatcggagaatcttcacatatactgacagtgataggtacactaatctggaggagcactgccagcggatgaccaccgctgcctcggaggtccccagtttcctggtggaacggatggccaacgtgaggcgcagacgacaagatcgacggggtatggagggaggtatactcaagtcgaggatagtaacgtgggagccaagtgaggaatttgtgcgaaacaaccatgtaatcaatacaccactgcagaccatgcacatcatggccgacttgggtccgtataagaagctaggatacaagaaatacgaacatgttctttgtacccttaaagtcgactctaatggggtaataactgtgaagcctgattttacaggactgaaaggcccttaccgcatcgaaacggagggagagaagcaggaactgtggaagtacactatcgataacgtcagtccccatgctcagccagaggaagaggaacgggagcgcagagtgtttaaagatctctacggtcgacataaggaatatctctcttctctggtgggtacggactttgaaatgaccgttcccggtgctctcagacttttcgtgaatggcgaggtggtgtcagcccaaggctacgagtacgataatctgtacgtccacttcttcgtggagctgccgacagcacattggtcttctccagcctttcagcaattgagcggggtgacgcagacctgtacgacgaagtccctcgcgatggacaaagtagctcactttagctacccgttcacgtttgaggcattttttctgcacgaagacgagtcaagcgacgcacttcctgaatggccagtgttatactgtgaagtgctaagcctggacttttggcagaggtatcgcgtggaaggctatggggctgtggtcctgccggctacaccaggttctcacacgttaacagtgtcgacatggaggcctgtcgaattaggtacagtggcggaactgaggcgcttttttatcggtggtagtcttgaattagaggaccttagctacgtcagaataccgggaagtttcaaggcgttgctatcttcatcaaagacaaaagaaggccgaaaagttgatggcgagcgcgtgttgaacccacagcctgtttcactttctctctttcctggaaagcctcattctaccgcttggggtctgctgaggctgcgttacgaattgtttctcagcaaatag

SEQ ID NO: 275241 - DNA, 1563 bp, Artificial Sequence
  derived and/or modified sequence
atggccgagactgtttggtcaacagacacgggggaggcagtgtatcgctcaagggaccctgtgcgtaatctgcgcctcagggtacaccttcagcgaattacgtcttcgaactttctgcactaccagcctgccgcagagctcggaaaggaccttatcgatctggctacctttaggccgcagccaaccgccagcggtcaccgtcccgaggaagacgaagaagaagagatcgtcatcgggtggcaggaaaagctgttcagtcagtttgaggtcgacctctatcagaatgagactgcctgccagagtcccctcgattatcagtacagacaggagattctgaagctcgaaaattccggcggaaagaaaaaccggagaatcttcacatatactgatagcgacaggtatacaaacttggaggagcactgtcagcgcatgaccacagctgcctcagaggtcccttcttttttggtggaacgtatggccaacgtgagacgtaggcgacaggacagaaggggcatggaggggggaattctgaaaagtagaatcgtaacgtgggagccatcagaagaatttgtgagaaacaaccacgtgattaataccccactgcaaactatgcacatcatggcagacctgggaccatataagaagttgggatataagaaatatgagcacgtcctctgcaccctgaaggtcgatagtaacggcgtaatcacagtgaaaccggactttacaggcttgaagggaccataccgaattgagacagagggcgaaaagcaagagctctggaaatataccattgataatgtttctccccacgctcagccggaagaagaggaacgggagcgccgagttttcaaagatctttatggcaggcacaaagaatacctgagctcattggttggaacagattttgagatgacagtgcctggtgccttacggctctttgtgaacggcgaggtagtgagtgcacagggatacgaatatgataacttatatgtccacttttttgttgagttacctacagcccactggtcttcccctgcgttccagcagctgtctggggtaacgcaaacttgcaccaccaagtctcttgctatggataaagtcgcgcacttctcctacccattcacctttgaggcattttttctccacgaagatgagtcctccgacgccttgccagagtggcctgtgctatactgcgaagttctctcactggacttttggcaaaggtacagggtcgaaggctatggggctgtggtactgccggctacgccgggaagccacactctgaccgtgagtacttggcggcctgtcgaactgggaacggtagcagaattaaggcgcttttttatcggcggatcgcttgaacttgaggacctgagctatgtgaggatccctggatcattcaaagggctaagcagctcaaaaacaaaggaaggtaggaaggttgatggagaacgcgtactaaatccccaacccgtgtcactaagcttgttccctggaaagccccacagcactgcctggggactgcttcgactgagatacgagctatttctgagcaagtag

SEQ ID NO: 275242 - DNA, 1566 bp, Artificial Sequence
  derived and/or modified sequence
atggccgagaccgtgtggagcaccgacaccggcgaggccgtgtacagaagcagagaccccgtgagaaacctgagactgagagtgcacctgcagagaatcaccagcagcaacttcctgcactaccagcccgccgccgagctgggcaaggacctgatcgacctggccaccttcagaccccagcccaccgccagcggccacagacccgaggaggacgaggaggaggagatcgtgatcggctggcaggagaagctgttcagccagttcgaggtggacctgtaccagaacgagaccgcctgccagagccccctggactaccagtacagacaggagatcctgaagctggagaacagcggcggcaagaagaacagaagaatcttcacctacaccgacagcgacagatacaccaacctggaggagcactgccagagaatgaccaccgccgccagcgaggtgcccagcttcctggtggagagaatggccaacgtgagaagaagaagacaggacagaagaggcatggagggcggcatcctgaagagcagaatcgtgacctgggagcccagcgaggagttcgtgagaaacaaccacgtgatcaacacccccctgcagaccatgcacatcatggccgacctgggcccctacaagaagctgggctacaagaagtacgagcacgtgctgtgcaccctgaaggtggacagcaacggcgtgatcaccgtgaagcccgacttcaccggcctgaagggcccctacagaatcgagaccgagggcgagaagcaggagctgtggaagtacaccatcgacaacgtgagcccccacgcccagcccgaggaggaggagagagagagaagagtgttcaaggacctgtacggcagacacaaggagtacctgagcagcctggtgggcaccgacttcgagatgaccgtgcccggcgccctgagactgttcgtgaacggcgaggtggtgagcgcccagggctacgagtacgacaacctgtacgtgcacttcttcgtggagctgcccaccgcccactggagcagccccgccttccagcagctgagcggcgtgacccagacctgcaccaccaagagcctggccatggacaaggtggcccacttcagctaccccttcaccttcgaggccttcttcctgcacgaggacgagagcagcgacgccctgcccgagtggcccgtgctgtactgcgaggtgctgagcctggacttctggcagagatacagagtggagggctacggcgccgtggtgctgcccgccacccccggcagccacaccctgaccgtgagcacctggagacccgtggagctgggcaccgtggccgagctgagaagattcttcatcggcggcagcctggagctggaggacctgagctacgtgagaatccccggcagcttcaaggccctgctgagcagcagcaagaccaaggagggcagaaaggtggacggcgagagagtgctgaacccccagcccgtgagcctgagcctgttccccggcaagccccacagcaccgcctggggcctgctgagactgagatacgagctgttcctgagcaagtag

SEQ ID NO: 275243 - DNA, 1563 bp, Artificial Sequence
  derived and/or modified sequence
atggccgagaccgtgtggagcaccgacaccggcgaggccgtgtacagaagcagagaccccgtgagaaacctgagactgagagtgcacctgcagagaatcaccagcagcaacttcctgcactaccagcccgccgccgagctgggcaaggacctgatcgacctggccaccttcagaccccagcccaccgccagcggccacagacccgaggaggacgaggaggaggagatcgtgatcggctggcaggagaagctgttcagccagttcgaggtggacctgtaccagaacgagaccgcctgccagagccccctggactaccagtacagacaggagatcctgaagctggagaacagcggcggcaagaagaacagaagaatcttcacctacaccgacagcgacagatacaccaacctggaggagcactgccagagaatgaccaccgccgccagcgaggtgcccagcttcctggtggagagaatggccaacgtgagaagaagaagacaggacagaagaggcatggagggcggcatcctgaagagcagaatcgtgacctgggagcccagcgaggagttcgtgagaaacaaccacgtgatcaacacccccctgcagaccatgcacatcatggccgacctgggcccctacaagaagctgggctacaagaagtacgagcacgtgctgtgcaccctgaaggtggacagcaacggcgtgatcaccgtgaagcccgacttcaccggcctgaagggcccctacagaatcgagaccgagggcgagaagcaggagctgtggaagtacaccatcgacaacgtgagcccccacgcccagcccgaggaggaggagagagagagaagagtgttcaaggacctgtacggcagacacaaggagtacctgagcagcctggtgggcaccgacttcgagatgaccgtgcccggcgccctgagactgttcgtgaacggcgaggtggtgagcgcccagggctacgagtacgacaacctgtacgtgcacttcttcgtggagctgcccaccgcccactggagcagccccgccttccagcagctgagcggcgtgacccagacctgcaccaccaagagcctggccatggacaaggtggcccacttcagctaccccttcaccttcgaggccttcttcctgcacgaggacgagagcagcgacgccctgcccgagtggcccgtgctgtactgcgaggtgctgagcctggacttctggcagagatacagagtggagggctacggcgccgtggtgctgcccgccacccccggcagccacaccctgaccgtgagcacctggagacccgtggagctgggcaccgtggccgagctgagaagattcttcatcggcggcagcctggagctggaggacctgagctacgtgagaatccccggcagcttcaagggcctgagcagcagcaagaccaaggagggcagaaaggtggacggcgagagagtgctgaacccccagcccgtgagcctgagcctgttccccggcaagccccacagcaccgcctggggcctgctgagactgagatacgagctgttcctgagcaagtag

SEQ ID NO: 275244 - DNA, 1071 bp, Artificial Sequence
  derived and/or modified sequence
atgcatatcatggccgacctgggtccctataagaagttagggtataaaaagtatgaacacgtgctgtgtactctaaaagttgactctaacggggtgattacagttaaacccgacttcaccggccttaagggcccctatcggatcgagaccgaaggtgaaaagcaggaactctggaagtacaccatcgacaatgtaagcccccacgctcagcccgaagaagaagagcgggagcggagagttttcaaggacttgtacgggcggcacaaggagtaccttagtagtttagttggtacagacttcgagatgacagttcccggtgccctccgtctgtttgtcaatggagaggtggtatccgctcaggggtacgaatacgacaatctgtacgtacatttcttcgtggaactgcccactgcgcattggtctagcccggccttccagcagttaagtggggtaacccaaacatgtacaaccaagtctctagccatggacaaggtagcacacttctcttaccctttcacattcgaagcattcttcctgcacgaagatgagagtagtgatgccctccccgagtggccagtcctgtactgcgaagttttgagtctggacttctggcagcggtaccgcgtagaaggttacggcgctgtagtgctccccgccacccctgggtcacacacactgactgtgtctacttggagacccgttgaactcggcactgtggccgagttacgacgcttcttcatcggtggatcactcgagcttgaggatctgagttacgtgcgcatcccaggttcattcaaaggcgagcgcttatcccggttcgggcttagaacagaaacgacaggcacggtcacatttaggctgcactgtttgcagcagtcgagggcttttatggaaagtagctccttgcagaagcggatgcggtcagtgctcgaccggctcgagggcttctcacagcagagtagtattcacaatgtccttgaggcctttcggcgggcaagacgcagaatgcaagaagcccgggaaagcctccctcaagacctcgtgtccccctccggcacattggtttcctag

SEQ ID NO: 275245 - DNA, 1071 bp, Artificial Sequence
  derived and/or modified sequence
atgcacatcatggctgacctgggcccctacaagaagctgggctacaagaagtatgagcacgtgctgtgcaccctgaaggtggacagcaatggagtcatcaccgtgaagccagacttcaccggcctgaagggcccctaccgcatcgagacagaaggagagaagcaggagctgtggaagtacaccatcgacaacgtgagcccccacgcccagcctgaggaggaggagcgggagcggcgggtcttcaaggacctgtatggccgccacaaggagtacctgagcagcctggtgggcacagactttgagatgacagtgcctggggccctgcggctgtttgtgaatggagaggtggtgtctgcccagggctatgaatatgacaacctgtatgtgcacttctttgtggagctgcccacagcccactggagcagccctgccttccagcagctgtctggagtgacccagacctgcaccaccaagagcctggccatggacaaggtggcccacttctcctaccccttcacctttgaggccttcttcctgcatgaagatgagagcagtgatgccctgcctgagtggcctgtgctgtactgtgaggtgctgagcctggacttctggcagcgctacagagtggagggctacggggctgtggtgctgcctgccaccccaggcagccacaccctgactgtgtccacctggaggcctgtggagctgggcaccgtggccgagctgcggcgcttcttcatcggcggcagcctggagctggaggacctgtcctatgtgcgcatccctggcagcttcaagggggagcggctgagcagatttggcctgaggacagagaccaccggcaccgtgaccttccggctgcactgcctgcagcagagccgggccttcatggagagcagcagcctgcagaagaggatgaggtctgtgctggaccggctggagggcttcagccagcagagcagcatccacaacgtgctggaggccttccggcgggcccggcggaggatgcaggaggcccgggagagcctgccccaggacctggtgagccccagcggcaccctggtgtcctag

SEQ ID NO: 275246 - DNA, 1071 bp, Artificial Sequence
  derived and/or modified sequence
atgcacatcatggccgacctgggcccctacaagaagctgggctacaagaaatatgagcacgtcctgtgtacattgaaggtggactctaatggggttattaccgtaaaacccgactttactggactgaagggtccatatcggatcgagacagagggagagaagcaggaattgtggaaatatactatcgacaatgtgtctccccatgcacagccagaggaggaagagagggagagaagggtttttaaggatctttatgggcgccacaaggaatacttgtcttctctagtgggtaccgacttcgagatgacagtccccggcgcactccggctgttcgttaatggcgaagtagtgtccgctcagggctatgaatacgataacctctacgtgcacttctttgtcgagcttcccaccgcccattggagtagtcctgcgttccaacagctgagtggtgtcactcaaacctgtaccaccaagtcccttgcaatggacaaagtcgcgcatttttcatatccattcacatttgaggcgttttttctgcatgaagacgaatcatcagatgccctgcctgagtggccagtgctttattgcgaagtgctgtctttggacttctggcagagatatcgcgtcgaaggttacggcgccgtcgtcctccctgcaacccccggctctcataccctgaccgtctccacctggcgaccagtcgagctcggtaccgtcgccgagttgcggcgcttcttcatcggcgggtcactggagctcgaagatttgtcctatgtgcgcatccccggaagctttaaaggcgaaaggctgagcaggttcggtctgagaacggaaaccacaggtaccgtgacttttagactccattgtctgcagcagagccgggcatttatggagtctagctcacttcagaaacgtatgcgcagcgttcttgatcgcctggaaggattttcgcagcagagcagtatccacaacgtgctcgaggcctttcggcgcgcccgtcgccggatgcaagaggcccgcgaaagtttgccccaggatttagtgagtccgtcaggtacattagtctcttag

SEQ ID NO: 275247 - DNA, 1071 bp, Artificial Sequence
  derived and/or modified sequence
atgcacattatggctgacttgggtccctacaagaagttaggctacaagaaatatgaacatgttctgtgcaccctgaaggtggactcgaacggggtcataaccgtcaagccggattttacaggcctcaagggcccataccgcatcgagacagagggggagaagcaggagctgtggaaatacacaatcgataacgtgagtccgcatgctcaacccgaggaggaagaaagagagagacgagtgtttaaggatctttatgggagacataaagagtatctgagttcactggtcggaacagactttgaaatgacagtccctggcgctctcaggctgttcgttaatggcgaagtggttagcgcccaggggtacgagtacgacaacctgtacgttcatttttttgtagaactgcccaccgctcactggtcttcaccggctttccaacagttatctggcgtcacccagacctgcactacaaagagtttagctatggacaaggttgcccacttcagctaccctttcacctttgaagctttttttctgcatgaagacgagagctccgatgcacttcctgaatggcccgtcctgtattgtgaagtgctgagtctggacttctggcagagatatcgagtggaggggtacggtgctgtggtattaccagcgaccccagggagtcataccctgactgtgagtacatggcggcctgtggagctggggaccgtggctgaacttagacgattctttattggcggatctctggagctcgaggatctgtcctacgtgaggataccgggaagcttcaaaggcgaacgcctgtcccgctttggcctacgaactgaaaccacaggtaccgtaacattccggctccactgtctgcagcagtcacgggcattcatggagtcatcctccctgcaaaagcggatgaggagcgttctggacagactggaaggtttttcacaacagtcttccatccacaatgtgctcgaagcctttcggagggctcgcagacgcatgcaagaggctagagagtccctgccccaagatttagtgtccccctctggcactctcgtctcatag

SEQ ID NO: 275248 - DNA, 1071 bp, Artificial Sequence
  derived and/or modified sequence
atgcacatcatggccgacctgggcccctacaagaagctgggctacaagaagtacgagcacgtgctgtgcaccctgaaggtggacagcaacggcgtgatcaccgtgaagcccgacttcaccggcctgaagggcccctacagaatcgagaccgagggcgagaagcaggagctgtggaagtacaccatcgacaacgtgagcccccacgcccagcccgaggaggaggagagagagagaagagtgttcaaggacctgtacggcagacacaaggagtacctgagcagcctggtgggcaccgacttcgagatgaccgtgcccggcgccctgagactgttcgtgaacggcgaggtggtgagcgcccagggctacgagtacgacaacctgtacgtgcacttcttcgtggagctgcccaccgcccactggagcagccccgccttccagcagctgagcggcgtgacccagacctgcaccaccaagagcctggccatggacaaggtggcccacttcagctaccccttcaccttcgaggccttcttcctgcacgaggacgagagcagcgacgccctgcccgagtggcccgtgctgtactgcgaggtgctgagcctggacttctggcagagatacagagtggagggctacggcgccgtggtgctgcccgccacccccggcagccacaccctgaccgtgagcacctggagacccgtggagctgggcaccgtggccgagctgagaagattcttcatcggcggcagcctggagctggaggacctgagctacgtgagaatccccggcagcttcaagggcgagagactgagcagattcggcctgagaaccgagaccaccggcaccgtgaccttcagactgcactgcctgcagcagagcagagccttcatggagagcagcagcctgcagaagagaatgagaagcgtgctggacagactggagggcttcagccagcagagcagcatccacaacgtgctggaggccttcagaagagccagaagaagaatgcaggaggccagagagagcctgccccaggacctggtgagccccagcggcaccctggtgagctag

SEQ ID NO: 275249 - protein, 579 aa, Artificial Sequence
  derived and/or modified sequence
MAEPGGAAGRSHPEDGSASEGEKEGNNESHMVSPPEKDDGQKGEEAVGSTEHPEEVTTQAEAAIEEGEVETEGEAAVEGEEEAVSYGDAESEEEYYYTETSSPEGQISAADTTYPYFSPPQELPGEEAYDSVSGEAGLQGFQQEATGPPESRERRVTSPEPSHGVLGPSEQMGQVTSGPAVGRLTGSTEEPQGQVLPMGVQHRFRLSHGSDIESSDLEEFVSQEPVIPPGVPDAHPREGDLPVFQDQIQQPSTEEGAMAERVESEGSDEEAEDEGSQLVVLDPDHPLMVRFQAALKNYLNRQIEKLKLDLQELVVATKQSRAQRQELGVNLYEVQQHLVHLQKLLEKSHDRHAMASSERRQKEEELQAARALYTKTCAAANEERKKLAALQTEMENLALHLFYMQNIDQDMRDDIRVMTQVVKKAETERIRAEIEKKKQDLYVDQLTTRAQQLEEDIALFEAQYLAQAEDTRILRKAVSEACTEIDAISVEKRRIMQQWASSLVGMKHRDEAHRAVLEALSVSLERFPSQNINTARSRLSTTWHSAGILLRGSFLPGASRAFASVCYGGAAVDNRIREC

SEQ ID NO: 275250 - DNA, 1740 bp, Artificial Sequence
  derived and/or modified sequence
atggccgagcctggaggggccgccggacgtagccatcccgaggacgggagcgcaagcgaaggggagaaagaaggcaataatgaaagccacatggtgagtcctcccgaaaaggacgatgggcagaagggggaggaagctgtagggagcacagagcaccctgaggaggtgacaacacaggccgaggccgctatcgaggagggagaagtagagactgagggcgaggcagcggtcgagggtgaggaggaggccgtgagttatggagacgccgagtctgaagaggagtattattataccgagacaagctccccagaggggcagatcagcgctgccgatacgacatacccttactttagtcctccacaggaattgccgggggaggaagcctacgactctgtcagcggagaagctggactgcaaggattccaacaggaggcaaccggtccacccgaaagtcgggaaaggagggttacatcacccgagccgagccacggggttctgggcccctccgagcagatgggtcaggttacttcgggacctgctgtaggtcggcttaccggcagcacagaagagccccaggggcaagtcttgcctatgggggtgcagcaccgatttcgcctaagccacggcagtgacatcgagagcagcgacttggaagagttcgtgagccaggagcctgtcattcccccaggcgtgcccgacgcacacccccgtgagggtgacctcccagtgttccaggatcaaatccaacaaccaagtacagaagaaggagcgatggcggagagggtcgaatccgagggctccgacgaagaagccgaggacgagggaagtcagctcgttgttctggatcctgaccatcccttgatggtcagatttcaggccgcccttaagaattacctgaatcgtcaaatcgagaagctgaagttggacctccaggaattggtggttgcgacaaaacagagcagggcccagcggcaagagcttggggtgaacctgtacgaggtgcagcagcatctggtccatcttcagaaactgctcgaaaaaagtcacgatagacatgccatggcctctagtgaacggcgccaaaaagaagaggagctgcaggccgctcgtgcactgtacacaaaaacctgcgctgcagccaatgaagaaaggaagaaactggccgcactgcaaactgagatggaaaatttggccttacacctgttctatatgcagaacatcgaccaagatatgagagatgacatcagagtgatgacacaggtcgtgaaaaaggccgagaccgagcgaattagagccgagatcgaaaaaaagaagcaggacctgtatgtggatcaattgacgacgcgcgcacaacagctggaggaagatatcgcgctgtttgaagcccaatatctcgcccaggccgaagatacgaggatcttaaggaaggcagtcagtgaggcttgtaccgagattgacgctataagtgtggagaaacggcggatcatgcagcagtgggcaagctccctggtgggaatgaaacatcgcgacgaagcacaccgggctgttctcgaggctctcagcgtgtccctggagaggttcccaagccagaacattaacactgcgcggagccgactctcgacgacttggcacagtgccggcattctcctgcgaggctcattcctgcccggggctagtcgcgcgtttgccagcgtgtgctacggaggggccgcggttgacaatcgcatccgggaatgttag

SEQ ID NO: 275251 - DNA, 1437 bp, Artificial Sequence
  derived and/or modified sequence
atggcggagcctggaggggccgcaggaaggtcgcatcctgaggacgggtcagcctcagaaggcgaaaaagagggcaacaacgaaagtcatatggttagcccacctgaaaaggatgatggacagaaaggggaggaggccgtcggctcgaccgagcaccccgaggaggtgacaactcaggccgaggctgctattgaagagggagaagtggagactgaaggagaggccgccgtggaaggtgaggaggaggctgtgagctatggggacgcagagagtgaagaagagtattattacaccgagaccagtagtcccgagggacagatcagcgccgctgacactacctatccttatttctctccaccgcaggagctgcctggggaagaagcctacgattctgtttcgggtgaggccggactccaagggttccagcaggaggccaccgggcccccagagtcccgagagcgccgcgtgacgagtccggagccatctcatggtgtgctggggcccagcgaacaaatgggtcaggttacctctgggcccgccgtgggacgattgaccggaagtacggaggaaccgcagggccaggttttgccaatgggcgttcagcaccggtttcggttatcccacgggagcgacatcgagagtagcgatcttgaagagtttgttagccaggagcctgtgattcctccaggggtccctgacgcgcaccccagggagggtgatttgccggtcttccaagaccaaattcagcagccttctactgaggagggggcaatggcggagcgtgtggaatccgaagggtccgatgaggaagccgaggacgagggatctcagctggttgtcctggatcctgatcatcccctgatggtgcgctttcaagcagccctcaagaattacctgaacaggcaaattgagaagttgaaactggatctgcaggagctcgtcgtcgccacaaaacagtcgcgcgcccagcggcaggaactgggcgtgaatctgtacgaggtacagcagcacttggtgcacctacagaaactgctggaaaaatcccacgatcggcacgccatggcgagctccgaacgtaggcagaaggaagaagaactccaagccgcgagggctttatataccaagacctgcgcagctgctaatgaggagcgcaagaagctcgcggcacttcagacagagatggagaatctggcgctccacctgttctacatgcagaatattgaccaagacatgagggacgacatacgggtcatgacacaggtggtcaagaaggctgaaactgagagaatccgggccgagatcgagaagaagaaacaaggcgtgggcgacacaggcgctgcttttatcccaaagacaacacagggggatcaggtaagcggacgaggaaagaaaaagcccggcacagtagtagctcgggtcagtcctgcagagctctag

SEQ ID NO: 275252 - DNA, 1740 bp, Artificial Sequence
  derived and/or modified sequence
atggccgagcccggcggggccgccggccgcagccacccagaagatggcagcgccagcgagggggagaaggagggcaacaatgaaagccacatggtgagccccccagagaaggatgatggccagaagggggaggaggccgtgggcagcacagagcaccctgaggaggtgaccacccaggccgaggccgccatcgaggagggggaggtggagacagaaggagaggccgctgtggagggggaggaggaggccgtgtcctatggagatgctgagagcgaggaggagtactactacacagagaccagcagccctgagggccagatctctgctgctgacaccacctacccctacttcagccccccccaggagctgcccggggaggaggcctatgattctgtgtctggagaggccggcctgcagggcttccagcaggaggccaccggccccccagagagccgggagcggcgggtgaccagccctgagcccagccatggagtgctgggccccagcgagcagatgggccaggtgaccagcggccctgctgtgggccgcctgaccggcagcacagaggagccccagggccaggtgctgcccatgggcgtgcagcaccgcttccggctgagccacggcagtgacatcgagagcagtgacctggaggagtttgtgtcccaggagcctgtgatccccccaggagtgcctgatgcccacccccgggagggggacctgcccgtcttccaggaccagatccagcagcccagcacagaggagggcgccatggccgagcgggtggagagcgagggcagtgatgaggaggccgaggatgagggcagccagctggtggtgctggaccctgaccaccccctgatggtgcgcttccaggccgccctgaagaactacctgaaccggcagatcgagaagctgaagctggacctgcaggagctggtggtggccaccaagcagagccgggcccagaggcaggagctgggcgtgaacctgtatgaggtgcagcagcacctggtgcacctgcagaagctgctggagaagagccatgacagacatgccatggccagcagcgagcggcggcagaaggaggaggagctgcaggccgcccgggccctgtacaccaagacctgtgccgccgccaatgaggagaggaagaagctggccgccctgcagacagagatggagaacctggccctgcacctgttctacatgcagaacatcgaccaggacatgagagatgacatccgggtgatgacccaggtggtgaagaaggccgagacagagcgcatccgggcagaaattgagaagaagaagcaggacctgtatgtggaccagctgaccacccgggcccagcagctggaggaggacatcgccctgtttgaggcccagtacctggcccaggccgaggacacccgcatcctgaggaaggctgtgtctgaggcctgcacagaaattgatgccatctctgtggagaagaggcgcatcatgcagcagtgggccagcagcctggtgggcatgaagcacagagatgaggcccacagagctgtgctggaggccctgtctgtgtccctggagcgcttccccagccagaacatcaacacagcccggagccggctgagcaccacctggcacagcgctggcatcctgctgcggggcagcttcctgcccggggccagccgggcctttgcctctgtgtgctatggaggagctgctgtggacaaccgcatccgggagtgctag

SEQ ID NO: 275253 - DNA, 1437 bp, Artificial Sequence
  derived and/or modified sequence
atggccgagcccggcggggccgccggccgcagccacccagaagatggcagcgccagcgagggggagaaggagggcaacaatgaaagccacatggtgagccccccagagaaggatgatggccagaagggggaggaggccgtgggcagcacagagcaccctgaggaggtgaccacccaggccgaggccgccatcgaggagggggaggtggagacagaaggagaggccgctgtggagggggaggaggaggccgtgtcctatggagatgctgagagcgaggaggagtactactacacagagaccagcagccctgagggccagatctctgctgctgacaccacctacccctacttcagccccccccaggagctgcccggggaggaggcctatgattctgtgtctggagaggccggcctgcagggcttccagcaggaggccaccggccccccagagagccgggagcggcgggtgaccagccctgagcccagccatggagtgctgggccccagcgagcagatgggccaggtgaccagcggccctgctgtgggccgcctgaccggcagcacagaggagccccagggccaggtgctgcccatgggcgtgcagcaccgcttccggctgagccacggcagtgacatcgagagcagtgacctggaggagtttgtgtcccaggagcctgtgatccccccaggagtgcctgatgcccacccccgggagggggacctgcccgtcttccaggaccagatccagcagcccagcacagaggagggcgccatggccgagcgggtggagagcgagggcagtgatgaggaggccgaggatgagggcagccagctggtggtgctggaccctgaccaccccctgatggtgcgcttccaggccgccctgaagaactacctgaaccggcagatcgagaagctgaagctggacctgcaggagctggtggtggccaccaagcagagccgggcccagaggcaggagctgggcgtgaacctgtatgaggtgcagcagcacctggtgcacctgcagaagctgctggagaagagccatgacagacatgccatggccagcagcgagcggcggcagaaggaggaggagctgcaggccgcccgggccctgtacaccaagacctgtgccgccgccaatgaggagaggaagaagctggccgccctgcagacagagatggagaacctggccctgcacctgttctacatgcagaacatcgaccaggacatgagagatgacatccgggtgatgacccaggtggtgaagaaggccgagacagagcgcatccgggcagaaattgagaagaagaagcagggcgtgggggacaccggggccgccttcatccccaagaccacccagggcgaccaggtgtctggccggggcaagaagaagccaggcaccgtggtggcccgggtgtccccagctgagctgtag

SEQ ID NO: 275254 - DNA, 1740 bp, Artificial Sequence
  derived and/or modified sequence
atggccgagcccggcggcgccgccggccggagccaccccgaggacgggagcgctagcgaaggcgagaaggagggcaacaacgaaagccacatggtgtcacctccggagaaggacgatgggcagaaaggggaagaggccgtgggctcaactgaacaccctgaagaggtcacaacccaggctgaagcggctattgaggagggagaggtcgaaaccgaaggcgaagccgccgtagaaggggaagaggaggctgtcagctatggcgacgcggaatcagaagaggaatactactataccgagaccagctcacccgaggggcagattagcgctgcagacacgacatacccctatttctcgccgccccaggagctccctggagaggaggcttacgatagcgtgtccggtgaggcaggcctgcagggattccagcaggaggccaccgggccccccgagtcaagggaaagaagggtgacttccccagagcccagccatggagttctgggcccctcagagcagatggggcaggtgacctctggacctgcggtgggccgtctgaccggaagcactgaggaaccccaaggacaggttctccctatgggtgtgcagcaccggttccgcctctcccacgggtccgacattgagtctagcgatttagaggagtttgtttctcaggagcccgtgatcccccccggtgtacctgatgcacaccctagagaaggcgatcttccagtgtttcaggaccagatacagcaacctagcacggaagaaggcgctatggctgaaagggtggagagcgaagggtccgacgaggaggctgaggatgaaggcagccagttggttgtcttagacccagaccaccctcttatggtcagatttcaagcggcactgaaaaattatctgaaccggcagatcgaaaagttaaagctggacttgcaggagttggtcgtggctacaaaacaaagccgtgctcaaaggcaggagctgggcgtgaatctgtacgaggtccagcaacatttggtgcacctccagaagctacttgaaaaaagccatgatagacacgcaatggcgagctctgaacgtcgacagaaagaagaagaactgcaggccgctagagccttatacacgaagacatgcgctgccgcaaacgaagagaggaaaaaactggcggctctgcagactgaaatggagaacctggctttgcatctcttctatatgcagaacatcgatcaggatatgagggacgacattagggtgatgacacaggtggtcaaaaaggcagaaaccgagagaattagggcagagattgagaaaaaaaaacaggatctttatgtggaccaactcaccactcgcgcgcagcagctggaagaagacatagcgctcttcgaggcacagtatctggcccaggccgaggacacaaggatcctccgaaaagctgtttctgaagcctgcaccgaaatcgatgccatcagcgtcgagaaacggaggattatgcagcagtgggccagtagtcttgtcggaatgaaacacagggacgaggcccaccgcgcagtccttgaagccctgagtgtttctttagaaagatttcccagtcagaacattaataccgcaaggagccggctgtctacaacatggcacagcgccggaatcctcctgagagggtcgtttctgccaggcgccagcagggccttcgcttcagtttgctacggcggcgctgctgtggataatagaattcgggagtgttag

SEQ ID NO: 275255 - DNA, 1437 bp, Artificial Sequence
  derived and/or modified sequence
atggccgagcccggcggcgccgccggccggagccaccccgaggacggctccgcctcagagggggagaaggagggcaacaacgagtcccacatggtgtctccacccgaaaaggacgacggccagaagggagaagaagctgtaggttccaccgagcaccctgaagaggttacaacccaggctgaggctgccattgaggagggcgaggttgagacggagggagaggccgccgttgaaggggaagaagaggccgtgagctatggagacgccgagtcggaggaggagtattactacaccgaaacttcaagccctgaagggcagatcagcgcggccgacacaacctatccttacttctcccctccacaagagctacctggagaggaggcttatgacagcgtgtccggcgaggctggactccaggggttccaacaagaggctacaggtcctccagaatctcgggagagacgtgttacctcccctgagccctcacatggggttctgggacccagcgagcagatgggtcaagtgacctcaggacctgccgtcgggaggctgaccgggtcaacagaggagccgcaggggcaggtgctgcccatgggtgtacagcacaggttccgtctctctcatggcagcgatatcgagagtagcgatctggaagaattcgtctctcaagagcctgtcatcccaccgggagtcccagatgcccacccgagagaaggtgatctaccggtttttcaggaccagattcagcagccgagtaccgaagaaggcgccatggccgagagggtagaatccgaggggtcagatgaagaagccgaggacgaaggctcacagctggtggtgctggaccccgaccacccgctgatggtgaggttccaggcagccctgaagaattacctgaacaggcagattgaaaaactgaagttagacttgcaagagctggtggttgctactaaacagagccgcgctcaacgccaggagttgggcgtgaacttgtatgaagtgcaacagcacttagtgcacttgcaaaaactattggagaaatcccacgacagacatgccatggctagctccgaacgcagacagaaagaggaagagcttcaagccgctcgggcgttatatacaaagacctgcgcagcggccaacgaggaaagaaaaaagcttgccgcacttcagacagagatggaaaacctggcgctccaccttttctatatgcaaaatattgatcaggacatgcgagatgatatcagagtcatgacacaagtggtgaagaaggctgagactgagcgcatacgtgctgagatcgaaaaaaagaagcagggagttggggacactggcgcggccttcattccgaagaccacgcaaggcgatcaggtttccggccgcgggaagaagaagcccgggactgtcgtggcccgggtatcccccgccgaactatag

SEQ ID NO: 275256 - DNA, 1740 bp, Artificial Sequence
  derived and/or modified sequence
atggccgagcccggtggcgcagctggtcgaagccatcctgaggatgggtccgcttctgagggcgaaaaggaaggaaataacgagagtcacatggtctcccccccagaaaaggacgatgggcagaagggtgaagaagccgttggttcaacagaacatcccgaagaggtgaccacgcaagctgaagccgctattgaggaaggagaagtagagacagagggtgaagcggctgtagaaggtgaggaggaggctgtctcttacggagacgctgagtccgaggaagagtattactacacagagacttccagcccagaaggccagatctcagccgctgataccacgtacccctacttttcaccccctcaggaactacctggggaggaagcttatgatagtgtgtccggggaggccggtctgcaaggatttcaacaggaggctactgggccacccgaatcccgcgagagacgcgtgacaagccccgagccctcacacggagtactgggaccatccgaacaaatggggcaggtgacttcaggaccggcagtaggacgcctgaccggcagcactgaagagcctcaggggcaggtgctgccaatgggcgtgcaacaccggttccggttgtcacacggtagcgacattgaaagctcagacctggaagaattcgtatcccaggagcctgtgatcccccctggagttcccgatgcccaccccagagaaggggaccttcccgtcttccaggatcagattcagcaaccttcgacggaggaaggcgctatggccgaaagggtggaaagtgagggctccgacgaagaggccgaagacgaaggcagtcagctggtggtcttagaccccgaccatccactcatggtacggttccaggcagcccttaagaactatcttaacaggcagatcgagaagctgaaactggaccttcaggaactcgtagttgctacaaaacagtcaagagcacagaggcaggagttaggggtcaacctctacgaggtgcaacagcacttggtgcatctgcagaagctgttggagaaaagccacgacaggcacgctatggccagctctgaacggcgtcaaaaagaggaggagctgcaggccgcaagggccctctacaccaagacatgcgccgcagcaaatgaagagcgaaaaaagcttgcggctcttcagaccgagatggagaacttagcactgcacctcttctacatgcagaacatcgaccaggacatgcgtgatgacatccgagtcatgacgcaggtggtcaaaaaagcagaaaccgaacgcatccgggcagaaatcgaaaagaagaagcaggatctctacgtggatcagctcacaactcgcgctcagcaattggaagaggacatcgcactttttgaagcacagtatctcgctcaggcagaagatactaggattctcagaaaggccgtcagcgaggcgtgcacagaaatagatgcaatctccgtggagaaaagaaggatcatgcaacaatgggcgagctcactcgtggggatgaagcatcgcgacgaggcccaccgcgctgtgcttgaggcattaagtgtgagtctcgaaaggtttcctagtcaaaatattaatacagctagaagtcgcttgtcaaccacatggcactctgctggcattctgttacggggttctttcctgcccggagcttctagagccttcgcctctgtgtgttatgggggagcggctgtggataaccgcatccgggagtgctag

SEQ ID NO: 275257 - DNA, 1437 bp, Artificial Sequence
  derived and/or modified sequence
atggctgaacctgggggagccgctggccgtagtcatcctgaggatggctccgcctcagaaggtgaaaaagagggaaacaacgaatcccacatggtcagccctcctgagaaggatgatgggcagaagggggaggaggccgtgggaagtactgagcaccccgaagaggtcacgacccaggccgaagccgcaatagaggaaggcgaagtggagacggaaggagaggcggctgtcgagggcgaggaagaagcagtcagctatggggatgcagagagtgaggaggagtactactataccgagacctcctctcctgagggtcagattagcgccgcagacacaacttatccctacttctcaccaccacaggagctgcccggagaggaagcctacgattcagtcagcggcgaggccggacttcaggggtttcagcaggaggctactggcccacccgaatcacgcgagagacgagtgacctcccccgaaccgtctcatggtgttttgggcccatctgaacaaatggggcaggtgacttcaggcccagcggtcgggcgtctcaccgggtccaccgaagagccccagggacaggtactacccatgggcgttcaacatcggtttcggttatcccacggcagcgatattgagtcttctgacctagaggaatttgtaagccaagagcccgtaattccacccggtgtcccggacgcccacccgagggagggtgatctgccagtgttccaggaccagattcaacaaccatccacagaggagggagcaatggccgaaagagtggaatctgaaggctccgatgaagaagccgaggacgaggggagccagttggtggtgctggaccccgaccatccccttatggtgcgatttcaagcagccctcaaaaattacctgaatagacagattgagaaactgaagctggacctacaggaactggtggtggcaaccaaacagtcccgggctcagcggcaggagctgggtgtgaacctatacgaagtacagcagcacctagtgcacctgcagaaactcctggagaaatcacacgaccgacatgccatggcaagctcggaacgcaggcagaaagaggaagagctccaggccgcaagggcactatacacaaaaacctgtgctgcggcaaatgaggagaggaaaaagctggcagccctgcagaccgaaatggagaacttggcccttcacttattctacatgcagaacatagatcaggacatgagagatgacattagagtgatgactcaggtggtgaaaaaggcggaaactgaaagaatacgtgcagagattgaaaagaagaaacaaggtgttggggacacaggagcagccttcatcccaaagactacacagggcgaccaggtgagcggcaggggtaaaaaaaaacctggaacagttgtcgctcgcgtcagccccgctgagctttag

SEQ ID NO: 275258 - DNA, 1767 bp, Artificial Sequence
  derived and/or modified sequence
gttgacagcgtcgcctagcaacgggaaatggcggaaccgggcggcgcggcgggccggtcccatccggaagatggatcggcttctgagggagagaaggaagggaataatgaaagccacatggtgtcaccaccagagaaggatgatggccagaaaggtgaagaagctgtcggtagcacagagcatcctgaggaagtcacaacccaagcggaagctgcaattgaagagggggaggtggagacagaaggggaagcagcagtggaaggggaagaggaggctgtgtcctatggagatgctgaaagcgaagaggaatattactatacagaaacttcatccccggaagggcaaatcagtgctgcagatacgacttacccgtatttcagtcctcctcaggaactgcctggagaggaggcatacgatagtgttagcggggaggctggtctccaaggcttccagcaagaggccaccggtccaccagaatccagagaaaggagggtcacctccccagagccatcccacggagtcttaggcccgtcggagcaaatgggccaggtcacctctgggccagcagtgggcagattgacaggatccacagaggagccccaggggcaggtgctcccaatgggcgtccagcaccgcttccggctgagccacgggagcgacatcgagtcctcagacctggaggagttcgtctcgcaggagccagtgatccccccaggggtgcccgatgcccaccccagggaaggagacctgccagtgttccaggaccagatccagcagcccagcaccgaggagggggccatggcagagagagtggagtccgaggggagtgacgaggaagcagaagacgaagggtcccagctggtggttttggacccagaccaccccctgatggtaagattccaggctgccctgaagaactacctgaaccgacagatcgaaaagttgaagctggacctccaagagctggttgtggctaccaagcagagccgagcccagcggcaggagctgggggtgaatctctatgaggtgcagcagcacctggtacacctgcagaagctgctggagaagagtcacgaccgccacgcaatggcctcgagcgagcgcaggcagaaggaggaggagctgcaggccgcccgcgctctctacaccaagacctgcgcagccgccaacgaggagcgcaaaaagttggcggctctgcagactgagatggagaacttggccctgcatctcttctacatgcagaacatcgaccaggacatgcgtgacgacatccgcgtgatgacacaagtggtaaagaaggccgagacggagaggatccgggcagaaatcgagaagaaaaagcaggacctgtatgtggaccagctcaccactcgagcccagcaactggaagaagacattgccctgtttgaggctcagtacttggcccaagctgaggacacccggattttaaggaaagcagtgagtgaggcctgcaccgagatcgacgccatcagcgtggagaagaggcgcatcatgcagcaatgggccagcagcctggtgggcatgaagcaccgcgacgaggcgcacagggcggtgctggaggcgctcagcgtgtccctagagcgcttcccaagtcaaaatataaacaccgctcgttcccgcctttctaccacatggcattccgctgggatacttctacggggaagcttcctgcccggggcatcgagggcgttcgcgtccgtctgttatggcggtgctgctgtagataaccggatccgcgaatgctaa

SEQ ID NO: 275259 - DNA, 1464 bp, Artificial Sequence
  derived and/or modified sequence
gttgacagcgtcgcctagcaacgggaaatggcggaaccgggcggcgcggcgggccggtcccatccggaagatggatcggcttctgagggagagaaggaagggaataatgaaagccacatggtgtcaccaccagagaaggatgatggccagaaaggtgaagaagctgtcggtagcacagagcatcctgaggaagtcacaacccaagcggaagctgcaattgaagagggggaggtggagacagaaggggaagcagcagtggaaggggaagaggaggctgtgtcctatggagatgctgaaagcgaagaggaatattactatacagaaacttcatccccggaagggcaaatcagtgctgcagatacgacttacccgtatttcagtcctcctcaggaactgcctggagaggaggcatacgatagtgttagcggggaggctggtctccaaggcttccagcaagaggccaccggtccaccagaatccagagaaaggagggtcacctccccagagccatcccacggagtcttaggcccgtcggagcaaatgggccaggtcacctctgggccagcagtgggcagattgacaggatccacagaggagccccaggggcaggtgctcccaatgggcgtccagcaccgcttccggctgagccacgggagcgacatcgagtcctcagacctggaggagttcgtctcgcaggagccagtgatccccccaggggtgcccgatgcccaccccagggaaggagacctgccagtgttccaggaccagatccagcagcccagcaccgaggagggggccatggcagagagagtggagtccgaggggagtgacgaggaagcagaagacgaagggtcccagctggtggttttggacccagaccaccccctgatggtaagattccaggctgccctgaagaactacctgaaccgacagatcgaaaagttgaagctggacctccaagagctggttgtggctaccaagcagagccgagcccagcggcaggagctgggggtgaatctctatgaggtgcagcagcacctggtacacctgcagaagctgctggagaagagtcacgaccgccacgcaatggcctcgagcgagcgcaggcagaaggaggaggagctgcaggccgcccgcgctctctacaccaagacctgcgcagccgccaacgaggagcgcaaaaagttggcggctctgcagactgagatggagaacttggccctgcatctcttctacatgcagaacatcgaccaggacatgcgtgacgacatccgcgtgatgacacaagtggtaaagaaggccgagacggagaggatccgggcagaaatcgagaagaaaaagcagggcgttggagacacaggtgctgccttcattcctaaaaccacccagggtgaccaggtctcgggacgcggaaagaaaaagccgggcactgtggtggcacgtgtctcacccgctgagctttaa

SEQ ID NO: 275260 - DNA, 1740 bp, Artificial Sequence
  derived and/or modified sequence
atggccgagcccggcggcgccgccggcagaagccaccccgaggacggcagcgccagcgagggcgagaaggagggcaacaacgagagccacatggtgagcccccccgagaaggacgacggccagaagggcgaggaggccgtgggcagcaccgagcaccccgaggaggtgaccacccaggccgaggccgccatcgaggagggcgaggtggagaccgagggcgaggccgccgtggagggcgaggaggaggccgtgagctacggcgacgccgagagcgaggaggagtactactacaccgagaccagcagccccgagggccagatcagcgccgccgacaccacctacccctacttcagccccccccaggagctgcccggcgaggaggcctacgacagcgtgagcggcgaggccggcctgcagggcttccagcaggaggccaccggcccccccgagagcagagagagaagagtgaccagccccgagcccagccacggcgtgctgggccccagcgagcagatgggccaggtgaccagcggccccgccgtgggcagactgaccggcagcaccgaggagccccagggccaggtgctgcccatgggcgtgcagcacagattcagactgagccacggcagcgacatcgagagcagcgacctggaggagttcgtgagccaggagcccgtgatcccccccggcgtgcccgacgcccaccccagagagggcgacctgcccgtgttccaggaccagatccagcagcccagcaccgaggagggcgccatggccgagagagtggagagcgagggcagcgacgaggaggccgaggacgagggcagccagctggtggtgctggaccccgaccaccccctgatggtgagattccaggccgccctgaagaactacctgaacagacagatcgagaagctgaagctggacctgcaggagctggtggtggccaccaagcagagcagagcccagagacaggagctgggcgtgaacctgtacgaggtgcagcagcacctggtgcacctgcagaagctgctggagaagagccacgacagacacgccatggccagcagcgagagaagacagaaggaggaggagctgcaggccgccagagccctgtacaccaagacctgcgccgccgccaacgaggagagaaagaagctggccgccctgcagaccgagatggagaacctggccctgcacctgttctacatgcagaacatcgaccaggacatgagagacgacatcagagtgatgacccaggtggtgaagaaggccgagaccgagagaatcagagccgagatcgagaagaagaagcaggacctgtacgtggaccagctgaccaccagagcccagcagctggaggaggacatcgccctgttcgaggcccagtacctggcccaggccgaggacaccagaatcctgagaaaggccgtgagcgaggcctgcaccgagatcgacgccatcagcgtggagaagagaagaatcatgcagcagtgggccagcagcctggtgggcatgaagcacagagacgaggcccacagagccgtgctggaggccctgagcgtgagcctggagagattccccagccagaacatcaacaccgccagaagcagactgagcaccacctggcacagcgccggcatcctgctgagaggcagcttcctgcccggcgccagcagagccttcgccagcgtgtgctacggcggcgccgccgtggacaacagaatcagagagtgctag

SEQ ID NO: 275261 - DNA, 1437 bp, Artificial Sequence
  derived and/or modified sequence
atggccgagcccggcggcgccgccggcagaagccaccccgaggacggcagcgccagcgagggcgagaaggagggcaacaacgagagccacatggtgagcccccccgagaaggacgacggccagaagggcgaggaggccgtgggcagcaccgagcaccccgaggaggtgaccacccaggccgaggccgccatcgaggagggcgaggtggagaccgagggcgaggccgccgtggagggcgaggaggaggccgtgagctacggcgacgccgagagcgaggaggagtactactacaccgagaccagcagccccgagggccagatcagcgccgccgacaccacctacccctacttcagccccccccaggagctgcccggcgaggaggcctacgacagcgtgagcggcgaggccggcctgcagggcttccagcaggaggccaccggcccccccgagagcagagagagaagagtgaccagccccgagcccagccacggcgtgctgggccccagcgagcagatgggccaggtgaccagcggccccgccgtgggcagactgaccggcagcaccgaggagccccagggccaggtgctgcccatgggcgtgcagcacagattcagactgagccacggcagcgacatcgagagcagcgacctggaggagttcgtgagccaggagcccgtgatcccccccggcgtgcccgacgcccaccccagagagggcgacctgcccgtgttccaggaccagatccagcagcccagcaccgaggagggcgccatggccgagagagtggagagcgagggcagcgacgaggaggccgaggacgagggcagccagctggtggtgctggaccccgaccaccccctgatggtgagattccaggccgccctgaagaactacctgaacagacagatcgagaagctgaagctggacctgcaggagctggtggtggccaccaagcagagcagagcccagagacaggagctgggcgtgaacctgtacgaggtgcagcagcacctggtgcacctgcagaagctgctggagaagagccacgacagacacgccatggccagcagcgagagaagacagaaggaggaggagctgcaggccgccagagccctgtacaccaagacctgcgccgccgccaacgaggagagaaagaagctggccgccctgcagaccgagatggagaacctggccctgcacctgttctacatgcagaacatcgaccaggacatgagagacgacatcagagtgatgacccaggtggtgaagaaggccgagaccgagagaatcagagccgagatcgagaagaagaagcagggcgtgggcgacaccggcgccgccttcatccccaagaccacccagggcgaccaggtgagcggcagaggcaagaagaagcccggcaccgtggtggccagagtgagccccgccgagctgtag

SEQ ID NO: 275262 - DNA, 1095 bp, Artificial Sequence
  derived and/or modified sequence
atgaacgtgtaccacttcaagaagggcaccgagatctgcaactacagctacagcagcaacatcctgagcatcagactgaacagacagagactgctggtgtgcctggaggagagcatctacatccacaacatcaaggacatgaagctgctgaagaccctgctggacatccccgccaaccccaccggcctgtgcgccctgagcatcaaccacagcaacagctacctggcctaccccggcagcctgaccagcggcgagatcgtgctgtacgacggcaacagcctgaagaccgtgtgcaccatcgccgcccacgagggcaccctggccgccatcaccttcaacgccagcggcagcaagctggccagcgccagcgagaagggcaccgtgatcagagtgttcagcgtgcccgacggccagaagctgtacgagttcagaagaggcatgaagagatacgtgaccatcagcagcctggtgttcagcatggacagccagttcctgtgcgccagcagcaacaccgagaccgtgcacatcttcaagctggagcaggtgaccaacagcagacccgaggagcccagcacctggagcggctacatgggcaagatgttcatggccgccaccaactacctgcccacccaggtgagcgacatgatgcaccaggacagagccttcgccaccgccagactgaacttcagcggccagagaaacatctgcaccctgagcaccatccagaagctgcccagactgctggtggccagcagcagcggccacctgtacatgtacaacctggacccccaggacggcggcgagtgcgtgctgatcaagacccacagcctgctgggcagcggcaccaccgaggagaacaaggagaacgacctgagacccagcctgccccagagctacgccgccaccgtggccagacccagcgccagcagcgccagcaccgtgcccggctacagcgaggacggcggcgccctgagaggcgaggtgatccccgagcacgagttcgccaccggccccgtgtgcctggacgacgagaacgagttcccccccatcatcctgtgcagaggcaaccagaagggcaagaccaagcagagctag

SEQ ID NO: 275263 - DNA, 1095 bp, Artificial Sequence
  derived and/or modified sequence
atgaacgtctaccatttcaagaaggggacggagatctgtaactattcatactctagtaacattctgtcaatcaggctaaatagacagcggctcctggtgtgcctggaggaaagcatctacatacataacatcaaagatatgaaactgcttaaaactttattggatataccagccaatccaacaggactctgcgccctttccataaaccattcaaactcttatctcgcatatccaggctctttgacctctggagagattgttttatatgacggaaattcactgaagacagtttgcacaattgccgctcatgagggcacgctggccgccattacctttaacgcatccggctctaagcttgcctctgcaagcgaaaagggcacggtgattagggtgtttagcgtacctgacggtcaaaagctctatgagttccggcgcggcatgaaacggtacgttactatatctagcctggtattctccatggatagtcagttcctgtgtgcttccagtaatacagagacggtgcacattttcaaacttgagcaggttacaaattcccggccagaggaacctagtacttggagtggctacatgggcaagatgttcatggctgcaacaaattatctgcccacccaggtgtcggatatgatgcaccaggacagggcatttgctaccgcgaggctgaatttttcagggcaacggaatatttgcaccttgagcaccatacagaagctcccccggttgctcgtggcttcatcttccgggcacttgtacatgtacaatctggaccctcaggacggcggggagtgtgtactgatcaaaacacactcactgttgggtagcggcacaactgaggaaaacaaggaaaacgatctgcgaccctccctgccgcagtcttatgcagccaccgttgccagaccgagcgctagctccgcctcgaccgtacctggctactcagaagacggcggtgctcttcggggggaagttatccccgagcatgaattcgctacagggcctgtgtgccttgacgatgaaaacgaatttccccccattatcttatgtcgtggcaaccaaaaaggcaaaactaaacaatcgtag

SEQ ID NO: 275264 - DNA, 1095 bp, Artificial Sequence
  derived and/or modified sequence
atgaatgtgtaccacttcaagaagggcacagagatctgcaactacagctacagcagcaacatcctgagcatccggctgaaccggcagaggctgctggtgtgcctggaggagagcatctacatccacaacatcaaggacatgaagctgctgaagaccctgctggacatcccagccaaccccaccggcctgtgtgccctgagcatcaaccacagcaacagctacctggcctacccaggcagcctgaccagcggggagatcgtgctgtatgatggcaacagcctgaagacagtgtgcaccatcgccgcccacgagggcaccctggccgccatcaccttcaatgccagcggcagcaagctggccagcgccagcgagaagggcaccgtcatccgggtcttctctgtgcctgatggccagaagctgtatgagttccggcggggcatgaagcgctacgtgaccatcagcagcctggtgttctccatggacagccagttcctgtgtgccagcagcaacacagaaacagtgcacatcttcaagctggagcaggtgaccaacagcaggcctgaggagcccagcacctggagcggctacatgggcaagatgttcatggccgccaccaactacctgcccacccaggtgtctgacatgatgcaccaggaccgggcctttgccacagcccggctgaacttcagcggccagaggaacatctgcaccctgagcaccatccagaagctgccccggctgctggtggccagcagcagcggccacctgtacatgtacaacctggacccccaggatggaggagaatgtgtgctgatcaagacccacagcctgctgggcagcggcaccacagaggagaacaaggaaaatgacctgcggcccagcctgccccagagctatgctgccaccgtggcccggcccagcgccagcagcgccagcacagtgcccggctacagtgaagatggaggagccctgcggggggaggtgattcctgagcacgagtttgccaccggccctgtgtgcctggatgatgaaaatgagttcccccccatcatcctgtgccggggcaaccagaagggcaagaccaagcagagctag

SEQ ID NO: 275265 - DNA, 1095 bp, Artificial Sequence
  derived and/or modified sequence
atgaacgtgtaccacttcaagaagggcaccgagatctgcaactacagttacagtagcaatatcttgagcataagactgaacagacagagattgttggtgtgtcttgaagaaagcatatacatccataatatcaaggatatgaagctgctgaaaactcttctggatattccggccaacccaaccggactgtgtgccctgtctatcaatcactcaaacagctacttggcttatcccggatccctcacaagtggagaaattgtgctgtatgacggtaattcccttaaaaccgtttgtacaattgccgctcacgaggggacccttgccgctattacctttaatgcatccgggtccaagcttgcttccgccagcgagaaggggactgttataagagtgttctccgtccctgacggacaaaaattatacgaattcagacgaggcatgaagagatatgtgaccatctcgtcgttggtgttctccatggacagccagttcttatgtgcatccagtaacaccgagacagtgcatatcttcaagttggagcaagtaacaaattcccggccagaggaaccgtcaacgtggagcggctacatgggtaaaatgtttatggcagccacgaattacctcccaacacaggtaagcgatatgatgcatcaagacagagcctttgccaccgctagactcaatttctccggacaacgcaacatttgcaccctgagcacaatacagaaactgccgaggttattagtggcatcctcttccggccacctctacatgtataacctcgatccccaggatggcggcgagtgcgtactcatcaagacacactccctgttgggcagtgggacgacagaggagaataaagagaatgacctcagaccctctctgccacaatcatatgcagctacagtcgccaggcccagtgccagcagcgcctccaccgtgcccggatactcggaagacggaggggccctccgtggggaagtgatacctgagcacgagtttgccactgggccagtctgtctggatgatgagaatgagttcccacctattattctgtgtcggggcaatcaaaaaggcaaaactaagcagagttag

SEQ ID NO: 275266 - DNA, 1095 bp, Artificial Sequence
  derived and/or modified sequence
atgaacgtctaccatttcaagaaaggcaccgaaatctgtaattatagttatagctcgaatattctgtctattagactaaatcgccagcgtctgctggtctgcctggaggagtcaatctatatccacaatattaaagatatgaagttgctcaaaactttgcttgacatccccgcaaatcccacgggtctctgcgcattatctatcaaccatagcaactcctatctggcgtaccctgggtccttgacctcgggagaaatcgtcctgtatgatggaaacagtcttaagacagtgtgtacaatcgctgcccatgaggggacattagcagctatcacttttaacgcatctggaagcaaactggcgtctgcatccgaaaaaggcaccgtgatcagagtgttttctgtgcctgacggtcagaagctctatgaattccgcaggggcatgaagcgttatgtgacgatctctagcctcgtgttctctatggatagccaattcttgtgtgctagctccaacacggaaacggttcacatcttcaaacttgaacaggtcaccaactctaggcccgaagagcctagtacatggtcaggatacatgggcaagatgttcatggcagccactaattacctccctacccaggtgtcagacatgatgcaccaggacagagcctttgccacagccagactaaacttttcgggacagcgcaacatttgtaccctctcaactattcagaagctacctcgactgctcgtggcaagcagcagcggccatctctacatgtataacctggacccacaggacggcggagaatgcgtgctgataaaaacacatagcctgcttgggtcgggaacaactgaagagaacaaagaaaatgacttgcggccatcactgccacagtcttacgccgcaactgttgcacgtccaagcgcttcatccgctagcacagtgccaggatactccgaggacggtggggcactccggggagaggtgatcccagagcatgagttcgccacagggccagtttgtcttgatgatgaaaacgagtttccaccaatcatattgtgcagagggaatcaaaaggggaagactaagcagtcgtag

SEQ ID NO: 275267 - DNA, 1152 bp, Artificial Sequence
  derived and/or modified sequence
aaaggaacccagtgccgggccacagccgggtcacgtggccggcggccccccatgacgtgctggctgcggggcgtcacggcgacgttcgggcgacctgccgagtggccaggctacctcagtcacctgtgtggtcgcagtgctgccatggacctgggacccatgcgcaagagttaccgcggggaccgagagagatggaaaaccctctgctcgcatgttgctgctgaagggcttcgggaaagatggcttccgcttcttcactaacttcgagagtcgaaaaggaaaagagctggactctaatccctttgcttcccttgtcttctactgggagccacttaaccgtcaggtgcgtgtggaaggccctgtgaagaaactgcctgaggaggaggctgagtgctacttccactcccgccccaagagcagccagattggggctgtggtcagccaccagagttctgtgatccctgatcgggagtatctgagaaagaaaaatgaggaactggaacagctctaccaggatcaagaggtgcccaagccaaaatcctggggtggctatgtcctgtaccctcaggtgatggagttctggcaaggtcaaaccaaccgcctgcatgaccggatagtctttcggcggggcctacccacaggagattcccctttggggcccatgacccaccgcggggaggaagactggctctatgagagacttgcaccttaactctgggacctgctggcccagagtggagctagggctaggtgtcaagagagggtgtgggattgggacccaggcccttctttctaaactcaacccatttccctccctaccccttatcttcaggactcttcagagctaatcctctaagttctctgtactcagttggttctcagttagctggtcaagtggagtgtaatggtggcgtagagaatcacaaatggaaaataattccataattatttttttgaccttgcctatgattgattaggatagctccctctaggggtagcagccggtgtgactccctttctggtgacagacagggccccagcagccctgtctgttaccatgtgagtcatactggccaaagcttagtcctagcatatgcacctgagccaacctggccaatcagattgttttgtcaataatttgaaatttgaact

SEQ ID NO: 275268 - DNA, 1826 bp, Artificial Sequence
  derived and/or modified sequence
aaagtacgagtcggctcagcctggagggacccaaccagagcctggcctgggagccaggatggccatccacaaagccttggtgatgtgcctgggactgcctctcttcctgttcccagagcaaagctaccagggggacatgtaccccacccggggcgtgggctatgagaccatcctgaaagagcagaagggtcagagcatgttcgtggagaacaaggccttttccatggatgagccggttgcagctaagaggccggtgtcaccatacagcgggtacaatgggcagctgctgaccagtgtgtaccagcccactgagatggccctgatgcacaaagttccgtccgaaggagcttacgacatcatcctcccacgggccaccgccaacagccaggtgatgggcagtgccaactcgaccctgcgggctgaagacatgtactcggcccagagccaccaggcggccacaccgccgaaagacggcaagaactctcaggtaagcgaactgacccagagaggccaggccaacaccaaccaggttttcctaagactctgacgtccagcagcctctctccgtggcccaccctgggctcagtccccacaaagtaaaacgagatggtagaagccctcttcccgggactgcacggcatcctgatcctcattcctctgtacccaggctggaccgggcccagcacctttcccatccttgtcattggagctgggaggggccggaggccaccaacctgaagcagtggaccgagtgggcccccgtgaagccctgagtgtgtgactggagcgcctagggccacctccctttcctgcccagcccatcttcctggtccccaggtggctgcagctacaaggagctgtccgcgggcccccaggctgcctccaactcccctcttgacacgcccccctccccccaaatcatagtccctgtgtccccaagctgtggttcagattgccttcttcccctctgtgaacaacaggcctcagtgccccgtcttgactctggaccttcctggccctgccatcttggtgtctggcactggcttgtcccaccctctgcctagatggatctcctccatgagtctttggagccaagccagggcagaagttggcccttgcccttctcaccagggcctcctgccaccacctggactgtggaaggccactgagatgggggcagagctcagcccgaggcttgggcacactgcttctctccacggcctgtgggtcctggatctgagcccttggggtgtttcactcaagagccactgagccgtccccatcttccacaaagcagtttccacaagcaagccagggccagccctgcctgcactctgcccgcagtgcccctcaacgtctgggatgaggatgagcctgctgagatgagggcagctctctccatccagcagtacctcatggagtgctcactaaggagttaggaatggcaggccacgctggcatctggggttcaaggtggctcctgtggcaggaacaggtgtccatgaccctgattacctggatctcacaggttctgggaatgcaataggggcctgctgtggctattccaacatctctggtcagggcctggaagtaccttaggacacatggggttggggtcaggactgcattctcagggaccagtggagagccctggaccagatgaactggagtctaggcctctctcgtgactgggacttgtgggacgtgggaggcctgtgagatccaggactaaagattatgctgtttcctaatgggcagatatgtaagtaggtaagtgggatcctcaggtaagcgggatccagaactaaagactgtgctatttcctg

SEQ ID NO: 275269 - DNA, 489 bp, Artificial Sequence
  derived and/or modified sequence
atggcaattcacaaggcgctggtcatgtgcttgggtctgccattatttttgttcccagaacagtcctaccagggcgatatgtaccctaccaggggtgtgggatatgagacaatcctgaaggagcaaaagggccagagtatgttcgtggaaaacaaagccttctccatggatgagccagttgcggcaaaacggccagtgtcaccctacagcggatacaacggccagctcttaacatccgtgtatcaaccgactgaaatggctttgatgcataaggtcccatccgagggcgcgtatgatataatcttgccgagagcgactgcgaacagtcaggttatgggctcggcaaattcaacccttcgcgctgaagatatgtactctgcacagtcccaccaggccgcaacgccacctaaggacggaaagaactctcaggtgtccgagctgacccagcgcggccaggcaaacacgaaccaggttttcttgcgcttgtag

SEQ ID NO: 275270 - DNA, 489 bp, Artificial Sequence
  derived and/or modified sequence
atggccatccacaaggccctggtgatgtgcctgggcctgcccctcttcctgtttcctgagcagagctaccagggcgacatgtaccccacccggggcgtgggctatgagaccatcctgaaggagcagaagggccagagcatgtttgtggagaacaaggccttctccatggatgagcctgtggccgccaagaggcctgtgagcccctacagcggctacaacggccagctgctgacctctgtgtaccagcccacagagatggccctgatgcacaaggtgcccagcgagggcgcctatgacatcatcctgccccgggccacagccaacagccaggtgatgggcagcgccaacagcaccctgcgggcagaggacatgtacagcgcccagagccaccaggccgccaccccacccaaggatggcaagaacagccaggtgtctgagctgacccagaggggccaggccaacaccaaccaggtgttcctgcggctgtag

SEQ ID NO: 275271 - DNA, 489 bp, Artificial Sequence
  derived and/or modified sequence
atggccatccacaaggccctggtgatgtgcctgggcctgcccctgtttctgttccccgaacaaagctaccaaggcgatatgtatcccacccggggcgtgggttacgagaccattctcaaggagcagaagggtcagagcatgtttgtcgagaataaagcttttagtatggacgaaccagtggccgcgaagagaccggttagcccctacagtggctacaatggacagttattgacgtccgtgtatcaacccacagaaatggccctcatgcataaggtcccaagtgagggagcctacgatatcattttacctcgggctaccgcgaacagccaggtaatgggatccgctaatagcacactgcgtgccgaagatatgtattcagctcagagccatcaggccgccactccccccaaggatggtaagaactcacaggtgtctgagctgacacagaggggccaggccaacactaaccaggtgtttttaagactttag

SEQ ID NO: 275272 - DNA, 489 bp, Artificial Sequence
  derived and/or modified sequence
atggccatccacaaggcattggtgatgtgtcttggtctccctctgttcctgttccccgaacagtcataccaaggtgatatgtatcctacgcgcggagtgggttacgaaacgatattaaaggagcagaagggacaatccatgttcgtcgagaacaaggccttttcgatggatgaacctgtcgcggcaaagaggcccgtctccccatactcgggctacaatggtcagctgttgactagcgtgtaccagcccacggagatggcactcatgcacaaggtgccgtcagaaggggcatatgacatcattctgcccagggcgactgctaactcgcaagtaatgggctccgctaattccaccttgcgcgcagaagatatgtacagcgctcagtctcaccaggctgccactcccccaaaagacggtaagaacagccaagtgtcagaactcacccagaggggacaggccaacaccaaccaggtgtttctccggttgtag

SEQ ID NO: 275273 - DNA, 489 bp, Artificial Sequence
  derived and/or modified sequence
atggccatccacaaggccctggtgatgtgcctgggcctgcccctgttcctgttccccgagcagagctaccagggcgacatgtaccccaccagaggcgtgggctacgagaccatcctgaaggagcagaagggccagagcatgttcgtggagaacaaggccttcagcatggacgagcccgtggccgccaagagacccgtgagcccctacagcggctacaacggccagctgctgaccagcgtgtaccagcccaccgagatggccctgatgcacaaggtgcccagcgagggcgcctacgacatcatcctgcccagagccaccgccaacagccaggtgatgggcagcgccaacagcaccctgagagccgaggacatgtacagcgcccagagccaccaggccgccaccccccccaaggacggcaagaacagccaggtgagcgagctgacccagagaggccaggccaacaccaaccaggtgttcctgagactgtag

SEQ ID NO: 275274 - protein, 1123 aa, Artificial Sequence
  derived and/or modified sequence
MPIVDKLKEALKPGRKDSADDGELGKLLASSAKKVLLQKIEFEPASKSFSYQLEALKSKYVLLNPKTEGASRHKSGDDPPARRQGSEHTYESCGDGVPAPQKVLFPTERLSLRWERVFRVGAGLHNLGNTCFLNATIQCLTYTPPLANYLLSKEHARSCHQGSFCMLCVMQNHIVQAFANSGNAIKPVSFIRDLKKIARHFRFGNQEDAHEFLRYTIDAMQKACLNGCAKLDRQTQATTLVHQIFGGYLRSRVKCSVCKSVSDTYDPYLDVALEIRQAANIVRALELFVKADVLSGENAYMCAKCKKKVPASKRFTIHRTSNVLTLSLKRFANFSGGKITKDVGYPEFLNIRPYMSQNNGDPVMYGLYAVLVHSGYSCHAGHYYCYVKASNGQWYQMNDSLVHSSNVKVVLNQQAYVLFYLRIPGSKKSPEGLISRTGSSSLPGRPSVIPDHSKKNIGNGIISSPLTGKRQDSGTMKKPHTTEEIGVPISRNGSTLGLKSQNGCIPPKLPSGSPSPKLSQTPTHMPTILDDPGKKVKKPAPPQHFSPRTAQGLPGTSNSNSSRSGSQRQGSWDSRDVVLSTSPKLLATATANGHGLKGNDESAGLDRRGSSSSSPEHSASSDSTKAPQTPRSGAAHLCDSQETNCSTAGHSKTPPSGADSKTVKLKSPVLSNTTTEPASTMSPPPAKKLALSAKKASTLWRATGNDLRPPPPSPSSDLTHPMKTSHPVVASTWPVHRARAVSPAPQSSSRLQPPFSPHPTLLSSTPKPPGTSEPRSCSSISTALPQVNEDLVSLPHQLPEASEPPQSPSEKRKKTFVGEPQRLGSETRLPQHIREATAAPHGKRKRKKKKRPEDTAASALQEGQTQRQPGSPMYRREGQAQLPAVRRQEDGTQPQVNGQQVGCVTDGHHASSRKRRRKGAEGLGEEGGLHQDPLRHSCSPMGDGDPEAMEESPRKKKKKKRKQETQRAVEEDGHLKCPRSAKPQDAVVPESSSCAPSANGWCPGDRMGLSQAPPVSWNGERESDVVQELLKYSSDKAYGRKVLTWDGKMSAVSQDAIEDSRQARTETVVDDWDEEFDRGKEKKIKKFKREKRRNFNAFQKLQTRRNFWSVTHPAKAASLSYRR

SEQ ID NO: 275275 - DNA, 3372 bp, Artificial Sequence
  derived and/or modified sequence
atgcccatcgtggacaagctgaaggaggccctgaagcccggcagaaaggacagcgccgacgacggcgagctgggcaagctgctggccagcagcgccaagaaggtgctgctgcagaagatcgagttcgagcccgccagcaagagcttcagctaccagctggaggccctgaagagcaagtacgtgctgctgaaccccaagaccgagggcgccagcagacacaagagcggcgacgacccccccgccagaagacagggcagcgagcacacctacgagagctgcggcgacggcgtgcccgccccccagaaggtgctgttccccaccgagagactgagcctgagatgggagagagtgttcagagtgggcgccggcctgcacaacctgggcaacacctgcttcctgaacgccaccatccagtgcctgacctacaccccccccctggccaactacctgctgagcaaggagcacgccagaagctgccaccagggcagcttctgcatgctgtgcgtgatgcagaaccacatcgtgcaggccttcgccaacagcggcaacgccatcaagcccgtgagcttcatcagagacctgaagaagatcgccagacacttcagattcggcaaccaggaggacgcccacgagttcctgagatacaccatcgacgccatgcagaaggcctgcctgaacggctgcgccaagctggacagacagacccaggccaccaccctggtgcaccagatcttcggcggctacctgagaagcagagtgaagtgcagcgtgtgcaagagcgtgagcgacacctacgacccctacctggacgtggccctggagatcagacaggccgccaacatcgtgagagccctggagctgttcgtgaaggccgacgtgctgagcggcgagaacgcctacatgtgcgccaagtgcaagaagaaggtgcccgccagcaagagattcaccatccacagaaccagcaacgtgctgaccctgagcctgaagagattcgccaacttcagcggcggcaagatcaccaaggacgtgggctaccccgagttcctgaacatcagaccctacatgagccagaacaacggcgaccccgtgatgtacggcctgtacgccgtgctggtgcacagcggctacagctgccacgccggccactactactgctacgtgaaggccagcaacggccagtggtaccagatgaacgacagcctggtgcacagcagcaacgtgaaggtggtgctgaaccagcaggcctacgtgctgttctacctgagaatccccggcagcaagaagagccccgagggcctgatcagcagaaccggcagcagcagcctgcccggcagacccagcgtgatccccgaccacagcaagaagaacatcggcaacggcatcatcagcagccccctgaccggcaagagacaggacagcggcaccatgaagaagccccacaccaccgaggagatcggcgtgcccatcagcagaaacggcagcaccctgggcctgaagagccagaacggctgcatcccccccaagctgcccagcggcagccccagccccaagctgagccagacccccacccacatgcccaccatcctggacgaccccggcaagaaggtgaagaagcccgcccccccccagcacttcagccccagaaccgcccagggcctgcccggcaccagcaacagcaacagcagcagaagcggcagccagagacagggcagctgggacagcagagacgtggtgctgagcaccagccccaagctgctggccaccgccaccgccaacggccacggcctgaagggcaacgacgagagcgccggcctggacagaagaggcagcagcagcagcagccccgagcacagcgccagcagcgacagcaccaaggccccccagacccccagaagcggcgccgcccacctgtgcgacagccaggagaccaactgcagcaccgccggccacagcaagaccccccccagcggcgccgacagcaagaccgtgaagctgaagagccccgtgctgagcaacaccaccaccgagcccgccagcaccatgagccccccccccgccaagaagctggccctgagcgccaagaaggccagcaccctgtggagagccaccggcaacgacctgagaccccccccccccagccccagcagcgacctgacccaccccatgaagaccagccaccccgtggtggccagcacctggcccgtgcacagagccagagccgtgagccccgccccccagagcagcagcagactgcagccccccttcagcccccaccccaccctgctgagcagcacccccaagccccccggcaccagcgagcccagaagctgcagcagcatcagcaccgccctgccccaggtgaacgaggacctggtgagcctgccccaccagctgcccgaggccagcgagcccccccagagccccagcgagaagagaaagaagaccttcgtgggcgagccccagagactgggcagcgagaccagactgccccagcacatcagagaggccaccgccgccccccacggcaagagaaagagaaagaagaagaagagacccgaggacaccgccgccagcgccctgcaggagggccagacccagagacagcccggcagccccatgtacagaagagagggccaggcccagctgcccgccgtgagaagacaggaggacggcacccagccccaggtgaacggccagcaggtgggctgcgtgaccgacggccaccacgccagcagcagaaagagaagaagaaagggcgccgagggcctgggcgaggagggcggcctgcaccaggaccccctgagacacagctgcagccccatgggcgacggcgaccccgaggccatggaggagagccccagaaagaagaagaagaagaagagaaagcaggagacccagagagccgtggaggaggacggccacctgaagtgccccagaagcgccaagccccaggacgccgtggtgcccgagagcagcagctgcgcccccagcgccaacggctggtgccccggcgacagaatgggcctgagccaggccccccccgtgagctggaacggcgagagagagagcgacgtggtgcaggagctgctgaagtacagcagcgacaaggcctacggcagaaaggtgctgacctgggacggcaagatgagcgccgtgagccaggacgccatcgaggacagcagacaggccagaaccgagaccgtggtggacgactgggacgaggagttcgacagaggcaaggagaagaagatcaagaagttcaagagagagaagagaagaaacttcaacgccttccagaagctgcagaccagaagaaacttctggagcgtgacccaccccgccaaggccgccagcctgagctacagaagatag

SEQ ID NO: 275276 - DNA, 3372 bp, Artificial Sequence
  derived and/or modified sequence
atgcccattgtggacaagctcaaagaggcactgaaacccggccgaaaggattccgcagacgacggggaacttggaaaattactagccagtagcgccaagaaggtactcctccagaagatagagttcgagccagcctctaagtctttcagctaccagttggaggccctgaaatccaaatatgtcctgctcaatccaaagacagagggagcttcccgtcataagagtggagatgatcccccagcccggcgccaaggatcagagcacacatacgagagttgcggtgatggcgtaccggcaccgcagaaggtcctgtttccaactgagaggctttcgctgagatgggagagagtgtttcgggtaggagcaggcctccacaacttggggaacacttgttttcttaatgcaaccatccagtgtttgacatacacgccccccctggccaactatttgctgtccaaagagcatgctcgatcttgtcaccagggtagcttctgcatgctgtgcgtcatgcaaaatcatattgtccaggccttcgcaaacagcggaaacgctatcaagcccgtgtcattcatacgcgatctgaagaagattgctcgccattttcggttcgggaaccaggaggatgcccacgagttcctccggtacacaattgacgccatgcaaaaagcttgtctaaatggctgtgctaagcttgatcggcagacccaagcgactactcttgtgcatcagatttttggcggatatctgagaagccgcgttaaatgctccgtctgcaaatccgtgagcgatacgtatgatccatatctggacgtggcactggagattcgccaggccgcgaatattgtccgggcccttgaactgtttgtaaaggcagatgtccttagcggtgagaacgcctacatgtgcgctaaatgtaagaagaaggtgccggcttcaaaacgtttcacaattcatcgcacgtccaatgtcttaacactctcactcaagcgtttcgcaaatttcagtgggggtaaaatcacaaaggatgtcgggtaccctgagtttttgaatatccgaccttacatgtcccagaataacggcgaccccgtgatgtacggcctgtacgctgttctagtccacagcggctatagttgtcatgccggacattactattgttacgttaaggccagcaacggccagtggtaccagatgaatgacagcttggtccattcctccaacgtgaaagtggtgttaaaccaacaggcatatgtgctgttctacctgagaattcccggcagtaaaaagtcccctgagggtctgatcagccgtaccggtagctcctctcttcctggacggcctagtgtcattccggatcactcaaagaaaaacatcggcaacggaatcattagctctccgctaaccggcaagagacaagatagcgggactatgaaaaaaccccacaccacagaggagatcggagttccgatctctcgaaacggttctactttggggctcaagagccagaatggatgtattcctccaaagttaccttctggttcgccgtcccccaagctcagccagactcctacccatatgcccactatcctggatgaccccgggaagaaggtgaagaagcctgcaccgccacaacatttcagtccaaggacagctcagggcctgcccggaaccagcaacagcaattcttcacgatcaggctcgcagagacagggttcatgggactcccgagacgttgtgctgtccacatctccaaagcttctggcaaccgcaactgcaaatggacatgggctgaaaggcaacgacgagtccgctggccttgaccgccgcggcagttcctctagctcccctgaacattcagcatcttccgactccaccaaggccccccaaacgcccaggagcggggccgctcatctgtgtgactcgcaggagaccaactgctccacagctggacacagcaaaaccccgccctccggggctgacagcaaaacagtcaagttgaagtcgccagtgctgagcaatacgactactgagccggcttcgactatgtccccaccgcccgcgaaaaagcttgccttgtcagccaagaaagcctctacgctgtggagggcgactggaaatgatctgaggcctcccccacccagcccttcatccgatctgacccatcccatgaagacctctcaccctgtagtggcctccacttggcccgtccaccgggccagggcagttagtccagcgccccagtcgtcctctcgactgcagccaccctttagcccacaccccacattgctcagcagcacaccgaagcctcctggcacctccgaacccagatcctgttcttctattagtacagccctgccgcaggtaaacgaggatctggtcagcctgcctcaccagctgccagaagcatctgaacctccccagtcaccctctgagaagcggaagaaaaccttcgtcggagaaccccagcgcctcggaagcgagacccggctgccacagcacatacgcgaagcaacggcagcaccacatggaaaaagaaaaaggaagaagaagaagcggcctgaagatactgccgcatccgctctccaagaaggacagacccagagacagcctggtagccccatgtatagacgggaggggcaggcccagcttccagcagtgagacgacaggaagatgggacccagccacaggtcaatggacaacaggtgggctgcgtgaccgatggccaccacgcaagcagtagaaagcgccggcgtaagggagctgaggggctgggagaagagggcgggctgcaccaagacccactccgacactcatgctcccctatgggtgatggggaccctgaggccatggaagagtcacctaggaagaaaaagaaaaaaaaacggaagcaagagacacagcgggcagtggaggaggacgggcacctgaagtgtccaaggtcagctaaaccccaagatgcagtggtcccagaatcatcttcgtgtgcaccttctgcaaacggctggtgtcccggcgaccgcatggggctgagccaggctccacctgtctcctggaatggcgagagagagtcagatgttgtgcaggagttgttaaagtatagtagtgacaaggcatatggtcgtaaggtactgacttgggacgggaagatgagtgcagtgagccaggacgccattgaggatagccgacaggcccggacggaaaccgtggtggatgattgggacgaggaatttgatcggggcaaggagaagaagattaagaagttcaagagagaaaaacggcggaacttcaacgcttttcagaagctgcagacaagaagaaacttctggtctgtgactcatcccgcaaaagctgcctccttgtcctacaggcggtag

SEQ ID NO: 275277 - DNA, 3372 bp, Artificial Sequence
  derived and/or modified sequence
atgccaattgttgataagcttaaggaagctttgaagcccgggagaaaggatagtgcggacgacggcgagctgggaaaactgctcgctagtagcgctaagaaggtgttattacagaaaatcgagtttgagccagctagcaaatctttttcataccaactcgaagccctaaagtccaagtacgtccttcttaatcctaagaccgagggcgccagccggcacaagtccggggatgacccacccgctagaaggcagggtagcgaacacacctatgaatcatgtggcgacggcgtgcccgctccccagaaagttctctttcctaccgagagactcagtctgcggtgggaacgggttttccgcgtgggggcaggcctgcataatttgggcaacacctgttttctcaacgccactattcaatgcttaacatatactcctccccttgctaactatctgctgtctaaggagcacgcaagatcctgtcaccaaggctcattctgtatgttgtgtgtgatgcaaaaccacattgtgcaggcctttgctaatagcggaaacgctatcaaacctgtctcatttatcagggacttaaagaagattgcccggcattttagattcggtaatcaggaggatgcccatgaatttctacgctacaccattgatgctatgcaaaaggcttgcctgaatgggtgcgccaagctggatcgccagacacaggccacaaccctggttcatcagatttttggcggatacctgcgcagtagggtgaaatgtagcgtatgcaaatcagtttctgatacctatgacccatatctggacgttgccctggagatcaggcaggctgccaatatagtgcgggcacttgagctgttcgtgaaggccgacgtcttgagtggggaaaatgcctatatgtgtgccaaatgcaagaagaaggtgcccgcatctaaaaggtttaccatccatcgcacgtctaacgtgctgaccttaagcctaaagcggtttgctaatttctccggaggaaaaatcacgaaggacgttgggtacccggaatttctcaacattcggccatatatgagtcagaataatggcgatcctgtgatgtacggtctctacgctgtgctggtccactcaggttattcctgccatgctgggcactattactgctatgtgaaagccagcaatggccagtggtatcaaatgaatgactccttggttcattcgagtaacgttaaggtggtgctcaaccagcaggcctacgtgctgttttatctgcggattccaggatcaaagaaatctcctgaaggactgatctcacgcaccggcagctcgtccctgcccgggagacccagtgtgatcccagaccactccaaaaagaatatcggaaacggaattatcagctcccccctgaccgggaagaggcaagactccggaacgatgaaaaaaccccacacaactgaagaaattggggtgcctatctctaggaatggcagcactttgggtctcaaatcccagaatggatgcataccacccaagttgcctagcggttctccctctcccaaactgtcccagactccaacccatatgcctaccatcttggatgaccctgggaagaaagttaaaaaacccgccccaccccagcatttctcccccaggacagcgcagggcttgccaggcacaagcaatagcaacagctcaagatccggctcacaaaggcagggttcatgggattccagagacgtggttctgagcacgtcccctaaattactggcgactgccaccgctaacggccacggcctcaagggcaatgatgaatcagccggcttggataggcgcgggagctcgtcgtccagccccgagcacagcgcgagcagtgactccaccaaagctccccagactccaaggagtggcgcggcgcatctgtgcgattcccaggagactaattgttcaaccgcaggtcattctaagactcccccaagtggagccgactctaagactgtcaagctaaagtcgccggttctgagtaacactaccacagagcctgcttctacaatgtcccctcccccagcgaaaaaattggccctgtcagctaaaaaggcttcaaccctgtggcgagccacaggaaatgatctgcggcccccacccccttccccctccagcgatctcacccaccccatgaaaacgagtcacccagtggtggcgtccacctggccggtgcaccgagcacgcgcagtgagtccagccccacagagttccagcagactgcaaccccccttcagtccgcatcctactcttctcagcagcacaccgaaaccccccggcaccagcgagccaagatcttgttcatcgataagtactgctcttccacaagtgaacgaggatcttgtgagcctcccccatcagctcccagaagccagtgaaccaccccaatcacctagtgagaagcgtaaaaagacatttgtaggggagcctcagagactcggaagtgagacccgattgccccagcacatccgggaggctacggcagcgccacacgggaagcgcaaacggaaaaagaaaaaacggccagaagatactgcggcctcagctctacaggaagggcagacacaaagacagccagggtcccccatgtacagacgcgagggacaagcccaactgcccgcggttaggcgtcaggaggacggcacgcagccgcaggttaatgggcaacaagtgggttgcgtcaccgacggacaccacgcctcctctagaaagaggcggaggaagggtgcagaggggctcggtgaagagggcggcctgcaccaggaccccctgaggcactcctgcagccccatgggagacggcgatccagaggcaatggaggagagcccgcgcaaaaaaaagaaaaaaaagcgcaagcaggaaacacagagggccgtggaggaggacggccaccttaaatgccccagatctgccaagccccaggatgcggtcgttcccgaaagtagctcatgtgccccatccgctaacgggtggtgccctggggacaggatgggactgtctcaggccccccctgtgtcctggaacggagagagagaaagtgacgtcgtgcaggagctgcttaagtatagctcagacaaggcttacggtaggaaggttctgacatgggacggtaaaatgtcagcagtttctcaggatgctattgaggactctcgtcaagcaaggacagagaccgttgttgatgattgggatgaggagttcgatcgtgggaaggagaaaaagattaaaaagtttaagcgcgaaaaacgtcggaatttcaatgcctttcagaagttacagacaaggcggaatttttggagcgtgactcatccagcaaaggcggctagcctgagctatcggaggtag

SEQ ID NO: 275278 - DNA, 3372 bp, Artificial Sequence
  derived and/or modified sequence
atgcccatcgtggacaagctgaaggaggccctgaagccaggcaggaaggacagcgcagatgatggagagctgggcaagctgctggccagcagcgccaagaaggtgctgctgcagaagattgaatttgagcccgccagcaagagcttctcctaccagctggaggccctgaagagcaaatatgtgctgctgaaccccaagacagaaggagccagccgccacaagtctggagatgatcctccagcccggcggcagggcagcgagcacacctatgagagctgtggagatggagtgcctgccccccagaaggtgctcttccccacagagcggctgagcctgcgctgggagagggtcttccgggtgggcgccggcctgcacaacctgggcaacacctgcttcctgaatgccaccatccagtgcctgacctacaccccacccctggccaactacctgctgagcaaggagcacgcccggagctgccaccagggcagcttctgcatgctgtgtgtgatgcagaaccacatcgtgcaggcctttgccaacagcggaaatgccatcaagcctgtgtccttcatccgggacctgaagaagatcgcccggcacttccgctttggaaaccaggaggatgcccacgagttcctgcgctacaccattgatgccatgcagaaggcctgcctgaatggctgtgccaagctggaccggcagacccaggccaccaccctggtgcaccagatctttggaggctacctgcggagccgggtgaagtgcagcgtgtgcaagtctgtgtctgacacctatgacccctacctggatgtggccctggagatccggcaggccgccaacatcgtgcgggccctggagctgtttgtgaaggcagatgtgctgtctggagaaaatgcctacatgtgtgccaagtgcaagaagaaggtgcctgccagcaagcgcttcaccatccacaggaccagcaatgtgctgaccctgagcctgaagagatttgccaacttcagcggcggcaagatcaccaaggatgtgggctacccagagttcctgaacatccggccctacatgagccagaacaatggagaccctgtgatgtatggcctgtatgctgtgctggtgcacagcggctacagctgccacgccggccactactactgctacgtgaaggccagcaatggccagtggtaccagatgaatgacagcctggtgcacagcagcaatgtgaaggtggtgctgaaccagcaggcctacgtgctcttctacctgcgcatccctggcagcaagaagagccctgagggcctcatcagcaggacaggcagcagcagcctgcccggccggcccagcgtcatcccagaccacagcaagaagaacattggaaatggcatcatcagcagccccctgaccgggaagaggcaggacagcggcaccatgaagaagccccacaccacagaggagattggagtgcccatcagcagaaatggcagcaccctgggcctgaagagccagaatggctgcatcccccccaagctgcccagcggcagccccagccccaagctgagccagacccccacccacatgcccaccatcctggatgaccccgggaagaaggtgaagaagccagccccaccccagcacttcagccccaggacagcccagggcctgcccggcaccagcaacagcaacagcagccgcagcggcagccagaggcagggctcctgggacagcagagatgtggtgctgagcaccagccccaagctgctggccacagccacagccaacggccacggcctgaagggaaatgatgagagcgctggcctggacagaagaggcagcagcagcagcagccctgagcacagcgccagcagtgacagcaccaaggccccccagacccccaggtctggggccgcccacctgtgtgacagccaggagaccaactgcagcacagctggccacagcaagaccccacccagcggggctgacagcaagacagtgaagctgaagagccctgtgctgagcaacaccaccacagagcccgccagcaccatgagccccccaccagccaagaagctggccctgagcgccaagaaggccagcaccctgtggagggccactggaaatgacctgcggcccccaccacccagccccagcagtgacctgacccaccccatgaagaccagccaccctgtggtggccagcacctggcctgtgcaccgggcccgggctgtgtccccagccccccagagcagcagccggctgcagccccccttcagcccccaccccaccctgctgagcagcacccccaagcccccaggcaccagcgagcccaggagctgcagcagcatcagcacagccctgccccaggtgaatgaagacctggtgtccctgccccaccagctgcctgaggccagcgagcccccccagagccccagcgagaagaggaagaagacctttgtgggggagccccagaggctgggcagcgagacccggctgccccagcacatccgggaggccacagctgcccctcatggcaagaggaagaggaagaagaagaagaggcctgaggacacagctgccagcgccctgcaggagggccagacccagaggcagcccggcagccccatgtacagaagagagggccaggcccagctgcctgctgtgcggcggcaggaggatggcacccagccccaggtgaatggccagcaggtgggctgtgtgacagatggccaccacgccagcagcaggaagagaagaagaaaaggagctgagggcctgggggaggagggcggcctgcaccaggaccccctgcggcacagctgcagccccatgggagatggagaccctgaggccatggaggagagccccaggaagaagaagaagaagaagaggaagcaggagacccagagagctgtggaggaggatggccacctgaagtgccccaggtctgccaagccccaggatgctgtggtgcctgagagcagcagctgtgcccccagcgccaacggctggtgccctggggacaggatgggcctgagccaggcccctcctgtgtcctggaatggagagcgggagagtgatgtggtgcaggagctgctgaagtacagcagtgacaaggcctacggcaggaaggtgctgacctgggatggcaagatgtctgctgtgtcccaggatgccatcgaggacagccggcaggccaggacagaaacagtggtggatgactgggatgaggagtttgaccggggcaaggagaagaagatcaagaagttcaagcgggagaagagaagaaacttcaatgccttccagaagctgcagaccaggaggaacttctggagcgtgacccacccagccaaggccgccagcctgagctacagaagatag

SEQ ID NO: 275279 - DNA, 3372 bp, Artificial Sequence
  derived and/or modified sequence
atgcccatcgtggacaagctgaaggaggccctgaagcccggccggaaggacagcgccgatgacggggaactcgggaagcttctggcctcgtcggccaagaaggtgcttctgcaaaaaatcgagtttgagcccgcatctaagagttttagttaccagctggaagcactcaagtccaagtacgtcttactcaacccaaagaccgaaggcgccagtaggcataagagcggcgatgaccctcccgcaagacgtcagggctccgagcacacctacgaaagctgtggagacggagtgccagcccctcagaaggtcctgttccccacggagagactctctctcaggtgggaaagggtcttcagagtcggtgccgggctgcacaacctcggcaacacctgctttctcaacgccaccatacagtgtttgacatacacgccaccactcgcaaactatcttctgtctaaggagcatgccagaagctgccatcaagggtcattctgcatgctatgtgtgatgcagaatcacattgtgcaggctttcgctaattccggcaatgcaatcaaaccagtcagcttcattcgagatctgaaaaagatcgccaggcacttccgattcgggaatcaagaggatgcccacgagttcctccggtataccattgacgcaatgcagaaggcatgtcttaatggctgtgccaaactggaccggcagacccaggccacaactctcgttcatcagatcttcggaggctacctccggtcacgtgtcaagtgttctgtttgtaaatcagtaagtgacacttatgatccataccttgatgtggctcttgagatcaggcaggccgccaacatcgtcagggccctggaattgtttgtgaaagcagacgtattgtcaggcgagaatgcatatatgtgcgccaagtgcaaaaagaaagtacccgcctcaaaacgatttacgattcataggactagtaacgtgctgaccttatctttaaaacgattcgcgaacttctcgggaggaaaaataacgaaggatgtgggctatcctgaatttctcaacatcagaccttacatgagccagaataacggtgatccggtaatgtatggactgtatgctgtcctggttcatagcggctattcgtgccacgcaggtcactactattgctatgtgaaggccagcaatggccagtggtaccagatgaacgatagcttagtacatagtagcaatgtaaaggtcgtgctgaaccagcaggcatacgtgctgttctacctcaggattccagggagtaagaagtcaccggaagggctcatctcacggacaggctcctcatctctgcccgggcgcccgagtgtgattcccgatcactcaaaaaaaaacatcggcaacgggatcatttcatcacccctgacgggtaaaagacaggatagtggcaccatgaaaaagcctcatacaacagaagagataggggtcccgatttcccgcaacgggtccacactcggcctaaagagccaaaacgggtgcattcctcctaagttgccaagtgggtctccatcaccaaaactgagtcagaccccaacccatatgcccaccatcttggacgatccgggaaaaaaagttaagaaacctgcccccccccagcacttttcgccacggactgcacaaggattgcccggaactagcaatagcaattctagccgcagtggtagtcagaggcagggctcgtgggactccagagatgtcgtactgagtacctccccaaagttgctagctaccgccacagctaacgggcacgggctgaaaggcaatgatgaaagcgctggtcttgatcggcgtggttcctctagtagtagtccagaacacagcgcctcttccgattcaactaaagcaccacagaccccccgctccggtgcagcgcacctgtgtgattcccaggagaccaactgcagcactgcagggcattcgaagactcccccttctggcgcagacagcaagactgtgaaattgaaaagcccggtgctgagtaacaccaccaccgagcctgctagcacaatgagtccacctccagctaagaaactggcattaagtgcgaaaaaggcctccacattgtggagggctactgggaacgatctacggcctccacccccgtcaccatcttccgatcttactcatcccatgaaaacctcccatcctgttgtggcttcaacctggcctgtacacagggcccgggccgttagccctgcccctcaatcgtcctcacggctgcaacctcctttcagcccacatcccaccctgctgtctagcacacctaaacctcctggaactagcgaaccgagatcctgcagttcaatcagcaccgcactgccccaggttaatgaggacctggtgtcactgccccaccagctccccgaggcttcagaaccaccccagagcccgtccgaaaagcggaagaagacctttgtgggggagccacagagattgggctcggaaacacggctcccccagcacattcgggaagcaaccgcggcccctcacgggaagcgcaaaagaaagaaaaagaagagacccgaggatactgccgctagtgctctccaggagggccagacccagaggcagcctggctctcccatgtatcgtcgagaaggccaggcccagctccctgcggtgcgcagacaggaggacggaacccagccacaggttaacggccagcaggtcggctgcgtcaccgacggccatcatgccagttctcggaagaggcggcggaaaggggctgagggtctgggtgaggagggtggtctccatcaggatccactccgtcactcttgtagtcctatgggcgatggcgatccggaggcgatggaagagtccccccggaagaaaaagaagaagaaaagaaagcaggagactcagagggcggtcgaggaggatggccatctgaaatgcccaagaagcgcgaagccacaggatgcggtggtgccagagagtagttcttgcgcaccgagtgccaacggatggtgccctggcgataggatgggtctgagtcaggctcccccagtgtcgtggaatggagagagggaaagcgacgtggtgcaggagcttttgaaatatagctctgataaggcatatggaagaaaagtgctaacatgggatggcaagatgtcggcagtgtcccaggatgcaattgaggacagccggcaggccaggaccgaaactgtggttgatgactgggacgaagagtttgaccgaggtaaggagaagaaaattaagaagtttaaaagggagaaaagacgtaatttcaacgccttccaaaaactgcagaccagacggaacttctggtccgtgactcaccctgccaaagccgcttccctaagctacagaaggtag

SEQ ID NO: 275280 - DNA, 3372 bp, Artificial Sequence
  derived and/or modified sequence
atgcccatcgtggacaagctgaaggaggccctgaagcccggccggaaggattcagccgacgatggggaactgggtaaattgctggcgagtagcgccaaaaaggttcttttgcagaaaatcgaatttgagcccgcaagcaaatccttctcctatcagctggaggcactcaagagtaaatacgtattgctgaaccccaagacggaaggagctagtcgtcacaagtccggcgacgaccccccggctcgcagacagggaagcgagcacacctacgagtcttgtggggacggcgtacccgcacctcaaaaggtgctgttccccaccgaaagattgtctctgcgatgggagcgggtcttcagagtgggcgccggactgcacaatctgggcaatacgtgtttcctgaacgccactatacagtgtttgacctacaccccgccgttggcaaattatctcctgagcaaagaacacgcgagatcctgccatcagggctccttctgtatgctgtgtgttatgcagaatcatattgtccaggcatttgcgaactcaggaaacgccatcaagcccgtgagcttcatccgcgatctgaaaaagattgctaggcattttcggtttggcaatcaggaagacgcccatgaatttctccggtacactatagatgccatgcagaaagcgtgcctgaatggatgcgccaagctcgatcgacagacacaagccacaaccctggtccatcagatatttggaggctacctccggtcccgcgttaagtgtagcgtgtgtaagagtgtttctgacacctacgacccttatctagacgtggcgctggaaatacggcaggcagcaaatatcgtgcgcgctttggagctcttcgtgaaagcggatgtcctgagcggagagaacgcctatatgtgcgctaaatgcaagaagaaggtgccggcttccaagcgtttcaccatccaccggacatccaatgttttaacactgtctctgaagcggttcgctaatttctccggtgggaagatcacaaaggacgtgggataccccgagtttctcaatatccgcccctacatgagtcaaaataatggagacccagtgatgtacggtctgtacgcagttctggtgcatagcgggtattcctgccacgctgggcactattattgctatgtgaaagccagcaatggccagtggtaccagatgaatgactccctggtccacagcagtaatgtaaaagtcgtcttaaaccaacaggcatacgtgctcttttacctccgcatccccggctccaagaagtcgcccgagggtctcataagccgcaccggcagctcttccctgccaggcagaccttcagttataccagaccactcgaaaaagaacatcgggaacggcataattagttcaccgctgactggtaaacggcaagattccgggacgatgaagaagccccataccaccgaggaaataggggtgcccattagcaggaacgggtcaacactaggattgaaaagccaaaacggttgcattccgcctaagctacccagtggcagtccatcccccaaattgagtcaaacccccactcatatgccaaccatcctggatgacccaggcaagaaggtcaaaaaaccagcccctccccagcacttcagtcccaggactgcacagggtctaccgggcaccagtaattccaattccagtcgctctggaagccagaggcaggggtcctgggattcaagagacgttgtcctgagtacatcgcctaaactgttggctaccgccaccgctaatggccatggcttgaagggcaacgacgaatctgcgggcctcgacagacgcggctcttcctcatccagccccgagcatagcgcctcaagcgattccacgaaagccccccagacaccccggagtggggccgcacacttatgcgactctcaggaaacgaactgctccaccgcaggccacagtaagacaccacccagcggtgctgatagtaagaccgtgaaattaaagtccccggtcctgtcaaataccactacagaacccgccagcactatgtccccgccccctgctaagaagctagcgctgagcgccaaaaaagcatcgacgttgtggagagccaccggaaatgatctccgcccgccaccgccttctcccagctcagatctgacccatccaatgaagactagccacccagtcgtcgcctctacatggcctgtgcatagggcccgcgctgttagtccagcgccacagtctagcagccggctacaaccgcccttcagccctcacccgacgctcctgtccagcacaccaaaaccgccaggaaccagcgaaccaaggagttgtagttcaatctcaacggccctgccccaggttaacgaagatttggtgtcgttgcctcatcagctcccggaagctagcgagccgccacagtctccgtccgagaagaggaaaaaaacgttcgtaggtgagcctcagagattagggtcagagacacgactgccccagcacatccgcgaggcaaccgccgcccctcacggcaaaaggaagcggaagaagaaaaaacgcccagaagacaccgccgcatctgctctgcaggaagggcagacacaaaggcagcccggctctccgatgtaccgtagagaggggcaggcacagctaccggccgtgcggaggcaagaagatgggacacagccgcaggttaacgggcagcaagtgggctgcgtaaccgatgggcaccatgcatcgagccgcaaacgacggcgcaagggggccgaaggtttgggggaagagggcggactgcaccaggatcccttgagacactcatgctcacccatgggagacggggaccccgaggctatggaagagtctccgcgcaagaagaagaaaaagaagcggaaacaagagacccagagagccgtggaggaagacggacatctgaagtgccctcgctccgctaaaccacaggacgccgttgttccggaaagcagctcttgcgccccttccgctaacggctggtgccctggtgacagaatggggctaagccaggccccccctgtgtcctggaacggagagagagagtccgatgtggtccaagagctgcttaagtactcatcagacaaagcatatgggcggaaagttctcacttgggacgggaaaatgtccgcagtatcacaggatgcgattgaagatagccgacaggctaggaccgaaacagttgtcgacgattgggatgaggaatttgatcgcggaaaagagaaaaaaatcaaaaagtttaaaagggagaagcgaaggaattttaacgcattccaaaagctgcagacacgaagaaatttttggtctgtgacacacccagctaaagctgcctctctaagctatagacgatag

SEQ ID NO: 275281 - DNA, 3372 bp, Artificial Sequence
  derived and/or modified sequence
atgccaatagtggataaactcaaggaggcactaaagccgggaaggaaagacagcgcggacgacggggagctggggaagctgttggcctcctctgcgaagaaagtactactgcaaaaaattgagtttgaaccagcctccaagtcattcagttatcagcttgaggcgctgaagtccaaatatgtcctccttaaccccaaaaccgaaggggcatctcgtcacaaatctggcgacgaccctccggcaagacgtcaggggtccgaacatacttacgagagttgtggggacggagtacctgctccacagaaagttttgttccccacggagagattgagcctcaggtgggaaagggtcttcagagtgggcgcaggtttgcacaacctgggtaatacttgttttctcaacgctaccatccagtgcctgacctacactccaccccttgcaaattatctgctcagcaaagaacatgctagatcgtgccaccagggatccttttgcatgctctgcgtgatgcagaaccatatcgtacaggcttttgcaaattcgggaaacgccatcaagcccgtgagttttatacgcgatctcaaaaagatcgctagacacttccgatttggaaatcaggaggatgctcacgagttcctgcgttacacaattgatgcaatgcagaaggcttgtctgaatggctgtgctaaactggaccgccagacccaggccactaccttagtccaccagatttttggcggataccttcggtcgcgcgtgaagtgtagcgtgtgcaagtcagtctcagacacatacgatccctacctggacgtcgcactggagattagacaagcggctaacatcgtgcgggcacttgaactttttgtaaaggccgacgttcttagcggagaaaacgcatatatgtgtgccaagtgcaagaagaaagtgccagccagcaagcggtttacgatccaccggacgagcaatgtgctcactctgtccctcaagagattcgccaattttagtggcggaaagattacaaaggatgtcggttatccagagttcctgaacatccgtccttacatgtctcagaacaatggagatccagtaatgtacgggctttacgcagttcttgtgcacagcggttactcatgccatgctggtcactactactgttacgttaaagcctccaacggccagtggtatcaaatgaatgacagtctagtacattccagcaacgttaaagtggtcctgaaccagcaggcttatgtcctcttctacctgcgcatacctggatccaaaaagtccccagaagggttgatctctcggaccgggagttcttcacttccagggagaccaagtgtgattcccgaccactctaaaaagaacattgggaatggcatcatttctagccccctgacgggaaaaagacaggacagtgggacaatgaagaaaccacacactacagaagaaataggcgtgcccatctcccggaacggctcgacgctgggtttgaaaagccagaatggttgcatcccccctaagctgccctcaggttcgccatctcctaaactcagccagacaccaacacacatgccgacaatcttggacgacccaggaaaaaaggtcaagaaaccagcaccccctcagcatttttcaccgcgaaccgcccagggtctccctggcactagcaactccaattcctcccgttctggtagccaaagacagggcagttgggactccagagatgtggtcctgtcgaccagtccaaagctccttgctaccgcaacagccaacgggcacggactgaagggcaacgatgagtctgctggcctcgaccgccgagggtcgagctctagctctcctgaacattcagcgtcctccgactccactaaggcacctcagacccctcgatccggggctgctcacctatgtgactctcaggaaaccaattgctctactgcaggccacagcaaaaccccgcctagtggtgccgatagtaagaccgtgaagctgaagtctcctgtcttgtcaaatacaactaccgagcccgctagcacaatgtccccaccaccagctaagaaattggccttgtccgcgaagaaagccagcactctgtggcgcgcaaccggcaacgacctcaggcctcctccaccaagccctagtagtgatctcacccaccccatgaagacctcacacccagtcgtggccagtacctggccagttcatcgggctcgggcagtgtcccctgctccacagagtagttccaggcttcagcccccattttccccccatcctactttgctgagctcaacccctaagcccccagggacatcagagccgcgttcttgtagctcaattagtaccgccctcccgcaggtgaacgaggacttggtctctctcccccaccagctcccagaagcttctgagccaccccagagcccctctgaaaaaagaaagaagacttttgttggggaaccccagagacttgggtccgagacacgtctcccccagcacatcagagaagccacggcagcccctcatggtaaacgaaaacgtaaaaagaagaagagacccgaagacaccgcagcaagcgccctacaggaaggacaaactcagaggcagccagggtctccaatgtataggcgagaagggcaggctcaattgccagctgtcaggaggcaggaagatggtacacaaccacaggtgaacggacagcaggttggctgcgtgaccgacgggcatcatgccagtagcaggaaacggcgacgtaaaggcgcagaaggtttgggagaggaaggcggtctccatcaggacccgttgcgacatagctgttcccctatgggagacggcgacccggaggcgatggaagagagcccccgtaagaagaagaaaaaaaagcgaaaacaggagacgcaaagggcagttgaggaggacgggcaccttaaatgtcccaggtcagccaaacctcaggatgccgtggttcctgaatcgtcatcatgtgcaccgagtgctaatggctggtgccccggagatagaatggggctgtcgcaagcaccacccgtatcatggaatggtgagcgtgagagtgacgtggtccaggaacttctcaagtattccagcgataaggcctatggcagaaaggttcttacctgggacggaaagatgtctgcggttagccaagacgccattgaggactcgcggcaggccaggacggagaccgtggttgacgactgggatgaggaatttgacagaggcaaggagaaaaaaataaaaaagttcaagcgggagaagagacggaacttcaatgccttccaaaaactgcagacccgacgcaacttttggagcgtcactcacccagccaaagcagcttcactgtcatatcgccgatag

SEQ ID NO: 275282 - DNA, 3372 bp, Artificial Sequence
  derived and/or modified sequence
atgcctatagtcgacaagttgaaggaagcactgaaaccgggaaggaaggattctgctgacgatggagagctgggcaagcttctagcttcctccgccaagaaggtgctgttacaaaagatcgaatttgagcctgcctccaaaagtttttcgtaccagctggaagctctaaagtcgaagtacgtgctgctaaatcccaaaactgagggtgcgtcacggcacaaatcaggcgacgatccacccgcacgcagacagggctccgagcatacctacgagagctgcggcgatggtgtgccagcgccacagaaggttttgtttcctacagagcggttgtcccttcgatgggaacgggtgttcagagtgggagcagggctgcacaatttaggtaatacttgctttctcaacgctaccatacaatgtctcacctatacaccccctctggctaactatctgctgagcaaagagcatgccaggtcctgccatcagggctcattttgcatgctttgcgtgatgcagaaccacattgtgcaggcatttgccaacagtggaaatgcaatcaagccagtgtcctttattcgggatctgaagaagattgctcggcactttcgatttggaaatcaggaggacgctcacgagtttctccggtatacaatcgatgcaatgcagaaagcctgccttaatggctgcgctaaactggaccgacagacgcaggccaccaccctagtacatcagatttttggaggttatttgcgctcccgcgtgaaatgtagcgtgtgcaagtcggtgtcagatacctacgatccgtatctggacgtggccctggaaatccggcaggcagccaacatcgtgcgagccctcgagctgttcgtgaaggctgatgtactctccggggagaacgcgtatatgtgtgccaagtgtaagaagaaggtccccgctagcaagagattcacgattcacaggacaagcaatgtgctgacactgtcactgaagcgattcgctaatttcagcggtggaaaaattaccaaggacgtgggataccctgagttcttaaacatcaggccgtacatgtcgcaaaacaatggtgaccccgtgatgtacggtctctatgctgtcctcgttcactctggctatagttgccatgccggtcattattactgttacgtgaaagcgagcaacgggcagtggtatcagatgaatgactctctagtgcatagttcaaacgtcaaagttgtgctcaaccaacaggcatatgtgttgttctacttgaggatcccaggtagtaagaaatcccctgagggccttattagcagaactggttcgtcaagcctccctgggcgtccgtcggttatccccgatcatagcaaaaaaaacatcggaaacggtatcatttctagcccgctaaccggcaagcggcaggactcgggcaccatgaagaagccacacacaacagaggagatcggcgtgcccatctcaaggaacgggagtactttgggactgaaaagtcagaacgggtgtatccctcccaaactgccgagcgggagcccaagccccaaactctcacagacacccacccatatgcccacaatcctagacgaccctgggaaaaaagtcaagaagccagcccctccacaacactttagccccagaacggcacagggactcccgggaacttccaacagtaattcttcaagatctggtagtcagcgacagggttcctgggactcccgtgatgtggtcttaagtaccagtccgaagctgcttgcaaccgccactgctaacggccacggtttaaagggtaacgacgagtccgccggtttggaccgtagaggctctagctcttcgtctccagaacattccgctagttcagactcaacaaaggccccacagacacccaggagtggcgcagcccatttgtgcgactctcaggaaacgaactgttctaccgcaggacacagcaaaacccctcccagcggtgccgactccaagaccgttaagttaaagtcccccgtgctgtctaatacaacaaccgaaccagcttccaccatgtcacctcctccagccaaaaaactcgcactgagtgcgaaaaaagcttccactctgtggagggccaccggcaacgaccttagacctcccccacccagtccttcatccgacctgactcaccctatgaagacatcccatccagtggtggctagcacctggcccgtacaccgggctcgggcagtatcgcccgcaccccagagttcaagcaggttgcagccgccattcagcccccaccccacactgttaagctcgacacctaagcccccaggcacctccgaacctaggagttgcagctcaatctcaaccgcgctgccccaggttaatgaagaccttgtatccctgccccaccagctgcctgaggcctcggagccaccccagagtccctccgaaaagaggaagaagacctttgtcggcgagccgcagcgattgggcagcgagactaggctcccacagcatataagagaagccaccgctgccccacacggaaaaagaaagcgaaaaaagaagaaacggccagaggacaccgcagcatccgcactgcaggagggccagacacagcgtcagcccggatctcccatgtatcggagagagggccaggctcagctccccgctgtgaggcgccaagaggacgggacacagccccaggtcaacggacagcaggtgggatgcgttaccgacgggcaccatgctagtagtcgaaaacgcagaaggaagggagcggaagggctcggggaggagggtggactgcaccaagaccccctccgacattcgtgctcccccatgggagacggggatcccgaggcgatggaggagtctccaaggaagaaaaagaagaaaaagagaaaacaggagacccagcgcgcagttgaagaggacggacacttgaagtgcccccgttctgccaagcctcaggacgcagtggttccggaatcctcctcatgtgcaccctccgcgaatgggtggtgcccaggggacagaatggggctgtcacaagctccgcctgttagttggaacggggaacgagagagcgatgtggtccaggagttgctcaagtatagctcggacaaggcttacggacgcaaagtgctgacctgggacggcaagatgtccgccgtcagtcaagatgccattgaggattccagacaagctagaacagaaacggtggtggatgattgggacgaggaattcgatagagggaaagagaaaaagatcaaaaagttcaagcgggaaaagcggagaaacttcaacgcattccaaaagcttcagacccgcagaaacttctggagtgtaacacaccccgctaaagccgcatctctgagctacagacggtag

SEQ ID NO: 275283 - DNA, 5234 bp, Artificial Sequence
  derived and/or modified sequence
agcgcagcgcgaacgctgggtgcggcgcctttaagcgtcgcggtgacacgtgtgtgaggcgccggaggcccggatggtgcgcgtgctgggccgcgggccgaaggagtcgccagggctgcgtaggcttgtggcgcgcccgcggagaggccggggctctgacgcccgctctgcggcttcggtgtttgaacaggccacagtccaggagcgcttacattcaggagctccgcgtagcacctgcccaaccaaactcagccctccgttaagatcctggttccatgccgcagtaggacagcaggcccaagtctgcacatcccagtgatgcaccatgccaatagtggataagttgaaggaggccctgaaacccggccgcaaggactcggctgatgatggagaactggggaagcttcttgcctcctctgccaagaaggtccttttacagaaaatcgagttcgagccagccagcaagagcttctcctaccagctggaggccttaaagagcaaatatgtgttgctcaaccccaaaacagagggagctagtcgccacaagagtggagatgacccaccggccaggagacagggcagtgagcacacgtatgagagctgtggtgacggagtcccagccccgcagaaagtgcttttccccacggagcgactgtctctgaggtgggagcgggtcttccgcgtgggcgcaggactccacaaccttggcaacacctgctttctcaatgccaccatccagtgcttgacctacacaccacctctagccaactacctgctctccaaggagcatgctcgcagctgccaccagggaagcttctgcatgctgtgtgtcatgcagaaccacattgtccaggccttcgccaacagcggcaacgccatcaagcccgtctccttcatccgagacctgaaaaagatcgcccgacacttccgctttgggaaccaggaggacgcgcatgagttcctgcggtacaccatcgacgccatgcagaaagcctgcctgaatggctgtgccaagttggatcgtcaaacgcaggctactaccttggtccatcaaatttttggagggtatctcagatcacgcgtgaagtgctccgtgtgcaagagcgtctcggacacctacgacccctacttggacgtcgcgctggagatccggcaagctgcgaatattgtgcgtgctctggaactttttgtgaaagcagatgtcctgagtggagagaatgcctacatgtgtgctaaatgcaagaagaaggttccagccagcaagcgcttcaccatccacagaacatccaacgtcttaaccctttccctcaagcgctttgccaacttcagcggggggaagatcaccaaggatgtaggctatccggaattcctcaacatacgtccgtatatgtcccagaataatggtgatcctgtcatgtatggactctatgctgtcctggtgcactcgggctacagctgccatgccgggcactattactgctacgtgaaggcaagcaatggacagtggtaccagatgaatgattccttggtccattccagcaacgtcaaggtggttctgaaccagcaggcctacgtgctgttctatctgcgaattccaggctctaagaaaagtcccgagggcctcatctccaggacaggctcctcctcccttcccggccgcccgagtgtgattccagatcactccaagaagaacatcggcaatgggattatttcctccccactgactggaaagcgacaagactctgggacgatgaagaagccgcacaccactgaagagattggtgtgcccatatccaggaatggctccaccctgggcctgaagtcccagaacggctgcattcctccaaagctgccctcggggtccccttcccccaaactctcccagacacccacacacatgccaaccatcctagacgaccctggaaagaaggtgaagaagccagctcctccacagcacttttcccccagaactgctcaggggctgcctgggaccagcaactcgaatagcagcagatctgggagccaaaggcagggctcctgggacagcagggatgttgtcctctctacctcacctaagctcctggctacagccactgccaacgggcatgggctgaaggggaacgacgagagcgctggcctcgacaggaggggctccagcagctccagcccagagcactcggccagcagcgactccaccaaggccccccagacccccaggagtggagcggcccatctctgcgattctcaggaaacgaactgttccaccgctggccactccaaaacgccgccaagtggagcagattctaagacggtgaagctgaagtcccctgtcctgagcaacaccaccactgagcctgcaagcaccatgtctcctccaccagccaaaaaactggccctttctgccaagaaggccagcaccctgtggagggcgaccggcaatgacctccgtccacctcccccctcaccatcctccgacctcacccaccccatgaaaacctctcaccccgtcgttgcctccacttggcccgtccatagagccagggctgtgtcacctgctccccaatcatccagccgcctgcaaccccccttcagcccccaccccacattgctgtccagtacccccaagcccccagggacgtcagaaccacggagctgctcctccatctcgacggcgctgcctcaggtcaacgaggaccttgtgtctcttccacaccagttgccagaggccagtgagcccccccagagcccctctgagaagaggaaaaagacctttgtgggagagccgcagaggctgggctcagagacgcgcctcccacagcacatcagggaggccactgcggctccccacgggaagaggaagaggaagaagaagaagcgcccggaggacacagctgccagcgccctgcaggaggggcagacacagagacagcctgggagccccatgtacaggagggagggccaggcacagctgcccgctgtcagacggcaggaagatggcacacagccacaggtgaatggccagcaggtgggatgtgttacggacggccaccacgcgagcagcaggaagcggaggaggaaaggagcagaaggtcttggtgaagaaggcggcctgcaccaggacccacttcggcacagctgctctcccatgggtgatggtgatccagaggccatggaagagtctccaaggaaaaagaaaaagaaaaaaagaaagcaggagacacagcgggcagtagaagaggatgggcatctcaaatgcccaaggagtgccaagccccaagatgctgttgtccccgagtccagcagctgcgcaccatccgcgaatggctggtgtcctggggaccgcatggggctgagccaggcccctcctgtgtcttggaatggagagcgggagtctgatgtggtccaggaactgctcaaatactcatctgataaagcttacgggagaaaagttctgacctgggatggcaagatgtcggcggtcagtcaggatgctattgaagacagcagacaggcccggactgagaccgtggttgatgactgggacgaagagtttgaccgagggaaggaaaagaaaattaaaaaatttaagagagagaagaggagaaacttcaacgccttccagaaacttcagactcgacggaacttctggtctgtgactcacccagcaaaggctgccagcctcagctatcgccgctgactgtgcccctgtggaaggaggtcggttccgagggggtgggtgtaagggtgaggtgggggtgtgtgtgccgtgtatgtgtgtaggggtgtggtggggtgtggcgtgtgtgtatgatgtatgtgggctgtgtatctggcacatgtgtgttgggtggtgtgtgtggtgtgggcgcgtctgtggtgtgtgtcctagtcacttggagaagggtgtgtgtgggatgcgtgtgtataagggggtgtgtgtgggatgcgtgtgtataagggggtgtgtgtagtgtgtgttgggtgtggggtgtgtacacctggcatctgtggcatgtgttctggtcacttggagaagggcatgtgtggggtgtgtgtgggatgtgggttgtgtgtatatctggcatgtgtcccagtcacttgcagaagggtgacttcttgccagccgcatcgagatgccatgcattgggttcctaggttggactcatacccgagggtggcagtgggaagattcgggtctcgtttctctctgtcaggactaccgtggtttgttctgcagcctcctggagacaaggcgtcccttcccgggagctgtcggtctggatctgagggagctctctgtgtgggctctgctgcgctgggagcctgtcacggtaggagctctcccggtaccagtgtccacagaccgcccaacacagaggctttgaggcttctctagatcggaacctctttggtgacattcccgaccagccctgcaagagaaacgacagtgtgtgtgtgagcagaggtggccgcacacctgctggacatctttgccaggctgtgccttctcatgtttcatagacagtggtctgtgctggcagaggctgctgcccctggttggggctatcaggagagtgggggatggtggccacatgtcccccaggtggtctcccggtgcatagctggtggctctgggcaagccatcccttgcttctcggggctgacgccaccgttgtgtccgagcccgccctcccctgcttcctcagcgggaccccttcatctgttggccttacctgtcctcagaaaggaagaggtgaccccacccagccacctctcccttttatggaactcgagagggtggccctactgtgcaccccttccttgtgagtagctctcaactgtcctggagagcagaggctatttggggtcggaggagccctcgatacctgcgaatacatctgctttccaggctgctgtttattctgagacgactgtgctgtagcttcccttgcagctgcaataacccgcaggtcttcactgaggtggaggctttggggtagaattctccatttattttactacttaatacaaaacatttatttttgaccagtcctgtggcttccattagcaatatgtttcctttcccaaatatgcaaatagtggctttgtttgctcaattttgtgagtgctttggaatttaaatgattgtataactcaagaagattacttttctatgttgctcaagctgtgcctgccaacttgtaacttaataaatacaggaaatcctcagagaa

SEQ ID NO: 275284 - DNA, 4504 bp, Artificial Sequence
  derived and/or modified sequence
gggtattcccgaggagggtccggggccgggctgtcctcgccggtctccgccgtcccccgggctccgggccggtgatgggggtcgccggggcccgctgtctgtgcaggattcaggtcaacttcggagaggctctgacgcccgctctgcggcttcggtgtttgaacaggccacagtccaggagcgcttacattcaggagctccgcgtagcacctgcccaaccaaactcagccctccgttaagatcctggttccatgccgcagtaggacagcaggcccaagtctgcacatcccagtgatgcaccatgccaatagtggataagttgaaggaggccctgaaacccggccgcaaggactcggctgatgatggagaactggggaagcttcttgcctcctctgccaagaaggtccttttacagaaaatcgagttcgagccagccagcaagagcttctcctaccagctggaggccttaaagagcaaatatgtgttgctcaaccccaaaacagagggagctagtcgccacaagagtggagatgacccaccggccaggagacagggcagtgagcacacgtatgagagctgtggtgacggagtcccagccccgcagaaagtgcttttccccacggagcgactgtctctgaggtgggagcgggtcttccgcgtgggcgcaggactccacaaccttggcaacacctgctttctcaatgccaccatccagtgcttgacctacacaccacctctagccaactacctgctctccaaggagcatgctcgcagctgccaccagggaagcttctgcatgctgtgtgtcatgcagaaccacattgtccaggccttcgccaacagcggcaacgccatcaagcccgtctccttcatccgagacctgaaaaagatcgcccgacacttccgctttgggaaccaggaggacgcgcatgagttcctgcggtacaccatcgacgccatgcagaaagcctgcctgaatggctgtgccaagttggatcgtcaaacgcaggctactaccttggtccatcaaatttttggagggtatctcagatcacgcgtgaagtgctccgtgtgcaagagcgtctcggacacctacgacccctacttggacgtcgcgctggagatccggcaagctgcgaatattgtgcgtgctctggaactttttgtgaaagcagatgtcctgagtggagagaatgcctacatgtgtgctaaatgcaagaagaaggttccagccagcaagcgcttcaccatccacagaacatccaacgtcttaaccctttccctcaagcgctttgccaacttcagcggggggaagatcaccaaggatgtaggctatccggaattcctcaacatacgtccgtatatgtcccagaataatggtgatcctgtcatgtatggactctatgctgtcctggtgcactcgggctacagctgccatgccgggcactattactgctacgtgaaggcaagcaatggacagtggtaccagatgaatgattccttggtccattccagcaacgtcaaggtggttctgaaccagcaggcctacgtgctgttctatctgcgaattccaggctctaagaaaagtcccgagggcctcatctccaggacaggctcctcctcccttcccggccgcccgagtgtgattccagatcactccaagaagaacatcggcaatgggattatttcctccccactgactggaaagcgacaagactctgggacgatgaagaagccgcacaccactgaagagattggtgtgcccatatccaggaatggctccaccctgggcctgaagtcccagaacggctgcattcctccaaagctgccctcggggtccccttcccccaaactctcccagacacccacacacatgccaaccatcctagacgaccctggaaagaaggtgaagaagccagctcctccacagcacttttcccccagaactgctcaggggctgcctgggaccagcaactcgaatagcagcagatctgggagccaaaggcagggctcctgggacagcagggatgttgtcctctctacctcacctaagctcctggctacagccactgccaacgggcatgggctgaaggggaacgacgagagcgctggcctcgacaggaggggctccagcagctccagcccagagcactcggccagcagcgactccaccaaggccccccagacccccaggagtggagcggcccatctctgcgattctcaggaaacgaactgttccaccgctggccactccaaaacgccgccaagtggagcagattctaagacggtgaagctgaagtcccctgtcctgagcaacaccaccactgagcctgcaagcaccatgtctcctccaccagccaaaaaactggccctttctgccaagaaggccagcaccctgtggagggcgaccggcaatgacctccgtccacctcccccctcaccatcctccgacctcacccaccccatgaaaacctctcaccccgtcgttgcctccacttggcccgtccatagagccagggctgtgtcacctgctccccaatcatccagccgcctgcaaccccccttcagcccccaccccacattgctgtccagtacccccaagcccccagggacgtcagaaccacggagctgctcctccatctcgacggcgctgcctcaggtcaacgaggaccttgtgtctcttccacaccagttgccagaggccagtgagcccccccagagcccctctgagaagaggaaaaagacctttgtgggagagccgcagaggctgggctcagagacgcgcctcccacagcacatcagggaggccactgcggctccccacgggaagaggaagaggaagaagaagaagcgcccggaggacacagctgccagcgccctgcaggaggggcagacacagagacagcctgggagccccatgtacaggagggagggccaggcacagctgcccgctgtcagacggcaggaagatggcacacagccacaggtgaatggccagcaggtgggatgtgttacggacggccaccacgcgagcagcaggaagcggaggaggaaaggagcagaaggtcttggtgaagaaggcggcctgcaccaggacccacttcggcacagctgctctcccatgggtgatggtgatccagaggccatggaagagtctccaaggaaaaagaaaaagaaaaaaagaaagcaggagacacagcgggcagtagaagaggatgggcatctcaaatgcccaaggagtgccaagccccaagatgctgttgtccccgagtccagcagctgcgcaccatccgcgaatggctggtgtcctggggaccgcatggggctgagccaggcccctcctgtgtcttggaatggagagcgggagtctgatgtggtccaggaactgctcaaatactcatctgataaagcttacgggagaaaagttctgacctgggatggcaagatgtcggcggtcagtcaggatgctattgaagacagcagacaggcccggactgagaccgtggttgatgactgggacgaagagtttgaccgagggaaggaaaagaaaattaaaaaatttaagagagagaagaggagaaacttcaacgccttccagaaacttcagactcgacggaacttctggtctgtgactcacccagcaaaggctgccagcctcagctatcgccgctgactgtgcccctgtggaaggagcctcctggagacaaggcgtcccttcccgggagctgtcggtctggatctgagggagctctctgtgtgggctctgctgcgctgggagcctgtcacggtaggagctctcccggtaccagtgtccacagaccgcccaacacagaggctttgaggcttctctagatcggaacctctttggtgacattcccgaccagccctgcaagagaaacgacagtgtgtgtgtgagcagaggtggccgcacacctgctggacatctttgccaggctgtgccttctcatgtttcatagacagtggtctgtgctggcagaggctgctgcccctggttggggctatcaggagagtgggggatggtggccacatgtcccccaggtggtctcccggtgcatagctggtggctctgggcaagccatcccttgcttctcggggctgacgccaccgttgtgtccgagcccgccctcccctgcttcctcagcgggaccccttcatctgttggccttacctgtcctcagaaaggaagaggtgaccccacccagccacctctcccttttatggaactcgagagggtggccctactgtgcaccccttccttgtgagtagctctcaactgtcctggagagcagaggctatttggggtcggaggagccctcgatacctgcgaatacatctgctttccaggctgctgtttattctgagacgactgtgctgtagcttcccttgcagctgcaataacccgcaggtcttcactgaggtggaggctttggggtagaattctccatttattttactacttaatacaaaacatttatttttgacc

SEQ ID NO: 275285 - protein, 3280 aa, Artificial Sequence
  derived and/or modified sequence
MVCDGDWEHCYLPSAFSQHKVFVTPQAPLEAIQAYLAGHYRVPKQTLSAAAVFNDRLCVGIVASERAGVGKSLYVKRLHDKMKMQLNVKNVPLKTIRLIDPQVDESRVLGALLPFLDAQYQKVPVLFHLDVTSSVQTGIWVFLFKLLILQYLMDINGKMWLRNPCHLYIVEILERRTSVPSRSSSALRTRVPQFSFLDIFPKVTCRPPKEVIDMELSALRSDTEPGMDLWEFCSETFQRPYQYLRRFNQNQDLDTFQYQEGSVEGTPEECLQHFLFHCGVINPSWSELRNFARFLNYQLRDCEASLFCNPSFIGDTLRGFKKFVVTFMIFMARDFATPSLHTSDQSPGKHMVTMDGVREEDLAPFSLRKRWESEPHPYVFFNDDHTTMTFIGFHLQPNINGSVDAISHLTGKVIKRDVMTRDLYQGLLLQRVPFNVDFDKLPRHKKLERLCLTLGIPQATDPDKTYELTTDNMLKILAIEMRFRCGIPVIIMGETGCGKTRLIKFLSDLRRGGTNADTIKLVKVHGGTTADMIYSRVREAENVAFANKDQHQLDTILFFDEANTTEAISCIKEVLCDHMVDGQPLAEDSGLHIIAACNPYRKHSEEMICRLESAGLGYRVSMEETADRLGSIPLRQLVYRVHALPPSLIPLVWDFGQLSDVAEKLYIQQIVQRLVESISLDENGTRVITEVLCASQGFMRKTEDECSFVSLRDVERCVKVFRWFHEHSAMLLAQLNAFLSKSSVSKNHTERDPVLWSLMLAIGVCYHASLEKKDSYRKAIARFFPKPYDDSRLLLDEITRAQDLFLDGVPLRKTIAKNLALKENVFMMVVCIELKIPLFLVGKPGSSKSLAKTIVADAMQGPAAYSDLFRSLKQVHLVSFQCSPHSTPQGIISTFRQCARFQQGKDLQQYVSVVVLDEVGLAEDSPKMPLKTLHPLLEDGCIEDDPAPHKKVGFVGISNWALDPAKMNRGIFVSRGSPNETELIESAKGICSSDILVQDRVQGYFASFAKAYETVCKRQDKEFFGLRDYYSLIKMVFAAAKASNRKPSPQDIAQAVLRNFSGKDDIQALDIFLANLPEAKCSEEVSPMQLIKQNIFGPSQKVPGGEQEDAESRYLLVLTKNYVALQILQQTFFEGDQQPEIIFGSGFPKDQEYTQLCRNINRVKICMETGKMVLLLNLQNLYESLYDALNQYYVHLGGQKYVDLGLGTHRVKCRVHPNFRLIVIEEKDVVYKHFPIPLINRLEKHYLDINTVLEKWQKSIVEELCAWVEKFINVKAHHFQKRHKYSPSDVFIGYHSDACASVVLQVIERQGPRALTEELHQKVSEEAKSILLNCATPDAVVRLSAYSLGGFAAEWLSQEYFHRQRHNSFADFLQAHLHTADLERHAIFTEITTFSRLLTSHDCEILESEVTGRAPKPTLLWLQQFDTEYSFLKEVRNCLTNTAKCKILIFQTDFEDGIRSAQLIASAKYSVINEINKIRENEDRIFVYFITKLSRVGRGTAYVGFHGGLWQSVHIDDLRRSTLMVSDVTRLQHVTISQLFAPGDLPELGLEHRAEDGHEEAMETEASTSGEVAEVAEEAMETESSEKVGKETSELGGSDVSILDTTRLLRSCVQSAVGMLRDQNESCTRNMRRVVLLLGLLNEDDACHASFLRVSKMRLSVFLKKQEESQFHPLEWLAREACNQDALQEAGTFRHTLWKRVQGAVTPLLASMISFIDRDGNLELLTRPDTPPWARDLWMFIFSDTMLLNIPLVMNNERHKGEMAYIVVQNHMNLSENASNNVPFSWKIKDYLEELWVQAQYITDAEGLPKKFVDIFQQTPLGRFLAQLHGEPQQELLQCYLKDFILLTMRVSTEEELKFLQMALWSCTRKLKAASEAPEEEVSLPWVHLAYQRFRSRLQNFSRILTIYPQVLHSLMEARWNHELAGCEMTLDAFAAMACTEMLTRNTLKPSPQAWLQLVKNLSMPLELICSDEHMQGSGSLAQAVIREVRAQWSRIFSTALFVEHVLLGTESRVPELQGLVTEHVFLLDKCLRENSDVKTHGPFEAVMRTLCECKETASKTLSRFGIQPCSICLGDAKDPVCLPCDHVHCLRCLRAWFASEQMICPYCLTALPDEFSPAVSQAHREAIEKHARFRQMCNSFFVDLVSTICFKDNAPPEKEVIESLLSLLFVQKGRLRDAAQRHCEHTKSLSPFNDVVDKTPVIRSVILKLLLKYSFHDVKDYIQEYLTLLKKKAFITEDKTELYMLFINCLEDSILEKTSAYSRNDELNHLEEEGRFLKAYSPASRGREPANEASVEYLQEVARIRLCLDRAADFLSEPEGGPEMAKEKQCYLQQVKQFCIRVENDWHRVYLVRKLSSQRGMEFVQGLSKPGRPHQWVFPKDVVKQQGLRQDHPGQMDRYLVYGDEYKALRDAVAKAVLECKPLGIKTALKACKTPQSQQSAYFLLTLFREVAILYRSHNASLHPTPEQCEAVSKFIGECKILSPPDISRFATSLVDNSVPLLRAGPSDSNLDGTVTEMAIHAAAVLLCGQNELLEPLKNLAFSPATMAHAFLPTMPEDLLAQARRWKGLERVHWYTCPNGHPCSVGECGRPMEQSICIDCHAPIGGIDHKPRDGFHLVKDKADRTQTGHVLGNPQRRDVVTCDRGLPPVVFLLIRLLTHLALLLGASQSSQALINIIKPPVRDPKGFLQQHILKDLEQLAKMLGHSADETIGVVHLVLRRLLQEQHQLSSRRLLNFDTELSTKEMRNNWEKEIAAVISPELEHLDKTLPTMNNLISQDKRISSNPVAKIIYGDPVTFLPHLPRKSVVHCSKIWSCRKRITVEYLQHIVEQKNGKERVPILWHFLQKEAELRLVKFLPEILALQRDLVKQFQNVQQVEYSSIRGFLSKHSSDGLRQLLHNRITVFLSTWNKLRRSLETNGEINLPKDYCSTDLDLDTEFEILLPRRRGLGLCATALVSYLIRLHNEIVYAVEKLSKENNSYSVDAAEVTELHVISYEVERDLTPLILSNCQYQVEEGRETVQEFDLEKIQRQIVSRFLQGKPRLSLKGIPTLVYRHDWNYEHLFMDIKNKMAQDSLPSSVISAISGQLQSYSDACEVLSVVEVTLGFLSTAGGDPNMQLNVYTQDILQMGDQTIHVLKALNRCQLKHTIALWQFLSAHKSEQLLRLHKEPFGEISSRYKADLSPENAKLLSTFLNQTGLDAFLLELHEMIILKLKNPQTQTEERFRPQWSLRDTLVSYMQTKESEILPEMASQFPEEILLASCVSVWKTAAVLKWNREMR

SEQ ID NO: 275286 - protein, 5256 aa, Artificial Sequence
  derived and/or modified sequence
MECPSCQHVSKEETPKFCSQCGERLPPAAPIADSENNNSTMASASEGEMECGQELKEEGGPCLFPGSDSWQENPEEPCSKASWTVQEGATSEVLVDAAVDLISDEWEAANAIPSKRRKQDAAPLEAASVPSADCEQSKKKKRKKKKKGNKSASSELASLPLSPASPCHLTLLSNPWPQDTALPHSQAQQSGPTGQPSQPPGTATTPLEGDGLSAPTEVGDSPLQAQALGEAGVATGSEAQSSPQFQDHTEGEDQDASIPSGGRGLSQEGTGPPTSAGEGHSRTEDAAQELLLPESKGGSSEPGTELQTTEQQAGASASMAVDAVAEPANAVKGAGKEMKEKTQRMKQPPATTPPFKTHCQEAETKTKDEMAAAEEKVGKNEQGEPEDLKKPEGKNRSAAAVKNEKEQKNQEADVQEVKASTLSPGGGVTVFFHAIISLHFPFNPDLHKVFIRGGEEFGESKWDSNICELHYTRDLGHDRVLVEGIVCISKKHLDKYIPYKYVIYNGESFEYEFIYKHQQKKGEYVNRCLFIKSSLLGSGDWHQYYDIVYMKPHGRLQKVMNHITDGPRKDLVKGKQIAAALMLDSTFSILQTWDTINLNSFFTQFEQFCFVLQQPMIYEGQAQLWTDLQYREKEVKRYLWQHLKKHVVPLPDGKSTDFLPVDCPVRSKLKTGLIVLFVVEKIELLLEGSLDWLCHLLTSDASSPDEFHRDLSHILGIPQSWRLYLVNLCQRCMDTRTYTWLGALPVLHCCMELAPRHKDAWRQPEDTWAALEGLSFSPFREQMLDTSSLLQFMREKQHLLSIDEPLFRSWFSLLPLSHLVMYMENFIEHLGRFPAHILDCLSGIYYRLPGLEQVLNTQDVQDVQNVQNILEMLLRLLDTYRDKIPEEALSPSYLTVCLKLHEAICSSTKLLKFYELPALSAEIVCRMIRLLSLVDSAGQRDETGNNSVQTVFQGTLAATKRWLREVFTKNMLTSSGASFTYVKEIEVWRRLVEIQFPAEHGWKESLLGDMEWRLTKEEPLSQITAYCNSCWDTKGLEDSVAKTFEKCIIEAVSSACQSQTSILQGFSYSDLRKFGIVLSAVITKSWPRTADNFNDILKHLLTLADVKHVFRLCGTDEKILANVTEDAKRLIAVADSVLTKVVGDLLSGTILVGQLELIIKHKNQFLDIWQLREKSLSPQDEQCAVEEALDWRREELLLLKKEKRCVDSLLKMCGNVKHLIQVDFGVLAVRHSQDLSSKRLNDTVTVRLSTSSNSQRATHYHLSSQVQEMAGKIDLLRDSHIFQLFWREAAEPLSEPKEDQEAAELLSEPEEESERHILELEEVYDYLYQPSYRKFIKLHQDLKSGEVTLAEIDVIFKDFVNKYTDLDSELKIMCTVDHQDQRDWIKDRVEQIKEYHHLHQAVHAAKVILQVKESLGLNGDFSVLNTLLNFTDNFDDFRRETLDQINQELIQAKKLLQDISEARCKGLQALSLRKEFICWVREALGGINELKVFVDLASISAGENDIDVDRVACFHDAVQGYASLLFKLDPSVDFSAFMKHLKKLWKALDKDQYLPRKLCDSARNLEWLKTVNESHGSVERSSLTLATAINQRGIYVIQAPKGGQKISPDTVLHLILPESPGSHEESREYSLEEVKELLNKLMLMSGKKDRNNTEVERFSEVFCSVQRLSQAFIDLHSAGNMLFRTWIAMAYCSPKQGVSLQMDFGLDLVTELKEGGDVTELLAALCRQMEHFLDSWKRFVTQKRMEHFYLNFYTAEQLVYLSTELRKQPPSDAALTMLSFIKSNCTLRDVLRASVGCGSEAARYRMRRVMEELPLMLLSEFSLVDKLRIIMEQSMRCLPAFLPDCLDLETLGHCLAHLAGMGGSPVERCLPRGLQVGQPNLVVCGHSEVLPAALAVYMQTPSQPLPTYDEVLLCTPATTFEEVALLLRRCLTLGSLGHKVYSLLFADQLSYEVARQAEELFHNLCTQQHREDYQLVMVCDGDWEHCYLPSAFSQHKVFVTPQAPLEAIQAYLAGHYRVPKQTLSAAAVFNDRLCVGIVASERAGVGKSLYVKRLHDKMKMQLNVKNVPLKTIRLIDPQVDESRVLGALLPFLDAQYQKVPVLFHLDVTSSVQTGIWVFLFKLLILQYLMDINGKMWLRNPCHLYIVEILERRTSVPSRSSSALRTRVPQFSFLDIFPKVTCRPPKEVIDMELSALRSDTEPGMDLWEFCSETFQRPYQYLRRFNQNQDLDTFQYQEGSVEGTPEECLQHFLFHCGVINPSWSELRNFARFLNYQLRDCEASLFCNPSFIGDTLRGFKKFVVTFMIFMARDFATPSLHTSDQSPGKHMVTMDGVREEDLAPFSLRKRWESEPHPYVFFNDDHTTMTFIGFHLQPNINGSVDAISHLTGKVIKRDVMTRDLYQGLLLQRVPFNVDFDKLPRHKKLERLCLTLGIPQATDPDKTYELTTDNMLKILAIEMRFRCGIPVIIMGETGCGKTRLIKFLSDLRRGGTNADTIKLVKVHGGTTADMIYSRVREAENVAFANKDQHQLDTILFFDEANTTEAISCIKEVLCDHMVDGQPLAEDSGLHIIAACNPYRKHSEEMICRLESAGLGYRVSMEETADRLGSIPLRQLVYRVHALPPSLIPLVWDFGQLSDVAEKLYIQQIVQRLVESISLDENGTRVITEVLCASQGFMRKTEDECSFVSLRDVERCVKVFRWFHEHSAMLLAQLNAFLSKSSVSKNHTERDPVLWSLMLAIGVCYHASLEKKDSYRKAIARFFPKPYDDSRLLLDEITRAQDLFLDGVPLRKTIAKNLALKENVFMMVVCIELKIPLFLVGKPGSSKSLAKTIVADAMQGPAAYSDLFRSLKQVHLVSFQCSPHSTPQGIISTFRQCARFQQGKDLQQYVSVVVLDEVGLAEDSPKMPLKTLHPLLEDGCIEDDPAPHKKVGFVGISNWALDPAKMNRGIFVSRGSPNETELIESAKGICSSDILVQDRVQGYFASFAKAYETVCKRQDKEFFGLRDYYSLIKMVFAAAKASNRKPSPQDIAQAVLRNFSGKDDIQALDIFLANLPEAKCSEEVSPMQLIKQNIFGPSQKVPGGEQEDAESRYLLVLTKNYVALQILQQTFFEGDQQPEIIFGSGFPKDQEYTQLCRNINRVKICMETGKMVLLLNLQNLYESLYDALNQYYVHLGGQKYVDLGLGTHRVKCRVHPNFRLIVIEEKDVVYKHFPIPLINRLEKHYLDINTVLEKWQKSIVEELCAWVEKFINVKAHHFQKRHKYSPSDVFIGYHSDACASVVLQVIERQGPRALTEELHQKVSEEAKSILLNCATPDAVVRLSAYSLGGFAAEWLSQEYFHRQRHNSFADFLQAHLHTADLERHAIFTEITTFSRLLTSHDCEILESEVTGRAPKPTLLWLQQFDTEYSFLKEVRNCLTNTAKCKILIFQTDFEDGIRSAQLIASAKYSVINEINKIRENEDRIFVYFITKLSRVGRGTAYVGFHGGLWQSVHIDDLRRSTLMVSDVTRLQHVTISQLFAPGDLPELGLEHRAEDGHEEAMETEASTSGEVAEVAEEAMETESSEKVGKETSELGGSDVSILDTTRLLRSCVQSAVGMLRDQNESCTRNMRRVVLLLGLLNEDDACHASFLRVSKMRLSVFLKKQEESQFHPLEWLAREACNQDALQEAGTFRHTLWKRVQGAVTPLLASMISFIDRDGNLELLTRPDTPPWARDLWMFIFSDTMLLNIPLVMNNERHKGEMAYIVVQNHMNLSENASNNVPFSWKIKDYLEELWVQAQYITDAEGLPKKFVDIFQQTPLGRFLAQLHGEPQQELLQCYLKDFILLTMRVSTEEELKFLQMALWSCTRKLKAASEAPEEEVSLPWVHLAYQRFRSRLQNFSRILTIYPQVLHSLMEARWNHELAGCEMTLDAFAAMACTEMLTRNTLKPSPQAWLQLVKNLSMPLELICSDEHMQGSGSLAQAVIREVRAQWSRIFSTALFVEHVLLGTESRVPELQGLVTEHVFLLDKCLRENSDVKTHGPFEAVMRTLCECKETASKTLSRFGIQPCSICLGDAKDPVCLPCDHVHCLRCLRAWFASEQMICPYCLTALPDEFSPAVSQAHREAIEKHARFRQMCNSFFVDLVSTICFKDNAPPEKEVIESLLSLLFVQKGRLRDAAQRHCEHTKSLSPFNDVVDKTPVIRSVILKLLLKYSFHDVKDYIQEYLTLLKKKAFITEDKTELYMLFINCLEDSILEKTSAYSRNDELNHLEEEGRFLKAYSPASRGREPANEASVEYLQEVARIRLCLDRAADFLSEPEGGPEMAKEKQCYLQQVKQFCIRVENDWHRVYLVRKLSSQRGMEFVQGLSKPGRPHQWVFPKDVVKQQGLRQDHPGQMDRYLVYGDEYKALRDAVAKAVLECKPLGIKTALKACKTPQSQQSAYFLLTLFREVAILYRSHNASLHPTPEQCEAVSKFIGECKILSPPDISRFATSLVDNSVPLLRAGPSDSNLDGTVTEMAIHAAAVLLCGQNELLEPLKNLAFSPATMAHAFLPTMPEDLLAQARRWKGLERVHWYTCPNGHPCSVGECGRPMEQSICIDCHAPIGGIDHKPRDGFHLVKDKADRTQTGHVLGNPQRRDVVTCDRGLPPVVFLLIRLLTHLALLLGASQSSQALINIIKPPVRDPKGFLQQHILKDLEQLAKMLGHSADETIGVVHLVLRRLLQEQHQLSSRRLLNFDTELSTKEMRNNWEKEIAAVISPELEHLDKTLPTMNNLISQDKRISSNPVAKIIYGDPVTFLPHLPRKSVVHCSKIWSCRKRITVEYLQHIVEQKNGKERVPILWHFLQKEAELRLVKFLPEILALQRDLVKQFQNVQQVEYSSIRGFLSKHSSDGLRQLLHNRITVFLSTWNKLRRSLETNGEINLPKDYCSTDLDLDTEFEILLPRRRGLGLCATALVSYLIRLHNEIVYAVEKLSKENNSYSVDAAEVTELHVISYEVERDLTPLILSNCQYQVEEGRETVQEFDLEKIQRQIVSRFLQGKPRLSLKGIPTLVYRHDWNYEHLFMDIKNKMAQDSLPSSVISAISGQLQSYSDACEVLSVVEVTLGFLSTAGGDPNMQLNVYTQDILQMGDQTIHVLKALNRCQLKHTIALWQFLSAHKSEQLLRLHKEPFGEISSRYKADLSPENAKLLSTFLNQTGLDAFLLELHEMIILKLKNPQTQTEERFRPQWSLRDTLVSYMQTKESEILPEMASQFPEEILLASCVSVWKTAAVLKWNREMR

SEQ ID NO: 275287 - DNA, 9843 bp, Artificial Sequence
  derived and/or modified sequence
atggtgtgtgacggcgattgggaacactgttatctgcctagcgctttttcacagcacaaagttttcgtgactccacaggcacccctggaggccatacaggcttatctagctggtcattaccgagtacccaaacagaccctgagtgctgctgcagtgtttaatgataggctgtgtgtgggaatcgtggcgtccgaaagagcaggcgtggggaagtctctttatgttaagcgcctgcacgacaaaatgaagatgcagctcaatgtgaagaatgtacccctcaagaccatcaggttaatagatccgcaagttgatgaaagcagagtgttgggcgcactgctgccttttctcgacgctcagtaccagaaggtcccagttctcttccacctggacgtgacgtcatcagtccagacgggaatctgggtatttctgtttaagctgctaattttacagtatttaatggatattaatggtaaaatgtggctgcgaaacccatgccacctctacatcgtcgaaatcctcgagcgtcggacctcggttccatcacggtcgtcttctgcccttcggaccagagtgccacagttcagctttctcgacattttccctaaggttacctgcaggccgccaaaggaagtaatagatatggagctgtccgcgctacggagcgacacagaacccgggatggatctgtgggagttttgcagtgaaaccttccagcgtccttaccagtatctccgaagatttaaccaaaatcaggacctggataccttccagtaccaagaaggatcggtcgaaggcacacccgaggagtgtctccagcactttctcttccactgtggcgtgatcaacccttcttggtccgagcttaggaatttcgcacggtttctgaactatcagctccgcgattgtgaagcgagcctgttctgtaacccctcattcatcggggacaccctgaggggttttaaaaaattcgtcgtaacattcatgatttttatggcaagagattttgccaccccgtcattgcacaccagtgatcagagtcccggcaagcatatggtcactatggacggggttagggaggaagatttagcccctttctctctgaggaaaagatgggagagtgaaccacacccgtatgtgttctttaacgacgaccataccacaatgacattcatcggcttccatctccagcctaacatcaatggctcagtagacgccatctcacacctcacagggaaggtgatcaagagggacgtaatgacaagagacttgtaccagggcctgcttctgcaacgcgtcccctttaatgtcgatttcgataaattacctaggcataagaagctggagcgcttgtgccttaccctggggattcctcaggctactgacccagacaaaacctatgaactgactaccgataacatgctcaaaatcctagccattgagatgcgctttcgttgtggtataccagtgattataatgggcgagacaggatgtggcaaaacaagacttattaaatttctctctgacctgagacgtggtggcaccaatgctgacacgattaagctggtcaaggttcatggtggtacgacagctgacatgatctactcacgggtgcgcgaagccgagaacgtggctttcgccaacaaagaccaacaccagctcgacactatccttttttttgacgaggccaacaccaccgaagctatctcttgtatcaaggaggtcctttgcgatcacatggtcgatggccagcccttagccgaggacagcggcctccatatcatagcagcttgcaacccgtacaggaaacattccgaagagatgatttgccgactagaaagtgctgggttaggataccgcgtgtcaatggaggaaaccgcagaccggcttgggagtataccgctgcgccagctcgtctatagggttcacgctctgccaccctccctgatccctctagtatgggattttggccagttgtcggatgtggccgaaaaactgtatatccagcagattgttcaacgcctggtagagtcaattagcctggatgagaatggaacacgcgtcataactgaggtgctttgcgcctcccaaggcttcatgagaaagacagaggatgagtgttcattcgtgtccctcagagacgtcgaaagatgcgtaaaggtgtttaggtggttccacgagcactccgctatgctactcgctcagctgaatgcctttctgagcaagagtagtgtgagcaagaatcatactgagcgggaccctgttctgtggtcactgatgctggctatcggggtctgctaccacgcttcactggagaaaaaagatagttacagaaaagcgattgcccgattttttccgaagccttatgacgacagtagactgctcctcgacgaaattacaagggctcaggatctgttccttgatggagtgcccttgcgcaaaaccatcgccaagaatctcgccttaaaggagaatgtgtttatgatggtggtgtgtattgagttgaagatccccctgttccttgtaggaaaacccggttccagtaaatccctggcaaaaactatcgtggccgacgctatgcagggtccggccgcctactccgatctcttccgctctttaaaacaagtgcaccttgtaagtttccagtgttcgccccatagtacgcctcaagggattataagcacatttaggcagtgcgcgcggtttcaacaggggaaggatctgcagcagtatgtttcagtggttgtgctagatgaagtgggtctggctgaggactctccgaagatgcccctgaagacactgcacccactgttagaggatggctgtatagaagatgaccctgcccctcacaaaaaagtaggcttcgtgggaattagcaactgggccttggaccccgccaaaatgaatagggggatcttcgtgagccgtggttccccaaacgagacagaactgattgagagtgccaaaggaatctgcagcagcgacattttggtgcaggatagggtgcagggatactttgcaagttttgccaaggcctacgaaaccgtctgtaagaggcaggataaggaattttttggccttagggactattactcattaattaaaatggtatttgcggccgccaaggcttctaatcgaaagccgagccctcaggatatagcccaggcagtcctgagaaactttagtggaaaagatgacattcaggccctggacatttttttggctaatctcccagaggctaagtgctctgaggaagtttcacctatgcagcttatcaagcaaaacatttttggaccctcccagaaagtgccgggaggcgaacaggaggatgccgaatctcgttatttgttggtgctgaccaagaattacgtggcactccagatactccagcagaccttcttcgagggagaccagcagccagaaataatcttcggcagcggatttccaaaagaccaagaatacacccaactgtgcaggaacattaatcgagtcaaaatttgcatggaaaccggaaagatggtactgctgctgaatctccagaatttgtacgaatctctgtatgatgccctgaaccagtactacgtgcatctcggaggccagaagtacgtggatttgggcctcggaacccaccgcgtgaagtgccgggtccacccaaatttcaggctgatcgtgattgaagagaaggatgtagtgtacaaacacttccccatcccactgataaacagattagagaagcattacctcgacatcaatacagtgctggaaaagtggcagaaaagcatcgtggaggaactttgcgcatgggtggagaaattcattaacgtcaaggcccaccatttccagaagcgccacaaatacagcccatctgacgtgtttataggctatcattccgatgcatgcgctagtgtggtcctccaggtaatagaacgccagggtcctcgcgccctcactgaagaactgcatcagaaagtgagcgaggaggctaagtcaattttgctcaactgcgcgacccccgacgccgtcgtgagactctctgcgtatagcctcggaggatttgccgcagaatggctttcacaagaatactttcatcggcaaagacataactctttcgccgattttcttcaggcgcacctccacaccgcagacctagaacggcacgctatattcaccgagatcaccaccttcagtagattgctcaccagccacgattgcgagatcctggagtctgaggtcaccgggcgcgcacctaaacccaccctgctgtggctgcagcaattcgatacggagtactccttcctaaaggaagtgcggaattgcttaaccaatacggcgaaatgcaaaattttaatctttcaaacagactttgaggatggaatacggtccgcgcaactcatagcttccgccaagtacagcgtaatcaacgaaatcaataagattcgcgaaaacgaggataggatttttgtgtattttattactaaactcagccgcgtgggaagaggtactgcctacgtcggatttcacggaggtctgtggcagtccgtgcatatcgacgatttacgcaggagtacactgatggttagcgatgtcacaaggctccagcatgttacgatttcacagcttttcgctccgggtgatctcccagagctgggcttagaacatcgggctgaagacgggcatgaagaagcaatggaaactgaagcaagcacatccggggaggtggccgaggtggccgaagaagccatggagaccgagtcatctgagaaagtggggaaagaaacatccgagcttgggggctcagacgtttccatccttgatacaacccgactgctgagatcatgtgtgcagtcggctgtggggatgttacgcgaccagaatgagtcttgtacacgtaatatgagacgcgtagttctcctcctggggctgctaaatgaggatgacgcctgccatgcctcttttctgagggtgtccaaaatgcgactgtccgtattcctcaagaagcaagaggagagccagttccaccctctggagtggctcgccagagaggcttgtaatcaagatgcgcttcaggaggccggtaccttccgacataccctatggaagcgagtccagggagcggtcacccctctccttgcttccatgatcagtttcattgatcgggatgggaatctggagctcctgactaggcccgacacccctccctgggcgcgggacctttggatgtttatatttagcgatactatgttgctaaatattcccttggttatgaacaacgaacggcacaaaggagagatggcatacattgtagttcagaaccatatgaacctgtcagaaaatgcatctaataatgtcccctttagctggaagataaaagattacctagaggagctctgggtgcaggcccagtacatcacggacgcagaaggcctccctaagaagtttgtcgatatattccagcaaacccccctgggcaggtttctagcccagctgcatggagagcctcaacaggagctcctccagtgctatctgaaggacttcatcttgctcacaatgcgggtcagtaccgaagaggagctgaagtttctccagatggcactctggtcttgtactagaaagctgaaggccgcctcagaggccccagaagaagaggtgtctttaccttgggtgcatctcgcctaccaaaggtttcgttccaggttgcagaatttcagccgaatcctgacaatatacccccaggttttacacagcttgatggaagcccggtggaatcacgagctggccggctgcgaaatgacactggatgcatttgccgcaatggcatgtacagaaatgctcaccaggaatacattaaaaccttctccgcaagcatggctgcagctggtgaagaacttgtctatgcctctagagcttatctgttcggacgagcacatgcaggggtctggttccctggcccaggccgtgatccgcgaggtgcgtgctcagtggagccggatcttctcaaccgccctgttcgtcgaacacgtactgctgggaacagaatctcgcgtcccagagctccagggccttgtgaccgagcacgtgttcctcctggataagtgtttgagggaaaatagtgatgtgaagacacacggaccctttgaggccgttatgcggaccctttgtgagtgtaaggagactgcatctaagacactcagtcgatttgggatccagccgtgttcaatctgcttgggcgatgcaaaggatccagtgtgccttccctgtgaccatgtacactgcctgaggtgtctgcgcgcctggttcgccagcgagcagatgatctgcccttactgcttaacggccctgccggacgagtttagtccagctgtgtcgcaagcccatagagaagcgattgaaaagcatgccaggttccgccagatgtgtaattctttcttcgtggacctggtctcgactatttgttttaaggataacgcgccccctgaaaaagaagtaatcgaaagcctactgtcgctcttgtttgttcagaaaggaaggctaagggatgctgcccaacggcactgtgagcataccaaatcactgtctccatttaacgacgttgtggacaaaaccccggtgatacgttcagtgattctgaaattgctcttgaagtacagctttcacgatgtcaaggactacatccaggagtatttgactttgctcaaaaagaaagcctttatcaccgaggataagacagaactgtacatgctgtttatcaactgcctggaggatagcatcctggaaaaaacatccgcctactcccgcaacgacgagttgaatcatctggaagaggagggcagattcttgaaagcctattcacccgcttcccgcggccgcgagcctgctaatgaagcctccgtagagtacctgcaggaagtggcacggatcaggctctgtctcgaccgagccgccgactttctgagcgaacccgaaggcggtccagaaatggctaaggagaaacaatgctatctccagcaagtgaagcagttctgtatacgcgtggaaaatgactggcatcgagtttaccttgtaaggaaattgtctagccaaagagggatggagttcgtgcaaggtttgtcaaaacccggtaggcctcatcagtgggtgttccccaaggatgtggttaagcagcaaggtttaagacaggaccaccccggccaaatggatagatacttggtgtatggagatgagtacaaggcactgcgcgacgctgtggcgaaagctgttctggaatgcaaacctctgggaatcaaaacagcactgaaagcctgtaaaacccctcagagccagcagagcgcgtatttcctactcacactgtttagagaggtcgcgatcctgtataggtctcataatgcttccctccaccccacaccagaacaatgcgaggccgtgtcaaaattcatcggagaatgtaagattctctctccccccgacatttccaggttcgccacctcccttgtggataacagcgtgccactcctaagagctgggcccagtgactccaacctcgatggcacagttaccgaaatggccatccatgccgccgccgtgctgctgtgtggccagaatgaattgctggagccgctgaaaaatctggcattcagccccgccactatggcacacgcattcctccccacaatgcccgaagacttacttgcacaggctcgccgctggaaggggttagagagagttcattggtatacgtgtccaaacggtcatccatgtagcgtcggggaatgcggtaggccgatggagcaatctatctgtatagattgccacgcccctattggtggaatcgaccacaagccacgcgacggatttcatctagtcaaagataaggccgatcggacccagacaggacacgttttgggcaaccctcaacgaagggatgtggtgacatgcgatagggggctgccacccgtcgtattcctgctgatacggctgctaacccatctcgcgcttcttctgggtgcctcccagagctcacaggccctcattaatattattaaaccaccagttcgggaccctaagggatttctgcagcagcacattctgaaggatctagagcagctggctaaaatgctagggcacagtgccgatgagaccataggcgtcgtgcatctcgtcctgagacgcttactccaggagcaacaccagctctcctctagaagattgctaaacttcgacactgagctaagcacaaaggagatgaggaataattgggagaaagaaatcgctgccgtaatcagccctgagctggaacatctggataaaacacttcccaccatgaacaatctcatttctcaggataagcgtattagctctaacccggtggcaaaaattatttacggagaccctgtgaccttcctcccccatctgcccagaaagtccgtagtgcattgttctaagatctggtcttgtagaaagaggattacagtcgaatatctgcagcacatcgtcgagcagaaaaatggcaaggaacgcgtgccaattctctggcattttctccaaaaagaagcggaacttaggctggtgaaattccttcctgagatcctggctcttcaacgcgacctcgtgaaacaattccagaacgtgcagcaggtcgagtacagtagcatccgcggcttcttgtctaaacactcatctgacggtctgaggcagcttctgcataacaggatcaccgtctttctctccacctggaacaagctccggagaagcttggagaccaacggtgaaattaacctaccaaaggactactgtagcacagacctcgacctggataccgaatttgaaattctcctgccgaggaggcgcgggttggggctgtgcgctacagcgctggtcagctatctgattagactgcacaacgaaatagtgtatgcagtcgaaaagctgtccaaagaaaataattcatactcagtcgatgcggctgaagttacagagctgcatgtaatctcatatgaagtggaacgagatcttacgcccctcatactgtcgaattgtcagtatcaggtggaggaaggaagagaaacggtgcaggagtttgatctcgagaaaattcagaggcagatcgtttcaagatttttgcaagggaagccacgcttatccctcaagggaattcccaccctggtctaccgacatgattggaattatgaacacctctttatggacattaaaaataaaatggctcaggattcattgcccagctccgtcatctccgcaatttccgggcaattgcagtcatacagcgatgcttgcgaagtgctctcagtggtcgaagtaactctcggattcctgtcgaccgctggtggggacccgaatatgcaattgaatgtgtacacgcaggatattctccagatgggcgaccaaacaatacatgttttaaaagccctcaacaggtgtcagctcaagcacacaattgccctgtggcagttcctgtcagcccataagtcggagcagctgcttcgactgcataaggaaccattcggcgagatctctagtaggtacaaggccgacctgtcaccagaaaacgccaaactgctcagcaccttcctaaatcagactggcctggatgccttcttgctggaattacatgaaatgatcatactgaagttgaagaatcctcagacacagaccgaagagcgattccggccccagtggtcactcagggacaccttagttagttacatgcaaactaaggaatccgaaatcctgcctgaaatggctagtcagttcccggaagagatcttgctcgcgagctgcgtgtctgtttggaagacagcagctgtcctcaagtggaatcgggagatgcgatag

SEQ ID NO: 275288 - DNA, 15771 bp, Artificial Sequence
  derived and/or modified sequence
atggagtgtccttcatgccagcacgtgtcaaaggaggaaacacctaaattttgttcccagtgtggcgaacgcctgccacccgcagcccccattgctgatagcgagaacaacaacagcaccatggcaagcgcctcagaaggggagatggaatgtggtcaggagctcaaggaagagggcggaccctgtctgtttcccggttctgacagctggcaggaaaatccagaggagccctgctcgaaggcttcctggaccgtgcaggaaggagctacttcagaagtgctggtcgacgcggctgtggatttgatatccgatgaatgggaagcagcaaatgcaattcctagcaagcgccggaagcaggatgcagctccattggaggcagccagcgtgcccagtgcagactgcgagcagtctaagaagaaaaaacggaaaaaaaagaaaaaaggcaacaaaagtgcatccagtgagttggcttccctgcctctctctcccgctagtccgtgccatctcacgcttttatccaacccatggccgcaggataccgctctgcctcacagccaagctcagcaatccgggcccactggccaaccatcccagccacctggaacggccaccacgcctctggagggagatggtttaagcgcccccaccgaagtgggagatagccccctgcaggctcaggcattgggcgaggctggggttgccaccgggtccgaggcccagtctagccctcagtttcaggatcataccgagggggaggatcaggatgcctccattccttcagggggaaggggcctctcccaagaaggaaccggcccacctacttcagccggcgagggccatagccgaactgaggacgctgctcaggagcttttgctgccagagagcaagggagggtcctccgagcccggcactgagctgcagacgacagagcaacaggccggggcgagcgcttccatggcagtcgacgcagtggcggaacccgcaaatgcagtgaaaggagcgggcaaggagatgaaggaaaagactcaaagaatgaaacagccacccgctacaaccccacccttcaaaacccattgccaagaggcggagactaaaaccaaagacgagatggcggcggctgaagagaaggtaggcaagaacgagcaaggcgaaccagaagacctgaaaaagcctgagggtaagaataggtctgctgccgccgtgaaaaatgagaaggaacagaaaaatcaggaagccgatgtccaagaagttaaggcctccacacttagtccaggtggcggagttactgtgtttttccacgctattatctcactgcatttcccctttaatcctgacctccacaaagtttttatacgcgggggcgaagaatttggcgaaagcaagtgggactcgaacatttgcgagcttcactacactcgagatctgggacatgaccgggtgttagtggaaggcatagtttgcatcagcaaaaaacacttggacaagtacattccctataaatatgtgatttataatggcgagtcattcgaatatgaattcatctataagcaccaacagaagaagggggaatacgtcaaccgctgcctgttcattaaatcctccctcctcggttccggtgattggcaccagtattatgatatcgtttacatgaagcctcacggccggctgcagaaggtgatgaaccacatcactgatgggccccgaaaggacctggtcaagggaaagcagattgccgcagcactgatgctagacagcacattttccattctccagacctgggacacaatcaatctgaactcattctttacccagttcgaacagttctgtttcgtactccagcaacccatgatctatgaaggacaggcccagctgtggacagatctgcagtaccgcgagaaggaggtgaaaaggtacctctggcagcacctgaaaaagcacgtggtacctctaccagacggcaagagtacagacttcctgcccgtggattgtcccgtacgctcaaagctgaaaaccgggctaatcgtcctgtttgtggtggaaaagattgagctgttgctggaggggtctctggactggctatgccacctccttacgtccgatgcctcctcgccagatgagtttcacagagatttgtcccacattttagggattccgcagagctggcgcttgtatctggtgaacctgtgtcagcggtgcatggatactagaacctacacatggttgggggcccttcccgtgttacattgctgtatggagctggccccacgacataaggatgcttggagacaaccagaagacacctgggccgcactggaaggcctcagcttcagcccttttagagaacagatgctagataccagcagtctgttacaattcatgcgcgagaagcaacatctgctgtccatcgatgaacccctgttccgctcctggttctcactgctcccgctctctcacctggtcatgtacatggagaactttatagagcacctgggccgtttccctgcacacatattagattgcctgtccgggatttactaccggttacccggcctggaacaggttctcaacactcaggatgttcaagatgtgcaaaacgtccagaacatactcgaaatgctgctgaggcttctggatacataccgggacaaaatccctgaagaagcgttgtccccttcgtaccttacggtgtgtctgaagctacatgaagccatctgctccagcaccaagctgctcaagttctacgaacttccagctctttctgccgaaatcgtatgcaggatgattagactgctgtcgctggtggacagcgctgggcagagggacgagactggcaataacagtgtgcaaacagtttttcagggcactttggcagccactaagcggtggctgcgcgaggtgtttactaagaacatgctgactagctctggagcgtcctttacctacgtgaaggagatagaggtgtggcgacgactcgtggagatccagtttccagctgagcatgggtggaaagaaagtcttctgggggacatggagtggcggttaacaaaagaagagcccctgtcacagattactgcctattgcaactcatgctgggatactaagggactggaggacagtgtcgccaaaaccttcgagaaatgcattattgaagctgtttcgtccgcatgtcaatcccaaacctctatcttacaaggcttctcttactcggacctccgaaagtttggcattgtcctctccgctgttatcacaaaatcctggccaaggactgccgataattttaatgacattttaaagcacctcctgacactcgctgatgtcaagcacgtttttcgattatgcggtacagacgagaagatcctggccaacgtgacggaagacgctaagaggctgatagctgtagctgactcagtgcttactaaggttgttggcgatctgctgtcgggcacgattttagtcggacagcttgaactgatcattaagcataagaatcagtttctggacatttggcagctgcgcgagaagagtctcagtcctcaggacgagcagtgtgccgtggaggaggcactggactggcgccgagaagaactgctgttgctgaagaaggagaagagatgcgtggactcacttttaaaaatgtgcggtaatgtgaagcacctgatccaggtggacttcggcgtcctggccgtgagacactctcaagacctcagctctaagaggctcaacgatacggtgacagtgagattatctacctcttcaaatagccagagagcaacccactaccacttgagtagtcaagtccaggagatggctggcaagatagaccttctcagggatagtcacattttccagctcttttggagagaggctgcagaaccactgtctgagccgaaggaggaccaggaggctgccgaactactgtccgaacctgaggaggaaagcgaaagacatatcctggagttggaagaagtgtatgattatctctatcagccatcctataggaagtttattaaactacaccaggaccttaagtccggtgaagtgacactagccgaaattgatgtcattttcaaagacttcgttaacaagtatacagatctggacagcgagttaaaaatcatgtgcactgttgaccaccaggatcaacgcgactggatcaaagatagggttgagcagattaaggagtatcaccaccttcaccaagcagtgcacgctgctaaggtgatcctacaagtgaaagaaagccttgggctgaacggagacttctctgtcttgaatacactattaaatttcaccgataattttgatgatttccgccgggaaactctagatcagataaatcaggagctgatccaggccaagaaactcctgcaggatatttcagaggcccgctgtaaggggttacaggcgctgagcctgcgcaaggagttcatctgctgggtccgggaggctcttgggggtattaacgaactgaaggtatttgtggacttggcctctattagcgcgggggagaatgacatcgatgttgaccgggtggcctgtttccatgacgccgtgcagggatacgcctcgctgctttttaagctagatccatccgtggatttttcggcattcatgaaacatttaaagaaactctggaaagctttggataaggatcagtatctacccaggaaactttgtgatagtgctcggaatttggaatggctgaaaaccgtaaacgagtcacacggttcagtagaaaggtccagcctgacccttgctaccgccatcaatcaaagggggatatacgtgattcaagcccccaagggcggccagaagataagtcccgacaccgtcttacacttgatcctaccagagtcgcctggctcacacgaggaatccagggaatactccctcgaggaagtgaaggagctattgaataaactcatgctcatgtcaggcaagaaggatcggaacaacactgaggtggaaaggttctcagaggtgttttgttcagttcagcgccttagtcaggcatttatagaccttcacagcgcagggaatatgctatttcgcacctggattgctatggcctattgttcccctaaacagggcgtttctttacaaatggatttcgggttggatctggtgacagaactcaaggaggggggcgatgtcaccgagctgctcgcagccttgtgccgccagatggagcacttcttagattcttggaaacggttcgttactcaaaagcgtatggagcacttctatttgaacttctacacagccgaacaactcgtctaccttagcacagaactccggaaacagcccccttccgacgccgccctgactatgcttagttttataaagtcaaactgcaccctccgagatgtgctcagagctagcgtcgggtgtgggtcggaagccgcgaggtatcgcatgagacgcgtcatggaagaactgccgcttatgctgctgtccgaatttagcctggtggacaaattgcgcatcattatggagcagagcatgagatgcctcccggcttttctgcccgattgcctagacttggagacactggggcactgcctggcacacctggccggaatggggggctctccagtggaaaggtgtttaccccgcgggctgcaggttgggcagcctaacctggtggtctgcggacactccgaagtgctgcccgctgcactcgcggtatacatgcagactccttcccagcctcttccaacctacgatgaagtgcttttgtgtacaccggcaactactttcgaggaggtggccctccttttgagacggtgtctcacgctgggttccctcggccataaggtttacagcctgctgttcgccgaccagctcagttatgaagtggctcgccaggcagaggagctgtttcataatctgtgcacacagcagcacagggaagactatcagctggtgatggtgtgcgacggtgactgggagcattgttatctgcctagcgctttttcccagcacaaggtgttcgtgaccccacaggcaccactggaggctattcaagcctacttggccgggcattaccgagtgccaaaacaaacactgtcggctgctgccgttttcaatgacagactgtgtgtagggatagtggcgtccgaacgggccggcgtgggaaaatctctctacgtaaaacgcttacacgataaaatgaaaatgcaactgaacgtcaagaatgttcccttgaaaacgatcaggcttattgaccctcaggtcgacgaatctagagtgctgggtgcactcctgcctttcctcgatgctcagtatcaaaaggtccccgttctttttcacctggacgtgacgtcatctgtgcaaaccgggatctgggtgtttctgtttaagcttctcatattgcagtatttgatggatattaatgggaagatgtggctgcgtaacccatgtcacctgtatatcgtcgaaatcttggaaagacgaacgagtgttcctagccgaagttcctctgccctgcggactagggtacctcagttttcattcttagacatttttccaaaggtcacttgtcggccccctaaggaggtgatagacatggagctttctgctctgcgctctgacaccgagcctgggatggatctgtgggagttctgctcagagaccttccagcggccttaccagtacctgcggcggttcaaccaaaaccaggatctcgacacatttcagtatcaagaagggtccgtggaagggaccccagaggagtgtctgcagcactttctgttccactgcggagtcatcaaccccagctggtctgagctgagaaatttcgctaggttcctcaactaccagctcagagattgtgaggcgtctctattttgcaacccatcattcatcggagacactctgagggggtttaaaaagttcgtggtgacttttatgatttttatggccagggacttcgccacgccatccctccacacatccgatcagagccctggaaagcatatggtcaccatggacggtgtccgtgaggaagatctcgccccgttttcattaagaaagagatgggagtctgagcctcatccttatgttttcttcaatgatgaccacaccacgatgaccttcatcggctttcacttacaacccaatataaatggctccgtcgacgctatcagccacttgacagggaaagtgatcaagcgagatgtcatgactagggacctctatcagggactgctactgcagcgggtgccgttcaacgtcgacttcgataaactcccacggcacaagaagctggaaaggctttgcctaactttaggaatcccacaagctaccgaccccgacaagacctatgaactcactactgacaacatgctcaagatcctggctatcgaaatgagattcagatgcggtatccctgtaattatcatgggtgagaccggatgtgggaaaacacggttgataaagtttctgagtgaccttagacgcggaggcacaaatgcggacaccatcaagctcgtgaaagttcacggcggaacgacagccgacatgatttactctagggtacgcgaggctgagaatgtggcctttgccaacaaggatcagcaccagttagacacaatcctctttttcgacgaggccaacaccaccgaggcaatttcctgcataaaggaggtgctgtgtgaccacatggtggacggccagcctctcgccgaggatagcgggctgcatattattgccgcctgcaatccgtatcgcaaacactctgaggagatgatctgtcgcctggagtccgccgggttggggtatcgtgtgtctatggaggagaccgctgatcgcctgggctcgattccattgcgccagttggtgtaccgagtgcatgcactaccaccctcgctgatcccactggtgtgggacttcggtcagttgagtgatgtggctgagaagctttacatacagcagatcgtccagcggcttgtcgaaagtatctccctggacgagaacggtacgcgggtgatcacagaggtcctctgtgccagtcagggcttcatgaggaaaacagaggatgagtgttcgtttgtctcccttagggacgtcgaacggtgtgtcaaggtgttcagatggttccacgagcacagtgctatgctgcttgctcagctgaatgcttttctttccaagagcagcgtctctaaaaatcacaccgagcgcgaccctgtcctttggtctctcatgttagcaatcggtgtatgctatcacgcatctctcgaaaaaaaagattcctatcgaaaggctattgctcgttttttccctaagccatatgatgattccagattgttgctagacgagattacgagagcgcaggatctctttcttgacggggtgccccttcgtaagaccattgctaaaaacctggccctcaaagaaaatgtattcatgatggtggtctgcattgagctgaagatacccctgtttctcgtagggaaacccgggagctccaagtcactcgctaagaccatagtggctgacgccatgcagggccctgcagcctattccgatttatttaggagcctcaagcaggtccatcttgtgtcttttcagtgcagcccacattccactccccagggtataatctccactttccggcagtgtgcgaggtttcaacagggcaaagatcttcaacaatatgtgagcgtcgtggtgttagacgaggttggcctggctgaggacagccctaagatgccgctcaagaccctccaccccctattggaagatggctgcattgaagacgatcccgcaccacataagaaagtggggttcgtgggcatatccaactgggccctggaccctgccaagatgaaccggggaattttcgtgtctagaggaagccctaacgagaccgaactgattgagagcgccaagggcatctgctccagcgatattctcgtgcaggacagagtgcagggctactttgcctcttttgccaaggcctacgaaacagtctgcaagcgccaggacaaggagttcttcggattgcgcgattattactccctgatcaaaatggtcttcgctgccgccaaggccagcaacaggaaaccctcacctcaagatatcgcacaggctgtccttagaaatttttcaggcaaggatgacattcaggcgctagatatcttcttggctaatctccccgaggccaagtgctctgaagaagtaagtcccatgcaacttataaagcaaaatatattcgggccttcgcagaaagtgcccggcggggagcaagaagatgctgagtcaagatacctgctggtcctcactaagaactatgtggcactgcagatactgcagcagactttctttgaaggcgaccagcagcccgaaatcatttttggaagtggctttcctaaagaccaggagtacactcaactgtgtcggaacatcaatagagtaaagatctgtatggaaacgggcaagatggtgctcctcttgaacctacagaacctgtacgagtccctgtacgatgctctgaaccaatactatgtgcacttaggaggccaaaagtacgtggacctcgggcttggaactcatcgtgtcaagtgccgtgtccatcccaacttcagactcatcgtgattgaagagaaagatgtggtttacaagcatttccccattccccttatcaatcggctcgagaaacattacctcgacatcaatacagtgcttgaaaaatggcagaaatcgatcgtggaagaattatgcgcgtgggtggagaagttcattaatgttaaggcccatcactttcagaagagacataagtacagtcccagtgatgttttcatcggctatcactcagatgcatgtgcctccgtggtgctgcaggttatcgaaagacagggccccagggctctcaccgaggagctacatcagaaggtctccgaggaggcaaagagcattctgctcaactgtgcaacacctgacgccgtcgtcaggctgtccgcctatagcctggggggattcgccgctgaatggctctcacaagagtatttccatcgccagcggcacaactccttcgcagatttcctgcaagctcatcttcacacggcagatctagagagacatgcaattttcacggagattacaaccttctcacgactattaacaagccacgattgtgagattcttgagtccgaggtcacaggcagagctcccaagccaaccttgctgtggctgcagcagttcgataccgaatactcatttctgaaggaggtccgaaactgcctgacaaatactgccaaatgcaaaattctgatctttcaaaccgatttcgaggacggcattaggagtgcacagcttatcgctagcgccaagtatagtgtgataaatgaaattaacaaaattcgcgaaaatgaagatcggatcttcgtgtattttattacaaagcttagcagagtcggccgaggcaccgcatacgtgggatttcacggaggtctgtggcagtcggttcacatagatgatctgcgccgctccaccttgatggtgagtgatgttaccagactgcagcatgtgaccatatctcaattattcgctccaggggatttgcccgaactaggcttggaacatcgcgcggaggacggtcacgaagaggctatggagacagaagcttccacctctggggaggtggccgaagtggccgaagaggccatggagactgaaagttctgagaaggtgggtaaggaaacatcggagttggggggttcggacgtgtccattctggacacaaccaggctgttgagatcttgcgtgcagagcgcagttggtatgctgcgcgaccagaatgagtcatgtacgagaaatatgcgacgtgtcgtcctactcctgggcttgctgaacgaagatgacgcatgccatgcttcgtttctccgcgtgagcaagatgaggttgtctgtgttccttaaaaaacaggaggagtcacagttccatcctctggagtggttggcccgggaagcttgcaaccaggatgcacttcaagaggcaggaaccttcagacacaccctttggaaacgggtacagggagcggtcactcctctgttggccagtatgatctcgtttatagacagggacggtaatctggaattgctgaccaggcccgatacccctccttgggctagagacctctggatgttcatttttagcgatactatgctcctcaacattccgctagttatgaataacgagcggcataagggggagatggcttacattgtggttcagaaccacatgaacctgtctgaaaacgctagcaataatgtgcctttctcttggaagataaaggactaccttgaagaactctgggttcaggcccagtacattaccgacgccgaaggcttgcccaagaagtttgtggacatttttcagcagacaccgctggggcgatttttggcccagctgcatggtgaacctcaacaggaactcttgcaatgttatttaaaagactttatcctgcttaccatgcgcgtatctaccgaagaagagttgaagttcctccagatggcactgtggtcctgtacgcggaaacttaaagctgcatctgaagccccagaagaagaagtatctctgccatgggttcacttggcttaccaacggtttcgaagtagactgcagaatttttccaggatcctgaccatatatccacaagtattgcatagcctgatggaggcacgctggaatcacgagttggctgggtgtgagatgacgctcgatgcctttgcagcaatggcgtgtactgagatgttgactagaaacactctgaagccctccccacaggcctggctgcaactggtcaaaaatctatccatgccattagagctcatctgttcagatgaacacatgcaggggagcggatccctcgcgcaggcagtgatcagagaggtgagggcccaatggtcccgcattttctccaccgctctctttgtggaacacgtcctgttgggtaccgagtcacgggtgcccgagttgcagggcctcgttacagagcatgtgtttctcctggataagtgtctgcgagagaactcggacgtgaagacccacggaccattcgaagccgtaatgagaaccctctgtgaatgtaaggagacggcctccaagacactatctcgcttcggaatccagccttgtagtatctgtctaggcgatgcgaaggaccctgtttgcctgccttgcgaccacgtccattgtctcaggtgtctgcgcgcctggttcgccagcgaacagatgatttgcccttattgtctcactgcacttccagacgagttttcccctgccgttagccaggcccaccgcgaggcaattgaaaagcatgccagatttcgacagatgtgcaatagcttttttgtcgacttagtttccacaatctgtttcaaggacaacgcaccgcctgagaaggaggtaattgagtccttgctatccctgcttttcgttcagaaaggaaggttgagggacgctgcccagcggcactgtgaacacacgaaaagtttgtcaccatttaatgacgtggtggacaaaactcccgtgatccgctcagtcatcctaaaactgctgctaaaatacagcttccatgacgttaaagattatatccaagagtatcttacgttactgaagaagaaggcctttataactgaggacaaaacagagctctacatgctgtttatcaactgcttggaagacagcatcctggaaaaaacatccgcgtatagcaggaacgacgaattaaatcacctagaggaggagggcagattcctgaaggcctacagccctgctagtagaggcagagagccagctaatgaggcatccgtggagtaccttcaagaggtagcccggattaggctgtgccttgaccgcgctgctgatttcctatctgaaccagaaggcggccctgagatggctaaggaaaaacaatgttaccttcaacaggttaaacagttctgtattcgagtcgaaaacgattggcaccgtgtatacctcgtgaggaaactgagtagtcagcggggaatggagtttgtgcagggactgtccaaacccggtagaccgcaccagtgggtgtttcccaaggatgtggtgaaacagcagggtctccgccaggaccatcctgggcaaatggacaggtatctggtgtatggggatgagtacaaggccctgcgcgatgcggtcgccaaagcggtgctggagtgcaaaccgcttggaatcaagactgctcttaaggcttgtaagacaccacaaagccagcaaagtgcctatttcctgctgactctgtttcgggaagtggctatactctatcgcagtcataacgctagcttgcacccgacgcccgaacagtgtgaagccgtctctaagttcattggcgaatgcaaaatacttagcccccctgatatctctaggtttgccacatctctcgtggataattctgttcccctcctgagagctggtccgagcgacagcaatctggacggaaccgttacggaaatggctattcatgcagccgccgttttgctttgtggacagaatgagcttctggaaccgctcaaaaacctggcattttctcccgcaaccatggcacacgcgtttctgcctactatgccagaggatctgcttgctcaagctcggcggtggaaagggctggagagggtccactggtatacatgcccaaatggccatccatgctccgtcggcgagtgcggaaggccaatggaacagtcgatatgtatcgactgtcatgccccaatcggaggcatcgaccataaacctcgcgatgggttccacctggttaaggacaaggccgaccgtacccagacaggacacgttttgggcaacccacagcgcagagacgtagtgacttgcgaccgcgggcttcctcccgtcgtgttcttactgatccgtttgttgacccatttggccctattgcttggagctagtcagagtagccaggcgctaatcaacatcattaaaccacctgtcagggaccctaagggattcctccagcagcacatcctgaaggatcttgagcagctggcaaaaatgctcgggcactctgccgacgagaccatcggcgtcgtacatctggtcctgcgcagactgttgcaggagcagcatcagctctcttcccgaaggctgttgaattttgacaccgagctctcaactaaagaaatgagaaataactgggagaaggaaatcgctgcggttatttcaccagaattggagcacctcgataagaccctaccgaccatgaataacttaatttcccaagacaagcgcatcagtagtaatcccgtagcaaaaatcatttacggcgacccagtgacgtttctcccgcatctgcctcggaaatccgtggtacattgctccaagatatggtcttgccgcaagcgtattacagtggagtatctccagcatatagtggagcagaagaacgggaaggagagggtacccattctttggcactttttgcaaaaagaggctgaactgcgcctggtaaaatttctgcccgaaattctggctctgcagcgtgacctggttaagcagtttcaaaatgtccagcaggtagaatactcatcgattcgtggcttcctgtccaaacattcaagcgacggactcaggcaactgttacacaatagaattaccgtattcctttctacctggaataaactccgaaggagtctggaaacaaatggggaaattaacctacccaaagactactgttccaccgacttggacctggatacggaatttgaaattctgctgcctaggaggcgaggactaggcctgtgtgccactgcgcttgttagttacctcattcgtttacacaacgaaattgtgtacgccgtggagaagctctccaaagagaataattcatattccgtggacgcagctgaggtgactgagttacacgtcatatcttacgaggtggaaagagacctgacaccattgatcctgagtaactgtcagtaccaggtggaagagggtcgggagacggttcaagaatttgacctggagaagatacagaggcaaatagtgagcagatttcttcaggggaagccgagactctctctgaagggcatccccaccctggtgtatcggcacgattggaactacgaacatcttttcatggacattaaaaataagatggcccaggatagtctccccagtagcgtgatcagcgctatcagtggtcaactacagagctactctgatgcttgtgaggtgctgagtgtggtggaggtgaccctggggtttttgagcactgccggcggagaccctaacatgcaactgaatgtgtatactcaggacattctccagatgggtgatcagaccatccatgtgctgaaggctttaaatcgctgtcagctcaaacacaccattgccctttggcagtttctgtcggcccataaaagcgagcagctcttgagactccacaaagaaccattcggagagatttcatcaagatataaggctgatctttcacccgagaatgctaaactgttaagcacattcttgaaccaaactggactggacgccttcctactggagcttcacgagatgatcatcctaaagctcaagaatccacagacacagacagaggagagattccgcccacaatggagtttacgcgatacactcgtgagttacatgcagactaaagagtctgagatcctgccggagatggcctcacagttccctgaggaaattctgctagcatcctgtgtctctgtgtggaagaccgctgccgttcttaaatggaaccgcgaaatgcgttag

SEQ ID NO: 275289 - DNA, 9843 bp, Artificial Sequence
  derived and/or modified sequence
atggtgtgtgatggagactgggagcactgctacctgcccagcgccttcagccagcacaaggtgtttgtgaccccccaggcccccctggaggccatccaggcctacctggccggccactacagagtgcccaagcagaccctgtctgctgctgctgtgttcaatgaccggctgtgtgtgggcatcgtggccagcgagagagctggggtgggcaagagcctgtatgtgaagaggctgcatgacaagatgaagatgcagctgaatgtgaagaatgtgcccctgaagaccatccggctgattgacccccaggtggatgagagccgggtgctgggcgccctgctgcccttcctggatgcccagtaccagaaggtgcctgtgctcttccacctggatgtgaccagctctgtgcagacaggcatctgggtgttcctgttcaagctgctgatcctgcagtacctgatggacatcaacgggaagatgtggctgaggaacccctgccacctgtacatcgtggagatcctggagaggaggacctctgtgcccagccgcagcagcagcgccctgcggaccagggtgccccagttctccttcctggacatcttccccaaggtgacctgcaggcctcccaaggaggtgattgacatggagctgagcgccctgcggagtgacacagagcccggcatggacctgtgggagttctgcagcgagaccttccagaggccctaccagtacctgcggcgcttcaaccagaaccaggacctggacaccttccagtaccaggagggctctgtggagggcaccccagaagaatgtctgcagcacttcctgttccactgtggggtcatcaaccccagctggagcgagctgaggaactttgcccgcttcctgaactaccagctgcgggactgtgaggccagcctcttctgcaaccccagcttcatcggggacaccctgcggggcttcaagaagtttgtggtgaccttcatgatcttcatggcccgggactttgccacccccagcctgcacaccagtgaccagagccctgggaagcacatggtgaccatggatggagtgcgggaggaggacctggcccccttcagcctgaggaagcgctgggagagcgagccccacccctacgtgttcttcaatgatgaccacaccaccatgaccttcatcggcttccacctgcagcccaacatcaatggatctgtggatgccatcagccacctgaccgggaaggtgatcaagagagatgtgatgacccgggacctgtaccagggcctgctgctgcagagggtgcccttcaacgtggactttgacaagctgcccaggcacaagaagctggagcggctgtgcctgaccctgggcatcccccaggccacagatcctgacaagacctatgagctgaccacagacaacatgctgaagatcctggccatcgagatgaggttccgctgtggcatccctgtgatcatcatgggagaaacaggctgcggcaagaccaggctcatcaagttcctgagtgacctgcggcggggcggcaccaatgctgacaccatcaagctggtgaaggtgcatggaggcaccacagctgacatgatctacagccgggtgcgggaggctgaaaatgtggcctttgccaacaaggaccagcaccagctggacaccatcctcttctttgatgaggccaacaccacagaggccatcagctgcatcaaggaggtgctgtgtgaccacatggtggatggccagcccctggctgaagattctggcctgcacatcatcgccgcctgcaacccctacaggaagcacagcgaggagatgatctgccgcctggagagcgctggcctgggctacagagtgtccatggaggagacagctgaccggctgggcagcatccccctgcggcagctggtgtacagagtgcacgccctgccccccagcctcatccccctggtgtgggactttggccagctgagtgatgtggccgagaagctgtacatccagcagatcgtgcagaggctggtggagagcatcagcctggatgaaaatggcaccagggtcatcacagaggtgctgtgtgccagccagggcttcatgaggaagacagaagatgaatgttcctttgtgtccctgagagatgtggagcgctgtgtgaaggtgttccgctggttccacgagcacagcgccatgctgctggcccagctgaatgccttcctgagcaagagctctgtgtccaagaaccacacagagcgggaccctgtgctgtggagcctgatgctggccatcggcgtgtgctaccacgccagcctggagaagaaggacagctacaggaaggccatcgcccgcttcttccccaagccctatgatgacagccggctgctgctggatgagatcacccgggcccaggacctcttcctggatggagtgcccctgaggaagaccatcgccaagaacctggccctgaaggaaaatgtgttcatgatggtggtgtgcatcgagctgaagatccccctcttcctggtgggcaagccaggcagcagcaagagcctggccaagaccatcgtggctgatgccatgcagggccctgctgcctacagcgacctcttccgcagcctgaagcaggtgcacctggtgtccttccagtgcagcccccacagcaccccccagggcatcatcagcaccttccggcagtgtgcccgcttccagcagggcaaggacctgcagcagtatgtgtctgtggtggtgctggatgaggtgggcctggccgaggacagccccaagatgcccctgaagaccctgcaccccctgctggaggatggctgcattgaagatgatcctgccccccacaagaaggtgggctttgtgggcatcagcaactgggccctggaccctgccaagatgaacagaggcatctttgtgtcccggggcagccccaatgaaacagagctgattgagagcgccaagggcatctgcagcagtgacatcctggtgcaggacagagtgcagggctactttgccagctttgccaaggcctatgagaccgtgtgcaagaggcaggacaaggagttcttcggcctgcgggactactacagcctcatcaagatggtgtttgctgctgccaaggccagcaacaggaagcccagcccccaggacatcgcccaggccgtgctgaggaacttcagcggcaaggatgacatccaggccctggacatcttcctggccaacctgcctgaggccaagtgcagcgaggaggtgagccccatgcagctgatcaagcagaacatcttcggccccagccagaaggtgcctggaggagagcaggaggatgctgagagccgctacctgctggtgctgaccaagaactacgtggccctgcagatcctgcagcagaccttctttgaaggagaccagcagcctgagatcatctttggaagtggcttccccaaggaccaggagtacacccagctgtgcaggaacatcaacagagtgaagatctgcatggagaccgggaagatggtgctgctgctgaacctgcagaacctgtatgagagcctgtatgatgccctgaaccagtactacgtgcacctgggcggccagaagtatgtggacctgggcctgggcacccaccgggtgaagtgccgggtgcaccccaacttccgcctcatcgtcatcgaggagaaggatgtggtgtacaagcacttccccatccccctcatcaaccggctggagaagcactacctggacatcaacacagtgctggagaagtggcagaagagcatcgtggaggagctgtgtgcctgggtggagaagttcatcaacgtgaaggcccaccacttccagaagaggcacaagtacagccccagtgatgtgttcatcggctaccacagtgatgcctgtgcctctgtggtgctgcaggtgattgagcggcagggcccccgggccctgacagaggagctgcaccagaaggtgtctgaggaggccaagagcatcctgctgaactgtgccaccccagatgctgtggtgcggctgagcgcctacagcctgggcggctttgctgctgagtggctgagccaggagtacttccaccggcagaggcacaacagctttgctgacttcctgcaggcccacctgcacacagctgacctggagagacatgccatcttcacagagatcaccaccttcagccggctgctgaccagccatgactgtgagatcctggagagcgaggtgacaggccgggcccccaagcccaccctgctgtggctgcagcagtttgacacagagtacagcttcctgaaggaggtgaggaactgcctgaccaacacagccaagtgcaagatcctgatcttccagacagactttgaagatggcatccgcagcgcccagctgattgccagcgccaagtacagcgtcatcaatgagatcaacaagatccgggagaatgaagatcgcatctttgtgtacttcatcaccaagctgagccgggtgggccggggcacagcctacgtgggcttccacggcggcctgtggcagagcgtgcacattgatgacctgcggcgcagcaccctgatggtgtctgatgtgacccggctgcagcacgtgaccatcagccagctgtttgcccctggggacctgcctgagctgggcctggagcacagagcagaagatggccacgaggaggccatggagacagaggccagcaccagcggggaggtggccgaggtggccgaggaggccatggagacagagagcagcgagaaggtgggcaaggagaccagcgagctgggcggcagtgatgtgtccatcctggacaccacccggctgctgcggagctgtgtgcagagcgctgtgggcatgctgcgggaccagaatgaaagctgcaccaggaacatgagaagagtggtgctgctgctgggcctgctgaatgaagatgatgcctgccacgccagcttcctgcgggtgtccaagatgaggctgagcgtcttcctgaagaagcaggaggagagccagttccaccccctggagtggctggcccgggaggcctgcaaccaggatgccctgcaggaggccggcaccttccgccacaccctgtggaagagggtgcagggcgctgtgacccccctgctggcctccatgatctccttcatcgacagagatggcaacctggagctgctgaccaggccagacaccccaccctgggcccgggacctgtggatgttcatcttcagtgacaccatgctgctgaacatccccctggtgatgaacaatgaaagacacaagggggagatggcctacatcgtggtgcagaaccacatgaacctgtctgaaaatgccagcaacaacgtgcccttctcctggaagatcaaggactacctggaggagctgtgggtgcaggcccagtacatcacagatgctgagggcctgcccaagaagtttgtggacatcttccagcagacccccctgggccgcttcctggcccagctgcatggagagccccagcaggagctgctgcagtgctacctgaaggacttcatcctgctgaccatgagggtgtccacagaggaggagctgaagttcctgcagatggccctgtggagctgcaccaggaagctgaaggccgccagcgaggcccctgaggaggaggtgtccctgccctgggtgcacctggcctaccagcgcttccgcagccggctgcagaacttcagccgcatcctgaccatctacccccaggtgctgcacagcctgatggaggcccgctggaaccacgagctggccggctgtgagatgaccctggatgcctttgctgccatggcctgcacagagatgctgaccaggaacaccctgaagcccagcccccaggcctggctgcagctggtgaagaacctgtccatgcccctggagctgatctgcagtgatgagcacatgcagggcagcggcagcctggcccaggccgtcatccgggaggtgcgggcccagtggagccgcatcttcagcacagccctgtttgtggagcacgtgctgctgggcacagagagccgggtgcctgagctgcagggcctggtgacagagcacgtgttcctgctggacaagtgcctgcgggagaacagtgatgtgaagacccacggcccctttgaggccgtgatgaggaccctgtgtgagtgcaaggagacagccagcaagaccctgagcagatttggcatccagccctgcagcatctgcctgggagatgccaaggaccctgtgtgcctgccctgtgaccacgtgcactgcctgcgctgcctgcgggcctggtttgccagcgagcagatgatctgcccctactgcctgacagccctgcctgatgagttcagccctgctgtgtcccaggcccaccgggaggccatcgagaagcacgcccgcttccggcagatgtgcaacagcttctttgtggacctggtgtccaccatctgcttcaaggacaatgcccctcctgagaaggaggtgattgagagcctgctgagcctgctgtttgtgcagaagggccgcctgagagatgctgcccagaggcactgtgagcacaccaagagcctgagccccttcaatgatgtggtggacaagacccctgtgatccgcagcgtcatcctgaagctgctgctgaagtacagcttccatgatgtgaaggactacatccaggagtacctgaccctgctgaagaagaaggccttcatcacagaggacaagacagagctgtacatgctgttcatcaactgcctggaggacagcatcctggagaagaccagcgcctacagcagaaatgatgagctgaaccacctggaggaggagggccgcttcctgaaggcctacagccctgccagccggggccgggagcccgccaatgaggcctctgtggagtacctgcaggaggtggcccgcatccggctgtgcctggacagagctgctgacttcctgtctgagcctgagggcggccctgagatggccaaggagaagcagtgctacctgcagcaggtgaagcagttctgcatccgggtggagaatgactggcaccgggtgtacctggtgaggaagctgagcagccagaggggcatggagtttgtgcagggcctgagcaagccaggccggccccaccagtgggtgttccccaaggatgtggtgaagcagcagggcctgcggcaggaccaccctggccagatggaccgctacctggtgtatggagatgagtacaaggccctgagagatgctgtggccaaggctgtgctggagtgcaagcccctgggcatcaagacagccctgaaggcctgcaagaccccccagagccagcagagcgcctacttcctgctgaccctcttccgggaggtggccatcctgtaccgcagccacaatgccagcctgcaccccaccccagagcagtgtgaggccgtgtccaagttcatcggggagtgcaagatcctgagccccccagacatcagcagatttgccaccagcctggtggacaacagcgtgcccctgctgcgggccggccccagcgacagcaacctggatggcaccgtgacagagatggccatccatgctgctgctgtgctgctgtgtggccagaatgagctgctggagcccctgaagaacctggccttctccccagccaccatggcccacgccttcctgcccaccatgcctgaggacctgctggcccaggcccggcgctggaagggcctggagcgggtgcactggtacacctgccccaacggccacccctgcagcgtgggggagtgtggccggcccatggagcagagcatctgcatcgactgccacgcccccatcggcggcatcgaccacaagcccagagatggcttccacctggtgaaggacaaggctgacaggacccagacaggccacgtgctgggcaacccccagaggagagatgtggtgacctgtgaccggggcctgccccctgtggtgttcctgctgatccggctgctgacccacctggccctgctgctgggcgccagccagagcagccaggccctgatcaacatcatcaagccccctgtgcgggaccccaagggcttcctgcagcagcacatcctgaaggacctggagcagctggccaagatgctgggccacagcgcagatgagaccatcggcgtggtgcacctggtgctgcggcggctgctgcaggagcagcaccagctgagcagccggcggctgctgaactttgacacagagctgagcaccaaggagatgaggaacaactgggagaaggagattgctgctgtgatcagccctgagctggagcacctggacaagaccctgcccaccatgaacaacctgatcagccaggacaagaggatcagcagcaaccctgtggccaagatcatctacggggaccctgtgaccttcctgccccacctgcccaggaagtctgtggtgcactgcagcaagatctggagctgcaggaagaggatcaccgtggagtacctgcagcacatcgtggagcagaagaatggcaaggagcgggtgcccatcctgtggcacttcctgcagaaggaggccgagctgcggctggtgaagttcctgcctgagatcctggccctgcagagggacctggtgaagcagttccagaatgtgcagcaggtggagtacagcagcatccggggcttcctgagcaagcacagcagtgatggcctgcggcagctgctgcacaaccgcatcaccgtcttcctgagcacctggaacaagctgcggcgcagcctggagaccaatggagagatcaacctgcccaaggactactgcagcacagacctggacctggacacagaatttgagatcctgctgccccggcggcggggcctgggcctgtgtgccacagccctggtgtcctacctgatccggctgcacaatgaaattgtgtatgctgtggagaagctgagcaaagaaaacaacagctacagcgtggatgctgctgaggtgacagagctgcacgtgatctcctatgaggtggagcgggacctgacccccctcatcctgagcaactgccagtaccaggtggaggagggccgggagaccgtgcaggagtttgacctggagaagatccagaggcagatcgtgagccgcttcctgcagggcaagccccggctgagcctgaagggcatccccaccctggtgtacagacatgactggaactatgagcacctgttcatggacatcaagaacaagatggcccaggacagcctgcccagcagcgtcatcagcgccatcagcggccagctgcagagctacagtgatgcctgtgaggtgctgtctgtggtggaggtgaccctgggcttcctgagcacagctggaggagaccccaacatgcagctgaatgtgtacacccaggacatcctgcagatgggagaccagaccatccacgtgctgaaggccctgaaccgctgccagctgaagcacaccatcgccctgtggcagttcctgagcgcccacaagtctgagcagctgctgcggctgcacaaggagccctttggagagatcagcagccgctacaaggctgacctgagcccagaaaatgccaagctgctgagcaccttcctgaaccagacaggcctggatgccttcctgctggagctgcacgagatgatcatcctgaagctgaagaacccccagacccagacagaggagcgcttccggccccagtggagcctgcgggacaccctggtgtcctacatgcagaccaaggagagcgagatcctgcctgagatggccagccagtttcctgaggagatcctgctggccagctgtgtgtctgtgtggaagacagctgctgtgctgaagtggaaccgggagatgaggtag

SEQ ID NO: 275290 - DNA, 15771 bp, Artificial Sequence
  derived and/or modified sequence
atggagtgccccagctgccagcacgtgtccaaggaggagacccccaagttctgcagccagtgtggggagcggctgcccccagctgcccccatcgctgacagcgagaacaacaacagcaccatggccagcgccagcgagggggagatggagtgtggccaggagctgaaggaggagggcggcccctgcctcttccctggcagtgacagctggcaggagaaccctgaggagccctgcagcaaggcctcctggacagtgcaggagggcgccaccagcgaggtgctggtggatgctgctgtggacctgatcagtgatgagtgggaggccgccaatgccatccccagcaagaggaggaagcaggatgctgcccccctggaggccgcctctgtgcccagcgctgactgtgagcagagcaagaagaagaagaggaagaagaagaagaagggcaacaagagcgccagcagcgagctggccagcctgcccctgagccctgccagcccctgccacctgaccctgctgagcaacccctggccccaggacacagccctgccccacagccaggcccagcagagcggccccaccggccagcccagccagcccccaggcacagccaccacccccctggagggagatggcctgagcgcccccacagaggtgggggacagccccctgcaggcccaggccctgggggaggccggcgtggccactggaagtgaggcccagagcagcccccagttccaggaccacacagaaggagaggaccaggatgccagcatccccagcggcggccggggcctgagccaggagggcaccggcccccccaccagcgctggggagggccacagcaggacagaagatgctgcccaggagctgctgctgcctgagagcaagggcggcagcagcgagcccggcacagagctgcagaccacagagcagcaggccggggccagcgcctccatggctgtggatgctgtggccgagcccgccaatgctgtgaagggggccggcaaggagatgaaggagaagacccagaggatgaagcagcccccagccaccaccccacccttcaagacccactgccaggaggccgagaccaagaccaaggatgagatggctgctgctgaggagaaggtgggcaagaatgagcagggcgagcctgaggacctgaagaagccagagggcaagaacagatctgctgctgctgtgaagaatgagaaggagcagaagaaccaggaggctgatgtgcaggaggtgaaggccagcaccctgagccctgggggcggcgtgacagtgttcttccacgccatcatcagcctgcacttccccttcaacccagacctgcacaaggtgttcatccggggcggggaggagtttggagagagcaagtgggacagcaacatctgtgagctgcactacacccgggacctgggccatgacagagtgctggtggagggcatcgtgtgcatcagcaagaagcacctggacaagtacatcccctacaagtatgtgatctacaatggagagagctttgaatatgagttcatctacaagcaccagcagaagaagggggagtatgtgaaccgctgcctcttcatcaagagcagcctgctgggcagcggggactggcaccagtactatgacatcgtgtacatgaagccccacggccgcctgcagaaggtgatgaaccacatcacagatggccccaggaaggacctggtgaagggcaagcagattgctgctgccctgatgctggacagcaccttcagcatcctgcagacctgggacaccatcaacctgaacagcttcttcacccagtttgagcagttctgctttgtgctgcagcagcccatgatctatgagggccaggcccagctgtggacagacctgcagtaccgggagaaggaggtgaagcgctacctgtggcagcacctgaagaagcacgtggtgcccctgcctgatggcaagagcacagacttcctgcctgtggactgccctgtgcgcagcaagctgaagacaggcctcatcgtgctgtttgtggtggagaagattgagctgctgctggagggcagcctggactggctgtgccacctgctgaccagtgatgccagcagcccagatgagttccaccgggacctgagccacatcctgggcatcccccagagctggaggctgtacctggtgaacctgtgccagcgctgcatggacaccaggacctacacctggctgggcgccctgcctgtgctgcactgctgcatggagctggcccccaggcacaaggatgcctggaggcagcctgaggacacctgggccgccctggagggcctgtccttcagccccttccgggagcagatgctggacaccagcagcctgctgcagttcatgagggagaagcagcacctgctgagcattgatgagcccctcttccgctcctggttcagcctgctgcccctgagccacctggtgatgtacatggagaacttcatcgagcacctgggccgcttccctgcccacatcctggactgcctgagcggcatctactaccgcctgcccggcctggagcaggtgctgaacacccaggatgtgcaggatgtgcagaatgtgcagaacatcctggagatgctgctgcggctgctggacacctacagagacaagatccctgaggaggccctgagccccagctacctgactgtgtgcctgaagctgcacgaggccatctgcagcagcaccaagctgctgaagttctatgagctgcctgccctgtctgctgagatcgtgtgcaggatgatccggctgctgagcctggtggacagcgctggccagagagatgaaacaggcaacaacagcgtgcagaccgtcttccagggcaccctggccgccaccaagcgctggctgcgggaggtgttcaccaagaacatgctgaccagcagcggggccagcttcacctacgtgaaggagattgaggtgtggaggcggctggtggagatccagtttcctgctgagcacggctggaaggagagcctgctgggggacatggagtggaggctgaccaaggaggagcccctgagccagatcacagcctactgcaacagctgctgggacaccaagggcctggaggacagcgtggccaagacctttgagaagtgcatcattgaagctgtgagcagcgcctgccagagccagaccagcatcctgcagggcttctcctacagcgacctgaggaagtttggcatcgtgctgtctgctgtgatcaccaagtcctggcccaggacagctgacaacttcaatgacatcctgaagcacctgctgaccctggctgatgtgaagcacgtgttccggctgtgtggcacagatgagaagatcctggccaacgtgacagaagatgccaagaggctgattgctgtggccgacagcgtgctgaccaaggtggtgggggacctgctgagcggcaccatcctggtgggccagctggagctgatcatcaagcacaagaaccagttcctggacatctggcagctgcgggagaagagcctgagcccccaggatgagcagtgtgctgtggaggaggccctggactggaggcgggaggagctgctgctgctgaagaaggagaagagatgtgtggacagcctgctgaagatgtgtggaaatgtgaagcacctgatccaggtggactttggagtgctggccgtgcgccacagccaggacctgagcagcaagaggctgaatgacacagtgacagtgcggctgagcaccagcagcaacagccagagggccacccactaccacctgagcagccaggtgcaggagatggccggcaagattgacctgctgcgggacagccacatcttccagctgttctggagggaggccgctgagcccctgtctgagcccaaggaggaccaggaggccgctgagctgctgtctgagcctgaggaggagagcgagcggcacatcctggagctggaggaggtgtatgactacctgtaccagcccagctacaggaagttcatcaagctgcaccaggacctgaagagcggggaggtgaccctggccgagattgatgtgatcttcaaggactttgtgaacaagtacacagacctggacagcgagctgaagatcatgtgcaccgtggaccaccaggaccagagggactggatcaaggacagagtggagcagatcaaggagtaccaccacctgcaccaggccgtgcacgccgccaaggtgatcctgcaggtgaaggagagcctgggcctgaatggagacttctctgtgctgaacaccctgctgaacttcacagacaactttgatgacttccggcgggagaccctggaccagatcaaccaggagctgatccaggccaagaagctgctgcaggacatcagcgaggcccgctgcaagggcctgcaggccctgagcctgaggaaggagttcatctgctgggtgcgggaggccctgggcggcatcaatgagctgaaggtgtttgtggacctggccagcatctctgctggagaaaatgacattgatgtggacagagtggcctgcttccatgatgctgtgcagggctacgccagcctgctcttcaagctggaccccagcgtggacttcagcgccttcatgaagcacctgaagaagctgtggaaggccctggacaaggaccagtacctgcccaggaagctgtgtgacagcgccaggaacctggagtggctgaagacagtgaatgaaagccacggctctgtggagaggagcagcctgaccctggccacagccatcaaccagaggggcatctacgtgatccaggcccccaagggcggccagaagatcagcccagacacagtgctgcacctgatcctgcctgagagccctggcagccatgaggagagccgggagtacagcctggaggaggtgaaggagctgctgaacaagctgatgctgatgtctgggaagaaggacaggaacaacacagaggtggagcgcttcagcgaggtgttctgcagcgtgcagaggctgagccaggccttcatcgacctgcacagcgctggcaacatgctgttccgcacctggatcgccatggcctactgcagccccaagcagggcgtgtccctgcagatggactttggcctggacctggtgacagagctgaaggagggcggagatgtgacagagctgctggccgccctgtgccggcagatggagcacttcctggacagctggaagagatttgtgacccagaagaggatggagcacttctacctgaacttctacacagctgagcagctggtgtacctgagcacagagctgaggaagcagcccccatctgatgctgccctgaccatgctgtccttcatcaagagcaactgcaccctgagagatgtgctgcgggcctctgtgggctgcggcagcgaggccgcccgctacaggatgagaagagtgatggaggagctgcccctgatgctgctgtctgagttcagcctggtggacaagctgcgcatcatcatggagcagagcatgcgctgcctgcctgccttcctgcctgactgcctggacctggagaccctgggccactgcctggcccacctggccggcatgggcggcagccctgtggagcgctgcctgccccggggcctgcaggtgggccagcccaacctggtggtgtgtggccacagcgaggtgctgcctgctgccctggccgtgtacatgcagacccccagccagcccctgcccacctatgatgaggtgctgctgtgcaccccagccaccacctttgaggaggtggccctgctgctgcggcgctgcctgaccctgggcagcctgggccacaaggtgtacagcctgctgtttgctgaccagctgtcctatgaggtggcccggcaggccgaggagctgttccacaacctgtgcacccagcagcaccgggaggactaccagctggtgatggtgtgtgatggagactgggagcactgctacctgcccagcgccttcagccagcacaaggtgtttgtgaccccccaggcccccctggaggccatccaggcctacctggccggccactacagagtgcccaagcagaccctgtctgctgctgctgtgttcaatgaccggctgtgtgtgggcatcgtggccagcgagagagctggggtgggcaagagcctgtatgtgaagaggctgcatgacaagatgaagatgcagctgaatgtgaagaatgtgcccctgaagaccatccggctgattgacccccaggtggatgagagccgggtgctgggcgccctgctgcccttcctggatgcccagtaccagaaggtgcctgtgctcttccacctggatgtgaccagctctgtgcagacaggcatctgggtgttcctgttcaagctgctgatcctgcagtacctgatggacatcaacgggaagatgtggctgaggaacccctgccacctgtacatcgtggagatcctggagaggaggacctctgtgcccagccgcagcagcagcgccctgcggaccagggtgccccagttctccttcctggacatcttccccaaggtgacctgcaggcctcccaaggaggtgattgacatggagctgagcgccctgcggagtgacacagagcccggcatggacctgtgggagttctgcagcgagaccttccagaggccctaccagtacctgcggcgcttcaaccagaaccaggacctggacaccttccagtaccaggagggctctgtggagggcaccccagaagaatgtctgcagcacttcctgttccactgtggggtcatcaaccccagctggagcgagctgaggaactttgcccgcttcctgaactaccagctgcgggactgtgaggccagcctcttctgcaaccccagcttcatcggggacaccctgcggggcttcaagaagtttgtggtgaccttcatgatcttcatggcccgggactttgccacccccagcctgcacaccagtgaccagagccctgggaagcacatggtgaccatggatggagtgcgggaggaggacctggcccccttcagcctgaggaagcgctgggagagcgagccccacccctacgtgttcttcaatgatgaccacaccaccatgaccttcatcggcttccacctgcagcccaacatcaatggatctgtggatgccatcagccacctgaccgggaaggtgatcaagagagatgtgatgacccgggacctgtaccagggcctgctgctgcagagggtgcccttcaacgtggactttgacaagctgcccaggcacaagaagctggagcggctgtgcctgaccctgggcatcccccaggccacagatcctgacaagacctatgagctgaccacagacaacatgctgaagatcctggccatcgagatgaggttccgctgtggcatccctgtgatcatcatgggagaaacaggctgcggcaagaccaggctcatcaagttcctgagtgacctgcggcggggcggcaccaatgctgacaccatcaagctggtgaaggtgcatggaggcaccacagctgacatgatctacagccgggtgcgggaggctgaaaatgtggcctttgccaacaaggaccagcaccagctggacaccatcctcttctttgatgaggccaacaccacagaggccatcagctgcatcaaggaggtgctgtgtgaccacatggtggatggccagcccctggctgaagattctggcctgcacatcatcgccgcctgcaacccctacaggaagcacagcgaggagatgatctgccgcctggagagcgctggcctgggctacagagtgtccatggaggagacagctgaccggctgggcagcatccccctgcggcagctggtgtacagagtgcacgccctgccccccagcctcatccccctggtgtgggactttggccagctgagtgatgtggccgagaagctgtacatccagcagatcgtgcagaggctggtggagagcatcagcctggatgaaaatggcaccagggtcatcacagaggtgctgtgtgccagccagggcttcatgaggaagacagaagatgaatgttcctttgtgtccctgagagatgtggagcgctgtgtgaaggtgttccgctggttccacgagcacagcgccatgctgctggcccagctgaatgccttcctgagcaagagctctgtgtccaagaaccacacagagcgggaccctgtgctgtggagcctgatgctggccatcggcgtgtgctaccacgccagcctggagaagaaggacagctacaggaaggccatcgcccgcttcttccccaagccctatgatgacagccggctgctgctggatgagatcacccgggcccaggacctcttcctggatggagtgcccctgaggaagaccatcgccaagaacctggccctgaaggaaaatgtgttcatgatggtggtgtgcatcgagctgaagatccccctcttcctggtgggcaagccaggcagcagcaagagcctggccaagaccatcgtggctgatgccatgcagggccctgctgcctacagcgacctcttccgcagcctgaagcaggtgcacctggtgtccttccagtgcagcccccacagcaccccccagggcatcatcagcaccttccggcagtgtgcccgcttccagcagggcaaggacctgcagcagtatgtgtctgtggtggtgctggatgaggtgggcctggccgaggacagccccaagatgcccctgaagaccctgcaccccctgctggaggatggctgcattgaagatgatcctgccccccacaagaaggtgggctttgtgggcatcagcaactgggccctggaccctgccaagatgaacagaggcatctttgtgtcccggggcagccccaatgaaacagagctgattgagagcgccaagggcatctgcagcagtgacatcctggtgcaggacagagtgcagggctactttgccagctttgccaaggcctatgagaccgtgtgcaagaggcaggacaaggagttcttcggcctgcgggactactacagcctcatcaagatggtgtttgctgctgccaaggccagcaacaggaagcccagcccccaggacatcgcccaggccgtgctgaggaacttcagcggcaaggatgacatccaggccctggacatcttcctggccaacctgcctgaggccaagtgcagcgaggaggtgagccccatgcagctgatcaagcagaacatcttcggccccagccagaaggtgcctggaggagagcaggaggatgctgagagccgctacctgctggtgctgaccaagaactacgtggccctgcagatcctgcagcagaccttctttgaaggagaccagcagcctgagatcatctttggaagtggcttccccaaggaccaggagtacacccagctgtgcaggaacatcaacagagtgaagatctgcatggagaccgggaagatggtgctgctgctgaacctgcagaacctgtatgagagcctgtatgatgccctgaaccagtactacgtgcacctgggcggccagaagtatgtggacctgggcctgggcacccaccgggtgaagtgccgggtgcaccccaacttccgcctcatcgtcatcgaggagaaggatgtggtgtacaagcacttccccatccccctcatcaaccggctggagaagcactacctggacatcaacacagtgctggagaagtggcagaagagcatcgtggaggagctgtgtgcctgggtggagaagttcatcaacgtgaaggcccaccacttccagaagaggcacaagtacagccccagtgatgtgttcatcggctaccacagtgatgcctgtgcctctgtggtgctgcaggtgattgagcggcagggcccccgggccctgacagaggagctgcaccagaaggtgtctgaggaggccaagagcatcctgctgaactgtgccaccccagatgctgtggtgcggctgagcgcctacagcctgggcggctttgctgctgagtggctgagccaggagtacttccaccggcagaggcacaacagctttgctgacttcctgcaggcccacctgcacacagctgacctggagagacatgccatcttcacagagatcaccaccttcagccggctgctgaccagccatgactgtgagatcctggagagcgaggtgacaggccgggcccccaagcccaccctgctgtggctgcagcagtttgacacagagtacagcttcctgaaggaggtgaggaactgcctgaccaacacagccaagtgcaagatcctgatcttccagacagactttgaagatggcatccgcagcgcccagctgattgccagcgccaagtacagcgtcatcaatgagatcaacaagatccgggagaatgaagatcgcatctttgtgtacttcatcaccaagctgagccgggtgggccggggcacagcctacgtgggcttccacggcggcctgtggcagagcgtgcacattgatgacctgcggcgcagcaccctgatggtgtctgatgtgacccggctgcagcacgtgaccatcagccagctgtttgcccctggggacctgcctgagctgggcctggagcacagagcagaagatggccacgaggaggccatggagacagaggccagcaccagcggggaggtggccgaggtggccgaggaggccatggagacagagagcagcgagaaggtgggcaaggagaccagcgagctgggcggcagtgatgtgtccatcctggacaccacccggctgctgcggagctgtgtgcagagcgctgtgggcatgctgcgggaccagaatgaaagctgcaccaggaacatgagaagagtggtgctgctgctgggcctgctgaatgaagatgatgcctgccacgccagcttcctgcgggtgtccaagatgaggctgagcgtcttcctgaagaagcaggaggagagccagttccaccccctggagtggctggcccgggaggcctgcaaccaggatgccctgcaggaggccggcaccttccgccacaccctgtggaagagggtgcagggcgctgtgacccccctgctggcctccatgatctccttcatcgacagagatggcaacctggagctgctgaccaggccagacaccccaccctgggcccgggacctgtggatgttcatcttcagtgacaccatgctgctgaacatccccctggtgatgaacaatgaaagacacaagggggagatggcctacatcgtggtgcagaaccacatgaacctgtctgaaaatgccagcaacaacgtgcccttctcctggaagatcaaggactacctggaggagctgtgggtgcaggcccagtacatcacagatgctgagggcctgcccaagaagtttgtggacatcttccagcagacccccctgggccgcttcctggcccagctgcatggagagccccagcaggagctgctgcagtgctacctgaaggacttcatcctgctgaccatgagggtgtccacagaggaggagctgaagttcctgcagatggccctgtggagctgcaccaggaagctgaaggccgccagcgaggcccctgaggaggaggtgtccctgccctgggtgcacctggcctaccagcgcttccgcagccggctgcagaacttcagccgcatcctgaccatctacccccaggtgctgcacagcctgatggaggcccgctggaaccacgagctggccggctgtgagatgaccctggatgcctttgctgccatggcctgcacagagatgctgaccaggaacaccctgaagcccagcccccaggcctggctgcagctggtgaagaacctgtccatgcccctggagctgatctgcagtgatgagcacatgcagggcagcggcagcctggcccaggccgtcatccgggaggtgcgggcccagtggagccgcatcttcagcacagccctgtttgtggagcacgtgctgctgggcacagagagccgggtgcctgagctgcagggcctggtgacagagcacgtgttcctgctggacaagtgcctgcgggagaacagtgatgtgaagacccacggcccctttgaggccgtgatgaggaccctgtgtgagtgcaaggagacagccagcaagaccctgagcagatttggcatccagccctgcagcatctgcctgggagatgccaaggaccctgtgtgcctgccctgtgaccacgtgcactgcctgcgctgcctgcgggcctggtttgccagcgagcagatgatctgcccctactgcctgacagccctgcctgatgagttcagccctgctgtgtcccaggcccaccgggaggccatcgagaagcacgcccgcttccggcagatgtgcaacagcttctttgtggacctggtgtccaccatctgcttcaaggacaatgcccctcctgagaaggaggtgattgagagcctgctgagcctgctgtttgtgcagaagggccgcctgagagatgctgcccagaggcactgtgagcacaccaagagcctgagccccttcaatgatgtggtggacaagacccctgtgatccgcagcgtcatcctgaagctgctgctgaagtacagcttccatgatgtgaaggactacatccaggagtacctgaccctgctgaagaagaaggccttcatcacagaggacaagacagagctgtacatgctgttcatcaactgcctggaggacagcatcctggagaagaccagcgcctacagcagaaatgatgagctgaaccacctggaggaggagggccgcttcctgaaggcctacagccctgccagccggggccgggagcccgccaatgaggcctctgtggagtacctgcaggaggtggcccgcatccggctgtgcctggacagagctgctgacttcctgtctgagcctgagggcggccctgagatggccaaggagaagcagtgctacctgcagcaggtgaagcagttctgcatccgggtggagaatgactggcaccgggtgtacctggtgaggaagctgagcagccagaggggcatggagtttgtgcagggcctgagcaagccaggccggccccaccagtgggtgttccccaaggatgtggtgaagcagcagggcctgcggcaggaccaccctggccagatggaccgctacctggtgtatggagatgagtacaaggccctgagagatgctgtggccaaggctgtgctggagtgcaagcccctgggcatcaagacagccctgaaggcctgcaagaccccccagagccagcagagcgcctacttcctgctgaccctcttccgggaggtggccatcctgtaccgcagccacaatgccagcctgcaccccaccccagagcagtgtgaggccgtgtccaagttcatcggggagtgcaagatcctgagccccccagacatcagcagatttgccaccagcctggtggacaacagcgtgcccctgctgcgggccggccccagcgacagcaacctggatggcaccgtgacagagatggccatccatgctgctgctgtgctgctgtgtggccagaatgagctgctggagcccctgaagaacctggccttctccccagccaccatggcccacgccttcctgcccaccatgcctgaggacctgctggcccaggcccggcgctggaagggcctggagcgggtgcactggtacacctgccccaacggccacccctgcagcgtgggggagtgtggccggcccatggagcagagcatctgcatcgactgccacgcccccatcggcggcatcgaccacaagcccagagatggcttccacctggtgaaggacaaggctgacaggacccagacaggccacgtgctgggcaacccccagaggagagatgtggtgacctgtgaccggggcctgccccctgtggtgttcctgctgatccggctgctgacccacctggccctgctgctgggcgccagccagagcagccaggccctgatcaacatcatcaagccccctgtgcgggaccccaagggcttcctgcagcagcacatcctgaaggacctggagcagctggccaagatgctgggccacagcgcagatgagaccatcggcgtggtgcacctggtgctgcggcggctgctgcaggagcagcaccagctgagcagccggcggctgctgaactttgacacagagctgagcaccaaggagatgaggaacaactgggagaaggagattgctgctgtgatcagccctgagctggagcacctggacaagaccctgcccaccatgaacaacctgatcagccaggacaagaggatcagcagcaaccctgtggccaagatcatctacggggaccctgtgaccttcctgccccacctgcccaggaagtctgtggtgcactgcagcaagatctggagctgcaggaagaggatcaccgtggagtacctgcagcacatcgtggagcagaagaatggcaaggagcgggtgcccatcctgtggcacttcctgcagaaggaggccgagctgcggctggtgaagttcctgcctgagatcctggccctgcagagggacctggtgaagcagttccagaatgtgcagcaggtggagtacagcagcatccggggcttcctgagcaagcacagcagtgatggcctgcggcagctgctgcacaaccgcatcaccgtcttcctgagcacctggaacaagctgcggcgcagcctggagaccaatggagagatcaacctgcccaaggactactgcagcacagacctggacctggacacagaatttgagatcctgctgccccggcggcggggcctgggcctgtgtgccacagccctggtgtcctacctgatccggctgcacaatgaaattgtgtatgctgtggagaagctgagcaaagaaaacaacagctacagcgtggatgctgctgaggtgacagagctgcacgtgatctcctatgaggtggagcgggacctgacccccctcatcctgagcaactgccagtaccaggtggaggagggccgggagaccgtgcaggagtttgacctggagaagatccagaggcagatcgtgagccgcttcctgcagggcaagccccggctgagcctgaagggcatccccaccctggtgtacagacatgactggaactatgagcacctgttcatggacatcaagaacaagatggcccaggacagcctgcccagcagcgtcatcagcgccatcagcggccagctgcagagctacagtgatgcctgtgaggtgctgtctgtggtggaggtgaccctgggcttcctgagcacagctggaggagaccccaacatgcagctgaatgtgtacacccaggacatcctgcagatgggagaccagaccatccacgtgctgaaggccctgaaccgctgccagctgaagcacaccatcgccctgtggcagttcctgagcgcccacaagtctgagcagctgctgcggctgcacaaggagccctttggagagatcagcagccgctacaaggctgacctgagcccagaaaatgccaagctgctgagcaccttcctgaaccagacaggcctggatgccttcctgctggagctgcacgagatgatcatcctgaagctgaagaacccccagacccagacagaggagcgcttccggccccagtggagcctgcgggacaccctggtgtcctacatgcagaccaaggagagcgagatcctgcctgagatggccagccagtttcctgaggagatcctgctggccagctgtgtgtctgtgtggaagacagctgctgtgctgaagtggaaccgggagatgaggtag

SEQ ID NO: 275291 - DNA, 9843 bp, Artificial Sequence
  derived and/or modified sequence
atggtgtgcgacggcgactgggagcactgctacctgcccagcgccttctctcaacataaagtgtttgtaaccccacaggcgcctctggaagccatacaggcctatttggcaggtcactacagagtccctaagcagacactgagcgcagctgctgttttcaatgatcgcctctgcgtagggattgtggcttctgaaagagccggagtcgggaagtctctatatgtaaaacgcctacatgataagatgaaaatgcagctcaacgtcaagaacgtacccttgaagaccatacggttgattgatccgcaggtcgacgagtctcgggtactgggcgccctgttgccttttctagatgcgcagtatcagaaagtacctgttctatttcacctggatgtcacaagttcagttcagaccggcatttgggtgtttctgtttaagctgcttattttgcagtacctcatggacatcaacggcaaaatgtggctgagaaatccctgtcatctgtacatcgtagagatattggaaagacggaccagtgttccgtcgaggtcttcaagcgcactacgaacacgggtgccccagttctccttcctagatatctttcccaaggtgacctgccgccctccgaaagaggtgattgacatggaactttctgcactgcggagtgacaccgagcccgggatggacctatgggagttctgctccgaaacctttcagcgaccgtatcagtacctcaggcgctttaatcaaaatcaagaccttgacaccttccagtaccaggagggctctgtggagggaaccccagaagaatgccttcagcacttccttttccactgcggagtgattaatcccagctggtctgagcttcgtaacttcgcgaggtttctgaactaccagttgagggattgtgaggccagcttgttttgcaaccccagttttattggggacaccctgcggggatttaagaagttcgttgtcacatttatgatttttatggcccgtgatttcgccactccttctctgcatacatctgaccagtcgccaggaaagcacatggtcaccatggatggagtgcgtgaggaggacctcgccccgtttagcctgaggaagcggtgggaatctgagcctcacccttatgtattttttaatgacgaccacaccactatgacctttatcggattccacttacagcccaatatcaatggaagcgttgacgccatttcccacttgaccggcaaggtgattaaaagagacgttatgacccgagacctctaccagggactgcttctgcagcgcgtcccatttaacgttgatttcgacaagttaccccgacacaaaaagttggagaggctctgtctgacactggggattccccaagctacagaccctgataagacgtatgagcttaccacagataatatgctgaaaatactagcgattgaaatgcgttttaggtgcggcattcctgtcatcattatgggcgagactggttgcggcaaaacacggctgatcaaatttctgtctgatttgagaagaggaggaactaatgctgacacaatcaaactagttaaagtacacggtgggactactgcggatatgatctactcccgggtgcgagaggccgaaaatgtagctttcgccaacaaagaccagcatcagctggataccatcctgttcttcgatgaggcgaataccaccgaggccattagctgtatcaaggaagtcctatgcgaccatatggtcgatggccagcctctggccgaggattctggcctacacatcatagccgcctgtaacccttatagaaaacatagcgaggaaatgatctgtcgcctggaatctgccggtctagggtaccgcgttagcatggaggaaacagctgacagactcgggagtataccgctccgccagctggtatatcgcgtgcatgctctccctcccagtctcatcccgctggtttgggatttcggacagctgagtgacgttgcggagaaactgtacatccagcagatcgtccaaaggctggtggagagcatcagtctggatgagaacggaacccgcgtgattaccgaggtgctctgcgcgagccaaggttttatgaggaagactgaggacgaatgctccttcgtctccctgcgcgacgtggaacgatgtgtaaaagtctttagatggtttcatgaacattccgctatgctgctggcccaacttaatgcgtttctgagcaaatccagcgtatctaaaaatcacacggagcgcgacccagttttatggtcactgatgctagcaattggggtgtgctatcatgccagtctcgagaagaaagattcttatagaaaggctatcgcccgcttttttcccaagccgtatgacgatagcaggttactactggacgagatcacccgagcccaggacttgtttctcgacggcgtcccgctgcgcaaaacaattgccaagaatctggccctcaaagagaatgtcttcatgatggtcgtatgcatcgagctgaagattcccctgtttctcgtcgggaagcccggctctagtaagagcctggccaagaccatcgtggctgacgccatgcaaggacctgccgcttacagcgatctatttcgcagcttgaagcaggttcacctcgtgtcttttcagtgttccccccatagcactccgcagggaattatatccacttttagacaatgcgcacgattccagcaaggtaaagatttgcagcagtacgtgagcgtcgtggtgctggacgaagtcggcttggccgaggatagtcctaaaatgcctcttaagacactgcatcctctgctggaagatggatgtattgaagacgacccggctcctcataaaaaagtagggttcgtaggaatctccaattgggccctggaccccgccaagatgaatcgcggcatttttgtgtctcgcggatccccaaacgaaaccgagctgatcgaatctgcgaagggaatttgtagcagcgacatcctggtgcaggaccgcgtgcagggatacttcgccagcttcgctaaggcttacgagactgtctgtaagcgccaggataaggaattttttgggctgcgtgactattatagcttgattaagatggtgtttgccgcagccaaggcctctaatcggaagcctagcccacaggacattgctcaagccgttctaagaaacttcagtggaaaggatgatatacaagcactggatatatttctcgcaaacctgcccgaggccaagtgtagtgaggaagtgtcaccaatgcagctcattaagcagaacatcttcggtcccagccagaaggtgccaggaggcgagcaggaggacgccgaatccaggtaccttctggtcctgacaaaaaattacgtggccctccagatcctgcagcaaaccttcttcgagggggaccagcagcctgaaattatctttggaagtggattccctaaggaccaagaatatacacagctatgtcgaaacattaatagagttaagatttgcatggagacaggcaagatggtgctgcttctgaatcttcagaatctgtatgaatcactgtacgacgctctgaatcagtactacgtccatctcgggggccagaaatacgtcgatctgggcctcggaacccaccgggtgaaatgtcgggtccacccaaattttaggctaatagttattgaggagaaggatgtagtgtacaaacattttcccatccccctgatcaatcgcctcgaaaaacattacctggatattaacacagttttggaaaagtggcagaagagcatcgtggaggagttgtgcgcttgggtggaaaagtttatcaatgtgaaagctcaccacttccagaagcgccacaaatacagtcccagtgatgtgttcatcggctatcactctgacgcttgtgcttctgttgtcctgcaggtgattgagcgacagggcccaagggcgttgactgaagagttgcatcagaaagtttccgaggaagctaagagtatcctcctgaactgcgccactcctgatgccgttgtaagactctccgcatacagccttgggggatttgcggccgaatggctcagccaagagtatttccaccgacaacgacataacagttttgccgatttcctgcaggcacacctccacacggccgatttagagcgacatgcaatttttaccgagattaccaccttctctaggcttctgacaagccacgattgtgagatcctggaaagtgaggtgaccgggcgggcaccaaagccaaccttgctgtggctgcaacagttcgataccgagtactcttttctgaaagaggtgcggaattgtctgactaacaccgctaaatgtaagattcttatttttcagaccgactttgaagatgggatccggtccgcccagctgatagcaagcgccaagtactccgtgattaacgaaataaataagatccgcgaaaatgaagacagaattttcgtgtacttcattactaagttatcaagagtcggacgcggcacagcctacgtgggatttcacggtgggctgtggcagtctgtacacattgacgacctgaggcgatccactctcatggtttcagacgtcactcgactgcagcacgtcactatctcacaattgtttgcacccggcgacttgcccgaacttggtctggagcaccgagcggaggacggacacgaggaggcaatggaaaccgaggcctccacttccggcgaggttgcagaagtcgccgaggaggctatggagactgaatcctccgagaaagtgggcaaagagaccagcgagctgggcgggagcgacgtatccatactcgacaccacacgcctgctgagatcttgtgtacagtccgccgtggggatgctcagggatcaaaacgaaagctgcactcgaaatatgcggcgcgtggtacttctgctgggtcttctgaacgaagacgacgcctgccacgcatcatttctgagggtgtccaaaatgcggctttctgtgttcttgaagaaacaggaagagagtcagttccatcctttggagtggttggcccgcgaagcctgtaaccaggacgcactccaggaggctggcacttttcggcatactctgtggaagcgcgtgcaaggagctgtgacacccctacttgctagtatgatctcctttatcgatagggatggaaacctggagttgctgactagacccgatacccctccctgggccagggatctgtggatgttcattttttccgataccatgctgctaaatatccctctggtaatgaacaatgagagacacaagggagaaatggcctacattgtagtgcagaaccatatgaacttaagtgaaaacgcctccaacaacgttcccttttcatggaagattaaggattatttagaagagctgtgggtacaggcacaatatatcaccgatgccgaaggcctccctaaaaaattcgttgatatctttcagcaaactccattggggcgatttttagcccagcttcacggtgagccccagcaggagttgctccaatgttaccttaaggattttatcctgctgactatgcgcgtgagtacagaagaggaattgaagtttttacagatggccctgtggtcctgtactagaaaacttaaggctgcctcggaagccccagaggaagaggttagcttgccatgggtgcatttggcttatcagagattcaggtctcgtctgcagaatttttcccgtattctgactatctacccacaggtattgcatagcctcatggaagcaagatggaaccacgagctggctggctgcgagatgaccttggatgctttcgccgctatggcatgtaccgagatgcttacccgaaacacccttaaaccttccccccaggcatggttgcagctggtgaaaaacctgtccatgccactggaacttatctgctctgatgaacacatgcagggcagcggttccttggcacaggcggtcatacgcgaagtgcgcgcacagtggtcaaggattttcagtactgcattattcgtcgagcacgtgcttctcggaacagagtccagagtgcccgaactacaggggctcgtgaccgagcatgtgtttctgctggacaagtgtctgagggagaattcagacgttaagactcatggaccttttgaggctgtgatgcggaccctctgcgaatgcaaggagacagcctcgaaaacactgtcccgcttcggaattcagccatgctccatttgtctcggcgatgcaaaggatcctgtctgtcttccttgcgaccacgtccactgtctgcggtgcctacgggcctggtttgcctcagagcagatgatctgcccatattgcctcacggccctcccagacgagttttccccggccgtttctcaggcccaccgggaggctatcgaaaaacacgcaaggtttcggcagatgtgcaattctttctttgtggacctggtatccaccatctgtttcaaggataatgcaccaccagagaaagaggtaatcgaatccctgctttctctgctattcgtccaaaagggccggctccgcgatgcagctcagaggcactgcgagcatacaaagagcctgtcacctttcaacgacgttgtggacaagactccagtaattaggagtgtcatcctgaaacttttactgaaatattctttccatgatgttaaagattatattcaggaatatcttaccctgctgaagaagaaagccttcatcaccgaagacaagaccgagctttacatgctgttcatcaactgtctggaggattccattctcgaaaagacttcagcctactccagaaatgatgaactcaatcatttggaggaagaagggaggtttctcaaggcatatagccccgcctctaggggacgggagcctgcgaacgaggcatctgtggagtatctgcaggaagtcgccagaattcgcctgtgcttggatagggctgccgatttcctgtctgagccggagggaggaccggaaatggcaaaggagaagcagtgctatttacagcaggtcaagcagttttgtatccgggtggaaaatgattggcacagagtttatctcgttcggaagcttagcagtcaaagagggatggaatttgtgcagggcttaagcaaacccggacgtcctcaccagtgggtttttccaaaggacgtggttaagcagcagggattgcgtcaggatcatcctgggcagatggaccgttacctggtgtacggtgacgagtataaggccctacgcgatgccgtggctaaggcggtgttggaatgtaaaccactagggatcaagaccgcattaaaagcttgtaaaactccccagagccagcagagcgcctacttccttcttaccctattcagagaagtcgccatcctttatcgtagccataatgctagcctgcatccaacgcctgaacagtgtgaagcagtctcaaagtttatcggggaatgcaaaatcctttctccaccggacatctcccgcttcgccacctctctggtggataattccgtgcccctccttcgagccggaccaagtgacagcaacctggatggaactgtgaccgagatggcgatccatgctgcggcggtgttgctgtgcggccaaaacgaacttctggagcccctgaagaatctggcgttctctcctgcaaccatggcacatgccttcttacccacaatgcccgaggatcttctagcccaagccagacgctggaagggcctggaaagagtgcactggtatacttgcccaaacggccacccctgctccgtgggggagtgcgggcggccaatggaacagagcatctgcatagattgtcacgccccgatcggagggatagaccataagcccagggatggcttccacctcgtgaaagacaaggccgatagaacccaaaccgggcatgttctgggaaaccctcagcggagagacgtggtaacatgcgaccgcggtctgcctccggtggtctttctgctgatccggctcctcacacacctggcattgctgttaggtgcatcccagtcaagtcaagctctgatcaacatcatcaaacctccagtgcgtgaccccaagggtttcttgcaacagcatatcctgaaagacctggagcaattagcaaaaatgctaggtcattccgcagatgaaacgataggagtagttcaccttgtgctgaggaggcttttgcaagaacagcaccagctgtctagtcggaggctgcttaactttgacactgagctgagtacaaaagaaatgagaaacaactgggagaaagagatcgccgccgtcatcagcccagaattggaacacttagacaagactctgccgacaatgaataatttgattagtcaggacaagaggatatcatccaatcccgtggcaaagataatctacggcgaccctgtgacattcctcccccatctgccacggaagtctgtggtacattgcagtaaaatatggtcttgcaggaaaaggataaccgtcgaatatctccagcacattgttgaacagaaaaatgggaaggaaagagttcccatactctggcactttctccaaaaggaggccgagctgaggctcgtgaagtttcttcctgagatattggcccttcagagggatttagtgaaacagttccagaacgtgcagcaggtggaatacagcagcattcggggtttcttatctaaacacagcagcgacggactccgacagctgctgcacaatcggattacagtcttccttagcacatggaacaagctgagaaggtcactggaaaccaatggagagatcaacctgccaaaggattactgttccacggatttagacctcgacaccgaatttgaaatcctcctccccagacgccggggtctgggtctgtgtgctactgcgctcgtctcatacctaatccgcctgcataacgagattgtttacgctgttgagaagctctccaaagaaaataactcctatagtgtagatgccgccgaggttacagagctgcatgtgatttcttacgaggtggaacgagacctcacacccctgattttgagcaactgtcagtaccaggtggaggagggcagggagaccgtccaggaatttgacctagaaaaaatccaacgccagatcgtatcccgctttctgcagggtaaaccgcggttgagcctgaaggggattcctactctagtgtatcggcacgattggaactacgaacatctgttcatggacatcaaaaacaagatggcccaggactccctgcccagctctgtgatttccgccatctcaggccaattgcagagctattccgatgcctgcgaagtgctgagcgtagtggaagttaccctggggtttcttagtaccgctgggggggaccctaatatgcaactgaacgtctacacccaggatatcctgcagatgggtgaccagacaatccacgtgttgaaggctctaaaccgctgccaattaaaacatacaatcgccctgtggcagttcctgtctgcccataagtccgagcagcttctgcggctccataaagagccctttggtgaaattagtagcagatataaggcggatctgtctcccgagaatgccaaactgctctccacgttcctgaaccagaccggtctggacgctttcctcctggagctccatgagatgattatactgaaactgaagaatccgcagactcagaccgaggagaggtttcgtccccagtggtccctgagggacactctagtctcctacatgcagacaaaggagtccgagatcctgcctgagatggcatcccagtttcccgaggagattctcctggctagttgtgtctccgtgtggaaaacagccgccgttctcaagtggaatagggagatgcgctag

SEQ ID NO: 275292 - DNA, 15771 bp, Artificial Sequence
  derived and/or modified sequence
atggagtgccccagctgccagcacgtgagcaaggaggagacccccaagttctgcagccagtgtggagaaaggttgcctccagcagctcccatcgccgattctgagaataacaattcaaccatggcttcggctagcgagggcgaaatggagtgcggacaagaactcaaggaagaggggggcccatgcctatttcctggctccgattcctggcaggagaatcccgaagaaccttgtagcaaggcttcttggactgtgcaggaaggggctacttctgaggtcttggtcgacgctgctgtcgacctgatcagcgatgagtgggaggcagctaatgcaatcccttctaagcggagaaagcaggacgcggcacctctggaggcagcttcagtaccgtctgctgattgtgaacagtccaaaaaaaagaaacgcaagaaaaaaaagaaaggcaataaaagcgcttcttctgagctggctagtttgccactctcgcccgcatctccgtgccacttgactctcttgtctaacccctggcctcaagacaccgctttgccccactcgcaggcacagcaatccgggcctactggtcaacctagccagccccctggaacagcaaccaccccacttgagggtgatgggctgtcagctccgactgaggtgggcgactcacccttgcaagcacaggccctcggagaagccggggtggcaacgggctctgaggcgcagtccagtcctcagttccaagaccacacagagggagaggaccaggatgcgtcaatcccttctggtgggaggggactgtcccaggaaggaacagggcctcccacctcggcgggcgagggccactcaagaacagaagacgccgcccaggagttgcttctgcccgagagcaaggggggtagctctgaaccagggacggagcttcagactaccgaacagcaggctggtgcttctgcctcaatggccgtcgacgccgtggcggaacccgccaatgccgtgaaaggggctgggaaggagatgaaggagaagacacagaggatgaagcaaccacctgccaccacgcccccatttaaaactcactgccaggaagccgagacaaagacgaaggatgagatggctgccgctgaggaaaaagtgggcaagaatgagcagggagagcccgaagacctcaaaaaacccgagggcaaaaaccgctcagccgcagccgttaagaatgagaaggagcaaaagaatcaagaggctgatgtgcaagaagtcaaagcaagcactctctctcctggagggggggttacagtcttcttccacgccataatttcactccacttcccctttaaccccgacttgcacaaggtcttcatccgggggggagaagagtttggagaatccaagtgggacagcaatatctgcgaactccactacactcgagacctgggacatgatagggtgctggtggaagggatagtctgtatctctaaaaaacacctggataagtatattccctacaagtacgtgatctacaatggggaatctttcgaatacgagttcatttacaaacatcagcagaaaaagggggagtatgtgaatcgctgtctcttcatcaaaagttcgcttcttggaagtggggattggcaccaatactacgatatcgtctatatgaaaccacacggtcgcttgcagaaggtcatgaaccacatcactgatgggccaagaaaggaccttgtgaaagggaagcaaatagcagcagccttgatgctcgattcgacgttctccatcctccaaacatgggacacgattaatctgaactccttttttacacagtttgagcagttctgctttgtgcttcagcaaccgatgatatatgaggggcaggcgcagctctggaccgatctccagtatcgggagaaggaggttaagcgctacctgtggcagcatttaaagaaacacgttgtcccacttcctgatgggaagtccacggactttcttcctgttgattgccctgtgagatcaaaattaaaaacaggtctgattgttttatttgtcgtggaaaagattgaacttttattagagggaagtttagattggttgtgccatctgttgacctcggacgcgagcagccctgatgagttccaccgggatctctctcatatactggggattccccagagctggagactgtacttagtaaacctttgtcagcgctgcatggacacacggacatatacctggctgggagctctgcccgtgcttcactgttgcatggagttagccccccgacataaagacgcatggcgccaacccgaagatacatgggcagccctggaaggcttgtccttctccccttttagggagcagatgctggatacatcttctttgctccaattcatgagggagaaacaacacctgctatctatcgatgagccgttgttccgatcttggttcagcttgttaccactttcacacttggtaatgtacatggagaacttcattgagcacctcggtaggtttcctgctcatattcttgactgcctctccgggatctattatagactccctggcctggagcaggtgctgaacactcaggatgtacaggacgtccaaaatgtgcagaacatactcgagatgctgctcagactcctggacacttatagggataaaataccggaagaggcattgtcgccctcctacttgactgtctgtctgaagttgcatgaagcgatttgtagctccaccaagctgctgaaattttacgagctgcccgcactgtctgcagagatagtttgtaggatgatccggctgttgtcgctggtcgatagcgccggccagcgtgacgaaacaggcaataactccgtacagactgtgtttcagggcactctggccgcgaccaagaggtggctaagagaagtgttcacaaagaacatgcttacaagttctggcgcgtccttcacttacgtaaaggaaatcgaagtttggcgacgacttgttgagatccaattccccgccgaacatggctggaaggaaagcctgttgggggatatggaatggcgcctcactaaggaggaaccactttcccagatcacagcgtattgcaatagttgttgggataccaagggcttggaggattctgtcgccaagacatttgagaagtgtataattgaggctgtgagtagcgcttgtcagagtcagacttccattctccagggattcagttactctgacctgagaaaattcgggatagtcttaagcgcagtgattactaagagctggcccagaacagcggacaacttcaatgacattcttaagcacctgttaacactggccgacgtgaagcatgtttttagattatgcgggaccgacgaaaaaatcctggccaacgtgaccgaggatgcaaagcggctaatcgccgtggctgacagcgtgctgacgaaggtcgttggcgacctattatccggcactatcctcgtgggccaattggaacttatcatcaaacacaagaaccagttcttggacatctggcagctgcgagagaagtccctttcccctcaagacgaacagtgtgctgtggaggaggctttggactggcgcagggaagaacttcttctgttgaagaaagagaaaaggtgcgtggattctttgctgaaaatgtgcggtaacgtgaagcatctgattcaggtggactttggcgtgttagccgtacggcacagccaggacctcagtagcaaaagactgaatgacactgtaacagttcgcttatctacctcaagtaactctcagcgggccacccattaccatctctctagccaggtgcaggaaatggccggcaagatagatcttctccgcgactcacacatattccagctcttttggagggaggctgccgagcccctgtcagagcccaaagaggaccaagaggcagccgagcttctatccgagccagaagaggagtcagagagacatatactcgaactggaagaggtgtatgactatctatatcagccatcctataggaaattcataaaattacatcaagacctcaaatcaggggaagtgaccctcgcagagatcgatgttatcttcaaggatttcgtaaataagtacacagatctagatagcgagctcaagatcatgtgcaccgttgaccatcaggatcagagagattggataaaggatcgcgtggaacagataaaggagtaccaccatctgcatcaagccgttcacgctgcgaaggtcatcttgcaggttaaggagtccctaggcctaaatggcgatttctccgtgctcaatacactgctcaattttaccgataactttgacgatttcaggagggagacacttgatcagatcaaccaggagctgatacaggctaagaaactgctgcaggacatctccgaagccagatgtaagggtcttcaagccctcagccttagaaaagaatttatttgttgggtccgggaagccttgggaggaattaatgaactgaaagtgttcgtcgatcttgcctcaatcagtgctggcgagaacgacatagacgtggaccgcgtcgcatgctttcacgatgctgtacaaggctacgcgtcactgttgtttaaacttgatccaagcgtcgacttttccgcattcatgaagcacctgaagaagctgtggaaggccttggacaaggaccagtatttgccccggaagctctgcgattccgcacgaaacctagagtggttgaagacagttaacgagtcccacggctctgtcgagcgcagctccctgacattagccacggctattaatcagagaggtatttacgttatccaggcacctaaagggggacagaagatttcccccgatacagtactgcaccttatactgccagagtctcctggctcgcacgaagaatcacgagagtattcccttgaggaggtaaaggaactgctgaataagttaatgctaatgtcgggtaaaaaagaccggaacaatacagaagtagagagatttagcgaggtattctgttccgtgcagcgactgtcccaggctttcatcgacctgcattccgctggtaacatgttgttccgtacttggattgccatggcttactgtagtcctaaacaaggagtttccctgcagatggacttcgggctggatctcgtgactgaactgaaagagggaggtgatgtgacggaactactggctgccctgtgtcggcagatggaacatttccttgactcctggaaaagatttgtcacgcagaaaaggatggaacacttttatcttaacttttatactgcagaacagcttgtctacttgtccaccgaactgcgtaagcagcccccatctgacgctgccctaacgatgctgtcctttatcaagagcaactgcacactcagggacgtgctcagggcctcagttgggtgcggatcagaggctgcacgatataggatgaggagggtcatggaggagctgcctctgatgctgctgagcgaattcagcttggtcgataagcttaggattatcatggagcaatccatgaggtgtttaccggcattcctgccagattgtctagacttagaaactctgggacattgcctggcccacctggccgggatgggtggctcccccgtggaacggtgcctgcccaggggtttacaagtgggccagccaaatctcgtcgtatgcggacactctgaggtcctacctgctgctttggccgtgtatatgcagaccccgtcacaacccctgcccacctatgatgaggtgctgctgtgtacacctgctactactttcgaagaggtggccttgctgctccggcggtgcctcacactcggctcactggggcataaagtctactccctgctctttgccgaccagctcagctacgaagtagcccgtcaggccgaggagctttttcataatctatgcacccagcaacatagagaggactatcaactggtcatggtctgtgatggcgactgggagcattgttacctgccttcagcttttagccagcataaggtgtttgtcaccccacaggctcccctggaagcaatccaggcctacctggccggccactacagagttcccaaacagactttgtccgccgcagcggtatttaacgacaggctgtgcgttggcatcgtggccagtgagcgggccggtgtgggcaagtctctgtacgtgaaacgcctccacgataagatgaaaatgcagcttaacgttaagaacgtgcccctgaagaccattcggttaattgatccccaggtcgatgagagcagggtcctgggcgcactgctgccatttctggatgcccagtaccagaaggtccccgttttatttcatctggacgttactagctccgtgcagactggtatttgggtgtttctgtttaaactactgatcctgcaatacctgatggacattaatgggaagatgtggctgaggaatccatgccacctttacatcgtcgaaatcctggaaaggaggacctccgtaccaagtaggtcgtctagcgccctaagaacaagggtccctcagttctctttcctagatatcttccctaaggtgacatgtaggcctcccaaagaagtgatcgacatggagctgagcgctctgcgcagcgacaccgagcccggcatggatctgtgggagttttgcagtgagacttttcaaagaccctatcaatatctgagaagatttaaccagaatcaggatttggataccttccagtaccaggaaggctccgtcgagggtacacctgaagaatgcttacagcacttcctttttcactgcggggtgattaacccatcgtggagcgagctgcgcaactttgctcgtttccttaattaccagcttcgcgattgcgaagcctcacttttctgcaatcccagctttatcggtgacacattacgtggatttaaaaaatttgtcgttacatttatgattttcatggcgagggacttcgctaccccctcacttcatacatccgatcagtccccgggaaaacatatggtgacaatggacggcgttcgcgaagaagacctggcccctttttccctgcgcaagaggtgggagtcagaaccacatccatacgtcttctttaatgacgaccacacaactatgacttttatcgggtttcacctccaacctaacataaatgggagtgtggacgcaatatctcacctcactggcaaggtgatcaagagagacgtgatgacccgggatctttaccaagggctgctgctgcagcgagtgccattcaacgtagacttcgacaaattgccaagacataaaaaactggaacggctatgtctgacactgggcatccctcaggccacagacccagacaagacttacgagcttaccaccgacaatatgctgaaaattctggctattgagatgagatttcgctgcgggattcccgtgattatcatgggcgagacaggctgtgggaagactagattgataaaattcctttctgatctgcggcggggaggcacaaacgcggataccattaagctcgtaaaagtacatggtgggacgaccgccgacatgatctactcccgggtcagggaggcagagaacgtggcctttgccaacaaggaccagcaccaactggatacaatcctattcttcgatgaggccaataccacagaggccatttcctgcatcaaagaagtgctttgcgaccacatggtggatgggcagccactggccgaggactcggggttgcacattattgccgcatgtaacccctatcgcaagcactctgaagagatgatctgtcgtttggagtccgcaggtctgggctatagagtgtcaatggaggaaactgcagaccgcctcggctccatccccctgaggcagttggtgtatagagtgcacgccctccctcctagtctgattccactcgtgtgggattttggccagcttagcgacgtcgctgaaaagctgtacatccagcagattgtgcaaagactggtcgagtccatcagcctggacgagaatggtactagggtcatcaccgaagtattatgcgcttctcaaggctttatgaggaagactgaggatgagtgcagttttgtctccctccgagatgtggagaggtgtgtcaaggtttttaggtggttccacgaacacagcgcaatgcttctggcacagttaaatgcattcctctcaaaatcatcagtgtccaagaatcacaccgaaagggatcctgtgctctggtcgctgatgctggctattggagtctgctaccatgcctctctggaaaagaaggactcttatcgcaaagccatcgctcgcttttttccaaaaccatacgacgatagtcgccttttgttggatgagatcactcgagcccaagatctttttctggacggggtgcccctcagaaagacgatcgccaagaacttagcactgaaagaaaacgtgttcatgatggtcgtgtgcattgagctaaaaatccctttgtttttggttggaaaacccgggtcttctaagtctctggcaaagacgatcgtcgccgacgccatgcaaggccctgccgcctattcagatctgtttaggtccctgaagcaagtgcatttggtctcttttcagtgcagtccccactccacccctcaaggcattatctccacattccgccagtgtgcccgtttccaacaaggcaaggacctccagcaatacgtgagtgtcgtggtactcgacgaagtcggtctggcggaagattcccccaagatgccattgaagacccttcaccctctgttggaggatggttgtatcgaggacgatcccgctccacacaaaaaagtaggcttcgtcgggatctcaaattgggcactggaccctgctaagatgaaccgtggcatttttgtgagccggggctcgcccaacgagaccgagctgattgagtctgctaagggaatttgctccagcgatattttggtccaggatcgcgtccagggctatttcgcctcctttgccaaggcatacgaaacagtgtgtaagcgacaagataaggagttcttcggcctgagggattattattcactcattaagatggtgttcgccgcggcaaaggcatcgaatagaaagccgagtcctcaagatattgcccaggccgtgctgcgtaatttctccgggaaggatgacatccaggccttggatatctttctcgcaaacctgccagaagctaagtgttctgaggaggtttcacctatgcaactgattaaacagaatatatttggaccgagtcagaaagtgccaggcggtgagcaggaggacgctgagtcacgctatttactggtacttaccaaaaattacgtcgctctgcagatccttcagcagactttcttcgagggggatcaacaaccagagattatattcggatctggctttccaaaagatcaagaatatacccagctatgtcggaatatcaaccgagttaaaatctgtatggaaaccggaaagatggtcctgctgctgaatttgcaaaacctgtacgagtctttatacgatgcccttaaccagtactacgttcatctgggcggacaaaagtacgtcgacctcggcctgggcacccacagggtaaagtgtcgcgtacatccgaacttccgcctgatcgtgatcgaggaaaaagatgtcgtatataagcacttcccgattccacttatcaaccgacttgagaagcactatcttgacatcaacaccgtcttagagaagtggcaaaaatctattgtggaggagctttgtgcctgggtggagaaatttatcaatgtaaaggcacaccacttccaaaagaggcacaagtacagcccctctgatgtgttcataggatatcattcggacgcatgcgcctccgtggtgctccaggtgatcgagcgccagggtcccagggcattaacagaagagttgcatcagaaagtatctgaagaggctaaatcaattttgctcaactgtgccacgcccgacgccgtagtcagactgagcgcctatagcctggggggcttcgcagcagaatggctgagccaggagtatttccaccggcagcgccataatagcttcgccgacttcctgcaggcccaccttcatactgctgatcttgaaaggcatgccatcttcaccgagattaccaccttcagcaggctcctgacatcacacgattgtgagatcttagaatctgaggtcacgggcagagcccccaagccaaccctgctttggctccagcaattcgatacagagtactcattcttaaaggaggtgaggaattgcttgacaaacacagctaagtgcaagatattaattttccaaacggatttcgaagatggcatcagatccgctcaactcattgcaagcgctaaatattctgttataaacgaaatcaataagattagagaaaatgaggatcgaatttttgtgtactttatcacaaagctctcaagagtgggtagaggtacagcatacgtgggttttcatggagggttgtggcagtcggttcacatcgatgacctccgccggtctacgctcatggtctctgatgtcacaagattacaacacgtgacgatttcccagttatttgcacctggcgatctgccagagttaggtctcgaacacagggctgaagatggccacgaggaggctatggaaactgaggcaagtacgagcggcgaggtggcagaggtcgctgaggaggccatggaaactgaatccagcgaaaaggtcggaaaagagacaagtgagctcggcggatctgatgtgtcaatcttggacactaccaggctactgcgatcttgcgtccaaagtgccgtggggatgcttagggaccaaaacgaaagctgcactcgcaacatgagaagggtggtgttactgctgggcctcctcaacgaggacgacgcctgtcacgccagttttctgcgagtatctaagatgagacttagcgtgttcctgaaaaagcaggaggaatcgcagttccatccgctggaatggctggcgcgtgaggcttgcaatcaagacgccctgcaggaagcaggaaccttcagacacacactctggaaacgcgtgcagggcgccgtgacccccttactggcttcaatgattagtttcattgatcgggatggcaacctggagctgttgacgcgacccgacacccctccctgggctcgtgacctgtggatgttcatattctcagacacaatgttactgaatatcccactcgtgatgaacaacgaaaggcacaaaggcgagatggcctacattgtggttcagaatcacatgaatctgtcagagaacgcatcgaataatgtccctttctcctggaaaattaaagactatcttgaagaactgtgggtccaggctcagtatatcacggacgccgagggactacctaaaaaattcgttgacatttttcagcaaacacccctcggccgattcttagcccaattacatggcgaaccccagcaagaactattacagtgctacctgaaggattttatcctactgacaatgcgtgtgtcaacagaggaggagcttaagttcctgcagatggccctgtggagctgcactaggaagcttaaggccgcatcagaggcccctgaagaagaagtctctctgccatgggtgcatctggcttaccagagatttcggagcagactccagaatttttctagaattctgactatatacccacaggttctccacagtctcatggaagcccgctggaaccacgaactggccggttgcgaaatgacgctggatgcctttgctgccatggcatgtaccgagatgctgacccgcaacactctgaagccctctccccaggcatggctccagctcgtgaaaaatctaagtatgcccctggagttgatttgttctgacgaacatatgcaggggagcggctccctggcccaagccgtgatccgcgaggttagagctcagtggagtagaatattttctactgcactgtttgtcgagcacgtgctactcggaaccgagtcacgggtcccagaacttcagggactggttaccgagcacgtctttctgctcgataaatgtcttagagaaaatagcgacgtcaaaacccacggtccttttgaggctgtaatgagaactctctgcgagtgcaaggagacggctagcaaaactctatcacgcttcggaattcagccatgctcaatttgcctgggcgacgccaaagaccctgtctgtctgccttgtgaccacgtgcactgtctgcggtgtctaagagcatggttcgcatcggaacagatgatttgcccttactgtttgacggccttgcccgatgagttcagccccgccgtgtcacaggcccatcgtgaggcgatcgaaaaacatgctcgattcagacagatgtgcaactcgtttttcgttgacctggtaagcacaatatgtttcaaggataacgctccacctgagaaagaggtgatcgagtctctgcttagtttgctcttcgttcagaaaggccgactccgcgacgcggcccagaggcactgcgagcacacgaagtctttaagccccttcaatgacgtggtggataaaacccccgtgatccgtagcgtaatactcaagttacttttgaagtactcttttcacgacgtcaaagactacattcaagagtacctcacattactgaagaaaaaggctttcatcaccgaggacaagaccgagctatacatgctttttatcaactgtctcgaagatagtatccttgagaaaacatccgcctatagccggaatgacgaactgaatcatctcgaggaggagggccgattcctgaaagcatactcacctgcttccagaggcagggagcccgccaacgaggccagcgtggaatatcttcaggaggtcgccaggatcaggctctgcctggatcgtgccgcagattttttatcagagcccgagggaggtcccgaaatggcaaaggagaagcagtgttatctgcaacaggtgaaacaattctgtatccgtgtggaaaacgactggcaccgcgtctatttagttcgaaagctgagctcccagcgaggaatggagttcgtgcaaggactgtccaagccaggtagaccccaccagtgggtctttcctaaagacgtggtgaagcagcaagggctccgtcaggaccacccaggtcagatggaccgctatctggtctatggcgacgagtataaagcactgcgagatgccgttgccaaagcagttctggaatgcaaacctctcggcattaagacagccttaaaggcatgcaagactcctcagtcccagcagagcgcgtactttctgttaaccctctttcgggaggtggcaatcttgtaccggagtcacaatgcgtccctccatccgactcctgaacagtgtgaagctgtgtccaaatttatcggtgaatgcaagattttatcaccccccgacatttctagattcgccactagcctggttgacaactctgtgcctcttttaagagcaggtcccagtgactctaacctggacggcacagtaacagagatggccatccacgcggctgccgtgctgctatgtggccagaatgaactgttagaaccccttaagaacctcgccttttcacctgccaccatggcccatgcctttttgcccacaatgcccgaagacttgctcgcacaggcgaggcgatggaaaggcctggagagggttcactggtatacatgtcccaacggccacccctgctccgtaggagagtgcgggcgcccaatggaacagtccatatgcatcgactgtcatgcccccatcggaggaatcgatcataaaccacgtgatggcttccatctagtgaaggataaagccgacaggacacagactggccacgttctgggcaatccccagcgacgggatgttgttacttgcgacaggggacttcccccggtggtgttcctcctgatacgtctgctgactcaccttgcactgctcctaggcgcgtcccagtcatcccaggcactgataaacatcatcaagccgcccgtgagagatcccaaaggtttcctccaacagcatatcctcaaagatttggagcagctggctaaaatgctcggccattcagctgacgaaacgatcggggtcgtgcatctcgtgttgagaagacttctgcaggagcaacatcagctctcctcccgaaggctcttaaacttcgatactgagttatctacgaaagaaatgcgtaacaactgggaaaaagagatagccgcagttattagcccagaactagagcatctcgacaaaaccctgcccacgatgaataacctgatcagccaagacaagcgaatctcctccaatccagtagcaaaaattatctatggagaccctgtcacatttctcccccatcttccccggaagtccgtggttcactgctctaagatctggtcctgccgcaagaggatcactgtggagtatctccagcatatcgtcgaacagaagaacggaaaagagagagttcctattctctggcacttcctgcagaaggaagctgaattacgcctagtgaagttcctgcctgaaattcttgctctgcaaagggacctagtcaaacaattccagaacgtacagcaggtggagtatagcagcatccggggttttctgtccaaacactcaagcgatggcctcagacagctgctgcacaatcggattaccgtttttctatcgacgtggaataagctgaggaggtcactcgaaaccaatggtgagatcaatctgcctaaggactattgctccacagacctcgatttggacaccgagtttgagattctgctgccaaggcgacgcgggttgggcctctgtgcaacagccctagtgtcatacctgatccgattgcacaacgaaatcgtgtatgcagtggaaaaactgagtaaagagaataactcatactccgtcgatgcagcggaggttaccgagctgcacgtgataagctacgaggtcgaaagggaccttacacccctgatcctcagcaattgtcaatatcaggtggaggagggacgcgagacagtacaggagttcgatctcgagaagatccaaaggcagatcgttagtcgcttcctgcaggggaaaccaagattgtcactgaagggcattcccacgctggtctaccggcacgactggaactacgagcacctgtttatggacattaaaaataagatggctcaggactccctcccatccagcgtcatctccgctattagcggccaattacagtcttactccgatgcctgcgaggtgctttctgtcgtggaggtgactctgggatttctcagcaccgcaggcggggaccctaacatgcagctgaatgtctatacccaggatatcctgcagatgggagaccagacaattcacgtgttaaaagctctgaatcgctgccagcttaaacatacaatagctctctggcagttcttgagcgcccataagtcggagcagctgctgcgactgcataaagagccctttggcgaaatttcgtctagatacaaggccgacctgtcacccgaaaatgccaagcttttgagcacattcctcaaccaaaccggattggatgctttcctgttggaactgcacgagatgatcattctgaagctcaagaaccctcagacccagaccgaagagaggtttcgaccacagtggtctctgcgcgatactctagtatcttatatgcaaacaaaggagtcagagatcctacccgagatggcctcgcagtttcctgaagaaattcttctggcgtcatgtgtgtctgtctggaaaaccgccgccgttttgaagtggaacagggagatgcgttag

SEQ ID NO: 275293 - DNA, 9842 bp, Artificial Sequence
  derived and/or modified sequence
atggtgtgcgacggtgattgggagcattgctacctcccttctgccttttctcagcacaaagtttttgtaacaccgcaggccccattggaggccatccaggcctaccttgctggtcactatcgagtgccaaaacagacactatccgcggcagccgtatttaatgaccgcctttgcgtaggcattgtggccagcgagcgcgcaggcgttggcaaaagtctgtacgtgaaaagactgcacgataagatgaagatgcaactgaacgtgaaaaacgtgcctttaaagaccattaggctgatagatccccaggtcgatgagagccgcgtcctgggcgcattgttacctttcctggacgcacaatatcagaaggtacccgtcctgtttcatctcgacgtaaccagtagcgtgcaaactggcatctgggtttttctgttcaaactccttatcctccaatatctgatggatataaatggaaaaatgtggctgaggaacccttgtcacttatatatcgtcgaaatactggagcgcaggaccagcgtcccgtctcgtagcagctctgccttacgaacccgagtcccacaattttcattcttggacatcttccctaaagtgacatgccgtccgccaaaggaggtgatcgacatggagctctctgctcttcggagtgacactgaaccaggcatggatctctgggaattctgttcagagacatttcagagaccatatcagtacttgagaaggttcaatcagaaccaggacctggacacgttccagtaccaggagggcagtgtagaggggacacctgaagagtgcctgcaacattttctgtttcattgtggggtgataaatccaagctggtccgaactgcgaaattttgctaggttcctgaactaccaacttagggactgtgaggcctctcttttttgtaatccatccttcattggggacaccctccgcggatttaagaagttcgtggtcacctttatgatcttcatggccagggattttgctacaccatccctgcacacaagcgaccagagtcctgggaaacatatggtcactatggatggggtgagggaggaggacctcgcccctttctcccttcgcaagagatgggagtctgaaccacacccatacgtgttttttaatgacgaccacactaccatgaccttcatcgggttccaccttcagcccaacatcaacgggagcgtagacgctatctctcaccttacaggcaaggtcattaagcgagacgtcatgactcgggatctgtatcagggtttacttttgcagagagtgccctttaatgttgattttgacaaacttccgcgacataaaaaattggagagactgtgtctcacgctgggtatcccgcaggccaccgatcccgataaaacgtacgagctgactactgacaacatgttgaagatcctcgccatcgaaatgcgcttcaggtgtggaattcctgtgatcattatgggcgagactgggtgtggaaaaacacggctcatcaaattcctgagcgatttgagaaggggaggcaccaacgcagacaccattaaacttgtgaaggttcatgggggaaccacggcagatatgatctactcacgagtaagagaggccgaaaatgtggctttcgccaataaggatcagcatcaactggataccattctgttctttgacgaagctaacacaaccgaagctattagttgcattaaggaggtcctctgtgaccatatggtagatggacagccactggccgaggattccggcctccacataattgctgcatgtaatccataccgcaagcactctgaggaaatgatttgcaggcttgagtctgctggcctcgggtaccgtgtctctatggaggagactgcagaccgcttaggtagtattcctttgcgccaactggtgtatagggtgcatgccttgccaccgagcctgatccccctggtgtgggactttgggcagttgtccgatgttgccgagaagctttatatacaacaaattgtgcagcggctcgtggaaagcatctctttggacgagaatgggactagagttatcaccgaagtgctctgtgcaagtcagggctttatgcgtaagaccgaagacgaatgttccttcgtcagcctgagagatgtagaacgatgtgtaaaggtcttccggtggttccacgagcattctgctatgctgctggcccagcttaacgctttcttatcaaaatcaagcgtgtccaaaaaccatactgaacgcgaccctgtcctgtggagtctgatgcttgctatcggcgtgtgctaccacgctagtttggagaagaaagactcttatcgaaaagcaatcgcaaggtttttcccaaaaccgtatgacgattcaagactgctacttgacgaaatcaccagagcccaggacctgtttctggacggagtgccactccgcaaaacgatcgcaaaaaatctggcactgaaggagaacgtgttcatgatggtggtatgcatcgaactgaagatcccactgttcctcgtcggaaaacctggttctagcaaatcactggccaagaccatcgttgccgacgcgatgcagggccctgccgcatattccgatctcttcaggagcctgaaacaggttcatcttgtatcatttcagtgtagcccacattcaaccccacagggaatcatctcgaccttccggcaatgcgcccgtttccagcagggcaaggaccttcagcagtacgtcagcgtggtggtgttagacgaggtgggtcttgccgaagacagtccaaagatgcctctgaagactcttcatccactcctggaggatggctgcattgaggacgatcctgctccgcataagaaggtgggctttgtgggaattagcaattgggcactcgatccagccaagatgaacagaggtatctttgtgtcgaggggttcccccaatgaaaccgagcttatcgagtcagctaaagggatctgtagctctgacatcttagtacaggacagggtgcagggatatttcgcttcctttgccaaagcttacgaaacagtttgtaagcgccaagacaaggaattctttggcttaagagactactattctctcattaaaatggtgttcgctgcagcaaaagcctctaaccgaaaaccgtccccccaggatatcgctcaggccgtgcttcgcaatttttctggcaaagacgatatccaggccctggacatattcctggctaatctgcctgaggctaaatgctccgaggaagtctcacccatgcaacttattaagcagaacatctttggcccaagccagaaagtgccagggggagagcaggaggacgccgaaagtcggtaccttcttgtgctgacaaagaattacgtcgccctgcagattttgcagcagaccttcttcgaaggcgaccagcagcccgagatcatctttggcagcggctttcctaaggatcaagagtatacacagctctgccgtaacattaatagggtgaaaatctgcatggagacggggaagatggtgcttctgctcaatctccagaacctgtacgagagtctatacgacgcgctgaaccagtactacgtccatctgggtggacaaaagtacgtagacctgggcttgggcactcaccgtgtgaagtgcagggtgcatcctaactttaggcttattgtcatcgaggagaaggacgtcgtgtacaagcacttcccaattcccctcattaaccgcctggaaaagcattaccttgacataaatacagttcttgagaagtggcagaaatcgattgtggaagaactctgcgcctgggtagaaaagttcatcaacgttaaggcccatcacttccagaagaggcacaagtactcaccttccgatgttttcatcggataccactccgacgcctgcgcctctgtggtcctgcaggtgatagagcggcaaggcccacgggctctaacggaggaattgcaccagaaagtgagtgaggaggccaaatcaattctgctaaattgtgccacacctgacgccgttgtccgcctctctgcctattcgctcggcggatttgctgcagagtggctctcccaggagtatttccatcggcagcggcacaattcatttgctgactttctacaggcacatctgcacactgcggacctcgaacgacacgccatttttaccgagattacaaccttttctagactgctgacatcgcacgactgtgaaatcttggagagcgaagtcaccggccgtgcccctaagcctacactcctatggctgcaacaatttgacactgaatacagctttctgaaggaagtccggaattgcctaacgaacacagcgaaatgcaaaattctgatcttccagactgactttgaagacggcatcaggtctgcacagctgatcgcatctgctaaatattctgtgattaatgagattaacaagatccgggaaaatgaggacagaatttttgtatactttattactaagctttcccgagtcggtagaggaactgcgtacgtgggatttcacggaggtctctggcagtccgttcacatagatgacctgagacggtccactctgatggtgagtgatgtgacgcggttgcagcatgtgacaatttcacagctttttgctcctggggacctccccgagctgggactggagcaccgagcagaggatgggcacgaagaggccatggagaccgaggcctcaaccagtggcgaggtcgcagaggtggctgaggaagccatggaaacagaaagcagcgaaaaggtaggtaaagagacctctgaattaggtggaagcgatgtttctatcttagacaccacacggctgctccgctcttgtgtccagtctgccgtggggatgttgagggaccagaatgagtcctgcacccgcaacatgcgcagagtcgtcctcttacttggcttgctcaatgaggacgacgcttgccacgcctcattccttcgggtgagcaaaatgcgtttgtctgtcttcctgaaaaaacaggaggagtcccaatttcatcccttggagtggctggcacgcgaggcctgcaatcaggatgctttgcaagaggccggtacctttcggcacacactttggaagcgagtgcagggggcagttacaccactgttggctagtatgatcagcttcatagatcgggacggtaatcttgagttactaactcgccctgacactcctccatgggcccgtgatctctggatgtttatcttctccgataccatgctgttaaatatcccccttgttatgaataacgagaggcataagggcgagatggcgtacatcgtggtgcagaatcatatgaacctctcagagaacgcaagcaacaatgtacctttttcttggaaaattaaagattatctggaggaattgtgggtgcaggcacagtatatcactgacgcggaaggtctcccaaagaagttcgtggacatttttcaacagactcccctaggacggtttcttgctcagttacatggcgagccccagcaggagctcctgcaatgctacctgaaggatttcatccttctgacaatgagggtgtcaacggaagaggagctaaaattcctccaaatggccctttggtcatgtacacggaaacttaaagcagctagtgaagcgccagaagaggaggtcagcctcccttgggtccatctcgcttatcaaagattcagatctcggctgcagaactttagtcgtattctcacaatttatccacaggtgctacatagtctgatggaagcgaggtggaatcacgagttggcgggatgcgagatgaccctggatgcatttgcagctatggcttgtactgagatgctgacccggaataccctgaaaccttccccacaagcatggctccaactggtgaaaaatctgagcatgcctctggagctgatatgctcagatgagcacatgcagggttccgggtcattggctcaggcagtgatcagggaagtccgggctcagtggagccgaattttttcgacagccctgttcgtggaacacgtcctgctgggtaccgaatcaagagtgcccgagctgcagggcttggtgacagagcatgtatttctgctcgataagtgtttacgagagaattccgacgtgaagactcacggcccatttgaggcagttatgcgtacattgtgcgagtgcaaagagactgccagcaaaaccctgagtcgctttggcattcagccttgtagcatatgcctcggggatgccaaggatcccgtatgcctgccatgtgatcatgtccattgcctccgctgcttgcgcgcttggtttgcctcggaacagatgatctgtccctattgtcttacagcccttccagacgagttttcccctgctgtgtcccaggcccaccgcgaggctatagaaaagcacgccagattcagacaaatgtgcaactctttcttcgtagatctggtttctactatctgcttcaaggacaacgccccaccagagaaagaggtgatagaatctctgctgtctctgctgttcgtgcagaagggaagactgcgggatgctgcacaacgacactgtgagcacaccaaatctttgagcccattcaatgacgtggtcgacaaaacccccgtgatccgctccgtaatcctcaaactgttgctgaaatactcattccatgatgtgaaggactatattcaggagtacctcacactcctcaagaagaaagctttcatcacagaggataagactgagctttatatgctgttcattaattgtctggaggattctatcctcgagaagaccagtgcttattctagaaatgatgagctgaatcacctagaggaagagggacgctttctgaaggcttattctccagccagcaggggcagggaacccgctaatgaggcatctgtcgagtacctgcaggaggtggcacggatccgcctgtgcctggatcgagcagccgactttctttcagagcccgaggggggaccggagatggccaaggagaagcagtgctatctgcagcaggtcaaacagttttgcatcagggtggaaaacgattggcacagggtctatctggtgcgtaagctctcttcccagcgcggaatggaatttgttcagggactgagtaagcccggaaggccacaccagtgggtgtttcccaaagacgtagttaagcagcaggggctaagacaggatcacccgggtcagatggatcgatatttagtgtatggcgacgagtataaggctctgagagacgccgtggctaaagccgtgttggagtgtaaaccattggggatcaaaaccgccttgaaggcgtgtaagactccgcagtcccagcagtccgcatacttcctgctaacactgtttcgtgaggttgccattctgtatcggtcacataacgcgtccctgcaccctacccccgagcagtgtgaagctgtgtccaaatttattggggagtgcaagatcttatcgccaccagacatttcaagatttgccaccagcctggtggataatagcgtcccactgctgcgggcagggccaagcgattctaatctggacggaacagtaaccgagatggctatccacgcagcagccgtgctcctttgcggccagaatgaactgctcgaaccgctgaagaacctcgcctttagtccagccaccatggcgcatgcatttctgcccacaatgccggaggacctgttagcacaggccagaaggtggaaaggcctcgaaagggttcactggtacacctgtcccaacgggcatccttgcagtgtcggcgagtgcgggagacctatggagcaatccatctgcatcgactgccatgcacctatcggagggatcgatcacaagccgagggatggcttccacctcgtgaaggataaagccgatcgcactcagactggccacgtgctgggaaatccacaacgcagagatgtcgttacatgtgaccggggactgccgccagtggtatttctgcttatccggctcctcacacacctcgcccttcttctgggcgcaagtcagtccagccaggccctaataaatatcatcaagccccctgtcagagaccctaagggattccttcagcaacacatactgaaggacttggaacagctcgcaaagatgttaggccattctgccgatgaaaccatcggagtagtgcaccttgtcttgagacggcttcttcaggagcaacaccagctgagtagccggaggctgctaaattttgatactgaactgtccaccaaggaaatgaggaataactgggagaaagagatcgctgcagtcatttccccggagcttgaacacctggataagacacttccaacaatgaacaacttgatcagtcaggataaacgtatttcttctaatcctgtggctaagatcatttatggagaccctgtaacattcttacctcacctcccacgcaaaagtgtcgtccactgctctaagatctggtcctgcaggaagaggatcacggtggaatacctgcagcatatcgtggaacaaaagaacggcaaggagcgggttcccatcctgtggcactttctgcagaaggaggccgaactgcgtttagtgaagttcctgccagagattctagccctccagcgtgacctggtaaagcagtttcagaatgtacaacaggtggagtacagtagcatccgtggcttcctctccaagcactccagtgatgggctgcgacagctactgcacaacagaatcaccgtattcctcagcacatggaataagctcagaaggagtttggagacgaatggggaaattaatttaccaaaggattattgcagcacggatctcgacttggatacagaatttgaaattctgctgcctcgccgacgaggcctggggctgtgcgctacagccctggtgagctatctcattcgtctgcacaatgagatcgtatacgcggtggagaaattatccaaggaaaacaacagctattctgtggacgcagctgaagttaccgagttacacgtgatatcttacgaagtggagagggacctgacacccctgattttatctaactgtcaatatcaggtcgaggagggacgggaaaccgtccaagagttcgatctagagaaaattcagcgccagattgtttcgagattcctacaagggaaacctagactcagcctcaagggaatccccactctcgtttatcgacacgattggaactatgagcacctatttatggacatcaagaacaaaatggcccaggacagcctaccaagcagcgtgatctcggccattagcggtcaactccaatcctattctgacgcatgcgaggttctgagtgtcgtcgaggttaccctgggatttctctccaccgccggaggagacccgaatatgcagcttaacgtgtacactcaagacattttacagatgggtgatcaaaccatacatgttctcaaggctctgaacaggtgtcagctgaagcacactattgctctctggcaattcctgtcggctcataaatctgagcagctgctgcggctccacaaagaacccttcggtgaaatatcatctcggtataaggccgacctgagtccggagaacgctaaactgttaagcacattcttgaatcaaaccggactggacgcctttttgttagaactccatgagatgataatcctaaagttgaaaaacccccagacgcaaacggaagaaagatttcgcccacagtggagccttagggacacattggtctcctacatgcagactaaggagtctgaaatccttccagagatggcgtcccagttccctgaggaaattctgctagcgagctgtgtttccgtctggaagacggccgcagtcctcaagtggaatcgagaaatgcgtta

SEQ ID NO: 275294 - DNA, 15770 bp, Artificial Sequence
  derived and/or modified sequence
atggagtgcccctcctgccagcatgtcagtaaggaggagactccaaagttttgctcccagtgcggagagagactcccccctgctgctcccattgctgactccgaaaataataattcgacaatggccagcgcaagtgagggtgagatggagtgtggtcaggagctcaaggaagaaggcggtccatgtctttttccaggatctgattcttggcaagaaaaccccgaagagccctgttccaaggcctcatggaccgtccaggagggggcaacctcagaagttctcgttgatgctgcagtggatctgattagtgatgagtgggaagccgctaacgctatcccaagtaagcggagaaaacaggatgcagcccctttggaggccgcaagtgtgcccagcgctgattgtgagcaatcaaagaagaaaaagcgcaaaaaaaaaaagaaagggaataaaagtgccagctctgagctcgcttccctacctttaagccctgccagcccatgccaccttacattgctgtctaatccttggccacaggacactgcccttccgcactctcaggcccagcagagcggccctacaggccaaccaagtcaaccacctgggaccgccaccacgccactggaaggcgatggcttgtcagctcccaccgaggtcggagactcccccctacaagcccaggcccttggcgaagcaggcgtcgctacgggttcagaggcccagtcctcccctcagtttcaggatcacaccgaaggagaagatcaagacgcctccattccctcaggtggtaggggattgtcccaagaagggactggccctccaacctccgcaggcgagggccacagcagaacggaggatgctgctcaggagctgctcttaccagagtcaaagggagggtctagtgaacctggcacagagttgcagactacagaacagcaggcaggcgcatccgcaagtatggcagtcgacgctgtggctgagcctgctaatgcagtgaagggggcaggcaaggagatgaaagagaagacgcagcgcatgaagcagccacccgctactacccccccttttaaaacccattgccaagaagcagaaaccaaaactaaagacgagatggctgcggcagaggaaaaggtcggcaaaaatgagcagggtgagcccgaggatttgaagaagccagaggggaagaaccgttccgcggctgcggtgaaaaacgagaaggaacagaaaaatcaggaggctgatgtgcaggaggtgaaagccagcaccctgtccccaggaggtggcgtaacagtcttctttcatgcaataatcagcctgcactttccgtttaacccagatctccataaggttttcatcagaggcggagaggaatttggagaatccaaatgggattcaaacatctgtgaattgcattacactagggacctgggccacgaccgggttctcgtggaaggaatagtgtgcatctccaaaaaacatcttgataaatatattccttataaatacgtgatctataacggagagtcttttgagtatgagttcatctacaagcatcagcagaagaaaggagaatacgtcaaccgatgtctctttatcaagtcatccctcctgggcagcggcgattggcaccaatactatgacatcgtttacatgaagccacacggccgactccagaaagtaatgaatcacattacagacggccctcggaaagatttggtgaaggggaaacagattgccgctgctcttatgcttgattctactttcagcatactgcagacgtgggacaccattaatcttaactccttcttcacacagtttgagcagttttgtttcgtccttcaacaaccaatgatctatgaagggcaggcccaactctggaccgatctgcagtatagggagaaagaagtgaaacgatatctgtggcagcatctgaagaagcatgttgtccctttacccgacggcaagtcgacggactttctccctgttgattgcccagtgcggtccaaactgaagactggcttgatcgtgctgttcgtggtggagaagatcgaactactgcttgagggctctctcgattggctgtgccatctgctgacctctgacgcatcctctcccgatgagttccaccgcgatctaagccacatcctgggtatcccacaaagttggcggctttacctggtgaacctttgccagcggtgtatggacacaagaacctacacgtggctcggggcactgccggttctccactgctgcatggagctggcaccaagacacaaggatgcctggaggcagcctgaagacacatgggctgcactggaaggcctctcattttccccattccgtgagcagatgctggacactagctcactgctacagttcatgagagagaaacaacatctcctgtcaattgacgagcctctgttcagatcttggttctcacttcttcccttatctcacctggtgatgtacatggagaactttattgaacacctggggcgttttcccgcacatatcctagattgtctgtcaggcatatattataggcttccgggactggaacaggttcttaacactcaggatgtccaagatgtgcagaacgtacagaacattctggaaatgctgctgcggctcctggacacttatcgggataaaatacctgaggaagccctttcaccctcctacctcactgtttgcctgaagctgcacgaggccatctgttcttctaccaaactgctcaaattttacgaactcccagcactctcagccgagatagtgtgccgcatgattcgcctcttgtccctggtcgacagtgccggtcagcgagacgaaactgggaacaattctgtgcagacagtgtttcagggaacgctcgccgctacaaagagatggctccgcgaggtctttactaagaatatgctgacctccagcggagcctctttcacatatgtgaaggagatcgaggtgtggcggagactggtggaaatacaatttccagctgaacacggatggaaggagtccttactgggagacatggaatggcgactgacaaaggaggaacccctttctcagatcacagcttattgcaattcctgctgggacaccaagggtctcgaggatagcgttgccaagaccttcgaaaagtgtattatcgaggccgtgagctcagcgtgtcagagtcaaacgtccattctgcagggattctcttactctgatttaaggaagttcgggatcgttttaagcgcagtgatcacaaagtcttggcctcgaacagctgacaatttcaacgatattctgaaacacttacttacacttgcagacgtgaaacatgtctttagactgtgcggcacagatgaaaagatcctcgctaacgttactgaggacgcgaagcgtttgattgctgtcgcggatagcgttctgaccaaagtggtgggtgatctcctctcaggtacgattcttgtgggacaattagagctcatcatcaaacataagaatcagttcctggacatttggcagttgcgggagaaaagcctgagccctcaggacgagcagtgtgctgttgaggaggctctcgattggaggagagaagaattattactgctgaagaaggaaaagaggtgcgtcgacagtcttctgaagatgtgcggtaatgtcaaacacctgatacaagtcgacttcggtgtgctggctgtaaggcatagccaggacctctcatctaagagacttaatgatacagttactgttcggctgtctacttcaagcaattcgcagagggccactcactaccacctctcctcccaggtacaggagatggccggaaagattgatttacttagagactctcatatatttcagctcttctggcgagaggccgctgaaccattatcagaacctaaagaagatcaagaagcagctgagctgctctcagagcctgaggaagagagtgagcgccatatcctggaattagaggaggtgtatgactatttgtaccagccttcatacaggaaatttattaaactccaccaggacctgaagtccggtgaggtcaccctggctgaaattgacgtgatctttaaagattttgtcaacaagtatactgatctggatagtgaactgaaaattatgtgtacagtagaccatcaggaccaacgagactggatcaaggatcgagtggaacagatcaaggaataccaccatctgcaccaggcagtacacgccgcaaaggtgattctccaggtcaaggagagcctggggctaaacggggacttctccgttctgaacaccctactgaacttcacagacaatttcgacgactttagacgagagacactcgaccagatcaaccaggaactgatccaggcgaagaaactgctgcaggatatcagcgaggccagatgcaaaggcttgcaggcactgtctctgaggaaagaatttatttgctgggtccgggaagccctgggtgggatcaacgaactgaaagtgttcgtcgatttagcctccatttcagccggagagaatgacatcgatgtagatcgagttgcgtgcttccacgatgccgttcagggatacgcatcactgctctttaaactcgacccgagcgttgatttctctgcttttatgaagcacctcaaaaagctttggaaggccttagataaagatcagtacctaccacgtaagctctgtgattcggcgagaaatctggagtggctcaagactgtcaacgagtcccacggcagtgtcgagcgcagttctctgacactcgcaaccgccattaaccagaggggaatttatgtgatccaggctcccaagggtggtcagaagatatcacctgatacagtcctgcacttaattctccccgaaagcccgggaagtcatgaggaatctcgcgaatacagtttggaagaggtgaaagaactgctgaacaaattaatgcttatgtctggaaagaaggatcgcaacaataccgaagtggagcgtttctctgaggttttctgctccgttcagaggctctctcaagctttcatagacctccactcggctggtaacatgctgtttcgcacttggattgctatggcgtattgcagcccaaaacaaggcgtgagcctccaaatggacttcggcctggacttggtgactgagctgaaagagggcggtgatgtaaccgagctgctggcagccctgtgccggcagatggaacacttcctcgacagctggaagaggtttgtcacacaaaagcgcatggaacacttttatctgaacttttatacagctgaacagctagtgtaccttagtacggaactgaggaaacagccaccgagcgatgctgcacttacgatgcttagtttcattaaaagcaactgtacgttgagagacgttctgcgggcaagcgtggggtgcgggtccgaagctgcacggtaccggatgcggagagttatggaggaactgcccttgatgttgctgtctgaattctctctggtggataagctcaggattattatggaacagtccatgcggtgtctgcctgccttcttgccagattgcctggacttggaaactctcggtcactgcttggcacacctagccggtatggggggatctcctgtagagcggtgcctgccgaggggtctccaggtaggacagccaaacttggttgtgtgcggacattctgaggttctgcctgctgcacttgccgtgtatatgcagacccccagccaacccttaccgacctatgacgaggtgcttctgtgcaccccagccaccacatttgaagaggtggccctgctccttcgtcgctgtctgacacttgggtcgcttggacacaaggtctacagtctgctatttgctgaccagctttcatacgaagttgccagacaggcggaggaactctttcacaatctgtgcacccaacagcatagagaggactaccagctggtgatggtctgcgacggcgattgggaacactgttacttgccctcagctttttcacaacacaaggtgtttgttacaccccaggctccactggaagccattcaggcctacctcgctggccactaccgcgttcccaagcagaccctgagcgccgcagcagtgttcaatgacagattgtgcgtgggaattgtggcaagtgagagagccggagtgggcaagagcttgtacgtgaagcgactccatgacaaaatgaagatgcagctcaatgtgaaaaatgtccctctgaaaacaatccgtctgattgatccacaagtggatgaatctcgggtcttgggagctctacttccattccttgatgcccagtatcagaaagtcccggtgttattccatctcgatgtcacaagtagtgtacagacaggcatatgggttttcttgttcaagctgctgattctgcagtatcttatggatatcaatggtaagatgtggctacggaacccttgtcacctctacattgtagaaattctggaacgcagaacctctgtaccaagtcgttcgtcgtccgccctgaggactcgtgtgccccagttttcgttcctagatatctttcctaaggtgacatgtagacctcccaaggaggtgatagacatggagctgagcgccctgaggagcgatactgaacccggaatggacttgtgggagttctgctcggagaccttccagaggccatatcagtatctgaggaggttcaaccagaaccaggacctggacacctttcagtatcaggagggcagtgtggagggcacccccgaagagtgcctccagcattttctatttcattgcggagttattaacccctcatggtctgaactcagaaactttgctcggtttttaaactatcagctcagagactgcgaggcctcactcttttgtaaccctagttttattggcgacacacttagggggttcaaaaagttcgtggtcacgttcatgattttcatggcgagggatttcgctacccccagtcttcatacatctgaccagtcgcctggcaaacacatggtgactatggatggggttagagaagaggacttggctcccttttctctgcgtaagcgctgggagtccgagccacatccttacgtgttctttaatgatgaccatactaccatgaccttcatcggtttccatctccaacctaacatcaatgggagtgtagacgccatttctcatctcactgggaaggtgattaagcgcgacgtaatgacccgagacctctaccagggactgctgctgcagcgagtcccttttaatgtcgactttgataagctgccgcgacacaagaagctcgaaagactgtgccttactttgggcatcccgcaggcaaccgaccctgacaaaacatatgaactcactaccgataacatgctgaagatcctcgctatagagatgaggtttcgctgcggtatcccggtcatcatcatgggcgagacgggatgcgggaagacccggttaattaagttcctgtccgacctccgtcggggaggaacaaacgccgacaccattaaactggttaaggtacatggaggtaccacggccgacatgatctacagtagagttcgggaggctgagaatgtggctttcgccaataaggatcagcatcagctcgatactatactgttctttgatgaggcgaacacaacagaggccatttcatgtataaaagaagtgctttgtgatcatatggtggacggccagcctttggcggaggattccggcttgcatattattgccgcatgtaacccataccgtaaacattcggaagagatgatttgcaggttggaaagtgcaggcctggggtatcgcgtctccatggaggaaaccgccgacaggctgggaagcataccactccgacagctcgtatatagggtccatgctcttcccccatctctgatccctctggtttgggactttggacaactgtctgatgttgcggaaaagttatacattcaacagattgttcagagactcgtcgaaagtatttcacttgatgagaatgggactagagtcatcaccgaagttctgtgcgcctctcaggggttcatgcgtaagacagaagacgaatgctcctttgtttctctgagggatgtcgagcgctgcgtcaaagtctttcgctggttccatgaacacagtgctatgctgctcgctcagttgaacgcctttttatcaaagagtagcgtgtccaagaaccacacagagcgcgatcccgttctttggagcctcatgctggccataggcgtttgttatcacgcgtccctggaaaaaaaggattcttacagaaaagccattgcaagatttttccccaagccctacgacgactctagactactgctcgacgaaatcactcgcgcacaggacttatttctcgatggagtgcccctaaggaaaaccatcgcaaagaacctggcacttaaagaaaatgtattcatgatggtggtctgcatagagttaaagatcccgctgttcctggtgggaaaacccggatcaagcaagtcacttgccaagacaatcgtggctgacgcaatgcagggcccagccgcatacagtgacctgttccgtagtctaaagcaggtccatttggtctcgtttcagtgcagcccgcattccacgccacagggaattatcagtaccttcagacagtgcgcacgcttccaacagggtaaggatctacagcagtatgtgtccgtggtggtgcttgatgaggtaggcttggcagaagattccccgaagatgccgcttaagactctgcatcccctcctcgaggacggctgcattgaagatgatcccgcaccccataagaaggtgggctttgttggtatctcaaactgggctctcgatcccgctaagatgaaccgcggaatttttgtcagtcgcggtagtccaaatgaaacagaattgattgaaagtgcgaagggaatctgcagcagcgatattctggtgcaagatcgcgtccagggatactttgctagcttcgccaaggcatacgagactgtatgtaaacgccaggataaggaatttttcggacttagagactactacagcctgattaaaatggtgttcgcggctgctaaggcaagcaatagaaagccaagcccccaggacatcgctcaggctgtgttgcgaaacttctcaggcaaggatgacatccaggccctagatatctttcttgccaacctacctgaggccaaatgttctgaagaggtgtcaccgatgcaactgatcaagcagaacatcttcggcccttcccaaaaggttccagggggtgaacaggaggacgccgagagccgttatctgctggtcctgacaaagaattacgttgcccttcagatccttcaacaaactttttttgagggcgatcaacaacccgagattatatttgggagcgggttccccaaagaccaggagtacacccaactgtgcagaaatatcaacagggtgaagatctgcatggagactggaaaaatggtgttattgctgaatctgcaaaatctttacgagagtctatatgatgccctgaaccagtactacgtccacctgggcggacagaagtacgttgatttgggattggggacacatcgcgtgaagtgccgtgttcatccaaactttcgcttgatcgtgattgaggagaaggatgtggtgtataagcactttcctattcccctcattaaccggctggagaagcactaccttgacatcaataccgttttagaaaagtggcagaaaagcatagtggaggaactgtgcgcctgggtcgaaaagttcattaacgtaaaagcacatcactttcaaaagcggcataaatatagccctagcgacgtttttatcggctaccactccgatgcttgtgcctctgtcgtactgcaggtcatcgaacggcagggacccagggccttgacggaggaactgcaccagaaggtgagtgaagaggcgaaaagtatactgctaaactgtgccacgcccgacgccgtagtccggctgagcgcttactccctgggcggatttgctgccgaatggctgtctcaggagtacttccataggcagagacacaactctttcgccgatttcctacaggcacacctgcatacggcggatctggaaaggcacgccatttttaccgaaatcaccacattcagtagactgctgacatcccatgactgtgagattctcgagagtgaggttaccggacgcgcacccaagcccacactgctgtggctccagcaattcgatacagaatacagctttcttaaggaggtccgcaattgcctcacaaataccgcgaaatgcaagattttgattttccaaactgattttgaagatggcatcagaagtgcccagctgatcgcaagcgccaagtattcggtgataaatgagatcaataaaatacgtgagaatgaagacagaatcttcgtttactttatcaccaaactgagccgcgtgggccgtggaacagcttatgtcggcttccacggcggtctctggcagagcgtgcatattgacgacctcaggagatctactttaatggtctccgatgtgacccgactacagcatgttacaatctcccaacttttcgcacctggagacctgccggagcttgggctcgagcatcgagccgaagacggacatgaagaggcgatggagaccgaggcctccacctccggagaggtggcggaagtagccgaagaggcgatggagacggagtcttctgagaaagtggggaaggagacatccgaacttggaggatccgacgtgtcaattctcgataccaccaggctgttaagatcttgtgtgcagagcgctgtgggcatgcttcgggaccaaaacgagagttgcaccagaaacatgaggagggtcgtgttactgctgggcctgctgaacgaggatgatgcttgtcacgcttcctttctgagggtttccaaaatgagattgtccgtgttcctgaaaaagcaggaggagagccagttccatcccctggagtggctcgcacgggaggcttgcaaccaggacgccctgcaagaagctgggacgtttcgtcacaccctgtggaagagggtgcagggtgcagttactccactgctggccagcatgatcagcttcatcgaccgagatggcaatctggagctgttaaccagaccagacacgccgccttgggctagagacctttggatgtttattttctcagatacaatgctcctcaacattccacttgtgatgaacaatgagcggcacaaaggagaaatggcctacatcgtggttcagaaccatatgaacctgagcgaaaacgcaagcaacaacgtcccgttcagttggaaaatcaaagattacttagaggaactgtgggtgcaggctcaatacatcacggatgcggagggcttgccaaagaagtttgtggacattttccagcagactcctcttggacggttcctcgcacagttacatggagagccccagcaggaacttcttcaatgctaccttaaagactttattctgctgactatgcgggtgtcgaccgaggaggagctcaagtttctgcagatggctttatggtcctgtacaaggaagctgaaggctgcttctgaggcccctgaggaggaggtgtcccttccctgggtccacttggcctatcaaagattccgatcccggctccagaacttctctagaatcttgacgatttatccccaggttctgcactctttaatggaggccagatggaaccacgaattagccggttgtgagatgactctcgacgctttcgccgctatggcgtgcactgagatgctgacacggaataccctgaaaccatcccctcaggcctggcttcaactcgtgaagaatctgagcatgcccttagaacttatatgcagtgacgagcatatgcaaggatctgggagcctcgctcaagcagttatccgcgaagtgcgagctcagtggagtagaatcttctcaacggcgctgtttgttgagcatgtgctactgggcacagagtcccgagtacccgagctgcaaggcttagtgactgagcatgtgttcctgctggacaagtgtctacgtgaaaattccgatgtgaagacccatggaccctttgaggctgtgatgcggacgctgtgtgagtgtaaggagaccgcgagcaagaccttgagtcggtttggaattcagccatgtagtatctgcctcggcgatgctaaggatccagtgtgtctaccgtgcgaccatgtgcattgcctacgatgcctgcgagcttggtttgccagcgaacagatgatttgcccctattgtctcactgctctgccagatgaattcagcccggcagtgtcccaggcacacagagaagcgattgaaaaacacgccaggttccgacagatgtgcaattccttttttgtagacctggtgagcaccatctgctttaaggacaacgcacccccagaaaaagaagtgattgagtcgcttctctcccttctgttcgtgcagaagggtagactgagagatgcagcccagagacactgtgaacacactaagtccctgtctcccttcaacgatgtcgtagacaagaccccagtaattcgatccgtcatactgaaactcctactgaaatactcattccacgatgtcaaagactacatacaggaataccttaccctgttgaagaagaaagcatttataaccgaggacaagactgagctttacatgttgttcattaactgcctcgaggattcaatcttagaaaagacttcagcttactctaggaatgacgaactgaaccatttagaagaggaggggaggtttttgaaggcctactctcctgcgtcaagaggtcgcgagcccgctaacgaggcttcagtggagtatctccaggaggttgcacgaatcaggctctgtctggacagggccgctgactttctctctgaacctgagggaggcccagaaatggcaaaggaaaagcagtgctatctgcagcaggtgaaacagttttgcatccgtgtggaaaatgactggcaccgagtctacctggtgcggaaactgagctctcaacgcggaatggagttcgttcaagggttgtcaaagcccggtaggccgcatcaatgggtgtttccgaaggacgtcgtgaagcaacaggggcttcgccaggaccatcccggacaaatggaccgctacctggtatatggcgacgagtacaaagccctgagagacgctgtggctaaggccgttctggaatgcaaaccgttgggaatcaaaaccgctttgaaggcgtgcaaaactcctcaaagccagcagagcgcatacttcctgttaaccttattcagagaagttgcaattctgtatagatcacataacgcatcactgcacccaactccagagcagtgtgaagctgtgagtaaatttattggagaatgtaaaatcctctcgccgccagacatctcacggtttgccacgtctctcgttgacaacagtgtgccactgctgcgagccggtccaagtgacagcaatcttgacggaaccgtcactgagatggcgatccacgcagccgcagtccttttgtgtgggcagaacgaactgctggagccattgaagaaccttgcattctctccagccacgatggctcatgcattcttgccaacaatgcctgaggatttactggcccaggccaggcggtggaagggtctggaacgcgtccattggtacacatgccctaatggacatccatgttctgtgggcgaatgtggacgtccgatggaacagtcaatctgtatcgactgtcatgccccaatcggcggaattgatcacaaacctagggacgggtttcacttggttaaggacaaagccgacagaacacagaccgggcatgtgttaggaaatccccagcgaagggatgtagttacttgcgaccgaggcctgcctccagttgtctttctgctgattcgtctgctcacacaccttgcattgctgctgggcgctagccaaagctctcaggctctcatcaatatcattaagccccctgtacgagacccgaagggcttccttcagcagcacatcctcaaagatttggagcagttggcaaaaatgctgggccacagtgccgacgaaaccatcggagtggttcacctggtcctccggagattgctgcaggagcagcaccagctgagttctcggagactgcttaattttgatacagagctgtccaccaaggaaatgcgtaacaattgggagaaggagatagccgctgtgatcagtccagaacttgaacatttggataagacattgcctaccatgaataatctgatttctcaggataagaggatctctagtaacccagtggcaaagattatctacggcgacccagtgaccttcctgccccacctgccccgtaagtccgttgtgcattgctccaagatatggtcttgccgtaagcgcattactgtcgagtacctacagcacatcgtagagcagaaaaacgggaaggaaagggtgcccatactgtggcatttcctgcagaaggaggccgaactgcggctggtgaagtttctgcccgaaatacttgccctccaaagggacctggttaagcagtttcagaatgtgcagcaggttgagtatagttcgattcgtggctttttatccaaacactcgagcgacggcttaagacagctcctacataaccgcattaccgtgttcttgtcaacttggaacaaattaagacggagccttgaaactaatggggaaataaatttacccaaggactactgcagtacggacctcgatctggatacagagttcgaaatcctcctgccacggaggaggggactgggcctctgcgctacagctctcgtgtcgtacctgatccgactccataatgagatcgtgtacgcggtggagaaactgtccaaggagaacaactcgtactctgttgacgcagcagaggtgacagaactgcacgttattagttacgaggtagaacgggatcttaccccccttattctctctaattgccagtaccaagtagaggaagggcgagaaaccgtacaagagttcgacctggaaaagattcagagacagatcgtctcaaggtttctccaaggaaagcccagactcagtctcaagggcattcctactttagtgtacaggcatgattggaactatgagcacctgttcatggatattaagaataagatggctcaggacagtctgccgtcaagcgtgatctccgccatcagcggccagttgcagtcgtactctgacgcctgtgaggtgctcagcgtggtcgaagtgaccctcggctttttgtccaccgctgggggtgatccgaacatgcaactaaatgtgtatacacaagacattctccagatgggtgaccagactattcacgtgctcaaagccttaaaccgatgccagctgaaacacactatagctctttggcagttcctgtcagctcacaagtcagagcagctgcttaggctgcataaagagccttttggagaaattagttccaggtacaaggcagatctgtctcccgagaacgccaagctgctgtccaccttcctgaatcagacaggtttggacgccttcctgctggaactgcatgaaatgatcatactgaagctgaagaaccctcagacccagactgaagaaagattccgcccacagtggtctttgcgagacacacttgtctcttacatgcagacaaaagagtcagaaattctgccagagatggccagtcagttccctgaggaaattctcctggccagctgtgtgtctgtctggaagactgccgcagttctcaaatggaatcgtgagatgcgcta

SEQ ID NO: 275295 - DNA, 11651 bp, Artificial Sequence
  derived and/or modified sequence
atggtctgtgatggggactgggagcactgctacctcccctctgccttcagccagcacaaggtcttcgtcaccccccaggcacccctcgaggccatccaagcctacctggcaggtcactaccgggtcccgaagcagaccctgtcggcggcagccgtgttcaatgaccggctgtgtgttgggatcgtggcctcggagcgagcaggtgttggaaagtctctgtacgtgaagaggttgcacgacaaaatgaagatgcagttaaacgtgaaaaatgtgcctctgaaaacaattcgactgatcgaccctcaggtggatgagagccgagtcctgggcgccctgctgcccttcctggatgcgcagtatcagaaggtccccgtgctctttcacctggacgtgacctcctcagtgcagactggaatttgggtgtttcttttcaagctcctcattttacaatacttaatggatataaatgggaaaatgtggcttcggaacccctgccatttgtatatcgttgaaatcctggaaaggaggacgtcagtgccgtcgaggagctcttcagcgctgcgtacacgtgtaccccagttcagttttcttgacatcttcccaaaagtcacctgcaggcctcccaaagaggtgatagacatggagctgagtgccctgaggagtgacacagagcctgggatggatctgtgggagttctgcagcgaaactttccaaagaccttaccagtatttaagacgattcaatcaaaaccaagacctagacacgtttcagtatcaagaaggctctgtcgaaggcaccccggaggaatgcctccagcatttcctgtttcactgcggggtaataaacccatcctggtcagagcttcggaactttgctcggttcctgaattatcagctcagagattgtgaggcctctctcttctgcaatccgagttttattggcgacacactgaggggcttcaagaagttcgtggtgaccttcatgatctttatggcaagagattttgccacaccatcactccacacctctgaccaaagcccggggaagcacatggtcaccatggatggggttagggaagaagatctagcgcccttctccctccggaagaggtgggagtcggagcctcacccatacgttttcttcaatgacgaccacacaaccatgacattcatcggcttccatctgcagcccaacatcaacggcagtgtcgatgccatcagtcacttgactgggaaggtcatcaagagagacgtcatgaccagggacctgtaccagggcctgctgctccagagggtgcccttcaatgtcgactttgataaactgcccagacacaagaaacttgagaggctctgcctgaccttagggatcccccaggccaccgaccccgacaaaacgtatgagctcacaaccgacaatatgcttaaaatccttgccatcgagatgcggttccggtgtgggatcccggttatcatcatgggagaaactggctgtgggaaaaccaggcttattaaattccttagcgacctgcggcgtggtggtaccaatgctgacaccataaagctggtcaaggtgcacggaggaacaactgcagacatgatctactccagagtcagggaggctgaaaatgtggccttcgccaataaggaccaacatcagttggacaccatcttgttttttgatgaagccaacacaacggaagctataagctgtatcaaagaagtcctgtgtgatcatatggtggatggccagcctctggctgaggactctggcctgcatattatagctgcctgcaatccataccggaagcactctgaggagatgatctgccgtttggagtcagctggtttgggctacagggttagtatggaggagacggccgacaggctgggctccattcctctgaggcagctggtataccgggtccatgctctgcccccgagcctgattcctctggtgtgggactttggacaactgagtgacgttgctgaaaagctctacatccagcagattgtccagagactggttgagtccatcagcctagatgaaaacgggactcgcgtgatcacagaagtcctctgcgcctctcagggtttcatgaggaaaacagaagatgagtgcagctttgtcagcctcagggacgtggagcgctgtgtgaaagttttcaggtggttccacgagcacagcgcgatgctcttagcgcagctgaatgcctttctctccaagtccagcgtcagcaaaaatcacaccgagagagatcccgtcctctggtcgttgatgctggccatcggggtgtgttaccatgcctctttagaaaagaaagactcatatcggaaagccatcgccaggttctttccgaaaccgtatgacgacagcaggctgcttctggatgaaataacacgggcacaggatctttttctggacggcgtacctctgaggaaaaccatcgccaagaacttggccttgaaggagaacgtcttcatgatggtcgtctgcatcgagctgaagattcccctcttcctggtggggaagcccggcagctccaagtctctcgccaagaccatcgtggcagacgccatgcagggcccggctgcctactcagatctcttccgcagcctgaagcaggtccacctggtgtccttccagtgcagcccgcactccaccccacagggcatcatcagcaccttccggcagtgcgcccgctttcagcaggggaaggacctgcagcagtacgtctctgtggtggtgttagatgaggtggggctggcggaagactcacccaaaatgcccctgaagactctgcacccgctgctggaagacggatgcattgaagacgatcccgccccccacaaaaaggtcggcttcgtgggcatctccaactgggcccttgaccctgccaagatgaaccggggcatttttgtgtcacgtggcagccccaacgagacagagctcatagagagcgccaagggcatctgctcctcagacatcctcgtccaggaccgagtccaagggtactttgcgtcctttgccaaagcctacgaaacggtgtgtaagcgccaggacaaggaattcttcgggcttcgtgactactacagcctcatcaaaatggtctttgctgcagcaaaggcttcaaatagaaagccttccccgcaagacattgcacaggctgtccttaggaacttcagtggcaaggatgacatccaagctttggacatctttctggccaatttgcccgaggccaagtgctcagaggaagtcagccccatgcagctgatcaaacagaacatctttgggccttctcagaaggtgccgggtggagagcaggaagatgctgagtcccgctacttactcgtgctgaccaaaaactacgtggcactgcagatcctgcagcagacattcttcgagggggaccagcagccggagattatttttggttctggtttccccaaggaccaagagtacacccagctctgcagaaacatcaatcgtgtgaagatctgcatggaaacaggcaagatggtgttgcttctcaacctgcagaacctctacgagagcctctacgacgcactcaaccagtactacgtccacctcggcggccagaagtacgtggacctcggtctggggacccaccgcgtcaaatgtcgggttcaccccaacttccgcctgattgtcattgaagagaaagacgtcgtgtacaaacactttcccatccccctcattaaccggctggagaagcactatctggatatcaacacggtgctggagaaatggcagaagagcatcgtggaggagctctgtgcgtgggtggagaagttcatcaatgtcaaagcacatcatttccagaagaggcacaaatacagcccctctgacgtcttcatcggctaccactcggacgcctgcgcgtctgtggtgctgcaggtcatagagaggcagggtccccgggccttgacggaggaacttcaccagaaggtgtctgaggaggccaaatcgatcctgctgaactgcgctacgcccgatgccgtggtccggctgagcgcctactcgctgggcgggttcgcagcggagtggctgtcgcaggagtactttcacagacagaggcacaactcctttgcagatttccttcaggcacacctgcacacggcagacctggagcgccacgccatcttcacagagatcaccactttctccaggctgctaacaagtcacgactgtgaaattttagaatcagaggtcacaggcagggctccgaaacccacactcctgtggctgcagcagtttgacaccgagtactcattcctcaaagaagtccgaaactgtttaacgaatacagccaaatgtaaaatcctcatttttcagacagattttgaagatggaatccgtagcgcccagctcattgcctcagctaagtattctgttataaatgaaatcaacaaaatacgagaaaatgaggaccgtatcttcgtctatttcatcacaaaactgtcccgggtgggaagaggaacagcctatgtgggcttccacggagggctgtggcagtctgtccacatcgatgacctccggagatccaccctcatggtttctgatgtgaccaggctgcagcatgtcaccatcagccagctgttcgcgcccggagacttgcctgagctgggcttggaacaccgggcggaagacggccatgaggaggcgatggagacggaggccagcacatcaggggaggtggcagaggtggcagaggaggccatggaaacagaaagttctgagaaggtgggaaaggaaacctctgaactcggaggcagtgatgtgtcgatcctggacaccaccaggctgctgagaagctgtgtgcagagcgccgtgggcatgctcagagaccagaacgagagctgcacgcgcaatatgcggagggtggtgctcctcctgggcctcttgaatgaggatgacgcgtgccacgcctctttcttgcgggtatccaagatgcgcctcagtgtctttttaaagaagcaagaagagagccagtttcaccctctggagtggttggcaagggaagcctgcaaccaggacgctctccaggaggcgggcacattcaggcacaccctctggaagcgggtccaaggtgctgtcacccctctgctggcgagcatgatatcattcatcgacagagacggcaacctagagttactgaccaggccagatactccgccctgggcaagagatctttggatgtttattttcagtgacacgatgcttctgaacattcctcttgtgatgaataatgaaagacataaaggtgagatggcctacatcgtggtgcagaaccacatgaacctttccgagaacgcttccaacaacgtccctttcagctggaaaatcaaggactatctggaggagctgtgggtccaggctcagtacatcacagacgcagaaggactgcccaagaagttcgtggacatctttcagcagactcctctgggcaggtttcttgcccagctccatggagagccgcagcaggaacttcttcagtgttacttgaaggatttcattctcttgaccatgcgtgtgtcaacggaggaggaattaaagtttctgcagatggctctgtggtcctgcactaggaaactgaaagcggcgtcagaagcgcccgaggaagaggtttccttaccgtgggtgcaccttgcctaccagcgtttcagaagccgtctgcagaacttttccagaatcctgaccatctaccctcaggttctccacagcctgatggaagcccgttggaaccatgagctggctggatgtgagatgaccctggacgcatttgccgcaatggcctgcacggagatgctgacaagaaacaccctgaagcccagtccccaggcgtggctacagttggtgaagaatctttccatgccgctggagctcatctgctccgatgagcacatgcaaggcagcgggagcctggcccaggctgtcatcagggaagtcagagcccagtggagtcggattttctccaccgcactcttcgtggagcacgtgctcctaggaaccgagagccgcgtccccgagttacaggggctggtgaccgagcacgtcttcttactagacaagtgtcttcgagagaactctgacgtgaagacgcacgggccttttgaggccgtgatgcgcactctctgtgaatgcaaggagacagccagcaagaccctcagcaggtttgggattcagccgtgctccatctgcctgggagatgcaaaggaccccgtctgtctgccctgcgaccacgtgcactgcctgcgctgcctcagggcctggtttgcctcagagcagatgatatgcccctactgtttaactgccttgccagacgaattctctccagctgtttcccaagcgcacagggaagccattgaaaagcatgcccgcttccggcagatgtgcaacagtttcttcgtagacctggtgtccaccatttgcttcaaggacaacgctccgcctgagaaggaagtgattgagagcctgctctctctcctcttcgtccaaaaggggcgcttaagagatgctgcccagagacactgtgaacacacaaaatctctctctccattcaatgatgttgtggataagactcctgtcatccgctcagtgatactgaaactgcttttgaagtacagctttcatgatgtaaaagattatattcaggaatatttgaccctgttaaaaaagaaagcattcataactgaagataaaactgaactgtacatgctcttcatcaactgcctggaggattcaatacttgagaagaccagtgcttactccagaaatgatgaactgaaccacctagaagaggaaggtcgtttccttaaggcatattctccagcaagccggggccgagagcctgccaacgaggcctcggttgaatacctgcaagaggtggcccggatccgcctctgcctcgacagagctgcagatttcctctcggagcctgagggaggcccagagatggccaaggagaagcagtgctacctgcagcaagtcaagcagttctgtatccgggtggagaacgactggcaccgggtgtacctggtgcggaagctcagcagccagcgggggatggagttcgtgcagggcctctccaagcccggccgcccgcaccagtgggtgtttcccaaggacgttgtcaagcagcaggggctgcggcaggaccacccaggccagatggataggtacctggtgtacggcgatgaatacaaggctctccgtgatgctgtggccaaagctgtcctcgagtgcaagccactgggcattaagactgctctgaaggcctgcaagaccccccaaagccagcagtcagcctacttcctgttaacactgtttagagaggtggctattttgtacagatcccacaatgcaagcctccaccccacgccagagcaatgtgaagctgtgagcaaattcattggcgaatgcaagatcctttcacctcctgatatcagccgttttgcaacatcgctcgtggacaattctgtgccattgttgagggcggggcctagtgacagcaaccttgatggaacggtgacagaaatggccattcatgctgcagccgtccttctgtgtggacagaatgaactcttggagcccctaaagaatctggccttctccccagccaccatggcgcatgcttttcttccaaccatgcctgaagacttgctggctcaagctcggaggtggaagggtctggagcgagtccactggtacacttgtcccaacggccatccttgctccgtgggagagtgtggcaggccgatggaacagagcatctgcattgactgccatgcgccgattggaggcattgaccacaaacctcgggacggctttcatctggtcaaagacaaggcagacagaacgcagaccggccacgtgctgggcaacccgcagcggagagacgtggtgacatgtgaccgagggctgcccccagtggtcttcctccttatccggctactcactcacttggctctgcttctgggagcgtcccagagttcccaggctctgataaacatcattaagcctccagtgagggatccaaaaggctttctgcagcagcacatcctgaaggacctggagcagttggccaagatgctgggacacagtgccgacgagaccatcggcgtggtccacctcgtcctgcgcaggcttctccaagagcagcaccagctctctagcagaaggcttttaaattttgacacagaattgtcaactaaagaaatgaggaacaactgggaaaaggaaatcgcagctgtgatttctcctgaactggagcatctagataaaacccttcccaccatgaataatctcatcagccaagataagcgtatcagctctaaccctgtggccaaaataatatatggtgacccagtgaccttcctgccccacctgccccggaaaagtgtggtccattgctctaagatttggagctgcaggaaaagaattacagttgagtacctccagcacattgtggaacagaaaaatggcaaagaaagagtgcccatcctctggcatttcctgcagaaggaagcagagctgaggctggtaaagttcctgcctgagattttggccttgcaaagggatctagtgaagcagttccagaacgtccagcaagttgaatacagctccatcagaggcttcctcagcaagcacagctcagatgggttgaggcagctgcttcacaacaggatcacagtctttctgtccacatggaacaaactgaggagatcgcttgagacgaacggtgagatcaacctacccaaagactactgcagcactgacttggatctggacactgagtttgagatcctcttgccacgccgacggggcctgggcctctgtgctaccgctctcgtcagctacttgattcgcctacacaatgaaattgtctacgccgtggaaaaactctccaaggaaaacaacagctattccgtggatgccgccgaggtcactgaactgcatgtcatcagttatgaagtggagcgggacctgactccactgattctctccaactgccagtaccaggtggaggagggcagagagaccgtgcaggagttcgatctggagaagattcagcggcagatcgtcagccgcttcctccagggcaagccccggctgagcctcaagggaatacccactctggtgtacagacacgactggaactatgaacatctctttatggacatcaagaacaaaatggcacaggactccctccccagctcggtcattagtgccatcagtggacagctgcagtcctacagcgatgcctgtgaagtgctgtctgtcgtagaagtcactctggggtttctgagcacagctggtggggatccaaacatgcagctgaatgtgtatactcaagacatcctgcaaatgggtgatcagacgattcacgtgttaaaggccttaaacagatgccagttaaaacacaccattgccctctggcagttcctgtctgctcataagtctgaacagctgctgcggctgcacaaagagccatttggggaaatcagttcaaggtacaaagcggatctgagcccggaaaatgctaagctcctcagcacattcctaaatcagactggcctagacgccttcctgctagagctgcacgaaatgataatcttgaaactaaagaacccccaaacccaaaccgaggagcgcttccgccctcagtggagcctgagagacactctcgtaagttacatgcaaactaaagaaagtgaaattcttcctgaaatggcatctcagttcccagaagagatactgctcgccagctgtgtctcagtgtggaaaacagctgctgtgctgaaatggaatcgagaaatgagatagaattatttcctcagctatctttggatgactttggagagaagactcctctctcctcgtctgcggcgtggacttgatcatggactggtgcctttgcattcagaaggagagctgtcagcgtagcaccgaattcaagaccaaggcgtgctacctgagctgacagctttttgaaagccgagctgtttctgaaccatgtacatacatgttctgaaactttctcatcattttatgagtactgttcattgagagatgacaatgaagattagatgaaattggaaataaaccaacattgtttacattccaggagacttgtagctcagccacacacgcagtaatgacctgtgcccgttcgcctctggcactgcccacccctctttttttttttcttctaattctgtactcacaaaagagaatctcattttcttctttcttccattcccttaaattctgagtactgtacatatatttctgggttcccacgatgatgtgaaaaactaccagactgttttttgtcttctcacaaagacaagaaaaatcagggcattttgtgagtgccttaagatcaaactaacaagatctgaccctctcccctcacagtgagccactgccccacttcagagggtaagagccaaaagcctcattgtgaaaggcactggacttggaccagggacaccatcagggccttggttttctcacgcataaaatggagagtggattaatcgccaaagattcttctgatctgacattttgaaattgtgagagaaactagatgactgtaaacttggtcacaggcctggttctggcagttctttgcggacttttttctagcattatgccaaataaacatgcagtctcagtgtgctctcgcatgtatgaatatctagtcctttctgtggttctcagccaagacataaaaactaggactcagagcacatacaaaaccagttatgtttcggaaagagggaaaagagtccccgagcccggatcttgtgctgcttttctcactgacgtgttgccttttttctttacaaaatctgctttgatacttaggacctctctggactaatttctcttcctagacagctcagcacagctattgatatgttagaggcagtatccttaatattcattctaaatgagttaacgacttaacttgaaattgggcctaaggagtgagaactacaaaaatacaaaatgcttgtccaggactcagccatgcacaccttgagcagcgccggcaggaggcacggaaggaactgtgctccgttctcctcactgtcatggtgccaccagtgtctgatgaagggcagagtgacccagactgcaggcagtaactgacttcacacagtccctggcatttagtcatctgtgattgttttatcactctggactgtgcagagccacctgccaccgagatctgcattccgactgcctatgaacgggtgtgggggccgggggctggcttgctgaagtcttcaacttgcactcggagctcctttgatacctcagagctggctgtcaggtggcagctcacacccagactcactggccacacctcagcagggggggagtcgagtgtcagtctctttctgtgaaggctttttttttcctttggcctgggaatttttcccatttttatgaaggggttttaaattgtttcattttgtgtgctgtgcttcaaagccttaactgtcaaatcttgcattatcttgtttgtacagaaatatactggcctagcagaggcaaaaaaaaaaaaaatgaattttattttacttgtcacacctgtcttaataaactggagttttgctgct

SEQ ID NO: 275296 - DNA, 17730 bp, Artificial Sequence
  derived and/or modified sequence
gacagcgcgcggcaggcggcgagctcgggggccgcagaaaatgaaactgaagccgtggtcacgtgacaggacatgtagtatatagcaggctgccagcgactcctgctcttgcttctggatctgcagggcagtcccagcaggacccatggagtgtccttcgtgccagcatgtctccaaggaggaaacccccaagttctgcagccagtgcggagagaggctgcctcctgcagcccccatagcagattctgagaacaataactccacaatggcgtcggcctcggagggtgaaatggagtgtgggcaggagctgaaggaggaagggggcccgtgcttgttcccgggctcagacagttggcaagaaaaccccgaggagccctgttccaaagcctcctggaccgtccaagaaggagctacatcagaggttttggtagatgctgctgtagacctcatatccgatgaatgggaagctgctaatgccatacccagcaagagaaggaagcaggatgcagccccgcttgaggccgccagcgtgccttctgcagactgtgagcagagcaaaaagaagaaaaggaagaagaaaaagaaggggaacaagtccgcttcctcagagctggcttccttgcccctttctcctgccagcccctgtcacctgactttgctttcaaacccgtggcctcaggacacagccctgccccacagccaagcccagcagagtggccccactggccagccgagccagcccccaggcacagccaccacgccactggagggtgacggcctctccgcgcccaccgaggttggcgacagccccctgcaggcccaggctttgggagaggcaggagtggccacaggaagtgaggctcagagcagcccgcaattccaggaccacacggaaggggaggaccaggacgcttccatcccctctgggggcagaggcctgtcccaggaggggaccggtccccccacctctgctggtgaaggccattctaggactgaagatgctgcccaggagctcctgttgcctgagtcaaaaggaggcagctctgagcccgggacagaactgcagaccaccgagcaacaggcaggggcctcagcctctatggcagttgatgctgtagctgagccagccaatgcagttaaaggggccgggaaggaaatgaaagagaagacccagagaatgaaacagccaccagcaaccactcctcctttcaaaacacactgccaggaagctgagaccaagaccaaggacgagatggctgctgctgaagaaaaagtcggtaagaatgaacaaggggagcctgaagacctcaagaagccagaggggaagaacagaagtgcagctgctgtgaaaaacgagaaggagcaaaaaaaccaggaagcagatgtccaggaagtgaaggcaagcacgctgagcccgggtggaggagtcaccgtgttcttccacgccatcatctctcttcatttcccattcaatcctgacctccataaagtcttcatcagaggaggagaagaatttggggagtcaaaatgggacagcaatatctgtgagctgcactacaccagagacttgggtcatgaccgcgttcttgttgaaggcattgtctgcatttccaagaagcacctagataaatacattccttacaagtacgtcatttataatggggaatcttttgagtatgagttcatttacaagcaccagcagaagaagggcgagtacgtcaaccgctgtctgttcataaaatcttcacttctgggctcaggagactggcatcagtactatgacatagtttatatgaagcctcatgggagactccagaaagtcatgaaccacatcacagacgggccgaggaaggacctggtgaaggggaagcagattgccgctgcgctcatgctggacagcaccttcagcatcctgcagacctgggacaccatcaacctgaacagcttcttcacccagttcgagcagttttgctttgtcctgcaacagcctatgatttatgaaggacaggcacagctgtggaccgatttgcagtacagggagaaagaggtgaagagatacctgtggcaacatctgaaaaaacacgtggtaccattgccggacggaaaaagcacggactttttgcctgtggactgcccagtgaggagtaaactgaaaacaggcctgattgtcctttttgtagtggaaaaaattgagcttttattagaaggcagcctggactggttgtgtcacctcctaacctcagatgccagctcaccagatgagtttcaccgtgacctaagccacatccttgggatacctcagagctggcggctgtacctggtgaacctgtgccaaagatgcatggacacaaggacgtacacctggctgggcgccctgcctgtcctgcactgctgtatggagctggccccgcggcacaaggatgcctggagacagcctgaggacacctgggccgctctggagggactctccttctcaccgttccgggaacaaatgctagatacgagttccctacttcagtttatgagagagaagcagcatttgctgagcatagacgagcctctcttccggtcctggtttagtctgctacctctgagtcacctggttatgtatatggaaaacttcattgagcacctgggtcgttttcctgctcatatcctggactgtctttcagggatttactaccggcttccgggacttgagcaagtcttgaatacgcaggatgttcaggatgttcagaacgttcagaacattttagaaatgctgttgcgactcctggacacttaccgggacaagattcccgaggaggccttgtcaccatcctacctgactgtgtgtctgaaactgcatgaagccatctgcagcagcacaaagctacttaagttttacgagctgccagccttatctgccgagattgtctgcagaatgattagacttctatctctggtggattctgcaggacagagagatgaaactggaaataattcagtccaaacagtcttccaagggacccttgctgctacgaaaaggtggctccgagaagtttttacaaagaacatgctcacatcttcaggtgcctcattcacatacgtcaaggaaattgaggtctggaggcggctggtggaaatccaattccccgcggagcatggctggaaggagtcgttgctgggagacatggaatggaggctcacaaaggaggaacccctctcccagatcactgcctactgcaatagttgctgggacaccaaaggcttagaggacagtgtggccaagaccttcgagaaatgcatcattgaagccgtgagctcagcctgccagtctcagaccagtatccttcaggggttctcttactctgatttgcggaaatttggcatcgtcttgtctgctgtgatcactaagtcctggcctaggaccgcggacaacttcaatgacattttaaagcatctgctcacgttggcagatgtcaagcacgtcttcagattgtgtggaaccgacgagaaaatactagcaaatgtcacagaggatgccaagaggctgatagctgttgccgactctgtgttgacgaaagttgttggtgacctcctaagtggcacgattttagttggacaactggagctgattataaagcacaagaatcagtttcttgacatctggcaactgagggaaaaaagtctttcaccccaggatgaacaatgtgctgtggaggaagcactggattggagaagggaggaactgttacttctaaagaaagagaaaagatgtgttgatagtctcctgaagatgtgtgggaacgtgaaacatctgatacaagtggactttggagtgcttgcagtaagacactcacaagacctcagcagtaaaagattaaatgacaccgtgacagtgagactgtccacctcctcgaactcgcagagggcaacgcattaccacctgagctcccaggtccaagaaatggctgggaagatagacttgctcagagacagccacatcttccagctcttctggcgggaagccgcagagccgctgagtgagcctaaggaggaccaggaagccgcagagttgctgagtgagcccgaagaagaatcagaaaggcacatccttgagcttgaagaggtgtatgactatttgtatcagccttcttacagaaagttcattaagttgcaccaggatctaaagtcaggagaggtcacccttgcagagattgatgtcatcttcaaggactttgtgaataaatacacggacctggattcagaacttaagatcatgtgcaccgtggaccaccaggaccaaagagattggatcaaggaccgagtcgaacagatcaaggaataccatcacctgcaccaggctgtccacgcagccaaggtcatcttgcaggtcaaagagagcctgggactgaacggtgacttcagtgttctcaacactttactaaattttactgataacttcgacgactttcgccgtgaaacactggaccagatcaaccaggagctcatccaggccaaaaagctgctccaggacatcagcgaggcccggtgcaaggggctgcaggctctgtccctgagaaaggagttcatctgctgggtccgggaggctcttggaggcatcaatgagctgaaggtgtttgtggacctggcctccatctcagcgggggagaatgacattgatgtggaccgggtggcctgcttccatgacgctgtgcagggctacgcatccctgctatttaagctggaccccagcgtggacttcagtgcattcatgaagcatctgaaaaagctgtggaaggctctggataaggaccagtacctgcccaggaaactgtgtgactccgccaggaacttggaatggctgaagactgtgaatgagagtcatgggtctgtggaacgctcatccctgaccctggccacggccatcaaccaaagaggcatctatgtgatccaggcgcccaaaggtggccaaaagatttccccagacacggttctgcacttgatccttcctgagagccctggcagccacgaggagtcacgagagtactctttagaggaggtgaaggagcttttgaacaagttgatgctgatgtctggcaagaaggatcgtaacaacacggaagtggagaggttttcagaggtcttctgcagtgtgcagaggctcagccaggccttcatcgacctgcactctgctgggaatatgctgttcaggacgtggatcgccatggcctactgctcccccaagcagggtgtgtccctccaaatggactttggcttggacctggtgacggagcttaaagaaggtggagatgtcactgagctgctggcagccctctgcaggcagatggagcacttccttgacagctggaagagatttgtgacccagaagcgaatggagcacttttacctgaacttctacacggcagagcagctggtttacctgagcactgagctcaggaagcagcccccgagtgatgccgccctaacgatgctatccttcatcaaaagcaactgcaccctgagggatgtcttaagggcctctgtggggtgtgggagtgaggccgccaggtaccgcatgaggagagtcatggaagagctcccgctgatgctcttatcagagttcagcctggtggacaagctgaggatcatcatggagcagtccatgaggtgccttcctgccttcctgcccgactgcctcgacctagagacccttggccactgtctggctcacctggcagggatgggtgggtctcccgtggagcgttgtctcccgagaggtctgcaggtcggccagcccaacctcgtcgtctgtggccactccgaggtgttgccagccgccctggctgtctacatgcaaaccccaagccagcccctgcccacttacgatgaggtgctgctctgcaccccggcaaccacctttgaggaggtggcactgttgctgcgccgctgcctgaccctgggctccctggggcacaaggtctacagcctgctgttcgcagatcagctgagctacgaggtggcacgccaagcggaggagcttttccacaatctgtgcacgcagcagcaccgagaagactaccagctcgtcatggtctgtgatggggactgggagcactgctacctcccctctgccttcagccagcacaaggtcttcgtcaccccccaggcacccctcgaggccatccaagcctacctggcaggtcactaccgggtcccgaagcagaccctgtcggcggcagccgtgttcaatgaccggctgtgtgttgggatcgtggcctcggagcgagcaggtgttggaaagtctctgtacgtgaagaggttgcacgacaaaatgaagatgcagttaaacgtgaaaaatgtgcctctgaaaacaattcgactgatcgaccctcaggtggatgagagccgagtcctgggcgccctgctgcccttcctggatgcgcagtatcagaaggtccccgtgctctttcacctggacgtgacctcctcagtgcagactggaatttgggtgtttcttttcaagctcctcattttacaatacttaatggatataaatgggaaaatgtggcttcggaacccctgccatttgtatatcgttgaaatcctggaaaggaggacgtcagtgccgtcgaggagctcttcagcgctgcgtacacgtgtaccccagttcagttttcttgacatcttcccaaaagtcacctgcaggcctcccaaagaggtgatagacatggagctgagtgccctgaggagtgacacagagcctgggatggatctgtgggagttctgcagcgaaactttccaaagaccttaccagtatttaagacgattcaatcaaaaccaagacctagacacgtttcagtatcaagaaggctctgtcgaaggcaccccggaggaatgcctccagcatttcctgtttcactgcggggtaataaacccatcctggtcagagcttcggaactttgctcggttcctgaattatcagctcagagattgtgaggcctctctcttctgcaatccgagttttattggcgacacactgaggggcttcaagaagttcgtggtgaccttcatgatctttatggcaagagattttgccacaccatcactccacacctctgaccaaagcccggggaagcacatggtcaccatggatggggttagggaagaagatctagcgcccttctccctccggaagaggtgggagtcggagcctcacccatacgttttcttcaatgacgaccacacaaccatgacattcatcggcttccatctgcagcccaacatcaacggcagtgtcgatgccatcagtcacttgactgggaaggtcatcaagagagacgtcatgaccagggacctgtaccagggcctgctgctccagagggtgcccttcaatgtcgactttgataaactgcccagacacaagaaacttgagaggctctgcctgaccttagggatcccccaggccaccgaccccgacaaaacgtatgagctcacaaccgacaatatgcttaaaatccttgccatcgagatgcggttccggtgtgggatcccggttatcatcatgggagaaactggctgtgggaaaaccaggcttattaaattccttagcgacctgcggcgtggtggtaccaatgctgacaccataaagctggtcaaggtgcacggaggaacaactgcagacatgatctactccagagtcagggaggctgaaaatgtggccttcgccaataaggaccaacatcagttggacaccatcttgttttttgatgaagccaacacaacggaagctataagctgtatcaaagaagtcctgtgtgatcatatggtggatggccagcctctggctgaggactctggcctgcatattatagctgcctgcaatccataccggaagcactctgaggagatgatctgccgtttggagtcagctggtttgggctacagggttagtatggaggagacggccgacaggctgggctccattcctctgaggcagctggtataccgggtccatgctctgcccccgagcctgattcctctggtgtgggactttggacaactgagtgacgttgctgaaaagctctacatccagcagattgtccagagactggttgagtccatcagcctagatgaaaacgggactcgcgtgatcacagaagtcctctgcgcctctcagggtttcatgaggaaaacagaagatgagtgcagctttgtcagcctcagggacgtggagcgctgtgtgaaagttttcaggtggttccacgagcacagcgcgatgctcttagcgcagctgaatgcctttctctccaagtccagcgtcagcaaaaatcacaccgagagagatcccgtcctctggtcgttgatgctggccatcggggtgtgttaccatgcctctttagaaaagaaagactcatatcggaaagccatcgccaggttctttccgaaaccgtatgacgacagcaggctgcttctggatgaaataacacgggcacaggatctttttctggacggcgtacctctgaggaaaaccatcgccaagaacttggccttgaaggagaacgtcttcatgatggtcgtctgcatcgagctgaagattcccctcttcctggtggggaagcccggcagctccaagtctctcgccaagaccatcgtggcagacgccatgcagggcccggctgcctactcagatctcttccgcagcctgaagcaggtccacctggtgtccttccagtgcagcccgcactccaccccacagggcatcatcagcaccttccggcagtgcgcccgctttcagcaggggaaggacctgcagcagtacgtctctgtggtggtgttagatgaggtggggctggcggaagactcacccaaaatgcccctgaagactctgcacccgctgctggaagacggatgcattgaagacgatcccgccccccacaaaaaggtcggcttcgtgggcatctccaactgggcccttgaccctgccaagatgaaccggggcatttttgtgtcacgtggcagccccaacgagacagagctcatagagagcgccaagggcatctgctcctcagacatcctcgtccaggaccgagtccaagggtactttgcgtcctttgccaaagcctacgaaacggtgtgtaagcgccaggacaaggaattcttcgggcttcgtgactactacagcctcatcaaaatggtctttgctgcagcaaaggcttcaaatagaaagccttccccgcaagacattgcacaggctgtccttaggaacttcagtggcaaggatgacatccaagctttggacatctttctggccaatttgcccgaggccaagtgctcagaggaagtcagccccatgcagctgatcaaacagaacatctttgggccttctcagaaggtgccgggtggagagcaggaagatgctgagtcccgctacttactcgtgctgaccaaaaactacgtggcactgcagatcctgcagcagacattcttcgagggggaccagcagccggagattatttttggttctggtttccccaaggaccaagagtacacccagctctgcagaaacatcaatcgtgtgaagatctgcatggaaacaggcaagatggtgttgcttctcaacctgcagaacctctacgagagcctctacgacgcactcaaccagtactacgtccacctcggcggccagaagtacgtggacctcggtctggggacccaccgcgtcaaatgtcgggttcaccccaacttccgcctgattgtcattgaagagaaagacgtcgtgtacaaacactttcccatccccctcattaaccggctggagaagcactatctggatatcaacacggtgctggagaaatggcagaagagcatcgtggaggagctctgtgcgtgggtggagaagttcatcaatgtcaaagcacatcatttccagaagaggcacaaatacagcccctctgacgtcttcatcggctaccactcggacgcctgcgcgtctgtggtgctgcaggtcatagagaggcagggtccccgggccttgacggaggaacttcaccagaaggtgtctgaggaggccaaatcgatcctgctgaactgcgctacgcccgatgccgtggtccggctgagcgcctactcgctgggcgggttcgcagcggagtggctgtcgcaggagtactttcacagacagaggcacaactcctttgcagatttccttcaggcacacctgcacacggcagacctggagcgccacgccatcttcacagagatcaccactttctccaggctgctaacaagtcacgactgtgaaattttagaatcagaggtcacaggcagggctccgaaacccacactcctgtggctgcagcagtttgacaccgagtactcattcctcaaagaagtccgaaactgtttaacgaatacagccaaatgtaaaatcctcatttttcagacagattttgaagatggaatccgtagcgcccagctcattgcctcagctaagtattctgttataaatgaaatcaacaaaatacgagaaaatgaggaccgtatcttcgtctatttcatcacaaaactgtcccgggtgggaagaggaacagcctatgtgggcttccacggagggctgtggcagtctgtccacatcgatgacctccggagatccaccctcatggtttctgatgtgaccaggctgcagcatgtcaccatcagccagctgttcgcgcccggagacttgcctgagctgggcttggaacaccgggcggaagacggccatgaggaggcgatggagacggaggccagcacatcaggggaggtggcagaggtggcagaggaggccatggaaacagaaagttctgagaaggtgggaaaggaaacctctgaactcggaggcagtgatgtgtcgatcctggacaccaccaggctgctgagaagctgtgtgcagagcgccgtgggcatgctcagagaccagaacgagagctgcacgcgcaatatgcggagggtggtgctcctcctgggcctcttgaatgaggatgacgcgtgccacgcctctttcttgcgggtatccaagatgcgcctcagtgtctttttaaagaagcaagaagagagccagtttcaccctctggagtggttggcaagggaagcctgcaaccaggacgctctccaggaggcgggcacattcaggcacaccctctggaagcgggtccaaggtgctgtcacccctctgctggcgagcatgatatcattcatcgacagagacggcaacctagagttactgaccaggccagatactccgccctgggcaagagatctttggatgtttattttcagtgacacgatgcttctgaacattcctcttgtgatgaataatgaaagacataaaggtgagatggcctacatcgtggtgcagaaccacatgaacctttccgagaacgcttccaacaacgtccctttcagctggaaaatcaaggactatctggaggagctgtgggtccaggctcagtacatcacagacgcagaaggactgcccaagaagttcgtggacatctttcagcagactcctctgggcaggtttcttgcccagctccatggagagccgcagcaggaacttcttcagtgttacttgaaggatttcattctcttgaccatgcgtgtgtcaacggaggaggaattaaagtttctgcagatggctctgtggtcctgcactaggaaactgaaagcggcgtcagaagcgcccgaggaagaggtttccttaccgtgggtgcaccttgcctaccagcgtttcagaagccgtctgcagaacttttccagaatcctgaccatctaccctcaggttctccacagcctgatggaagcccgttggaaccatgagctggctggatgtgagatgaccctggacgcatttgccgcaatggcctgcacggagatgctgacaagaaacaccctgaagcccagtccccaggcgtggctacagttggtgaagaatctttccatgccgctggagctcatctgctccgatgagcacatgcaaggcagcgggagcctggcccaggctgtcatcagggaagtcagagcccagtggagtcggattttctccaccgcactcttcgtggagcacgtgctcctaggaaccgagagccgcgtccccgagttacaggggctggtgaccgagcacgtcttcttactagacaagtgtcttcgagagaactctgacgtgaagacgcacgggccttttgaggccgtgatgcgcactctctgtgaatgcaaggagacagccagcaagaccctcagcaggtttgggattcagccgtgctccatctgcctgggagatgcaaaggaccccgtctgtctgccctgcgaccacgtgcactgcctgcgctgcctcagggcctggtttgcctcagagcagatgatatgcccctactgtttaactgccttgccagacgaattctctccagctgtttcccaagcgcacagggaagccattgaaaagcatgcccgcttccggcagatgtgcaacagtttcttcgtagacctggtgtccaccatttgcttcaaggacaacgctccgcctgagaaggaagtgattgagagcctgctctctctcctcttcgtccaaaaggggcgcttaagagatgctgcccagagacactgtgaacacacaaaatctctctctccattcaatgatgttgtggataagactcctgtcatccgctcagtgatactgaaactgcttttgaagtacagctttcatgatgtaaaagattatattcaggaatatttgaccctgttaaaaaagaaagcattcataactgaagataaaactgaactgtacatgctcttcatcaactgcctggaggattcaatacttgagaagaccagtgcttactccagaaatgatgaactgaaccacctagaagaggaaggtcgtttccttaaggcatattctccagcaagccggggccgagagcctgccaacgaggcctcggttgaatacctgcaagaggtggcccggatccgcctctgcctcgacagagctgcagatttcctctcggagcctgagggaggcccagagatggccaaggagaagcagtgctacctgcagcaagtcaagcagttctgtatccgggtggagaacgactggcaccgggtgtacctggtgcggaagctcagcagccagcgggggatggagttcgtgcagggcctctccaagcccggccgcccgcaccagtgggtgtttcccaaggacgttgtcaagcagcaggggctgcggcaggaccacccaggccagatggataggtacctggtgtacggcgatgaatacaaggctctccgtgatgctgtggccaaagctgtcctcgagtgcaagccactgggcattaagactgctctgaaggcctgcaagaccccccaaagccagcagtcagcctacttcctgttaacactgtttagagaggtggctattttgtacagatcccacaatgcaagcctccaccccacgccagagcaatgtgaagctgtgagcaaattcattggcgaatgcaagatcctttcacctcctgatatcagccgttttgcaacatcgctcgtggacaattctgtgccattgttgagggcggggcctagtgacagcaaccttgatggaacggtgacagaaatggccattcatgctgcagccgtccttctgtgtggacagaatgaactcttggagcccctaaagaatctggccttctccccagccaccatggcgcatgcttttcttccaaccatgcctgaagacttgctggctcaagctcggaggtggaagggtctggagcgagtccactggtacacttgtcccaacggccatccttgctccgtgggagagtgtggcaggccgatggaacagagcatctgcattgactgccatgcgccgattggaggcattgaccacaaacctcgggacggctttcatctggtcaaagacaaggcagacagaacgcagaccggccacgtgctgggcaacccgcagcggagagacgtggtgacatgtgaccgagggctgcccccagtggtcttcctccttatccggctactcactcacttggctctgcttctgggagcgtcccagagttcccaggctctgataaacatcattaagcctccagtgagggatccaaaaggctttctgcagcagcacatcctgaaggacctggagcagttggccaagatgctgggacacagtgccgacgagaccatcggcgtggtccacctcgtcctgcgcaggcttctccaagagcagcaccagctctctagcagaaggcttttaaattttgacacagaattgtcaactaaagaaatgaggaacaactgggaaaaggaaatcgcagctgtgatttctcctgaactggagcatctagataaaacccttcccaccatgaataatctcatcagccaagataagcgtatcagctctaaccctgtggccaaaataatatatggtgacccagtgaccttcctgccccacctgccccggaaaagtgtggtccattgctctaagatttggagctgcaggaaaagaattacagttgagtacctccagcacattgtggaacagaaaaatggcaaagaaagagtgcccatcctctggcatttcctgcagaaggaagcagagctgaggctggtaaagttcctgcctgagattttggccttgcaaagggatctagtgaagcagttccagaacgtccagcaagttgaatacagctccatcagaggcttcctcagcaagcacagctcagatgggttgaggcagctgcttcacaacaggatcacagtctttctgtccacatggaacaaactgaggagatcgcttgagacgaacggtgagatcaacctacccaaagactactgcagcactgacttggatctggacactgagtttgagatcctcttgccacgccgacggggcctgggcctctgtgctaccgctctcgtcagctacttgattcgcctacacaatgaaattgtctacgccgtggaaaaactctccaaggaaaacaacagctattccgtggatgccgccgaggtcactgaactgcatgtcatcagttatgaagtggagcgggacctgactccactgattctctccaactgccagtaccaggtggaggagggcagagagaccgtgcaggagttcgatctggagaagattcagcggcagatcgtcagccgcttcctccagggcaagccccggctgagcctcaagggaatacccactctggtgtacagacacgactggaactatgaacatctctttatggacatcaagaacaaaatggcacaggactccctccccagctcggtcattagtgccatcagtggacagctgcagtcctacagcgatgcctgtgaagtgctgtctgtcgtagaagtcactctggggtttctgagcacagctggtggggatccaaacatgcagctgaatgtgtatactcaagacatcctgcaaatgggtgatcagacgattcacgtgttaaaggccttaaacagatgccagttaaaacacaccattgccctctggcagttcctgtctgctcataagtctgaacagctgctgcggctgcacaaagagccatttggggaaatcagttcaaggtacaaagcggatctgagcccggaaaatgctaagctcctcagcacattcctaaatcagactggcctagacgccttcctgctagagctgcacgaaatgataatcttgaaactaaagaacccccaaacccaaaccgaggagcgcttccgccctcagtggagcctgagagacactctcgtaagttacatgcaaactaaagaaagtgaaattcttcctgaaatggcatctcagttcccagaagagatactgctcgccagctgtgtctcagtgtggaaaacagctgctgtgctgaaatggaatcgagaaatgagatagaattatttcctcagctatctttggatgactttggagagaagactcctctctcctcgtctgcggcgtggacttgatcatggactggtgcctttgcattcagaaggagagctgtcagcgtagcaccgaattcaagaccaaggcgtgctacctgagctgacagctttttgaaagccgagctgtttctgaaccatgtacatacatgttctgaaactttctcatcattttatgagtactgttcattgagagatgacaatgaagattagatgaaattggaaataaaccaacattgtttacattccaggagacttgtagctcagccacacacgcagtaatgacctgtgcccgttcgcctctggcactgcccacccctctttttttttttcttctaattctgtactcacaaaagagaatctcattttcttctttcttccattcccttaaattctgagtactgtacatatatttctgggttcccacgatgatgtgaaaaactaccagactgttttttgtcttctcacaaagacaagaaaaatcagggcattttgtgagtgccttaagatcaaactaacaagatctgaccctctcccctcacagtgagccactgccccacttcagagggtaagagccaaaagcctcattgtgaaaggcactggacttggaccagggacaccatcagggccttggttttctcacgcataaaatggagagtggattaatcgccaaagattcttctgatctgacattttgaaattgtgagagaaactagatgactgtaaacttggtcacaggcctggttctggcagttctttgcggacttttttctagcattatgccaaataaacatgcagtctcagtgtgctctcgcatgtatgaatatctagtcctttctgtggttctcagccaagacataaaaactaggactcagagcacatacaaaaccagttatgtttcggaaagagggaaaagagtccccgagcccggatcttgtgctgcttttctcactgacgtgttgccttttttctttacaaaatctgctttgatacttaggacctctctggactaatttctcttcctagacagctcagcacagctattgatatgttagaggcagtatccttaatattcattctaaatgagttaacgacttaacttgaaattgggcctaaggagtgagaactacaaaaatacaaaatgcttgtccaggactcagccatgcacaccttgagcagcgccggcaggaggcacggaaggaactgtgctccgttctcctcactgtcatggtgccaccagtgtctgatgaagggcagagtgacccagactgcaggcagtaactgacttcacacagtccctggcatttagtcatctgtgattgttttatcactctggactgtgcagagccacctgccaccgagatctgcattccgactgcctatgaacgggtgtgggggccgggggctggcttgctgaagtcttcaacttgcactcggagctcctttgatacctcagagctggctgtcaggtggcagctcacacccagactcactggccacacctcagcagggggggagtcgagtgtcagtctctttctgtgaaggctttttttttcctttggcctgggaatttttcccatttttatgaaggggttttaaattgtttcattttgtgtgctgtgcttcaaagccttaactgtcaaatcttgcattatcttgtttgtacagaaatatactggcctagcagaggcaaaaaaaaaaaaaatgaattttattttacttgtcacacctgtcttaataaactggagttttgctgctaaagaa

SEQ ID NO: 275297 - DNA, 9843 bp, Artificial Sequence
  derived and/or modified sequence
atggtgtgcgacggcgactgggagcactgctacctgcccagcgccttcagccagcacaaggtgttcgtgaccccccaggcccccctggaggccatccaggcctacctggccggccactacagagtgcccaagcagaccctgagcgccgccgccgtgttcaacgacagactgtgcgtgggcatcgtggccagcgagagagccggcgtgggcaagagcctgtacgtgaagagactgcacgacaagatgaagatgcagctgaacgtgaagaacgtgcccctgaagaccatcagactgatcgacccccaggtggacgagagcagagtgctgggcgccctgctgcccttcctggacgcccagtaccagaaggtgcccgtgctgttccacctggacgtgaccagcagcgtgcagaccggcatctgggtgttcctgttcaagctgctgatcctgcagtacctgatggacatcaacggcaagatgtggctgagaaacccctgccacctgtacatcgtggagatcctggagagaagaaccagcgtgcccagcagaagcagcagcgccctgagaaccagagtgccccagttcagcttcctggacatcttccccaaggtgacctgcagaccccccaaggaggtgatcgacatggagctgagcgccctgagaagcgacaccgagcccggcatggacctgtgggagttctgcagcgagaccttccagagaccctaccagtacctgagaagattcaaccagaaccaggacctggacaccttccagtaccaggagggcagcgtggagggcacccccgaggagtgcctgcagcacttcctgttccactgcggcgtgatcaaccccagctggagcgagctgagaaacttcgccagattcctgaactaccagctgagagactgcgaggccagcctgttctgcaaccccagcttcatcggcgacaccctgagaggcttcaagaagttcgtggtgaccttcatgatcttcatggccagagacttcgccacccccagcctgcacaccagcgaccagagccccggcaagcacatggtgaccatggacggcgtgagagaggaggacctggcccccttcagcctgagaaagagatgggagagcgagccccacccctacgtgttcttcaacgacgaccacaccaccatgaccttcatcggcttccacctgcagcccaacatcaacggcagcgtggacgccatcagccacctgaccggcaaggtgatcaagagagacgtgatgaccagagacctgtaccagggcctgctgctgcagagagtgcccttcaacgtggacttcgacaagctgcccagacacaagaagctggagagactgtgcctgaccctgggcatcccccaggccaccgaccccgacaagacctacgagctgaccaccgacaacatgctgaagatcctggccatcgagatgagattcagatgcggcatccccgtgatcatcatgggcgagaccggctgcggcaagaccagactgatcaagttcctgagcgacctgagaagaggcggcaccaacgccgacaccatcaagctggtgaaggtgcacggcggcaccaccgccgacatgatctacagcagagtgagagaggccgagaacgtggccttcgccaacaaggaccagcaccagctggacaccatcctgttcttcgacgaggccaacaccaccgaggccatcagctgcatcaaggaggtgctgtgcgaccacatggtggacggccagcccctggccgaggacagcggcctgcacatcatcgccgcctgcaacccctacagaaagcacagcgaggagatgatctgcagactggagagcgccggcctgggctacagagtgagcatggaggagaccgccgacagactgggcagcatccccctgagacagctggtgtacagagtgcacgccctgccccccagcctgatccccctggtgtgggacttcggccagctgagcgacgtggccgagaagctgtacatccagcagatcgtgcagagactggtggagagcatcagcctggacgagaacggcaccagagtgatcaccgaggtgctgtgcgccagccagggcttcatgagaaagaccgaggacgagtgcagcttcgtgagcctgagagacgtggagagatgcgtgaaggtgttcagatggttccacgagcacagcgccatgctgctggcccagctgaacgccttcctgagcaagagcagcgtgagcaagaaccacaccgagagagaccccgtgctgtggagcctgatgctggccatcggcgtgtgctaccacgccagcctggagaagaaggacagctacagaaaggccatcgccagattcttccccaagccctacgacgacagcagactgctgctggacgagatcaccagagcccaggacctgttcctggacggcgtgcccctgagaaagaccatcgccaagaacctggccctgaaggagaacgtgttcatgatggtggtgtgcatcgagctgaagatccccctgttcctggtgggcaagcccggcagcagcaagagcctggccaagaccatcgtggccgacgccatgcagggccccgccgcctacagcgacctgttcagaagcctgaagcaggtgcacctggtgagcttccagtgcagcccccacagcaccccccagggcatcatcagcaccttcagacagtgcgccagattccagcagggcaaggacctgcagcagtacgtgagcgtggtggtgctggacgaggtgggcctggccgaggacagccccaagatgcccctgaagaccctgcaccccctgctggaggacggctgcatcgaggacgaccccgccccccacaagaaggtgggcttcgtgggcatcagcaactgggccctggaccccgccaagatgaacagaggcatcttcgtgagcagaggcagccccaacgagaccgagctgatcgagagcgccaagggcatctgcagcagcgacatcctggtgcaggacagagtgcagggctacttcgccagcttcgccaaggcctacgagaccgtgtgcaagagacaggacaaggagttcttcggcctgagagactactacagcctgatcaagatggtgttcgccgccgccaaggccagcaacagaaagcccagcccccaggacatcgcccaggccgtgctgagaaacttcagcggcaaggacgacatccaggccctggacatcttcctggccaacctgcccgaggccaagtgcagcgaggaggtgagccccatgcagctgatcaagcagaacatcttcggccccagccagaaggtgcccggcggcgagcaggaggacgccgagagcagatacctgctggtgctgaccaagaactacgtggccctgcagatcctgcagcagaccttcttcgagggcgaccagcagcccgagatcatcttcggcagcggcttccccaaggaccaggagtacacccagctgtgcagaaacatcaacagagtgaagatctgcatggagaccggcaagatggtgctgctgctgaacctgcagaacctgtacgagagcctgtacgacgccctgaaccagtactacgtgcacctgggcggccagaagtacgtggacctgggcctgggcacccacagagtgaagtgcagagtgcaccccaacttcagactgatcgtgatcgaggagaaggacgtggtgtacaagcacttccccatccccctgatcaacagactggagaagcactacctggacatcaacaccgtgctggagaagtggcagaagagcatcgtggaggagctgtgcgcctgggtggagaagttcatcaacgtgaaggcccaccacttccagaagagacacaagtacagccccagcgacgtgttcatcggctaccacagcgacgcctgcgccagcgtggtgctgcaggtgatcgagagacagggccccagagccctgaccgaggagctgcaccagaaggtgagcgaggaggccaagagcatcctgctgaactgcgccacccccgacgccgtggtgagactgagcgcctacagcctgggcggcttcgccgccgagtggctgagccaggagtacttccacagacagagacacaacagcttcgccgacttcctgcaggcccacctgcacaccgccgacctggagagacacgccatcttcaccgagatcaccaccttcagcagactgctgaccagccacgactgcgagatcctggagagcgaggtgaccggcagagcccccaagcccaccctgctgtggctgcagcagttcgacaccgagtacagcttcctgaaggaggtgagaaactgcctgaccaacaccgccaagtgcaagatcctgatcttccagaccgacttcgaggacggcatcagaagcgcccagctgatcgccagcgccaagtacagcgtgatcaacgagatcaacaagatcagagagaacgaggacagaatcttcgtgtacttcatcaccaagctgagcagagtgggcagaggcaccgcctacgtgggcttccacggcggcctgtggcagagcgtgcacatcgacgacctgagaagaagcaccctgatggtgagcgacgtgaccagactgcagcacgtgaccatcagccagctgttcgcccccggcgacctgcccgagctgggcctggagcacagagccgaggacggccacgaggaggccatggagaccgaggccagcaccagcggcgaggtggccgaggtggccgaggaggccatggagaccgagagcagcgagaaggtgggcaaggagaccagcgagctgggcggcagcgacgtgagcatcctggacaccaccagactgctgagaagctgcgtgcagagcgccgtgggcatgctgagagaccagaacgagagctgcaccagaaacatgagaagagtggtgctgctgctgggcctgctgaacgaggacgacgcctgccacgccagcttcctgagagtgagcaagatgagactgagcgtgttcctgaagaagcaggaggagagccagttccaccccctggagtggctggccagagaggcctgcaaccaggacgccctgcaggaggccggcaccttcagacacaccctgtggaagagagtgcagggcgccgtgacccccctgctggccagcatgatcagcttcatcgacagagacggcaacctggagctgctgaccagacccgacacccccccctgggccagagacctgtggatgttcatcttcagcgacaccatgctgctgaacatccccctggtgatgaacaacgagagacacaagggcgagatggcctacatcgtggtgcagaaccacatgaacctgagcgagaacgccagcaacaacgtgcccttcagctggaagatcaaggactacctggaggagctgtgggtgcaggcccagtacatcaccgacgccgagggcctgcccaagaagttcgtggacatcttccagcagacccccctgggcagattcctggcccagctgcacggcgagccccagcaggagctgctgcagtgctacctgaaggacttcatcctgctgaccatgagagtgagcaccgaggaggagctgaagttcctgcagatggccctgtggagctgcaccagaaagctgaaggccgccagcgaggcccccgaggaggaggtgagcctgccctgggtgcacctggcctaccagagattcagaagcagactgcagaacttcagcagaatcctgaccatctacccccaggtgctgcacagcctgatggaggccagatggaaccacgagctggccggctgcgagatgaccctggacgccttcgccgccatggcctgcaccgagatgctgaccagaaacaccctgaagcccagcccccaggcctggctgcagctggtgaagaacctgagcatgcccctggagctgatctgcagcgacgagcacatgcagggcagcggcagcctggcccaggccgtgatcagagaggtgagagcccagtggagcagaatcttcagcaccgccctgttcgtggagcacgtgctgctgggcaccgagagcagagtgcccgagctgcagggcctggtgaccgagcacgtgttcctgctggacaagtgcctgagagagaacagcgacgtgaagacccacggccccttcgaggccgtgatgagaaccctgtgcgagtgcaaggagaccgccagcaagaccctgagcagattcggcatccagccctgcagcatctgcctgggcgacgccaaggaccccgtgtgcctgccctgcgaccacgtgcactgcctgagatgcctgagagcctggttcgccagcgagcagatgatctgcccctactgcctgaccgccctgcccgacgagttcagccccgccgtgagccaggcccacagagaggccatcgagaagcacgccagattcagacagatgtgcaacagcttcttcgtggacctggtgagcaccatctgcttcaaggacaacgccccccccgagaaggaggtgatcgagagcctgctgagcctgctgttcgtgcagaagggcagactgagagacgccgcccagagacactgcgagcacaccaagagcctgagccccttcaacgacgtggtggacaagacccccgtgatcagaagcgtgatcctgaagctgctgctgaagtacagcttccacgacgtgaaggactacatccaggagtacctgaccctgctgaagaagaaggccttcatcaccgaggacaagaccgagctgtacatgctgttcatcaactgcctggaggacagcatcctggagaagaccagcgcctacagcagaaacgacgagctgaaccacctggaggaggagggcagattcctgaaggcctacagccccgccagcagaggcagagagcccgccaacgaggccagcgtggagtacctgcaggaggtggccagaatcagactgtgcctggacagagccgccgacttcctgagcgagcccgagggcggccccgagatggccaaggagaagcagtgctacctgcagcaggtgaagcagttctgcatcagagtggagaacgactggcacagagtgtacctggtgagaaagctgagcagccagagaggcatggagttcgtgcagggcctgagcaagcccggcagaccccaccagtgggtgttccccaaggacgtggtgaagcagcagggcctgagacaggaccaccccggccagatggacagatacctggtgtacggcgacgagtacaaggccctgagagacgccgtggccaaggccgtgctggagtgcaagcccctgggcatcaagaccgccctgaaggcctgcaagaccccccagagccagcagagcgcctacttcctgctgaccctgttcagagaggtggccatcctgtacagaagccacaacgccagcctgcaccccacccccgagcagtgcgaggccgtgagcaagttcatcggcgagtgcaagatcctgagcccccccgacatcagcagattcgccaccagcctggtggacaacagcgtgcccctgctgagagccggccccagcgacagcaacctggacggcaccgtgaccgagatggccatccacgccgccgccgtgctgctgtgcggccagaacgagctgctggagcccctgaagaacctggccttcagccccgccaccatggcccacgccttcctgcccaccatgcccgaggacctgctggcccaggccagaagatggaagggcctggagagagtgcactggtacacctgccccaacggccacccctgcagcgtgggcgagtgcggcagacccatggagcagagcatctgcatcgactgccacgcccccatcggcggcatcgaccacaagcccagagacggcttccacctggtgaaggacaaggccgacagaacccagaccggccacgtgctgggcaacccccagagaagagacgtggtgacctgcgacagaggcctgccccccgtggtgttcctgctgatcagactgctgacccacctggccctgctgctgggcgccagccagagcagccaggccctgatcaacatcatcaagccccccgtgagagaccccaagggcttcctgcagcagcacatcctgaaggacctggagcagctggccaagatgctgggccacagcgccgacgagaccatcggcgtggtgcacctggtgctgagaagactgctgcaggagcagcaccagctgagcagcagaagactgctgaacttcgacaccgagctgagcaccaaggagatgagaaacaactgggagaaggagatcgccgccgtgatcagccccgagctggagcacctggacaagaccctgcccaccatgaacaacctgatcagccaggacaagagaatcagcagcaaccccgtggccaagatcatctacggcgaccccgtgaccttcctgccccacctgcccagaaagagcgtggtgcactgcagcaagatctggagctgcagaaagagaatcaccgtggagtacctgcagcacatcgtggagcagaagaacggcaaggagagagtgcccatcctgtggcacttcctgcagaaggaggccgagctgagactggtgaagttcctgcccgagatcctggccctgcagagagacctggtgaagcagttccagaacgtgcagcaggtggagtacagcagcatcagaggcttcctgagcaagcacagcagcgacggcctgagacagctgctgcacaacagaatcaccgtgttcctgagcacctggaacaagctgagaagaagcctggagaccaacggcgagatcaacctgcccaaggactactgcagcaccgacctggacctggacaccgagttcgagatcctgctgcccagaagaagaggcctgggcctgtgcgccaccgccctggtgagctacctgatcagactgcacaacgagatcgtgtacgccgtggagaagctgagcaaggagaacaacagctacagcgtggacgccgccgaggtgaccgagctgcacgtgatcagctacgaggtggagagagacctgacccccctgatcctgagcaactgccagtaccaggtggaggagggcagagagaccgtgcaggagttcgacctggagaagatccagagacagatcgtgagcagattcctgcagggcaagcccagactgagcctgaagggcatccccaccctggtgtacagacacgactggaactacgagcacctgttcatggacatcaagaacaagatggcccaggacagcctgcccagcagcgtgatcagcgccatcagcggccagctgcagagctacagcgacgcctgcgaggtgctgagcgtggtggaggtgaccctgggcttcctgagcaccgccggcggcgaccccaacatgcagctgaacgtgtacacccaggacatcctgcagatgggcgaccagaccatccacgtgctgaaggccctgaacagatgccagctgaagcacaccatcgccctgtggcagttcctgagcgcccacaagagcgagcagctgctgagactgcacaaggagcccttcggcgagatcagcagcagatacaaggccgacctgagccccgagaacgccaagctgctgagcaccttcctgaaccagaccggcctggacgccttcctgctggagctgcacgagatgatcatcctgaagctgaagaacccccagacccagaccgaggagagattcagaccccagtggagcctgagagacaccctggtgagctacatgcagaccaaggagagcgagatcctgcccgagatggccagccagttccccgaggagatcctgctggccagctgcgtgagcgtgtggaagaccgccgccgtgctgaagtggaacagagagatgagatag

SEQ ID NO: 275298 - DNA, 15771 bp, Artificial Sequence
  derived and/or modified sequence
atggagtgccccagctgccagcacgtgagcaaggaggagacccccaagttctgcagccagtgcggcgagagactgccccccgccgcccccatcgccgacagcgagaacaacaacagcaccatggccagcgccagcgagggcgagatggagtgcggccaggagctgaaggaggagggcggcccctgcctgttccccggcagcgacagctggcaggagaaccccgaggagccctgcagcaaggccagctggaccgtgcaggagggcgccaccagcgaggtgctggtggacgccgccgtggacctgatcagcgacgagtgggaggccgccaacgccatccccagcaagagaagaaagcaggacgccgcccccctggaggccgccagcgtgcccagcgccgactgcgagcagagcaagaagaagaagagaaagaagaagaagaagggcaacaagagcgccagcagcgagctggccagcctgcccctgagccccgccagcccctgccacctgaccctgctgagcaacccctggccccaggacaccgccctgccccacagccaggcccagcagagcggccccaccggccagcccagccagccccccggcaccgccaccacccccctggagggcgacggcctgagcgcccccaccgaggtgggcgacagccccctgcaggcccaggccctgggcgaggccggcgtggccaccggcagcgaggcccagagcagcccccagttccaggaccacaccgagggcgaggaccaggacgccagcatccccagcggcggcagaggcctgagccaggagggcaccggcccccccaccagcgccggcgagggccacagcagaaccgaggacgccgcccaggagctgctgctgcccgagagcaagggcggcagcagcgagcccggcaccgagctgcagaccaccgagcagcaggccggcgccagcgccagcatggccgtggacgccgtggccgagcccgccaacgccgtgaagggcgccggcaaggagatgaaggagaagacccagagaatgaagcagccccccgccaccaccccccccttcaagacccactgccaggaggccgagaccaagaccaaggacgagatggccgccgccgaggagaaggtgggcaagaacgagcagggcgagcccgaggacctgaagaagcccgagggcaagaacagaagcgccgccgccgtgaagaacgagaaggagcagaagaaccaggaggccgacgtgcaggaggtgaaggccagcaccctgagccccggcggcggcgtgaccgtgttcttccacgccatcatcagcctgcacttccccttcaaccccgacctgcacaaggtgttcatcagaggcggcgaggagttcggcgagagcaagtgggacagcaacatctgcgagctgcactacaccagagacctgggccacgacagagtgctggtggagggcatcgtgtgcatcagcaagaagcacctggacaagtacatcccctacaagtacgtgatctacaacggcgagagcttcgagtacgagttcatctacaagcaccagcagaagaagggcgagtacgtgaacagatgcctgttcatcaagagcagcctgctgggcagcggcgactggcaccagtactacgacatcgtgtacatgaagccccacggcagactgcagaaggtgatgaaccacatcaccgacggccccagaaaggacctggtgaagggcaagcagatcgccgccgccctgatgctggacagcaccttcagcatcctgcagacctgggacaccatcaacctgaacagcttcttcacccagttcgagcagttctgcttcgtgctgcagcagcccatgatctacgagggccaggcccagctgtggaccgacctgcagtacagagagaaggaggtgaagagatacctgtggcagcacctgaagaagcacgtggtgcccctgcccgacggcaagagcaccgacttcctgcccgtggactgccccgtgagaagcaagctgaagaccggcctgatcgtgctgttcgtggtggagaagatcgagctgctgctggagggcagcctggactggctgtgccacctgctgaccagcgacgccagcagccccgacgagttccacagagacctgagccacatcctgggcatcccccagagctggagactgtacctggtgaacctgtgccagagatgcatggacaccagaacctacacctggctgggcgccctgcccgtgctgcactgctgcatggagctggcccccagacacaaggacgcctggagacagcccgaggacacctgggccgccctggagggcctgagcttcagccccttcagagagcagatgctggacaccagcagcctgctgcagttcatgagagagaagcagcacctgctgagcatcgacgagcccctgttcagaagctggttcagcctgctgcccctgagccacctggtgatgtacatggagaacttcatcgagcacctgggcagattccccgcccacatcctggactgcctgagcggcatctactacagactgcccggcctggagcaggtgctgaacacccaggacgtgcaggacgtgcagaacgtgcagaacatcctggagatgctgctgagactgctggacacctacagagacaagatccccgaggaggccctgagccccagctacctgaccgtgtgcctgaagctgcacgaggccatctgcagcagcaccaagctgctgaagttctacgagctgcccgccctgagcgccgagatcgtgtgcagaatgatcagactgctgagcctggtggacagcgccggccagagagacgagaccggcaacaacagcgtgcagaccgtgttccagggcaccctggccgccaccaagagatggctgagagaggtgttcaccaagaacatgctgaccagcagcggcgccagcttcacctacgtgaaggagatcgaggtgtggagaagactggtggagatccagttccccgccgagcacggctggaaggagagcctgctgggcgacatggagtggagactgaccaaggaggagcccctgagccagatcaccgcctactgcaacagctgctgggacaccaagggcctggaggacagcgtggccaagaccttcgagaagtgcatcatcgaggccgtgagcagcgcctgccagagccagaccagcatcctgcagggcttcagctacagcgacctgagaaagttcggcatcgtgctgagcgccgtgatcaccaagagctggcccagaaccgccgacaacttcaacgacatcctgaagcacctgctgaccctggccgacgtgaagcacgtgttcagactgtgcggcaccgacgagaagatcctggccaacgtgaccgaggacgccaagagactgatcgccgtggccgacagcgtgctgaccaaggtggtgggcgacctgctgagcggcaccatcctggtgggccagctggagctgatcatcaagcacaagaaccagttcctggacatctggcagctgagagagaagagcctgagcccccaggacgagcagtgcgccgtggaggaggccctggactggagaagagaggagctgctgctgctgaagaaggagaagagatgcgtggacagcctgctgaagatgtgcggcaacgtgaagcacctgatccaggtggacttcggcgtgctggccgtgagacacagccaggacctgagcagcaagagactgaacgacaccgtgaccgtgagactgagcaccagcagcaacagccagagagccacccactaccacctgagcagccaggtgcaggagatggccggcaagatcgacctgctgagagacagccacatcttccagctgttctggagagaggccgccgagcccctgagcgagcccaaggaggaccaggaggccgccgagctgctgagcgagcccgaggaggagagcgagagacacatcctggagctggaggaggtgtacgactacctgtaccagcccagctacagaaagttcatcaagctgcaccaggacctgaagagcggcgaggtgaccctggccgagatcgacgtgatcttcaaggacttcgtgaacaagtacaccgacctggacagcgagctgaagatcatgtgcaccgtggaccaccaggaccagagagactggatcaaggacagagtggagcagatcaaggagtaccaccacctgcaccaggccgtgcacgccgccaaggtgatcctgcaggtgaaggagagcctgggcctgaacggcgacttcagcgtgctgaacaccctgctgaacttcaccgacaacttcgacgacttcagaagagagaccctggaccagatcaaccaggagctgatccaggccaagaagctgctgcaggacatcagcgaggccagatgcaagggcctgcaggccctgagcctgagaaaggagttcatctgctgggtgagagaggccctgggcggcatcaacgagctgaaggtgttcgtggacctggccagcatcagcgccggcgagaacgacatcgacgtggacagagtggcctgcttccacgacgccgtgcagggctacgccagcctgctgttcaagctggaccccagcgtggacttcagcgccttcatgaagcacctgaagaagctgtggaaggccctggacaaggaccagtacctgcccagaaagctgtgcgacagcgccagaaacctggagtggctgaagaccgtgaacgagagccacggcagcgtggagagaagcagcctgaccctggccaccgccatcaaccagagaggcatctacgtgatccaggcccccaagggcggccagaagatcagccccgacaccgtgctgcacctgatcctgcccgagagccccggcagccacgaggagagcagagagtacagcctggaggaggtgaaggagctgctgaacaagctgatgctgatgagcggcaagaaggacagaaacaacaccgaggtggagagattcagcgaggtgttctgcagcgtgcagagactgagccaggccttcatcgacctgcacagcgccggcaacatgctgttcagaacctggatcgccatggcctactgcagccccaagcagggcgtgagcctgcagatggacttcggcctggacctggtgaccgagctgaaggagggcggcgacgtgaccgagctgctggccgccctgtgcagacagatggagcacttcctggacagctggaagagattcgtgacccagaagagaatggagcacttctacctgaacttctacaccgccgagcagctggtgtacctgagcaccgagctgagaaagcagccccccagcgacgccgccctgaccatgctgagcttcatcaagagcaactgcaccctgagagacgtgctgagagccagcgtgggctgcggcagcgaggccgccagatacagaatgagaagagtgatggaggagctgcccctgatgctgctgagcgagttcagcctggtggacaagctgagaatcatcatggagcagagcatgagatgcctgcccgccttcctgcccgactgcctggacctggagaccctgggccactgcctggcccacctggccggcatgggcggcagccccgtggagagatgcctgcccagaggcctgcaggtgggccagcccaacctggtggtgtgcggccacagcgaggtgctgcccgccgccctggccgtgtacatgcagacccccagccagcccctgcccacctacgacgaggtgctgctgtgcacccccgccaccaccttcgaggaggtggccctgctgctgagaagatgcctgaccctgggcagcctgggccacaaggtgtacagcctgctgttcgccgaccagctgagctacgaggtggccagacaggccgaggagctgttccacaacctgtgcacccagcagcacagagaggactaccagctggtgatggtgtgcgacggcgactgggagcactgctacctgcccagcgccttcagccagcacaaggtgttcgtgaccccccaggcccccctggaggccatccaggcctacctggccggccactacagagtgcccaagcagaccctgagcgccgccgccgtgttcaacgacagactgtgcgtgggcatcgtggccagcgagagagccggcgtgggcaagagcctgtacgtgaagagactgcacgacaagatgaagatgcagctgaacgtgaagaacgtgcccctgaagaccatcagactgatcgacccccaggtggacgagagcagagtgctgggcgccctgctgcccttcctggacgcccagtaccagaaggtgcccgtgctgttccacctggacgtgaccagcagcgtgcagaccggcatctgggtgttcctgttcaagctgctgatcctgcagtacctgatggacatcaacggcaagatgtggctgagaaacccctgccacctgtacatcgtggagatcctggagagaagaaccagcgtgcccagcagaagcagcagcgccctgagaaccagagtgccccagttcagcttcctggacatcttccccaaggtgacctgcagaccccccaaggaggtgatcgacatggagctgagcgccctgagaagcgacaccgagcccggcatggacctgtgggagttctgcagcgagaccttccagagaccctaccagtacctgagaagattcaaccagaaccaggacctggacaccttccagtaccaggagggcagcgtggagggcacccccgaggagtgcctgcagcacttcctgttccactgcggcgtgatcaaccccagctggagcgagctgagaaacttcgccagattcctgaactaccagctgagagactgcgaggccagcctgttctgcaaccccagcttcatcggcgacaccctgagaggcttcaagaagttcgtggtgaccttcatgatcttcatggccagagacttcgccacccccagcctgcacaccagcgaccagagccccggcaagcacatggtgaccatggacggcgtgagagaggaggacctggcccccttcagcctgagaaagagatgggagagcgagccccacccctacgtgttcttcaacgacgaccacaccaccatgaccttcatcggcttccacctgcagcccaacatcaacggcagcgtggacgccatcagccacctgaccggcaaggtgatcaagagagacgtgatgaccagagacctgtaccagggcctgctgctgcagagagtgcccttcaacgtggacttcgacaagctgcccagacacaagaagctggagagactgtgcctgaccctgggcatcccccaggccaccgaccccgacaagacctacgagctgaccaccgacaacatgctgaagatcctggccatcgagatgagattcagatgcggcatccccgtgatcatcatgggcgagaccggctgcggcaagaccagactgatcaagttcctgagcgacctgagaagaggcggcaccaacgccgacaccatcaagctggtgaaggtgcacggcggcaccaccgccgacatgatctacagcagagtgagagaggccgagaacgtggccttcgccaacaaggaccagcaccagctggacaccatcctgttcttcgacgaggccaacaccaccgaggccatcagctgcatcaaggaggtgctgtgcgaccacatggtggacggccagcccctggccgaggacagcggcctgcacatcatcgccgcctgcaacccctacagaaagcacagcgaggagatgatctgcagactggagagcgccggcctgggctacagagtgagcatggaggagaccgccgacagactgggcagcatccccctgagacagctggtgtacagagtgcacgccctgccccccagcctgatccccctggtgtgggacttcggccagctgagcgacgtggccgagaagctgtacatccagcagatcgtgcagagactggtggagagcatcagcctggacgagaacggcaccagagtgatcaccgaggtgctgtgcgccagccagggcttcatgagaaagaccgaggacgagtgcagcttcgtgagcctgagagacgtggagagatgcgtgaaggtgttcagatggttccacgagcacagcgccatgctgctggcccagctgaacgccttcctgagcaagagcagcgtgagcaagaaccacaccgagagagaccccgtgctgtggagcctgatgctggccatcggcgtgtgctaccacgccagcctggagaagaaggacagctacagaaaggccatcgccagattcttccccaagccctacgacgacagcagactgctgctggacgagatcaccagagcccaggacctgttcctggacggcgtgcccctgagaaagaccatcgccaagaacctggccctgaaggagaacgtgttcatgatggtggtgtgcatcgagctgaagatccccctgttcctggtgggcaagcccggcagcagcaagagcctggccaagaccatcgtggccgacgccatgcagggccccgccgcctacagcgacctgttcagaagcctgaagcaggtgcacctggtgagcttccagtgcagcccccacagcaccccccagggcatcatcagcaccttcagacagtgcgccagattccagcagggcaaggacctgcagcagtacgtgagcgtggtggtgctggacgaggtgggcctggccgaggacagccccaagatgcccctgaagaccctgcaccccctgctggaggacggctgcatcgaggacgaccccgccccccacaagaaggtgggcttcgtgggcatcagcaactgggccctggaccccgccaagatgaacagaggcatcttcgtgagcagaggcagccccaacgagaccgagctgatcgagagcgccaagggcatctgcagcagcgacatcctggtgcaggacagagtgcagggctacttcgccagcttcgccaaggcctacgagaccgtgtgcaagagacaggacaaggagttcttcggcctgagagactactacagcctgatcaagatggtgttcgccgccgccaaggccagcaacagaaagcccagcccccaggacatcgcccaggccgtgctgagaaacttcagcggcaaggacgacatccaggccctggacatcttcctggccaacctgcccgaggccaagtgcagcgaggaggtgagccccatgcagctgatcaagcagaacatcttcggccccagccagaaggtgcccggcggcgagcaggaggacgccgagagcagatacctgctggtgctgaccaagaactacgtggccctgcagatcctgcagcagaccttcttcgagggcgaccagcagcccgagatcatcttcggcagcggcttccccaaggaccaggagtacacccagctgtgcagaaacatcaacagagtgaagatctgcatggagaccggcaagatggtgctgctgctgaacctgcagaacctgtacgagagcctgtacgacgccctgaaccagtactacgtgcacctgggcggccagaagtacgtggacctgggcctgggcacccacagagtgaagtgcagagtgcaccccaacttcagactgatcgtgatcgaggagaaggacgtggtgtacaagcacttccccatccccctgatcaacagactggagaagcactacctggacatcaacaccgtgctggagaagtggcagaagagcatcgtggaggagctgtgcgcctgggtggagaagttcatcaacgtgaaggcccaccacttccagaagagacacaagtacagccccagcgacgtgttcatcggctaccacagcgacgcctgcgccagcgtggtgctgcaggtgatcgagagacagggccccagagccctgaccgaggagctgcaccagaaggtgagcgaggaggccaagagcatcctgctgaactgcgccacccccgacgccgtggtgagactgagcgcctacagcctgggcggcttcgccgccgagtggctgagccaggagtacttccacagacagagacacaacagcttcgccgacttcctgcaggcccacctgcacaccgccgacctggagagacacgccatcttcaccgagatcaccaccttcagcagactgctgaccagccacgactgcgagatcctggagagcgaggtgaccggcagagcccccaagcccaccctgctgtggctgcagcagttcgacaccgagtacagcttcctgaaggaggtgagaaactgcctgaccaacaccgccaagtgcaagatcctgatcttccagaccgacttcgaggacggcatcagaagcgcccagctgatcgccagcgccaagtacagcgtgatcaacgagatcaacaagatcagagagaacgaggacagaatcttcgtgtacttcatcaccaagctgagcagagtgggcagaggcaccgcctacgtgggcttccacggcggcctgtggcagagcgtgcacatcgacgacctgagaagaagcaccctgatggtgagcgacgtgaccagactgcagcacgtgaccatcagccagctgttcgcccccggcgacctgcccgagctgggcctggagcacagagccgaggacggccacgaggaggccatggagaccgaggccagcaccagcggcgaggtggccgaggtggccgaggaggccatggagaccgagagcagcgagaaggtgggcaaggagaccagcgagctgggcggcagcgacgtgagcatcctggacaccaccagactgctgagaagctgcgtgcagagcgccgtgggcatgctgagagaccagaacgagagctgcaccagaaacatgagaagagtggtgctgctgctgggcctgctgaacgaggacgacgcctgccacgccagcttcctgagagtgagcaagatgagactgagcgtgttcctgaagaagcaggaggagagccagttccaccccctggagtggctggccagagaggcctgcaaccaggacgccctgcaggaggccggcaccttcagacacaccctgtggaagagagtgcagggcgccgtgacccccctgctggccagcatgatcagcttcatcgacagagacggcaacctggagctgctgaccagacccgacacccccccctgggccagagacctgtggatgttcatcttcagcgacaccatgctgctgaacatccccctggtgatgaacaacgagagacacaagggcgagatggcctacatcgtggtgcagaaccacatgaacctgagcgagaacgccagcaacaacgtgcccttcagctggaagatcaaggactacctggaggagctgtgggtgcaggcccagtacatcaccgacgccgagggcctgcccaagaagttcgtggacatcttccagcagacccccctgggcagattcctggcccagctgcacggcgagccccagcaggagctgctgcagtgctacctgaaggacttcatcctgctgaccatgagagtgagcaccgaggaggagctgaagttcctgcagatggccctgtggagctgcaccagaaagctgaaggccgccagcgaggcccccgaggaggaggtgagcctgccctgggtgcacctggcctaccagagattcagaagcagactgcagaacttcagcagaatcctgaccatctacccccaggtgctgcacagcctgatggaggccagatggaaccacgagctggccggctgcgagatgaccctggacgccttcgccgccatggcctgcaccgagatgctgaccagaaacaccctgaagcccagcccccaggcctggctgcagctggtgaagaacctgagcatgcccctggagctgatctgcagcgacgagcacatgcagggcagcggcagcctggcccaggccgtgatcagagaggtgagagcccagtggagcagaatcttcagcaccgccctgttcgtggagcacgtgctgctgggcaccgagagcagagtgcccgagctgcagggcctggtgaccgagcacgtgttcctgctggacaagtgcctgagagagaacagcgacgtgaagacccacggccccttcgaggccgtgatgagaaccctgtgcgagtgcaaggagaccgccagcaagaccctgagcagattcggcatccagccctgcagcatctgcctgggcgacgccaaggaccccgtgtgcctgccctgcgaccacgtgcactgcctgagatgcctgagagcctggttcgccagcgagcagatgatctgcccctactgcctgaccgccctgcccgacgagttcagccccgccgtgagccaggcccacagagaggccatcgagaagcacgccagattcagacagatgtgcaacagcttcttcgtggacctggtgagcaccatctgcttcaaggacaacgccccccccgagaaggaggtgatcgagagcctgctgagcctgctgttcgtgcagaagggcagactgagagacgccgcccagagacactgcgagcacaccaagagcctgagccccttcaacgacgtggtggacaagacccccgtgatcagaagcgtgatcctgaagctgctgctgaagtacagcttccacgacgtgaaggactacatccaggagtacctgaccctgctgaagaagaaggccttcatcaccgaggacaagaccgagctgtacatgctgttcatcaactgcctggaggacagcatcctggagaagaccagcgcctacagcagaaacgacgagctgaaccacctggaggaggagggcagattcctgaaggcctacagccccgccagcagaggcagagagcccgccaacgaggccagcgtggagtacctgcaggaggtggccagaatcagactgtgcctggacagagccgccgacttcctgagcgagcccgagggcggccccgagatggccaaggagaagcagtgctacctgcagcaggtgaagcagttctgcatcagagtggagaacgactggcacagagtgtacctggtgagaaagctgagcagccagagaggcatggagttcgtgcagggcctgagcaagcccggcagaccccaccagtgggtgttccccaaggacgtggtgaagcagcagggcctgagacaggaccaccccggccagatggacagatacctggtgtacggcgacgagtacaaggccctgagagacgccgtggccaaggccgtgctggagtgcaagcccctgggcatcaagaccgccctgaaggcctgcaagaccccccagagccagcagagcgcctacttcctgctgaccctgttcagagaggtggccatcctgtacagaagccacaacgccagcctgcaccccacccccgagcagtgcgaggccgtgagcaagttcatcggcgagtgcaagatcctgagcccccccgacatcagcagattcgccaccagcctggtggacaacagcgtgcccctgctgagagccggccccagcgacagcaacctggacggcaccgtgaccgagatggccatccacgccgccgccgtgctgctgtgcggccagaacgagctgctggagcccctgaagaacctggccttcagccccgccaccatggcccacgccttcctgcccaccatgcccgaggacctgctggcccaggccagaagatggaagggcctggagagagtgcactggtacacctgccccaacggccacccctgcagcgtgggcgagtgcggcagacccatggagcagagcatctgcatcgactgccacgcccccatcggcggcatcgaccacaagcccagagacggcttccacctggtgaaggacaaggccgacagaacccagaccggccacgtgctgggcaacccccagagaagagacgtggtgacctgcgacagaggcctgccccccgtggtgttcctgctgatcagactgctgacccacctggccctgctgctgggcgccagccagagcagccaggccctgatcaacatcatcaagccccccgtgagagaccccaagggcttcctgcagcagcacatcctgaaggacctggagcagctggccaagatgctgggccacagcgccgacgagaccatcggcgtggtgcacctggtgctgagaagactgctgcaggagcagcaccagctgagcagcagaagactgctgaacttcgacaccgagctgagcaccaaggagatgagaaacaactgggagaaggagatcgccgccgtgatcagccccgagctggagcacctggacaagaccctgcccaccatgaacaacctgatcagccaggacaagagaatcagcagcaaccccgtggccaagatcatctacggcgaccccgtgaccttcctgccccacctgcccagaaagagcgtggtgcactgcagcaagatctggagctgcagaaagagaatcaccgtggagtacctgcagcacatcgtggagcagaagaacggcaaggagagagtgcccatcctgtggcacttcctgcagaaggaggccgagctgagactggtgaagttcctgcccgagatcctggccctgcagagagacctggtgaagcagttccagaacgtgcagcaggtggagtacagcagcatcagaggcttcctgagcaagcacagcagcgacggcctgagacagctgctgcacaacagaatcaccgtgttcctgagcacctggaacaagctgagaagaagcctggagaccaacggcgagatcaacctgcccaaggactactgcagcaccgacctggacctggacaccgagttcgagatcctgctgcccagaagaagaggcctgggcctgtgcgccaccgccctggtgagctacctgatcagactgcacaacgagatcgtgtacgccgtggagaagctgagcaaggagaacaacagctacagcgtggacgccgccgaggtgaccgagctgcacgtgatcagctacgaggtggagagagacctgacccccctgatcctgagcaactgccagtaccaggtggaggagggcagagagaccgtgcaggagttcgacctggagaagatccagagacagatcgtgagcagattcctgcagggcaagcccagactgagcctgaagggcatccccaccctggtgtacagacacgactggaactacgagcacctgttcatggacatcaagaacaagatggcccaggacagcctgcccagcagcgtgatcagcgccatcagcggccagctgcagagctacagcgacgcctgcgaggtgctgagcgtggtggaggtgaccctgggcttcctgagcaccgccggcggcgaccccaacatgcagctgaacgtgtacacccaggacatcctgcagatgggcgaccagaccatccacgtgctgaaggccctgaacagatgccagctgaagcacaccatcgccctgtggcagttcctgagcgcccacaagagcgagcagctgctgagactgcacaaggagcccttcggcgagatcagcagcagatacaaggccgacctgagccccgagaacgccaagctgctgagcaccttcctgaaccagaccggcctggacgccttcctgctggagctgcacgagatgatcatcctgaagctgaagaacccccagacccagaccgaggagagattcagaccccagtggagcctgagagacaccctggtgagctacatgcagaccaaggagagcgagatcctgcccgagatggccagccagttccccgaggagatcctgctggccagctgcgtgagcgtgtggaagaccgccgccgtgctgaagtggaacagagagatgagatag

SEQ ID NO: 275299 - protein, 478 aa, Artificial Sequence
  derived and/or modified sequence
MMSQTMTQAGVSFRHSVRAAQCHTRVPNTWPRATRPYASCRRSPRLRGRWPGSAGQGAGGRAPRAGWRAGDVTGSAIETQSSSSEEIVPSPPSPPPLPRIYKPCFVCQDKSSGYHYGVSACEGCKGFFRRSIQKNMVYTCHRDKNCIINKVTRNRCQYCRLQKCFEVGMSKESVRNDRNKKKKEVPKPECSESYTLTPEVGELIEKVRKAHQETFPALCQLGKYTTNNSSEQRVSLDIDLWDKFSELSTKCIIKTVEFAKQLPGFTTLTIADQITLLKAACLDILILRICTRYTPEQDTMTFSDGLTLNRTQMHNAGFGPLTDLVFAFANQLLPLEMDDAETGLLSAICLICGDRQDLEQPDRVDMLQEPLLEALKVYVRKRRPSRPHMFPKMLMKITDLRSISAKGAERVITLKMEIPGSMPPLIQEMLENSEGLDTLSGQPGGGGRDGGGLAPPPGSCSPSLSPSSNRSSPATHSP

SEQ ID NO: 275300 - protein, 346 aa, Artificial Sequence
  derived and/or modified sequence
MGQEILPARSPTLRLGSPTPHLPQELLRASPKGPPGRLQLGGLAVRNDRNKKKKEVPKPECSESYTLTPEVGELIEKVRKAHQETFPALCQLGKYTTNNSSEQRVSLDIDLWDKFSELSTKCIIKTVEFAKQLPGFTTLTIADQITLLKAACLDILILRICTRYTPEQDTMTFSDGLTLNRTQMHNAGFGPLTDLVFAFANQLLPLEMDDAETGLLSAICLICGDRQDLEQPDRVDMLQEPLLEALKVYVRKRRPSRPHMFPKMLMKITDLRSISAKGAERVITLKMEIPGSMPPLIQEMLENSEGLDTLSGQPGGGGRDGGGLAPPPGSCSPSLSPSSNRSSPAT

SEQ ID NO: 275301 - DNA, 1437 bp, Artificial Sequence
  derived and/or modified sequence
atgatgagccagactatgacccaggcgggagtatccttcaggcacagtgtccgggcagcccagtgccacactagggtaccaaacacatggcctcgggctaccagaccctacgcgtcatgtagaagatccccgcgtctacgcgggaggtggcccggatccgccggtcagggagcaggtgggcgcgccccccgggccggttggcgggcaggcgatgtgaccggctccgcaattgagacacagtcctctagttcagaagaaatagttcccagtcctcccagcccaccaccactcccacggatctataaaccctgtttcgtgtgccaagacaaatcctccgggtaccattacggagtcagtgcctgcgagggatgtaagggctttttcaggagaagcatacagaagaatatggtgtatacttgccaccgtgacaagaactgtattatcaacaaggttaccagaaaccgctgccagtattgtagactccagaagtgcttcgaagtgggtatgtcaaaggagagtgtaagaaacgaccgcaataaaaagaagaaagaggtcccgaaaccggagtgctccgagtcctacacattgacacctgaggttggcgaactgatagaaaaagtccgtaaagctcatcaggaaacctttcccgccttgtgtcagctaggaaaatatacaacaaataacagctccgagcaacgagtatcactggacattgatctctgggataaattttctgagctgtctactaaatgcataattaagaccgtggagtttgccaagcagctcccaggattcacaactctgacaatcgcggaccagatcaccctcttaaaggctgcatgtctagacattcttatcttaagaatctgtacacgctacaccccggaacaggataccatgaccttcagcgacggattgaccctcaacaggacccagatgcataatgccggcttcgggcctctgacagacctggtgtttgccttcgcaaaccagctgctccccctcgagatggacgacgctgaaaccgggctcctgagtgccatttgcttaatctgcggcgatcgacaggatctggagcagccggatagagtcgacatgcttcaagaacctcttctggaggcattgaaagtctacgtgcggaaacgtagaccatccaggccgcacatgtttcccaaaatgctgatgaaaatcaccgatctgagatcgatctctgcaaaaggggccgaacgcgtaattactctaaagatggaaatccccggtagcatgccccccttaattcaagaaatgttggaaaactcagagggcctagacaccttgtccggccagcctggtggtggaggtcgggacggcggcggtctcgccccaccgccaggtagttgttccccctctctgtcaccctctagcaatcggtcttccccagccactcatagtccttag

SEQ ID NO: 275302 - DNA, 1437 bp, Artificial Sequence
  derived and/or modified sequence
atgatgagccagaccatgacccaggccggcgtgtccttccgccacagcgtgcgggccgcccagtgccacaccagggtgcccaacacctggccccgggccacccggccctatgccagctgcagaagaagcccccggctgcggggccgctggccaggcagcgctggccagggcgctgggggccgggcccccagggctggctggagggctggagatgtgactggaagtgccatcgagacccagagcagcagcagcgaggagatcgtgcccagcccccccagccccccacccctgccccgcatctacaagccctgctttgtgtgccaggacaagagcagcggctaccactacggcgtgtctgcctgtgagggctgcaagggcttcttcagaagaagcatccagaagaacatggtgtacacctgccaccgggacaagaactgcatcatcaacaaggtgaccaggaaccgctgccagtactgccgcctgcagaagtgctttgaggtgggcatgagcaaggagagcgtgagaaatgacaggaacaagaagaagaaggaggtgcccaagccagaatgttctgagagctacaccctgaccccagaggtgggggagctgattgagaaggtgaggaaggcccaccaggagaccttccctgccctgtgccagctgggcaagtacaccaccaacaacagcagcgagcagagggtgtccctggacatcgacctgtgggacaagttcagcgagctgagcaccaagtgcatcatcaagacagtggagtttgccaagcagctgcccggcttcaccaccctgaccatcgctgaccagatcaccctgctgaaggccgcctgcctggacatcctgatcctgcgcatctgcacccgctacaccccagagcaggacaccatgaccttcagtgatggcctgaccctgaacagaacccagatgcacaatgccggcttcggccccctgacagacctggtgtttgcctttgccaaccagctgctgcccctggagatggatgatgctgagaccggcctgctgagcgccatctgcctgatctgtggggaccggcaggacctggagcagcctgacagagtggacatgctgcaggagcccctgctggaggccctgaaggtgtatgtgaggaagaggcggcccagccggccccacatgttccccaagatgctgatgaagatcacagacctgcggagcatcagcgccaagggagctgagagggtcatcaccctgaagatggagatccctggctccatgcctcctctcatccaggagatgctggagaacagcgagggcctggacaccctgagcggccagcccggcggcggcggcagagatggcggcggcctggcccctcctcctggcagctgcagccccagcctgagccccagcagcaacagaagcagccctgccacccacagcccctag

SEQ ID NO: 275303 - DNA, 1437 bp, Artificial Sequence
  derived and/or modified sequence
atgatgagccagaccatgacccaggccggcgtgagcttccggcactcagttagagcagcccaatgtcacacaagagtcccaaatacctggccaagggcgacaagaccttatgcatcgtgccggcggagcccccgcttacgggggaggtggccgggcagtgccggtcagggcgctgggggcagggccccccgggctggttggcgggcgggcgacgttaccggcagtgcaatcgagacgcagagctcttcttccgaggaaattgttccttctccaccgtccccgccaccgctgccaagaatatataagccgtgcttcgtatgtcaggacaagtccagtggttaccactatggagtctctgcctgcgagggctgtaaggggttttttcgtcgcagcatacagaagaacatggtgtacacctgccaccgggacaagaattgtattattaataaagtgactagaaacaggtgtcagtactgtagacttcaaaaatgttttgaggttggaatgtcaaaggaatccgtgcggaatgatcggaataagaagaaaaaggaagttcctaaaccagagtgtagcgagtcttataccctgacacctgaagttggcgagctcattgaaaaggtgagaaaggcacaccaggaaactttccctgcattgtgccagttgggcaagtatactaccaataacagctctgagcagcgtgtttctttggatatcgatctgtgggacaagttctccgagttatcgacaaagtgcattatcaagactgtagaattcgccaagcagctgcctgggttcaccacccttactatcgccgaccagattacgctcctcaaggccgcatgtcttgacatactgatcttgcgcatttgtaccaggtacactcccgagcaggacacaatgaccttttctgacggtcttactctgaatcgcacccagatgcacaacgccggctttggtccactgactgacctggtgttcgcattcgcaaaccaacttctgccacttgaaatggacgatgcagagaccggtctgctctctgccatttgcctgatctgtggcgatcgacaggacctggaacaacctgatcgcgttgacatgttgcaggagccattgctcgaagcactgaaggtctacgtgcgcaagaggaggcccagccgcccccacatgttcccaaagatgctaatgaaaattacagatctgaggtctatttccgctaaaggcgcagagcgcgtgattactttgaagatggagatccccgggtctatgccccctctcatacaggagatgttagagaatagtgaaggccttgacacattatcaggtcaaccgggtgggggtggccgagacgggggcggactggcacctccgccagggagttgttccccctctctctccccctctagtaaccgcagcagccctgccacccactcaccttag

SEQ ID NO: 275304 - DNA, 1437 bp, Artificial Sequence
  derived and/or modified sequence
atgatgagtcagactatgacacaggctggagtgagctttcggcactcagtaagagctgcccagtgccatactcgggtgcccaacacatggcctcgcgctactcgcccatacgcatcatgcaggcggagtccgaggcttcgcggaagatggccgggaagtgctgggcagggtgccggaggtcgggctcccagagccggatggcgggctggggacgtgacagggtccgccatagaaacacagtcgagttcaagtgaagaaatcgtgcccagccctccatcccccccaccactgcccaggatctataaaccctgctttgtctgtcaggacaagtcctcaggttaccactacggggtgtccgcgtgcgagggctgcaagggattcttccggaggtcaatccagaagaatatggtttatacctgccatcgcgataagaactgtatcataaacaaggtcactaggaatcgatgtcagtattgccgtttacaaaaatgttttgaggtgggaatgtcaaaggagagcgtccggaacgaccggaacaagaaaaagaaggaggtgcccaagccggagtgctccgaatcctataccctgacaccggaagtgggcgaactcatcgaaaaggtgcggaaagcccaccaagagacctttccggctttgtgccaattgggtaagtacaccacaaacaattcttccgaacagagagtgagtctggacattgatctctgggacaagttcagtgagttgtctacgaaatgcattattaaaactgtggaatttgctaagcagctgcccggttttactacattgactatcgcagaccaaattaccctgttgaaggcagcctgtttggacatactgattctgcggatttgcactcgatatactcccgagcaggatacaatgaccttttcagatggcctcaccctgaatcgcacccagatgcacaatgccggatttggccctctgactgacctggtgttcgcctttgccaaccagctgctgccactagaaatggatgatgcagaaactggcctgctgtccgctatctgccttatttgcggagatcgccaggacttggagcagcctgatcgggtcgatatgcttcaggaaccgttacttgaagccttgaaagtgtatgtgaggaagcgacggcctagccggcctcacatgttcccgaaaatgctcatgaagatcactgatctgcgcagcatctcagctaagggagccgagcgggttatcactctaaaaatggaaattcctggatccatgccaccgcttatccaggagatgctggagaattcagaggggctggatacactctcagggcagccaggagggggtggaagagatgggggtggcttagcaccaccgcctgggagctgcagccctagtctatctccatcttctaaccgtagctctcccgcaacacacagtccttag

SEQ ID NO: 275305 - DNA, 2008 bp, Artificial Sequence
  derived and/or modified sequence
acatgatgtcacagacaatgacacaagccggtgtctcattccgacacagcgtccgagctgcacaatgtcacacccgggtgccaaacacttggccccgcgcgacccggccctacgcctcctgccgccgctctccgcgtctccgggggaggtggcccggttcggccgggcagggggctggcgggcgagccccgcgggcgggctggcgagcgggtgatgtcacgggcagcgccattgagacccagagcagcagttctgaagagatagtgcccagccctccctcgccaccccctctaccccgcatctacaagccttgctttgtctgtcaggacaagtcctcaggctaccactatggggtcagcgcctgtgagggctgcaagggcttcttccgccgcagcatccagaagaacatggtgtacacgtgtcaccgggacaagaactgcatcatcaacaaggtgacccggaaccgctgccagtactgccgactgcagaagtgctttgaagtgggcatgtccaaggagtctgtgagaaacgaccgaaacaagaagaagaaggaggtgcccaagcccgagtgctctgagagctacacgctgacgccggaggtgggggagctcattgagaaggtgcgcaaagcgcaccaggaaaccttccctgccctctgccagctgggcaaatacactacgaacaacagctcagaacaacgtgtctctctggacattgacctctgggacaagttcagtgaactctccaccaagtgcatcattaagactgtggagttcgccaagcagctgcccggcttcaccaccctcaccatcgccgaccagatcaccctcctcaaggctgcctgcctggacatcctgatcctgcggatctgcacgcggtacacgcccgagcaggacaccatgaccttctcggacgggctgaccctgaaccggacccagatgcacaacgctggcttcggccccctcaccgacctggtctttgccttcgccaaccagctgctgcccctggagatggatgatgcggagacggggctgctcagcgccatctgcctcatctgcggagaccgccaggacctggagcagccggaccgggtggacatgctgcaggagccgctgctggaggcgctaaaggtctacgtgcggaagcggaggcccagccgcccccacatgttccccaagatgctaatgaagattactgacctgcgaagcatcagcgccaagggggctgagcgggtgatcacgctgaagatggagatcccgggctccatgccgcctctcatccaggaaatgttggagaactcagagggcctggacactctgagcggacagccggggggtggggggcgggacgggggtggcctggcccccccgccaggcagctgtagccccagcctcagccccagctccaacagaagcagcccggccacccactccccgtgaccgcccacgccacatggacacagccctcgccctccgccccggcttttctctgcctttctaccgaccatgtgaccccgcaccagccctgcccccacctgccctcccgggcagtactggggaccttccctgggggacggggagggaggaggcagcgactccttggacagaggcctgggccctcagtggactgcctgctcccacagcctgggctgacgtcagaggccgaggccaggaactgagtgaggcccctggtcctgggtctcaggatgggtcctgggggcctcgtgttcatcaagacacccctctgcccagctcaccacatcttcatcaccagcaaacgccaggacttggctcccccatcctcagaactcacaagccattgctccccagctggggaacctcaacctcccccctgcctcggttggtgacagagggggtgggacaggggcggggggttccccctgtacataccctgccataccaaccccaggtattaattctcgctggttttgtttttattttaatttttttgttttgatttttttaataagaattttcattttaagcac

SEQ ID NO: 275306 - DNA, 1437 bp, Artificial Sequence
  derived and/or modified sequence
atgatgagccagaccatgacccaggccggcgtgagcttcagacacagcgtgagagccgcccagtgccacaccagagtgcccaacacctggcccagagccaccagaccctacgccagctgcagaagaagccccagactgagaggcagatggcccggcagcgccggccagggcgccggcggcagagcccccagagccggctggagagccggcgacgtgaccggcagcgccatcgagacccagagcagcagcagcgaggagatcgtgcccagcccccccagccccccccccctgcccagaatctacaagccctgcttcgtgtgccaggacaagagcagcggctaccactacggcgtgagcgcctgcgagggctgcaagggcttcttcagaagaagcatccagaagaacatggtgtacacctgccacagagacaagaactgcatcatcaacaaggtgaccagaaacagatgccagtactgcagactgcagaagtgcttcgaggtgggcatgagcaaggagagcgtgagaaacgacagaaacaagaagaagaaggaggtgcccaagcccgagtgcagcgagagctacaccctgacccccgaggtgggcgagctgatcgagaaggtgagaaaggcccaccaggagaccttccccgccctgtgccagctgggcaagtacaccaccaacaacagcagcgagcagagagtgagcctggacatcgacctgtgggacaagttcagcgagctgagcaccaagtgcatcatcaagaccgtggagttcgccaagcagctgcccggcttcaccaccctgaccatcgccgaccagatcaccctgctgaaggccgcctgcctggacatcctgatcctgagaatctgcaccagatacacccccgagcaggacaccatgaccttcagcgacggcctgaccctgaacagaacccagatgcacaacgccggcttcggccccctgaccgacctggtgttcgccttcgccaaccagctgctgcccctggagatggacgacgccgagaccggcctgctgagcgccatctgcctgatctgcggcgacagacaggacctggagcagcccgacagagtggacatgctgcaggagcccctgctggaggccctgaaggtgtacgtgagaaagagaagacccagcagaccccacatgttccccaagatgctgatgaagatcaccgacctgagaagcatcagcgccaagggcgccgagagagtgatcaccctgaagatggagatccccggcagcatgccccccctgatccaggagatgctggagaacagcgagggcctggacaccctgagcggccagcccggcggcggcggcagagacggcggcggcctggcccccccccccggcagctgcagccccagcctgagccccagcagcaacagaagcagccccgccacccacagcccctag

SEQ ID NO: 275307 - protein, 462 aa, Artificial Sequence
  derived and/or modified sequence
MASNSSSCPTPGGGHLNGYPVPPYAFFFPPMLGGLSPPGALTTLQHQLPVSGYSTPSPATIETQSSSSEEIVPSPPSPPPLPRIYKPCFVCQDKSSGYHYGVSACEGCKGFFRRSIQKNMVYTCHRDKNCIINKVTRNRCQYCRLQKCFEVGMSKESVRNDRNKKKKEVPKPECSESYTLTPEVGELIEKVRKAHQETFPALCQLGKYTTNNSSEQRVSLDIDLWDKFSELSTKCIIKTVEFAKQLPGFTTLTIADQITLLKAACLDILILRICTRYTPEQDTMTFSDGLTLNRTQMHNAGFGPLTDLVFAFANQLLPLEMDDAETGLLSAICLICGDRQDLEQPDRVDMLQEPLLEALKVYVRKRRPSRPHMFPKMLMKITDLRSISAKGAERVITLKMEIPGSMPPLIQEMLENSEGLDTLSGQPGGGGRDGGGLAPPPGSCSPSLSPSSNRSSPATHSP

SEQ ID NO: 275308 - DNA, 3260 bp, Artificial Sequence
  derived and/or modified sequence
cagaagcaggggggaatcctgaatcgagctgagagggcttccccggttctcctgggaaccccatcggccccctgccagcacacacctgagcagcatcacaggacatggccccctcagccacctagctggggcccatctaggagtggcatcttttttggtgccctgaaggccagctctggaccttcccaggaaaagtgccagctcacagaactgcttgaccaaaggaccggctcttgagacatcccccaacccacctggcccccagctagggtgggggctccaggagactgagattagcctgccctctttggacagcagctccaggacagggcgggtgggctgaccacccaaaccccatctgggcccaggccccatgccccgaggaggggtggtctgaagcccaccagagccccctgccagactgtctgcctcccttctgactgtggccgcttggcatggccagcaacagcagctcctgcccgacacctgggggcgggcacctcaatgggtacccggtgcctccctacgccttcttcttcccccctatgctgggtggactctccccgccaggcgctctgaccactctccagcaccagcttccagttagtggatatagcacaccatccccagccaccattgagacccagagcagcagttctgaagagatagtgcccagccctccctcgccaccccctctaccccgcatctacaagccttgctttgtctgtcaggacaagtcctcaggctaccactatggggtcagcgcctgtgagggctgcaagggcttcttccgccgcagcatccagaagaacatggtgtacacgtgtcaccgggacaagaactgcatcatcaacaaggtgacccggaaccgctgccagtactgccgactgcagaagtgctttgaagtgggcatgtccaaggagtctgtgagaaacgaccgaaacaagaagaagaaggaggtgcccaagcccgagtgctctgagagctacacgctgacgccggaggtgggggagctcattgagaaggtgcgcaaagcgcaccaggaaaccttccctgccctctgccagctgggcaaatacactacgaacaacagctcagaacaacgtgtctctctggacattgacctctgggacaagttcagtgaactctccaccaagtgcatcattaagactgtggagttcgccaagcagctgcccggcttcaccaccctcaccatcgccgaccagatcaccctcctcaaggctgcctgcctggacatcctgatcctgcggatctgcacgcggtacacgcccgagcaggacaccatgaccttctcggacgggctgaccctgaaccggacccagatgcacaacgctggcttcggccccctcaccgacctggtctttgccttcgccaaccagctgctgcccctggagatggatgatgcggagacggggctgctcagcgccatctgcctcatctgcggagaccgccaggacctggagcagccggaccgggtggacatgctgcaggagccgctgctggaggcgctaaaggtctacgtgcggaagcggaggcccagccgcccccacatgttccccaagatgctaatgaagattactgacctgcgaagcatcagcgccaagggggctgagcgggtgatcacgctgaagatggagatcccgggctccatgccgcctctcatccaggaaatgttggagaactcagagggcctggacactctgagcggacagccggggggtggggggcgggacgggggtggcctggcccccccgccaggcagctgtagccccagcctcagccccagctccaacagaagcagcccggccacccactccccgtgaccgcccacgccacatggacacagccctcgccctccgccccggcttttctctgcctttctaccgaccatgtgaccccgcaccagccctgcccccacctgccctcccgggcagtactggggaccttccctgggggacggggagggaggaggcagcgactccttggacagaggcctgggccctcagtggactgcctgctcccacagcctgggctgacgtcagaggccgaggccaggaactgagtgaggcccctggtcctgggtctcaggatgggtcctgggggcctcgtgttcatcaagacacccctctgcccagctcaccacatcttcatcaccagcaaacgccaggacttggctcccccatcctcagaactcacaagccattgctccccagctggggaacctcaacctcccccctgcctcggttggtgacagagggggtgggacaggggcggggggttccccctgtacataccctgccataccaaccccaggtattaattctcgctggttttgtttttattttaatttttttgttttgatttttttaataagaattttcattttaagcacatttatactgaaggaatttgtgctgtgtattggggggagctggatccagagctggagggggtgggtccgggggagggagtggctcggaaggggcccccactctcctttcatgtccctgtgccccccagttctcctcctcagccttttcctcctcagttttctctttaaaactgtgaagtactaactttccaaggcctgccttcccctccctcccactggagaagccgccagcccctttctccctctgcctgaccactgggtgtggacggtgtggggcagccctgaaaggacaggctcctggccttggcacttgcctgcacccaccatgaggcatggagcagggcagagcaagggccccgggacagagttttcccagacctggctcctcggcagagctgcctcccgtcagggcccacatcatctaggctccccagcccccactgtgaaggggctggccaggggcccgagctgcccccacccccggcctcagccaccagcacccccatagggcccccagacaccacacacatgcgcgtgcgcacacacacaaacacacacacactggacagtagatgggccgacacacacttggcccgagttcctccatttccctggcctgccccccacccccaacctgtcccacccccgtgccccctccttaccccgcaggacgggcctacaggggggtctcccctcacccctgcacccccagctgggggagctggctctgccccgacctccttcaccaggggttggggccccttcccctggagcccgtgggtgcacctgttactgttgggctttccactgagatctactggataaagaataaagttctatttattct

SEQ ID NO: 275309 - DNA, 1389 bp, Artificial Sequence
  derived and/or modified sequence
atggcctccaacagttcttcatgtcctacgcctgggggtggacacctcaatggctaccctgtgcctccgtacgccttttttttcccccctatgctgggcggtctgtccccccctggcgcactgacaacgcttcaacaccagcttcctgttagcggttattccactccttctccagccacaatcgagacacagagctcctcgtctgaggagatagtaccatctccgccttctcccccccccctccccagaatttacaagccttgtttcgtctgccaggataagtcatcaggctatcactacggagtatctgcatgtgagggctgtaaagggttttttagacgcagcatccagaagaatatggtgtatacctgtcatcgtgataagaactgcataataaataaagtcacccgtaacaggtgccaatattgccgactccagaaatgcttcgaggtgggaatgagcaaggagagcgtgagaaatgacaggaataaaaagaaaaaagaagtccccaagcccgagtgctctgagtcatacactctgacccctgaggttggggagttgatagagaaggtgagaaaagcccatcaggagacgttccccgccctctgccagctggggaagtacaccacaaacaattctagtgaacagcgcgtttctctggatatcgatctgtgggacaagttctctgagctgtctactaagtgcattattaagacggtggagttcgctaaacagctaccaggattcacaacactcacaatcgcagaccagataacactcctcaaagccgcctgcctcgacattttgatccttaggatttgcacgaggtatacgcctgagcaggacacaatgaccttcagtgacggcttgacattgaatcgcacccagatgcacaatgccgggtttggccccctaactgatctggtgtttgcattcgctaaccagctgttgcctttggagatggatgacgctgagactggcttgctttccgccatttgccttatttgtggcgaccgccaggacttagaacagcccgaccgcgtggacatgctgcaggagcctctgttggaggcattgaaggtgtacgtgcgaaaacggcgcccctcgaggccgcatatgttccccaagatgttgatgaagatcactgatctcaggagcatcagcgcaaagggggcggagagggtgatcaccttaaaaatggagattccagggagcatgccccctttgatccaggaaatgctggaaaattccgaggggctggatactttgagcggacaacccggcggcggagggagagacggcggaggcctcgctccaccacccggtagctgttctccttccctgagtccctcctcaaaccgttcttcacccgctacccattcgccttag

SEQ ID NO: 275310 - DNA, 1389 bp, Artificial Sequence
  derived and/or modified sequence
atggccagtaattcctccagctgtcctacccctggcggcggccatctcaacgggtaccccgtccccccttacgcctttttctttccccctatgctggggggcctgtctccaccaggcgctttgacaacattacagcaccagcttccagtgtcaggatattccactccctcaccagcgacgatcgagacgcagtctagctcaagcgaagagatcgtcccttccccaccctcccccccacctcttccgaggatctacaaaccctgtttcgtatgtcaggataagagttccggctatcactacggagtgagcgcctgtgaagggtgtaagggcttttttaggcgcagcatccagaagaacatggtctatacctgccaccgcgataaaaactgtatcattaataaggtgacgagaaatcggtgccagtactgtagacttcaaaaatgcttcgaggtggggatgagcaaggaatctgtgcggaacgatagaaataaaaaaaagaaggaagtgcccaagccagagtgttctgagtcctacacattgacgcccgaggtgggtgaacttatcgaaaaggtgcgcaaagcccatcaggagacgttccctgctctgtgtcagttggggaagtatactacgaataatagctcggagcagcgtgtgtcgctcgatatcgacctgtgggacaaattcagtgaactctcaactaagtgcatcatcaagactgtggaatttgccaaacagctccccgggttcacaactctgacgattgctgaccagataactttgctcaaggccgcttgcctagacattctcatactcagaatatgcacccggtatacgcccgagcaggatacgatgacttttagtgacggactcactctcaaccgaacccaaatgcataatgccggtttcggacctttgaccgacctggtgtttgcctttgcaaatcaactgcttccccttgaaatggatgatgccgagaccggattactgtccgccatctgcctcatctgcggcgacagacaggacctcgagcaaccagacagagttgatatgctacaggagcccttgctagaagcccttaaggtgtacgtacgcaaaaggcgcccatctaggccccacatgttccccaaaatgctgatgaaaatcactgatctgagaagcatttccgctaaaggagctgaacgtgtcattactctcaaaatggaaattcctggcagcatgccacccctgatacaggagatgctcgagaatagcgagggcctcgatacgctgagcggacagccaggcggaggcggtagagatggaggcgggttggcgccaccgcctgggtcttgctccccgagtctctccccaagctcaaacagatctagtccggccacccatagtccatag

SEQ ID NO: 275311 - DNA, 1389 bp, Artificial Sequence
  derived and/or modified sequence
atggccagcaacagcagcagctgccccaccccaggcggcggccacctgaatggctaccctgtgcccccctatgccttcttcttcccccccatgctgggcggcctgagccccccaggggccctgaccaccctgcagcaccagctgcctgtgtctggctacagcacccccagccctgccaccatcgagacccagagcagcagcagcgaggagatcgtgcccagcccccccagccccccacccctgccccgcatctacaagccctgctttgtgtgccaggacaagagcagcggctaccactacggcgtgtctgcctgtgagggctgcaagggcttcttcagaagaagcatccagaagaacatggtgtacacctgccaccgggacaagaactgcatcatcaacaaggtgaccaggaaccgctgccagtactgccgcctgcagaagtgctttgaggtgggcatgagcaaggagagcgtgagaaatgacaggaacaagaagaagaaggaggtgcccaagccagaatgttctgagagctacaccctgaccccagaggtgggggagctgattgagaaggtgaggaaggcccaccaggagaccttccctgccctgtgccagctgggcaagtacaccaccaacaacagcagcgagcagagggtgtccctggacatcgacctgtgggacaagttcagcgagctgagcaccaagtgcatcatcaagacagtggagtttgccaagcagctgcccggcttcaccaccctgaccatcgctgaccagatcaccctgctgaaggccgcctgcctggacatcctgatcctgcgcatctgcacccgctacaccccagagcaggacaccatgaccttcagtgatggcctgaccctgaacagaacccagatgcacaatgccggcttcggccccctgacagacctggtgtttgcctttgccaaccagctgctgcccctggagatggatgatgctgagaccggcctgctgagcgccatctgcctgatctgtggggaccggcaggacctggagcagcctgacagagtggacatgctgcaggagcccctgctggaggccctgaaggtgtatgtgaggaagaggcggcccagccggccccacatgttccccaagatgctgatgaagatcacagacctgcggagcatcagcgccaagggagctgagagggtcatcaccctgaagatggagatccctggctccatgcctcctctcatccaggagatgctggagaacagcgagggcctggacaccctgagcggccagcccggcggcggcggcagagatggcggcggcctggcccctcctcctggcagctgcagccccagcctgagccccagcagcaacagaagcagccctgccacccacagcccctag

SEQ ID NO: 275312 - DNA, 1389 bp, Artificial Sequence
  derived and/or modified sequence
atggccagcaacagcagcagctgccccacccccggcggcggccaccttaacggatatcctgtgcccccttacgcctttttttttccaccaatgcttgggggcctgtcccctcccggcgcactgacaacccttcagcaccaactgcccgtctctggttacagcactccgtcaccggcaactatagagacacagtcaagctcaagtgaagaaattgtcccaagcccacccagtccaccccccctgcctcgcatttataaaccttgttttgtgtgccaggataaaagctccggataccattacggcgtttccgcctgtgagggatgcaagggttttttccgtcgctctattcagaagaatatggtgtacacatgccatcgggacaaaaattgtatcataaataaggtcactaggaaccgatgtcaatattgccgcctacagaaatgttttgaagttgggatgtccaaagagagtgtgcgtaacgatcggaacaaaaaaaaaaaagaggtccctaagcccgaatgtagtgagtcttatacgctaacaccggaagtgggggaacttatcgagaaggttaggaaggcccaccaagagactttccccgccctgtgccagctcggcaagtataccaccaataattcatccgaacagcgggtgtctctggacattgatttgtgggataaattctcggagctatctactaaatgcattatcaaaacagttgaattcgcaaaacaattacctggctttaccacgctaacaatcgctgaccagattacactgttgaaggcagcctgcctggatattctgatcctgcgcatttgcaccaggtatacacccgagcaggataccatgacattttctgatggccttactttaaacaggactcagatgcataacgccggcttcgggcccctgaccgacttagtgtttgccttcgctaatcagctgcttcctctggagatggacgacgccgagacgggactgctgagtgctatttgcctgatttgtggggataggcaggatctagagcagccagaccgggtcgacatgttacaggaacccctgttggaagccctaaaggtgtacgtccggaagaggcgccccagccgcccgcatatgttccccaaaatgctgatgaagattactgatttgcggtccatctcagccaaaggagcagagcgcgttattactctaaaaatggagatccccggtagtatgcctccgttaattcaggagatgctggaaaatagtgaaggtttagatacgctgagcggccagcctggagggggcggtcgagatggcggtgggctagcacccccccctgggagttgctccccgagtctctccccaagcagtaaccggtcctcacccgccacccactcaccctag

SEQ ID NO: 275313 - DNA, 1389 bp, Artificial Sequence
  derived and/or modified sequence
atggccagcaacagcagcagctgccccacccccggcggcggccacctgaatggatacccagtgcccccttatgcctttttctttcccccgatgctgggagggctgtcaccgcccggggccctgaccactctacagcaccagctgccggtgtcaggctactccacaccttccccagccaccattgagacccagtccagctcctccgaagaaattgtgccaagcccccccagccctccaccattgccacgcatctacaaaccatgctttgtgtgccaggataagtcctcgggatatcactacggtgtaagcgcatgtgaaggttgcaaggggttttttcgccgttctatccaaaagaacatggtgtatacgtgtcacagagataagaactgtatcataaacaaagtgacgaggaaccggtgtcagtactgcaggctgcagaaatgctttgaagtcggaatgagtaaggagtctgtacggaacgacagaaataagaagaagaaagaggtaccaaagccagagtgtagcgagtcttacactcttacacccgaggtcggcgagctgatcgaaaaggtgcgaaaggctcaccaggaaacattccccgcgctgtgtcagctgggaaagtatactactaacaatagctctgaacagcgcgtgagcctcgatatcgacttatgggacaaattcagcgagctgtccactaaatgtatcattaaaactgtggagtttgctaagcaactgcccgggttcacaactctcacaattgccgaccagatcaccttactcaaagccgcatgcctcgatatccttatcctgaggatttgcacccgatataccccggagcaggacaccatgacgttctccgatgggctgactttaaatcgcacacagatgcataatgcgggttttggacccctgacagacctggtgtttgcctttgccaaccagttattacccttagagatggacgatgcagagacagggcttctgtctgcgatatgcctgatctgcggtgatcggcaggatttagaacagcctgatcgagtcgacatgttgcaggagcctctcctggaggcccttaaggtatacgttcgcaaaagacggcccagtcgcccccacatgtttcccaagatgctgatgaagataaccgacttacggtctatttcagcaaaaggcgcggaacgggttattacattgaagatggagatcccaggatctatgccgcctttaatccaggagatgctggagaattctgaaggacttgacaccctttcaggacaaccaggaggagggggacgggatggcggaggactggctcctcccccgggaagctgctcgccgagtctcagcccgtccagtaaccggtcttccccagccactcacagtccctag

SEQ ID NO: 275314 - DNA, 1389 bp, Artificial Sequence
  derived and/or modified sequence
atggcttcaaatagcagcagctgtcctacacctgggggtgggcatctgaacggttacccggtgccgccttacgcctttttctttcctcccatgttgggaggacttagcccacccggagctctgactacactccagcaccagcttccagtgagcggatactccacaccctcaccagccactatcgagactcagtcctcctcctccgaggagatcgttccctcccctccatctccgccacctctccctcgtatatacaaaccctgtttcgtctgccaggataagtcttctggatatcactacggggtgagcgcctgtgaggggtgcaaaggattcttccgccgatcaatacaaaagaatatggtatacacttgccatcgggataaaaattgcatcattaataaggtcacccggaatcgatgccagtattgtcgactgcagaaatgcttcgaggtggggatgtctaaagagagcgttcgcaatgacagaaacaagaagaagaaggaagttcctaaacccgagtgctccgagagttacactttaactcctgaagtgggcgaacttattgagaaagtgaggaaggcccaccaggagaccttcccagcgttgtgccagctgggaaaatacacaaccaacaattcatccgagcagcgcgtttccctagatattgatctctgggataaatttagtgagctgtcaactaagtgcataatcaaaactgttgagttcgctaaacaacttccgggtttcaccaccctgactatcgccgatcagatcaccctcttgaaagcagcttgtttagacatcctgatcctcaggatatgtacccggtatacacccgaacaggataccatgacattttcagacggtctgacgctgaacaggacacagatgcacaatgcaggttttggacccctgaccgacctggtttttgccttcgccaatcagctgctgcctctagagatggatgacgcagagaccgggctgttgtccgctatatgcctcatttgtggagatcggcaggacctggagcaacccgatcgggtcgatatgctgcaggaacccctgctagaggctctcaaggtgtacgtgcggaagcgcaggcctagcaggccccatatgttcccaaagatgctgatgaagataaccgacttgcggtcgatttccgccaaaggggctgaacgagtcattactctgaaaatggagatccctgggtcaatgccccctttgatccaggagatgctcgagaattctgaaggcctggacactctatctggacagcccggaggcggtggacgagacggcggagggctagctccaccccctgggagttgtagtccttccttgtcgccgagtagcaatcgctcctccccggcaacgcattcaccttag

SEQ ID NO: 275315 - DNA, 1389 bp, Artificial Sequence
  derived and/or modified sequence
atggccagcaattcttccagctgccccactccaggaggcggtcacctgaacggatatcccgtccccccatacgcgttcttcttcccacctatgctgggcggactgtcccctcccggtgcgctaacaaccctgcagcaccagcttccagtgtctggttactccaccccatcacctgccactattgaaactcagtcttcgagcagcgaggagatcgtgcctagtcctccaagtccacccccactgcccaggatctataagccatgttttgtgtgccaggacaaatcatccggctaccattatggagtgtccgcttgtgagggctgtaagggtttcttcaggagaagcattcagaaaaatatggtctatacatgccatagagacaagaattgtatcataaataaagttactcgcaatcggtgtcagtattgccgcctgcagaaatgcttcgaagtcgggatgagcaaggagtcagtccgaaatgatcgaaataagaagaagaaagaagtgccaaagccagagtgctcagagtcctacaccctgacccccgaggtgggtgagctaatcgaaaaggtgcgtaaagcgcaccaggaaacctttcctgcattatgtcaactggggaagtacacaactaacaactcctccgagcagcgcgtgagtcttgatattgacctatgggacaagtttagcgagctgtccaccaagtgtattatcaagaccgtagagttcgcaaaacagctccccggtttcacaacactcaccatcgccgaccagatcacactgcttaaagccgcatgcctggatatattgatcttacgcatctgtactcggtatacgcctgagcaggatactatgactttttctgacggactgaccctgaatcggacccagatgcataatgcaggctttggtccacttaccgacctggtgttcgcgtttgccaatcagctgctgcctcttgagatggatgacgcagaaaccgggcttctgagcgcaatttgcctgatatgcggagacaggcaggacctggaacagcccgacagagtggatatgctccaggaaccattgttagaggctctcaaagtgtacgtccggaaaaggcgcccttccagacctcatatgttccctaaaatgctcatgaagataaccgatttgcggtcaatttcagctaagggagccgagagagtaatcactcttaaaatggagattcccggatccatgcccccattaatccaggaaatgttggagaacagtgagggactggatacacttagcggccagcccggtggaggagggcgtgatggagggggtcttgcgcctccccctggtagctgctcaccatcactgtctccaagctcaaatcgttccagtccagccacccattccccatag

SEQ ID NO: 275316 - DNA, 3271 bp, Artificial Sequence
  derived and/or modified sequence
cagcctaacccagaagcaggggggaatcctgaatcgagctgagagggcttccccggttctcctgggaaccccatcggccccctgccagcacacacctgagcagcatcacaggacatggccccctcagccacctagctggggcccatctaggagtggcatcttttttggtgccctgaaggccagctctggaccttcccaggaaaagtgccagctcacagaactgcttgaccaaaggaccggctcttgagacatcccccaacccacctggcccccagctagggtgggggctccaggagactgagattagcctgccctctttggacagcagctccaggacagggcgggtgggctgaccacccaaaccccatctgggcccaggccccatgccccgaggaggggtggtctgaagcccaccagagccccctgccagactgtctgcctcccttctgactgtggccgcttggcatggccagcaacagcagctcctgcccgacacctgggggcgggcacctcaatgggtacccggtgcctccctacgccttcttcttcccccctatgctgggtggactctccccgccaggcgctctgaccactctccagcaccagcttccagttagtggatatagcacaccatccccagccaccattgagacccagagcagcagttctgaagagatagtgcccagccctccctcgccaccccctctaccccgcatctacaagccttgctttgtctgtcaggacaagtcctcaggctaccactatggggtcagcgcctgtgagggctgcaagggcttcttccgccgcagcatccagaagaacatggtgtacacgtgtcaccgggacaagaactgcatcatcaacaaggtgacccggaaccgctgccagtactgccgactgcagaagtgctttgaagtgggcatgtccaaggagtctgtgagaaacgaccgaaacaagaagaagaaggaggtgcccaagcccgagtgctctgagagctacacgctgacgccggaggtgggggagctcattgagaaggtgcgcaaagcgcaccaggaaaccttccctgccctctgccagctgggcaaatacactacgaacaacagctcagaacaacgtgtctctctggacattgacctctgggacaagttcagtgaactctccaccaagtgcatcattaagactgtggagttcgccaagcagctgcccggcttcaccaccctcaccatcgccgaccagatcaccctcctcaaggctgcctgcctggacatcctgatcctgcggatctgcacgcggtacacgcccgagcaggacaccatgaccttctcggacgggctgaccctgaaccggacccagatgcacaacgctggcttcggccccctcaccgacctggtctttgccttcgccaaccagctgctgcccctggagatggatgatgcggagacggggctgctcagcgccatctgcctcatctgcggagaccgccaggacctggagcagccggaccgggtggacatgctgcaggagccgctgctggaggcgctaaaggtctacgtgcggaagcggaggcccagccgcccccacatgttccccaagatgctaatgaagattactgacctgcgaagcatcagcgccaagggggctgagcgggtgatcacgctgaagatggagatcccgggctccatgccgcctctcatccaggaaatgttggagaactcagagggcctggacactctgagcggacagccggggggtggggggcgggacgggggtggcctggcccccccgccaggcagctgtagccccagcctcagccccagctccaacagaagcagcccggccacccactccccgtgaccgcccacgccacatggacacagccctcgccctccgccccggcttttctctgcctttctaccgaccatgtgaccccgcaccagccctgcccccacctgccctcccgggcagtactggggaccttccctgggggacggggagggaggaggcagcgactccttggacagaggcctgggccctcagtggactgcctgctcccacagcctgggctgacgtcagaggccgaggccaggaactgagtgaggcccctggtcctgggtctcaggatgggtcctgggggcctcgtgttcatcaagacacccctctgcccagctcaccacatcttcatcaccagcaaacgccaggacttggctcccccatcctcagaactcacaagccattgctccccagctggggaacctcaacctcccccctgcctcggttggtgacagagggggtgggacaggggcggggggttccccctgtacataccctgccataccaaccccaggtattaattctcgctggttttgtttttattttaatttttttgttttgatttttttaataagaattttcattttaagcacatttatactgaaggaatttgtgctgtgtattggggggagctggatccagagctggagggggtgggtccgggggagggagtggctcggaaggggcccccactctcctttcatgtccctgtgccccccagttctcctcctcagccttttcctcctcagttttctctttaaaactgtgaagtactaactttccaaggcctgccttcccctccctcccactggagaagccgccagcccctttctccctctgcctgaccactgggtgtggacggtgtggggcagccctgaaaggacaggctcctggccttggcacttgcctgcacccaccatgaggcatggagcagggcagagcaagggccccgggacagagttttcccagacctggctcctcggcagagctgcctcccgtcagggcccacatcatctaggctccccagcccccactgtgaaggggctggccaggggcccgagctgcccccacccccggcctcagccaccagcacccccatagggcccccagacaccacacacatgcgcgtgcgcacacacacaaacacacacacactggacagtagatgggccgacacacacttggcccgagttcctccatttccctggcctgccccccacccccaacctgtcccacccccgtgccccctccttaccccgcaggacgggcctacaggggggtctcccctcacccctgcacccccagctgggggagctggctctgccccgacctccttcaccaggggttggggccccttcccctggagcccgtgggtgcacctgttactgttgggctttccactgagatctactggataaagaataaagttctatttattcta

SEQ ID NO: 275317 - DNA, 3371 bp, Artificial Sequence
  derived and/or modified sequence
agtctggggctccgggtaaagtttcagcctccgcacgtgactcgctatggccgctgccatcgccccgcgcccctgagccgcggccccctggacggctcctctcccgggaccccgcaccctgatgccgagcagcaccagggcgccgggttagggcagacgctgtgctcgctggcaccccgaacgggttgcttcccccgctgcgagcatcacaggacatggccccctcagccacctagctggggcccatctaggagtggcatcttttttggtgccctgaaggccagctctggaccttcccaggaaaagtgccagctcacagaactgcttgaccaaaggaccggctcttgagacatcccccaacccacctggcccccagctagggtgggggctccaggagactgagattagcctgccctctttggacagcagctccaggacagggcgggtgggctgaccacccaaaccccatctgggcccaggccccatgccccgaggaggggtggtctgaagcccaccagagccccctgccagactgtctgcctcccttctgactgtggccgcttggcatggccagcaacagcagctcctgcccgacacctgggggcgggcacctcaatgggtacccggtgcctccctacgccttcttcttcccccctatgctgggtggactctccccgccaggcgctctgaccactctccagcaccagcttccagttagtggatatagcacaccatccccagccaccattgagacccagagcagcagttctgaagagatagtgcccagccctccctcgccaccccctctaccccgcatctacaagccttgctttgtctgtcaggacaagtcctcaggctaccactatggggtcagcgcctgtgagggctgcaagggcttcttccgccgcagcatccagaagaacatggtgtacacgtgtcaccgggacaagaactgcatcatcaacaaggtgacccggaaccgctgccagtactgccgactgcagaagtgctttgaagtgggcatgtccaaggagtctgtgagaaacgaccgaaacaagaagaagaaggaggtgcccaagcccgagtgctctgagagctacacgctgacgccggaggtgggggagctcattgagaaggtgcgcaaagcgcaccaggaaaccttccctgccctctgccagctgggcaaatacactacgaacaacagctcagaacaacgtgtctctctggacattgacctctgggacaagttcagtgaactctccaccaagtgcatcattaagactgtggagttcgccaagcagctgcccggcttcaccaccctcaccatcgccgaccagatcaccctcctcaaggctgcctgcctggacatcctgatcctgcggatctgcacgcggtacacgcccgagcaggacaccatgaccttctcggacgggctgaccctgaaccggacccagatgcacaacgctggcttcggccccctcaccgacctggtctttgccttcgccaaccagctgctgcccctggagatggatgatgcggagacggggctgctcagcgccatctgcctcatctgcggagaccgccaggacctggagcagccggaccgggtggacatgctgcaggagccgctgctggaggcgctaaaggtctacgtgcggaagcggaggcccagccgcccccacatgttccccaagatgctaatgaagattactgacctgcgaagcatcagcgccaagggggctgagcgggtgatcacgctgaagatggagatcccgggctccatgccgcctctcatccaggaaatgttggagaactcagagggcctggacactctgagcggacagccggggggtggggggcgggacgggggtggcctggcccccccgccaggcagctgtagccccagcctcagccccagctccaacagaagcagcccggccacccactccccgtgaccgcccacgccacatggacacagccctcgccctccgccccggcttttctctgcctttctaccgaccatgtgaccccgcaccagccctgcccccacctgccctcccgggcagtactggggaccttccctgggggacggggagggaggaggcagcgactccttggacagaggcctgggccctcagtggactgcctgctcccacagcctgggctgacgtcagaggccgaggccaggaactgagtgaggcccctggtcctgggtctcaggatgggtcctgggggcctcgtgttcatcaagacacccctctgcccagctcaccacatcttcatcaccagcaaacgccaggacttggctcccccatcctcagaactcacaagccattgctccccagctggggaacctcaacctcccccctgcctcggttggtgacagagggggtgggacaggggcggggggttccccctgtacataccctgccataccaaccccaggtattaattctcgctggttttgtttttattttaatttttttgttttgatttttttaataagaattttcattttaagcacatttatactgaaggaatttgtgctgtgtattggggggagctggatccagagctggagggggtgggtccgggggagggagtggctcggaaggggcccccactctcctttcatgtccctgtgccccccagttctcctcctcagccttttcctcctcagttttctctttaaaactgtgaagtactaactttccaaggcctgccttcccctccctcccactggagaagccgccagcccctttctccctctgcctgaccactgggtgtggacggtgtggggcagccctgaaaggacaggctcctggccttggcacttgcctgcacccaccatgaggcatggagcagggcagagcaagggccccgggacagagttttcccagacctggctcctcggcagagctgcctcccgtcagggcccacatcatctaggctccccagcccccactgtgaaggggctggccaggggcccgagctgcccccacccccggcctcagccaccagcacccccatagggcccccagacaccacacacatgcgcgtgcgcacacacacaaacacacacacactggacagtagatgggccgacacacacttggcccgagttcctccatttccctggcctgccccccacccccaacctgtcccacccccgtgccccctccttaccccgcaggacgggcctacaggggggtctcccctcacccctgcacccccagctgggggagctggctctgccccgacctccttcaccaggggttggggccccttcccctggagcccgtgggtgcacctgttactgttgggctttccactgagatctactggataaagaataaagttctatttattct

SEQ ID NO: 275318 - DNA, 1389 bp, Artificial Sequence
  derived and/or modified sequence
atggccagcaacagcagcagctgccccacccccggcggcggccacctgaacggctaccccgtgcccccctacgccttcttcttcccccccatgctgggcggcctgagcccccccggcgccctgaccaccctgcagcaccagctgcccgtgagcggctacagcacccccagccccgccaccatcgagacccagagcagcagcagcgaggagatcgtgcccagcccccccagccccccccccctgcccagaatctacaagccctgcttcgtgtgccaggacaagagcagcggctaccactacggcgtgagcgcctgcgagggctgcaagggcttcttcagaagaagcatccagaagaacatggtgtacacctgccacagagacaagaactgcatcatcaacaaggtgaccagaaacagatgccagtactgcagactgcagaagtgcttcgaggtgggcatgagcaaggagagcgtgagaaacgacagaaacaagaagaagaaggaggtgcccaagcccgagtgcagcgagagctacaccctgacccccgaggtgggcgagctgatcgagaaggtgagaaaggcccaccaggagaccttccccgccctgtgccagctgggcaagtacaccaccaacaacagcagcgagcagagagtgagcctggacatcgacctgtgggacaagttcagcgagctgagcaccaagtgcatcatcaagaccgtggagttcgccaagcagctgcccggcttcaccaccctgaccatcgccgaccagatcaccctgctgaaggccgcctgcctggacatcctgatcctgagaatctgcaccagatacacccccgagcaggacaccatgaccttcagcgacggcctgaccctgaacagaacccagatgcacaacgccggcttcggccccctgaccgacctggtgttcgccttcgccaaccagctgctgcccctggagatggacgacgccgagaccggcctgctgagcgccatctgcctgatctgcggcgacagacaggacctggagcagcccgacagagtggacatgctgcaggagcccctgctggaggccctgaaggtgtacgtgagaaagagaagacccagcagaccccacatgttccccaagatgctgatgaagatcaccgacctgagaagcatcagcgccaagggcgccgagagagtgatcaccctgaagatggagatccccggcagcatgccccccctgatccaggagatgctggagaacagcgagggcctggacaccctgagcggccagcccggcggcggcggcagagacggcggcggcctggcccccccccccggcagctgcagccccagcctgagccccagcagcaacagaagcagccccgccacccacagcccctag

SEQ ID NO: 275319 - DNA, 1613 bp, Artificial Sequence
  derived and/or modified sequence
gaactagcggaggaggacgacggcgagaagccgggcctcaagctctggctgcgcatggaggacgcgcggcgcggggggcgcccacgggacaaccaggccatcgagttcctgttccagctgggccgggacgcggccgaggaggtggcacaggagatggtggctctgggcttggtctgtgaagccgattaccagccagtggcccgtgcagtacgtgaacgggttgctgccatccagcgaaagcgtgagaagctgcgtaaagcaagggaattggaggcactcccaccagagccaggacctccaccagcaactgtgcccatggcccccggtccccccagtgtcttcccccctgagcctgaggagccagaggcagaccagcaccagcccttccttttccgccacgccagctactcatctaccacttgcttttgccctatccattccacgttctggccctggaagtgacttttcccccggggacagctatgcctcagatgcagcttcaggccttagcgatgtgggagaagggatgggacaaatgaggagacccccagggaggaatctccggcgcagaccccgatcccggctgcgggtcactagtgtctcagaccagaatgacagagtggttgagtgccagctacagacccataacagcaagatggtgaccttccgatttgatctggatggggacagcccggaagagattgcagctgccatggtatataacgagttcattctgccttcggagcgagatggatttctcagacggattcgggagattatccagcgagtggagaccctgttgaagagagacactggccccatggaggctgctgaagacaccctaagcccccaggtcagaccccttggtggacacttccaggggaaatggactctctgctccagggtttattactctctgccctcagcggtccccttggatttaactcctcttcatctctgggaccctaaaacagtggcgcttttttttttttttgagatggagtctcactctgtcgcccaggctggagtgcagtggcacgatctcggctcactgcaagctccgcctcccgggttcacgccattctcctgtcccagcctcccgagtagctgggactacaggcgctcgccaccacacccggctaattttttttgtatttttagtagagacagggtttcaccgtgttagccaggctggtctcgatctcctgacctcgtgatccgccctcctcggcctcccaaagtgctgggattacaggtgtgagccaccgtgcctggcctaaaacagtggctcttagcccatttgagaatatgatgaaagccatggactcttgttctagaaaacttgttcaatacatacttttcttttaactcattattttgaaataatttcagacttgtggagagaagttgcaagaattatataaagaaccactggataccctttgcccagatttgccacttgttagtgttttgccaccttagcgtcatcattgtctcttcctctcccctctgtatgtgtgcatacataatatatttttcggaaccacttaagagtaagttgcagacatcatgcccttttacctctatacatttcagcacatatgcttctgaat

SEQ ID NO: 275320 - DNA, 378 bp, Artificial Sequence
  derived and/or modified sequence
atggccggctggatccaggcccagcagctgcagggcgacgccctgagacagatgcaggtgctgtacggccagcacttccccatcgaggtgagacactacctggcccagtggatcgagagccagccctgggacgccatcgacctggacaacccccaggacagagcccaggccacccagctgctggagggcctggtgcaggagctgcagaagaaggccgagcaccaggtgggcgaggacggcttcctgctgaagatcaagctgggccactacgccacccagctgcagaagacctacgacagatgccccctggagctggtgagatgcatcagacacatcctgtacaacgagcagagactggtgagagaggccaacaactag

SEQ ID NO: 275321 - DNA, 378 bp, Artificial Sequence
  derived and/or modified sequence
atggccggctggatccaggcgcagcagctgcagggtgacgcgctgcggcagatgcaggtcctttacggccagcactttcccattgaggtccgccactacttggcccaatggatcgagagccagccttgggatgcgattgacttggataatccacaggatcgggctcaggccacccaacttttggagggactggtccaggagttgcagaaaaaggccgagcaccaagtcggtgaagatggctttctactgaaaatcaagttgggtcactacgccacacaactgcaaaagacctacgatcggtgtccattggagctggtaaggtgcattagacatatactgtacaacgagcagagactcgttagggaggcaaataactag

SEQ ID NO: 275322 - DNA, 378 bp, Artificial Sequence
  derived and/or modified sequence
atggccggctggatccaggcccagcagctgcagggagatgccctgcggcagatgcaggtgctgtatggccagcacttccccatcgaggtgcgccactacctggcccagtggattgagagccagccctgggatgccatcgacctggacaacccccaggaccgggcccaggccacccagctgctggagggcctggtgcaggagctgcagaagaaggccgagcaccaggtgggggaggatggcttcctgctgaagatcaagctgggccactacgccacccagctgcagaagacctatgaccgctgccccctggagctggtgcgctgcatccgccacatcctgtacaatgagcagaggctggtgcgggaggccaacaactag

SEQ ID NO: 275323 - DNA, 378 bp, Artificial Sequence
  derived and/or modified sequence
atggccggctggatccaggcccagcagctgcagggcgacgccctgagacagatgcaggtactttacggacagcacttccccatcgaagttcgccactacctcgcacagtggatcgagtctcaaccctgggacgcaatagacctcgataacccacaagatcgggctcaggctacccagctccttgaaggtttggtacaggagcttcagaaaaaggcggagcatcaagtcggcgaagatgggtttttgcttaagattaaacttggccattacgctacccagcttcagaaaacctatgacagatgcccccttgagctcgtgcgctgtatcaggcatattctttacaacgagcagcgcttggttcgcgaagcaaacaattag

SEQ ID NO: 275324 - DNA, 378 bp, Artificial Sequence
  derived and/or modified sequence
atggctggctggatccaagcacagcagctgcagggggatgctttaagacagatgcaagtgctgtatggtcaacatttccctatcgaggtacgccactacctcgctcagtggattgaaagccagccctgggacgccatcgacctcgataatcctcaggaccgagcccaggcgacgcagctgctggagggcctcgtgcaggagctgcagaaaaaggctgagcatcaggtgggggaagacgggttcctgttgaagattaaactaggacattatgccactcaattacagaagacctacgaccgatgtccactggagcttgtgcggtgcatcaggcacatcctgtataatgaacaacgactagtgagagaggctaataattag

SEQ ID NO: 275325 - DNA, 515 bp, Artificial Sequence
  derived and/or modified sequence
aacagccgccgctgccgccgccgccaggaaccccggccgggagcgagagccgcggggcgcagagccggcccggctgccggacggtgcggccccaccagaggagagcgcttcagcgctcggctcgccctaggtgaacggccatggcgggctggatccaggcccagcagctgcagggagacgcgctgcgccagatgcaggtgctgtacggccagcacttccccatcgaggtccggcactacttggcccagtggattgagagccagccatgggatgccattgacttggacaatccccaggacagagcccaagccacccagctcctggagggcctggtgcaggagctgcagaagaaggcggagcaccaggtgggggaagatgggtttttactgaagatcaagctggggcactacgccacgcagctccagaaaacatatgaccgctgccccctggagctggtccgctgcatccggcacattctgtacaatgaacagaggctggtccgagaagccaacaat

SEQ ID NO: 275326 - protein, 156 aa, Artificial Sequence
  derived and/or modified sequence
MAVWIQAQQLQGEALHQMQALYGQHFPIEVRHYLSQWIESQAWDSVDLDNPQENIKATQLLEGLVQELQKKAEHQVGEDGFLLKIKLGHYATQLQNTYDRCPMELVRCIRHILYNEQRLVREANNGSSPAGSLADAMSQKHLQINQTFEELRLVTQ

SEQ ID NO: 275327 - DNA, 471 bp, Artificial Sequence
  derived and/or modified sequence
atggccgtgtggatccaggcccagcagctgcagggcgaggccctgcaccagatgcaggccctgtacggccagcacttccccatcgaggtgagacactacctgagccagtggatcgagagccaggcctgggacagcgtggacctggacaacccccaggagaacatcaaggccacccagctgctggagggcctggtgcaggagctgcagaagaaggccgagcaccaggtgggcgaggacggcttcctgctgaagatcaagctgggccactacgccacccagctgcagaacacctacgacagatgccccatggagctggtgagatgcatcagacacatcctgtacaacgagcagagactggtgagagaggccaacaacggcagcagccccgccggcagcctggccgacgccatgagccagaagcacctgcagatcaaccagaccttcgaggagctgagactggtgacccagtag

SEQ ID NO: 275328 - DNA, 471 bp, Artificial Sequence
  derived and/or modified sequence
atggccgtttggattcaggcccagcaactgcagggagaagccctgcaccagatgcaagctttgtacggccagcactttcccattgaggtgcgccactacctgtctcaatggatcgaatctcaagcttgggactcggtcgacctcgataatccccaggagaacattaaagcaactcagcttttagagggtttggtccaggagctccaaaagaaggccgagcaccaggtgggagaagacggattcttactgaaaatcaagttgggacattacgccacgcagctgcagaatacctatgaccgctgtccaatggagctggtccgctgcatccgccatattctatataacgagcagcgcctggtgagagaggctaacaatggaagcagtcctgcagggtccctggccgatgccatgagccaaaaacatctgcagatcaatcaaaccttcgaggaactgaggctggtgactcagtag

SEQ ID NO: 275329 - DNA, 471 bp, Artificial Sequence
  derived and/or modified sequence
atggctgtgtggatccaggcccagcagctgcagggcgaggccctgcaccagatgcaggccctgtatggccagcacttccccatcgaggtgcgccactacctgagccagtggattgagagccaggcctgggacagcgtggacctggacaacccccaggagaacatcaaggccacccagctgctggagggcctggtgcaggagctgcagaagaaggccgagcaccaggtgggggaggatggcttcctgctgaagatcaagctgggccactacgccacccagctgcagaacacctatgaccgctgccccatggagctggtgcgctgcatccgccacatcctgtacaatgagcagaggctggtgcgggaggccaacaacggcagcagccctgctggcagcctggctgatgccatgagccagaagcacctgcagatcaaccagacctttgaggagctgcggctggtgacccagtag

SEQ ID NO: 275330 - DNA, 471 bp, Artificial Sequence
  derived and/or modified sequence
atggccgtgtggatccaggcccagcagctgcagggcgaggccctgcaccagatgcaggcgctgtatggccaacactttcctatcgaggtaaggcattacctcagccaatggattgagagccaggcatgggattctgtggacctggataatcctcaggaaaacataaaggcgacccagctgctggagggtctggtgcaggagctacagaaaaaggccgagcaccaggtgggggaggacggctttctcttaaaaatcaagcttgggcactacgcgacccagctccaaaacacctatgatcgctgtcccatggagctcgtgaggtgtattcggcatatactctataacgaacaaaggcttgtcagagaagccaataacggttcgtctcccgccggttctttggccgacgccatgtcccagaaacatctgcagatcaaccaaactttcgaagaattgcgactggtgactcagtag

SEQ ID NO: 275331 - DNA, 471 bp, Artificial Sequence
  derived and/or modified sequence
atggccgtgtggatccaggcgcagcagctccaaggggaggctttgcaccagatgcaggcgctgtacggccagcatttccctatcgaggtgcgccattaccttagtcagtggattgaatcccaagcttgggatagcgtcgacttggataacccccaggaaaacatcaaagcaacccagcttctcgagggactggtgcaagaacttcagaaaaaagcagagcaccaggtcggggaagacgggttcctgttaaagatcaagctcgggcactatgctactcaactgcagaacacatacgacagatgccccatggaattggtgcggtgtattaggcacatcctttacaatgaacagagactcgtgagagaagcaaataacggcagttcccctgctggcagtcttgctgacgccatgagccagaagcatctgcagatcaatcaaacatttgaggagctccggctcgtcacccaatag

SEQ ID NO: 275332 - DNA, 559 bp, Artificial Sequence
  derived and/or modified sequence
aaacaaagcagcatgtgcttgcggtgcggcgtcggctagggagccgagccgggaagacaccccaccgccgcagaaaggggattgtaaaccatggctgtgtggatacaagctcagcagctccaaggagaagcccttcatcagatgcaagcgttatatggccagcattttcccattgaggtgcggcattatttatcccagtggattgaaagccaagcatgggactcagtagatcttgataatccacaggagaacattaaggccacccagctcctggagggcctggtgcaggagctgcagaagaaggcagagcaccaggtgggggaagatgggtttttactgaagatcaagctggggcactatgccacacagctccagaacacgtatgaccgctgccccatggagctggtccgctgcatccgccatatattgtacaatgaacagaggttggtccgagaagccaacaatggtagctctccagctggaagccttgctgatgccatgtcccagaaacacctccagatcaaccagacgtttgaggagctgcgactggtcacgcagg

SEQ ID NO: 275333 - protein, 1611 aa, Artificial Sequence
  derived and/or modified sequence
QVSPSHPVNENMQVNKIKKNEDAKKRLSVERIYQKKTQLEHILLRPDTYIGSVELVTQQMWVYDEDVGINYREVTFVPGLYKIFDEILVNAADNKQRDPKMSCIRVTIDPENNLISIWNNGKGIPVVEHKVEKMYVPALIFGQLLTSSNYDDDEKKVTGGRNGYGAKLCNIFSTKFTVETASREYKKMFKQTWMDNMGRAGEMELKPFNGEDYTCITFQPDLSKFKMQSLDKDIVALMVRRAYDIAGSTKDVKVFLNGNKLPVKGFRSYVDMYLKDKLDETGNSLKVIHEQVNHRWEVCLTMSEKGFQQISFVNSIATSKGGRHVDYVADQIVTKLVDVVKKKNKGGVAVKAHQRLECSGTISAHCNLRLLGFSDSLASASRVAEITDMHHHIQLIFVFLIEMGFYHVGQAGLELLASLDPPSSASCVSHCTQLFVSNFIYLFLIFLRRSFTFVTQAGVQCTISPTSSSVLAQFFESFLFVAIGCGIVESILNWVKFKAQVQLNKKCSAVKHNRIKGIPKLDDANDAGGRNSTECTLILTEGDSAKTLAVSGLGVVGRDKYGVFPLRGKILNVREASHKQIMENAEINNIIKIVGLQYKKNYEDEDSLKTLRYGKIMIMTDQDQDGSHIKGLLINFIHHNWPSLLRHRFLEEFITPIVKVSKNKQEMAFYSLPEFEEWKSSTPNHKKWKVKYYKGLGTSTSKEAKEYFADMKRHRIQFKYSGPEDDAAISLAFSKKQIDDRKEWLTNFMEDRRQRKLLGLPEDYLYGQTTTYLTYNDFINKELILFSNSDNERSIPSMVDGLKPGQRKVLFTCFKRNDKREVKVAQLAGSVAEMSSYHHGEMSLMMTIINLAQNFVGSNNLNLLQPIGQFGTRLHGGKDSASPRYIFTMLSSLARLLFPPKDDHTLKFLYDDNQRVEPEWYIPIIPMVLINGAEGIGTGWSCKIPNFDVREIVNNIRRLMDGEEPLPMLPSYKNFKGTIEELAPNQYVISGEVAILNSTTIEISELPVRTWTQTYKEQVLEPMLNGTEKTPPLITDYREYHTDTTVKFVVKMTEEKLAEAERVGLHKVFKLQTSLTCNSMVLFDHVGCLKKYDTVLDILRDFFELRLKYYGLRKEWLLGMLGAESAKLNNQARFILEKIDGKIIIENKPKKELIKVLIQRGYDSDPVKAWKEAQQKVPDEEENEESDNEKETEKSDSVTDSGPTFNYLLDMPLWYLTKEKKDELCRLRNEKEQELDTLKRKSPSDLWKEDLATFIEELEAVEAKEKQDEQVGLPGKGGKAKGKKTQMAEVLPSPRGQRVIPRITIEMKAEAEKKNKKKIKNENTEGSPQEDGVELEGLKQRLEKKQKREPGTKTKKQTTLAFKPIKKGKKRNPWSDSESDRSSDESNFDVPPRETEPRRAATKTKFTMDLDSDEDFSDFDEKTDDEDFVPSDASPPKTKTSPKLSNKELKPQKSVVSDLEADDVKGSVPLSSSPPATHFPDETEITNPVPKKNVTVKKTAAKSQSSTSTTGAKKRAAPKGTKRDPALNSGVSQKPDPAKTKNRRKRKPSTSDDSDSNFEKIVSKAVTSKKSKGESDDFHMDFDSAVAPRAKSVRAKKPIKYLEESDEDDLF

SEQ ID NO: 275334 - DNA, 4836 bp, Artificial Sequence
  derived and/or modified sequence
caggtgagccccagccaccccgtgaacgagaacatgcaggtgaacaagatcaagaagaacgaggacgccaagaagagactgagcgtggagagaatctaccagaagaagacccagctggagcacatcctgctgagacccgacacctacatcggcagcgtggagctggtgacccagcagatgtgggtgtacgacgaggacgtgggcatcaactacagagaggtgaccttcgtgcccggcctgtacaagatcttcgacgagatcctggtgaacgccgccgacaacaagcagagagaccccaagatgagctgcatcagagtgaccatcgaccccgagaacaacctgatcagcatctggaacaacggcaagggcatccccgtggtggagcacaaggtggagaagatgtacgtgcccgccctgatcttcggccagctgctgaccagcagcaactacgacgacgacgagaagaaggtgaccggcggcagaaacggctacggcgccaagctgtgcaacatcttcagcaccaagttcaccgtggagaccgccagcagagagtacaagaagatgttcaagcagacctggatggacaacatgggcagagccggcgagatggagctgaagcccttcaacggcgaggactacacctgcatcaccttccagcccgacctgagcaagttcaagatgcagagcctggacaaggacatcgtggccctgatggtgagaagagcctacgacatcgccggcagcaccaaggacgtgaaggtgttcctgaacggcaacaagctgcccgtgaagggcttcagaagctacgtggacatgtacctgaaggacaagctggacgagaccggcaacagcctgaaggtgatccacgagcaggtgaaccacagatgggaggtgtgcctgaccatgagcgagaagggcttccagcagatcagcttcgtgaacagcatcgccaccagcaagggcggcagacacgtggactacgtggccgaccagatcgtgaccaagctggtggacgtggtgaagaagaagaacaagggcggcgtggccgtgaaggcccaccagagactggagtgcagcggcaccatcagcgcccactgcaacctgagactgctgggcttcagcgacagcctggccagcgccagcagagtggccgagatcaccgacatgcaccaccacatccagctgatcttcgtgttcctgatcgagatgggcttctaccacgtgggccaggccggcctggagctgctggccagcctggacccccccagcagcgccagctgcgtgagccactgcacccagctgttcgtgagcaacttcatctacctgttcctgatcttcctgagaagaagcttcaccttcgtgacccaggccggcgtgcagtgcaccatcagccccaccagcagcagcgtgctggcccagttcttcgagagcttcctgttcgtggccatcggctgcggcatcgtggagagcatcctgaactgggtgaagttcaaggcccaggtgcagctgaacaagaagtgcagcgccgtgaagcacaacagaatcaagggcatccccaagctggacgacgccaacgacgccggcggcagaaacagcaccgagtgcaccctgatcctgaccgagggcgacagcgccaagaccctggccgtgagcggcctgggcgtggtgggcagagacaagtacggcgtgttccccctgagaggcaagatcctgaacgtgagagaggccagccacaagcagatcatggagaacgccgagatcaacaacatcatcaagatcgtgggcctgcagtacaagaagaactacgaggacgaggacagcctgaagaccctgagatacggcaagatcatgatcatgaccgaccaggaccaggacggcagccacatcaagggcctgctgatcaacttcatccaccacaactggcccagcctgctgagacacagattcctggaggagttcatcacccccatcgtgaaggtgagcaagaacaagcaggagatggccttctacagcctgcccgagttcgaggagtggaagagcagcacccccaaccacaagaagtggaaggtgaagtactacaagggcctgggcaccagcaccagcaaggaggccaaggagtacttcgccgacatgaagagacacagaatccagttcaagtacagcggccccgaggacgacgccgccatcagcctggccttcagcaagaagcagatcgacgacagaaaggagtggctgaccaacttcatggaggacagaagacagagaaagctgctgggcctgcccgaggactacctgtacggccagaccaccacctacctgacctacaacgacttcatcaacaaggagctgatcctgttcagcaacagcgacaacgagagaagcatccccagcatggtggacggcctgaagcccggccagagaaaggtgctgttcacctgcttcaagagaaacgacaagagagaggtgaaggtggcccagctggccggcagcgtggccgagatgagcagctaccaccacggcgagatgagcctgatgatgaccatcatcaacctggcccagaacttcgtgggcagcaacaacctgaacctgctgcagcccatcggccagttcggcaccagactgcacggcggcaaggacagcgccagccccagatacatcttcaccatgctgagcagcctggccagactgctgttcccccccaaggacgaccacaccctgaagttcctgtacgacgacaaccagagagtggagcccgagtggtacatccccatcatccccatggtgctgatcaacggcgccgagggcatcggcaccggctggagctgcaagatccccaacttcgacgtgagagagatcgtgaacaacatcagaagactgatggacggcgaggagcccctgcccatgctgcccagctacaagaacttcaagggcaccatcgaggagctggcccccaaccagtacgtgatcagcggcgaggtggccatcctgaacagcaccaccatcgagatcagcgagctgcccgtgagaacctggacccagacctacaaggagcaggtgctggagcccatgctgaacggcaccgagaagaccccccccctgatcaccgactacagagagtaccacaccgacaccaccgtgaagttcgtggtgaagatgaccgaggagaagctggccgaggccgagagagtgggcctgcacaaggtgttcaagctgcagaccagcctgacctgcaacagcatggtgctgttcgaccacgtgggctgcctgaagaagtacgacaccgtgctggacatcctgagagacttcttcgagctgagactgaagtactacggcctgagaaaggagtggctgctgggcatgctgggcgccgagagcgccaagctgaacaaccaggccagattcatcctggagaagatcgacggcaagatcatcatcgagaacaagcccaagaaggagctgatcaaggtgctgatccagagaggctacgacagcgaccccgtgaaggcctggaaggaggcccagcagaaggtgcccgacgaggaggagaacgaggagagcgacaacgagaaggagaccgagaagagcgacagcgtgaccgacagcggccccaccttcaactacctgctggacatgcccctgtggtacctgaccaaggagaagaaggacgagctgtgcagactgagaaacgagaaggagcaggagctggacaccctgaagagaaagagccccagcgacctgtggaaggaggacctggccaccttcatcgaggagctggaggccgtggaggccaaggagaagcaggacgagcaggtgggcctgcccggcaagggcggcaaggccaagggcaagaagacccagatggccgaggtgctgcccagccccagaggccagagagtgatccccagaatcaccatcgagatgaaggccgaggccgagaagaagaacaagaagaagatcaagaacgagaacaccgagggcagcccccaggaggacggcgtggagctggagggcctgaagcagagactggagaagaagcagaagagagagcccggcaccaagaccaagaagcagaccaccctggccttcaagcccatcaagaagggcaagaagagaaacccctggagcgacagcgagagcgacagaagcagcgacgagagcaacttcgacgtgccccccagagagaccgagcccagaagagccgccaccaagaccaagttcaccatggacctggacagcgacgaggacttcagcgacttcgacgagaagaccgacgacgaggacttcgtgcccagcgacgccagcccccccaagaccaagaccagccccaagctgagcaacaaggagctgaagccccagaagagcgtggtgagcgacctggaggccgacgacgtgaagggcagcgtgcccctgagcagcagcccccccgccacccacttccccgacgagaccgagatcaccaaccccgtgcccaagaagaacgtgaccgtgaagaagaccgccgccaagagccagagcagcaccagcaccaccggcgccaagaagagagccgcccccaagggcaccaagagagaccccgccctgaacagcggcgtgagccagaagcccgaccccgccaagaccaagaacagaagaaagagaaagcccagcaccagcgacgacagcgacagcaacttcgagaagatcgtgagcaaggccgtgaccagcaagaagagcaagggcgagagcgacgacttccacatggacttcgacagcgccgtggcccccagagccaagagcgtgagagccaagaagcccatcaagtacctggaggagagcgacgaggacgacctgttctag

SEQ ID NO: 275335 - DNA, 4836 bp, Artificial Sequence
  derived and/or modified sequence
caggtgagcccctcccatcctgtaaatgagaacatgcaggtcaataagatcaagaaaaatgaggacgccaagaagagattaagtgttgagaggatctaccagaagaagacccagctggaacatattctcctcaggccagatacctatatcggttcggtggaactggtgacccagcagatgtgggtgtacgacgaggacgtggggatcaattaccgggaagtcaccttcgtgccaggcctgtataagatttttgatgaaattctggtgaacgctgcggataacaaacaacgggatccaaaaatgtcttgcattagggtgactatcgatccggagaacaatctgattagcatttggaacaacggaaaaggcatcccagtcgtggaacacaaggtggagaaaatgtacgtccccgctttgatcttcggccagctgttaacatcctctaactacgatgatgatgaaaagaaagtcaccggcggaaggaacgggtatggggctaagctctgtaatatcttttctactaagtttacagtggaaacggctagccgcgagtataaaaagatgtttaagcagacatggatggataacatggggcgggccggagagatggagttgaagccattcaatggcgaggattacacctgcatcacctttcagcctgacctcagcaagttcaaaatgcaaagcctggacaaggatattgtggcccttatggttcgcagagcatatgacatagcaggctccaccaaggatgtcaaggtgtttctgaatggcaataagcttcccgtaaagggatttaggtcctatgtcgatatgtacttgaaggataagctggatgagacaggcaatagcctaaaagtcattcatgagcaggtgaatcatcggtgggaagtttgcctgacaatgagcgagaaaggcttccagcagatctcgttcgtcaactctatcgccacctccaaggggggacgccacgtggactacgtggcagatcagatcgtgactaagctagtggatgtcgttaaaaaaaaaaacaaaggtggtgtagctgtaaaagcacaccagcgactggaatgctccggaaccatctctgctcactgcaacctaaggctgcttggcttctcagactctctggccagtgcgtctagagtggccgagatcacagacatgcatcaccatattcagctgatcttcgtatttctgattgagatgggattctaccatgtcgggcaggctggcctggaactattggcgagtctcgacccgccctctagtgcatcgtgcgtttctcactgtactcagttgtttgtgtcgaatttcatctacctgtttttaatttttctcaggaggagcttcactttcgtgactcaggccggcgtgcagtgcactatctcgccaaccagtagctccgtgttagcgcagttcttcgagtctttcctgttcgtcgccatcggatgtggaattgttgagtctatattaaactgggtgaaatttaaagcccaggttcagctgaataaaaagtgctccgctgtgaagcacaaccggataaagggcattccaaagttggatgacgctaacgacgccggtgggcgcaactccaccgagtgcactttgatcctgacggagggtgacagtgctaaaaccttggccgtcagtggattgggagtggtcggtcgcgataaatatggcgtgtttcctctgcgcggtaagattctgaatgttcgcgaagcttctcataaacagattatggagaatgcagaaatcaataacatcatcaagatcgtcgggttgcagtataaaaagaactacgaggatgaggacagtctaaaaactttacggtatggaaagataatgatcatgaccgatcaagaccaggacgggtcccacattaaaggtctactgattaattttatacaccacaattggccatctttgctgaggcatagatttttagaagaatttatcacccctatcgtcaaagtgtccaagaacaagcaggagatggcattctactccttacccgagttcgaagaatggaaatcctctactcctaaccacaagaaatggaaggtcaagtattacaagggcctcggcacatcaacttccaaagaggctaaggagtactttgccgacatgaagaggcacagaatacaattcaagtattccggacccgaagacgatgccgcaatctctttagcctttagcaaaaaacagattgatgaccgcaaggaatggctaacaaatttcatggaggatagacgccaaagaaagctactggggctgccagaagattacctgtatggccagacaacgacttatctgacctacaatgactttattaataaggagctcatactgtttagcaattccgacaatgagagatcgattcctagcatggttgatgggttaaagcctgggcagagaaaggtgctgttcacctgttttaaacgcaacgacaagagagaagttaaggtggctcaactcgctggctctgtggccgaaatgagtagctatcaccacggggaaatgagtctcatgatgacaattattaatctggcacaaaactttgtaggctctaataatctcaatcttctccagccaatcggccagtttggaactcggctgcacggcgggaaggactcggcatcaccccgctatatttttacaatgctttccagcctggctaggctcctctttccacccaaagacgaccataccctgaaattcctatacgacgataatcagcgggtggaaccggaatggtacatccctatcatacctatggtcctgatcaacggagctgagggtatcggaacaggttggtcttgtaagatccccaattttgacgtgagagaaattgtcaataatatccggaggctgatggatggggaagagccgctgcccatgttgccaagttacaaaaacttcaagggaaccatcgaggagcttgccccaaatcagtacgtgatttccggcgaggtagcgatcctcaactcgacaaccatcgaaatcagcgaactgcctgtgcgtacgtggacccagacttacaaggaacaagttcttgagcccatgttgaacgggaccgaaaagacacccccactcattaccgattatagggagtatcatacagacacgactgtcaaatttgttgtaaaaatgacagaagagaaacttgcggaagccgagcgtgtcggtctgcacaaggtgtttaaattgcaaacttcgctgacttgtaactctatggtcctgtttgatcacgtgggatgtttgaaaaaatacgacacagtcctcgatatccttagggacttcttcgagctcaggctcaagtactatggactgcggaaggagtggctgctgggcatgctaggagcagagagcgcaaagctgaataatcaggcacgcttcattttagagaagatcgacgggaagattataattgaaaataaaccgaaaaaggagcttatcaaggtcctgattcaaagggggtatgactccgacccagtaaaagcttggaaggaggctcaacagaaagtcccggatgaggaggagaatgaggagagcgacaacgaaaaagagaccgagaagtctgactcagtgactgacagcggacctactttcaactacctcctggatatgcctttatggtatctgaccaaagaaaagaaggatgaactgtgtcgactgaggaacgagaaagagcaagaactggacaccctgaagagaaagagtccatccgacttgtggaaagaggacctcgccacctttatcgaagaactggaggctgttgaggccaaggaaaaacaggatgagcaggtggggctgcctgggaaaggtggaaaagcaaaaggtaagaaaactcaaatggccgaggtcctcccatctcctaggggtcagagagttattcccagaatcactatagaaatgaaggctgaggccgagaagaaaaacaagaaaaaaattaaaaatgaaaatacagagggttccccccaggaggacggcgtggaactggaaggactcaaacagagattagagaagaaacagaaacgggaacccgggactaagaccaaaaagcaaacaactcttgcattcaaaccgatcaaaaaggggaaaaaacgtaacccctggtccgactccgagtccgataggagctctgacgagtccaatttcgacgtgcccccgagagaaaccgagcccaggagagcagccaccaaaacaaagttcactatggacctcgacagtgacgaggacttttctgattttgatgagaaaacagatgacgaggattttgttccgtccgatgcaagccctccaaaaaccaagacatctcccaaactttccaataaagagctcaagccacagaagagtgtggtgagcgatttagaggctgacgacgtgaagggcagcgtgcctctgagctcctcaccgcccgccacccactttccagacgaaacagagattaccaatccagtgccaaaaaaaaacgtaacggtgaagaaaaccgccgctaagtctcagtcctccacctcaaccactggggctaagaagcgggccgcgcctaaaggaaccaaacgtgatcccgccttgaattccggcgtgtctcagaagcccgatcccgctaaaaccaaaaacaggcggaagcggaagcccagtaccagcgacgattcggattcaaatttcgaaaaaatcgtcagcaaggccgtaacatcgaagaagagcaaaggggaatctgatgattttcatatggattttgattctgccgtggccccacgagcaaagagcgtgagagctaaaaagccgatcaagtacctggaagagtcagacgaggatgacctgttctag

SEQ ID NO: 275336 - DNA, 4836 bp, Artificial Sequence
  derived and/or modified sequence
caggtgagccccagccaccctgtgaatgaaaacatgcaggtgaacaagatcaagaagaatgaagatgccaagaagaggctgtctgtggagcgcatctaccagaagaagacccagctggagcacatcctgctgcggccagacacctacatcggctctgtggagctggtgacccagcagatgtgggtgtatgatgaagatgtgggcatcaactaccgggaggtgacctttgtgcccggcctgtacaagatctttgatgagatcctggtgaatgctgctgacaacaagcagagggaccccaagatgagctgcatccgggtgaccatcgaccctgagaacaacctgatcagcatctggaacaacgggaagggcatccctgtggtggagcacaaggtggagaagatgtatgtgcctgccctgatcttcggccagctgctgaccagcagcaactatgatgatgatgagaagaaggtgactggaggaagaaatggctacggggccaagctgtgcaacatcttcagcaccaagttcaccgtggagacagccagccgggagtacaagaagatgttcaagcagacctggatggacaacatgggccgggccggggagatggagctgaagcccttcaatggagaggactacacctgcatcaccttccagcctgacctgagcaagttcaagatgcagagcctggacaaggacatcgtggccctgatggtgcggcgggcctatgacattgctggcagcaccaaggatgtgaaggtgttcctgaatggaaacaagctgcctgtgaagggcttccgctcctatgtggacatgtacctgaaggacaagctggatgaaacaggcaacagcctgaaggtgattcatgagcaggtgaaccaccgctgggaggtgtgcctgaccatgtctgagaagggcttccagcagatcagctttgtgaacagcatcgccaccagcaagggcggccgccacgtggactatgtggccgaccagatcgtgaccaagctggtggatgtggtgaagaagaagaacaagggcggcgtggccgtgaaggcccaccagaggctggagtgcagcggcaccatcagcgcccactgcaacctgcggctgctgggcttcagtgacagcctggccagcgccagccgggtggccgagatcacagacatgcaccaccacatccagctgatctttgtgttcctgattgagatgggcttctaccacgtgggccaggccggcctggagctgctggccagcctggacccccccagcagcgccagctgtgtgagccactgcacccagctgtttgtgagcaacttcatctacctgttcctgatcttcctgcggcgctccttcacctttgtgacccaggccggcgtgcagtgcaccatcagccccaccagcagctctgtgctggcccagttctttgagagcttcctgtttgtggccatcggctgcggcatcgtggagagcatcctgaactgggtgaagttcaaggcccaggtgcagctgaacaagaagtgcagcgctgtgaagcacaaccgcatcaagggcatccccaagctggatgatgccaatgatgctgggggcaggaacagcacagagtgcaccctcatcctgacagaaggagacagcgccaagaccctggccgtgtctggcctgggcgtggtgggccgggacaagtatggagtcttccccctgcggggcaagatcctgaatgtgcgggaggccagccacaagcagatcatggagaatgctgagatcaacaacatcatcaagatcgtgggcctgcagtacaagaagaactatgaagatgaggacagcctgaagaccctgcgctatggcaagatcatgatcatgacagaccaggaccaggacggcagccacatcaagggcctgctgatcaacttcatccaccacaactggcccagcctgctgcggcaccgcttcctggaggagttcatcacccccatcgtgaaggtgtccaagaacaagcaggagatggccttctacagcctgcctgagtttgaggagtggaagagcagcacccccaaccacaagaagtggaaggtgaagtactacaagggcctgggcaccagcaccagcaaggaggccaaggagtactttgctgacatgaagaggcaccgcatccagttcaagtacagcggcccagaagatgatgctgccatcagcctggccttcagcaagaagcagattgatgacaggaaggagtggctgaccaacttcatggaggaccggcggcagaggaagctgctgggcctgcctgaggactacctgtatggccagaccaccacctacctgacctacaatgacttcatcaacaaggagctgatcctcttcagcaacagcgacaatgaaagaagcatccccagcatggtggatggcctgaagccaggccagaggaaggtgctcttcacctgcttcaagagaaatgacaagcgggaggtgaaggtggcccagctggccggctctgtggccgagatgagcagctaccaccacggggagatgagcctgatgatgaccatcatcaacctggcccagaactttgtgggcagcaacaacctgaacctgctgcagcccatcggccagtttggcacccggctgcatggaggcaaggacagcgccagcccccgctacatcttcaccatgctgagcagcctggcccggctgctcttcccccccaaggatgaccacaccctgaagttcctgtatgatgacaaccagagggtggagcctgagtggtacatccccatcatccccatggtgctgatcaatggagctgagggcatcggcaccggctggagctgcaagatccccaactttgatgtgcgggagatcgtgaacaacatccggcggctgatggatggagaggagcccctgcccatgctgcccagctacaagaacttcaagggcaccatcgaggagctggcccccaaccagtatgtgatcagcggggaggtggccatcctgaacagcaccaccatcgagatcagcgagctgcctgtgaggacctggacccagacctacaaggagcaggtgctggagcccatgctgaatggaacagagaagaccccacccctcatcacagactaccgggagtaccacacagacaccaccgtgaagtttgtggtgaagatgacagaggagaagctggccgaggccgagcgggtgggcctgcacaaggtgttcaagctgcagaccagcctgacctgcaacagcatggtgctgtttgaccacgtgggctgcctgaagaagtatgacacagtgctggacatcctgcgggacttctttgagctgcggctgaagtactacggcctgaggaaggagtggctgctgggcatgctgggcgctgagagcgccaagctgaacaaccaggcccgcttcatcctggagaagattgatggcaagatcatcatcgagaacaagcccaagaaggagctgatcaaggtgctgatccagaggggctatgacagcgaccctgtgaaggcctggaaggaggcccagcagaaggtgcctgatgaggaggagaatgaggagagtgacaatgagaaggagacagagaagagtgacagcgtgacagattctggccccaccttcaactacctgctggacatgcccctgtggtacctgaccaaggagaagaaggatgagctgtgccgcctgagaaatgagaaggagcaggagctggacaccctgaagaggaagagccccagcgacctgtggaaggaggacctggccaccttcatcgaggagctggaggccgtggaggccaaggagaagcaggatgagcaggtgggcctgcccgggaagggcggcaaggccaagggcaagaagacccagatggccgaggtgctgcccagcccccggggccagagggtcatcccccgcatcaccatcgagatgaaggccgaggccgagaagaagaacaagaagaagatcaagaatgaaaatacagagggcagcccccaggaggatggagtggagctggagggcctgaagcagaggctggagaagaagcagaagcgggagcccggcaccaagaccaagaagcagaccaccctggccttcaagcccatcaagaagggcaagaagaggaacccctggagcgacagcgagagtgacaggagcagtgatgagagcaactttgatgtgcccccccgggagacagagccccggcgggccgccaccaagaccaagttcaccatggacctggacagtgatgaggacttcagtgactttgatgagaagacagatgatgaggactttgtgcccagtgatgccagcccccccaagaccaagaccagccccaagctgagcaacaaggagctgaagccccagaagtctgtggtgtctgacctggaggctgatgatgtgaagggctctgtgcccctgagcagcagccccccagccacccacttcccagatgaaacagagatcaccaaccctgtgcccaagaagaatgtgacagtgaagaagacagctgccaagagccagagcagcaccagcaccaccggggccaagaagagagctgcccccaagggcaccaagagggaccctgccctgaacagcggcgtgtcccagaagccagaccctgccaagaccaagaacagaaggaagaggaagcccagcaccagtgatgacagcgacagcaactttgagaagatcgtgtccaaggctgtgaccagcaagaagagcaagggggagagtgatgacttccacatggactttgacagcgctgtggccccccgggccaagtctgtgcgggccaagaagcccatcaagtacctggaggagagtgatgaagatgacctcttctag

SEQ ID NO: 275337 - DNA, 4836 bp, Artificial Sequence
  derived and/or modified sequence
caggtgagccccagccaccccgtgaacgagaacatgcaggtgaacaaaattaaaaaaaatgaggatgcaaagaagcgcttatcggtggagagaatctaccagaaaaagacacagctggagcatattcttcttcggcctgatacttacataggatcagttgagcttgtgacacagcagatgtgggtctacgacgaggacgtgggcatcaattatcgtgaggtgacctttgttcctggcctttataaaatttttgatgaaatcctggtgaacgctgctgacaacaagcaaagggatcccaaaatgtcctgtattcgagtcacgatagatccagagaataaccttattagcatctggaataacggaaagggaatccccgtagtggaacataaggttgagaaaatgtatgtaccagctcttatttttggccagctccttaccagcagcaattatgatgacgatgagaaaaaggtcacaggtggccgaaatggctatggggcgaaactgtgcaacatattttctaccaaatttaccgtggagaccgcctcccgagagtacaaaaaaatgtttaagcagacctggatggacaatatgggccgcgccggggaaatggagttgaagccattcaatggtgaggattatacgtgtatcacctttcaacccgatttgtctaagtttaagatgcaatcactggataaggatatagtggccttaatggtgaggcgagcttatgacatcgcaggctcaacaaaggacgtgaaagtctttctaaacgggaacaagttgcccgtgaaggggtttcggagttatgtagacatgtacctgaaggacaagctcgatgagaccggcaatagtcttaaggtcatccacgagcaagtcaaccacagatgggaggtctgcctgacgatgtcagagaaaggatttcagcaaatctcatttgtcaattctattgctacctccaagggcggcaggcacgtggactacgtcgcagatcagattgtgacaaaattggttgacgtggtgaagaaaaaaaataagggtggcgtggcagtgaaggctcaccagcgtctggaatgcagcggaaccattagcgctcattgtaaccttcgccttctcggattctctgactccctggcgtccgccagcagggttgcagagattacggacatgcatcatcatatccagctgatttttgtgttcctgattgagatgggcttttatcatgtcggccaagccgggctggaactcctggcctccctggatccacccagcagcgcctcctgtgtatcccattgcacccagcttttcgtgtccaacttcatctatctgtttctgatattcctgagaagatctttcacttttgtgacccaagcgggtgtgcagtgcactattagcccaacgtcctcttccgtactggctcagttcttcgagtccttcctcttcgtggctatcggctgtggaattgtggagagtattcttaattgggtaaagtttaaagcacaggtgcaacttaacaagaagtgcagtgctgtgaagcataaccggatcaagggcattccgaagttagacgatgccaacgatgctgggggcagaaatagcactgagtgtactctgatcctgacagagggcgacagtgccaagacccttgcagtgagcgggctgggcgtagtgggcagagataagtatggcgttttccctctgcgaggaaaaatcctgaatgtgcgcgaggcttcgcacaagcagattatggaaaacgcagagattaacaacatcatcaagatcgttggactgcagtataagaagaattatgaagacgaggattctctgaaaacactcagatatggcaaaattatgattatgacagatcaggatcaagatgggtcacatatcaagggccttctaatcaactttatccaccacaattggcctagcctgctccgacaccgctttctagaggagtttattacccctatcgtgaaggtttcaaagaataagcaggaaatggccttttatagcctgcctgagttcgaggaatggaagagctcaacgcctaaccacaaaaagtggaaggtgaagtattacaagggtctgggcacaagcacctccaaggaagccaaagaatatttcgcagatatgaaaagacaccgtatccagtttaagtacagtggtccagaagacgacgcagcaatctccctggcattttctaagaaacaaattgacgatagaaaggaatggttgacgaacttcatggaggaccgccgccagcgtaaactgctgggcttgcccgaagattatctatacggccagaccactacttacctgacctacaacgattttatcaataaggaactgattctattctcgaactcagacaatgagagatcaattccttctatggtagatggcctgaagcctggacagcgtaaagtgctgtttacatgttttaaacgaaacgacaaacgcgaagtcaaggttgctcagttagctggctccgtagctgagatgagcagctaccatcacggagagatgtccttgatgatgaccattatcaaccttgcgcagaattttgttggttctaacaatctgaatctactgcaaccgatcggacagttcggaaccagattacacggaggcaaagatagtgctagtccacgctatatcttcacaatgttgtcctctttagcccgcctgctattccccccgaaggacgatcacactctgaaattcctttatgacgataaccaacgggtcgaacctgaatggtatataccaataattccaatggtccttatcaatggcgccgaaggaattggaacgggctggtcctgcaagattccaaactttgatgttcgcgaaatagtcaataatattagaagactaatggacggtgaggagccacttccaatgctcccgagctacaagaattttaagggtaccattgaggagttagccccaaaccaatacgtcattagcggagaagtggccatacttaattcaacaactatcgagatctcggaactgcctgttcgcacttggactcagacctacaaggaacaggtcctggagcccatgcttaacggaaccgagaaaacccctcccctgatcacagactatcgcgagtatcataccgataccactgtgaagttcgttgtcaagatgactgaggagaaattagctgaggccgaacgcgtcggactccataaagtattcaaactgcagacatctctaacgtgtaactcgatggtgctctttgaccacgtgggctgcctcaagaagtacgacaccgtacttgacatcctgcgtgatttcttcgagttgaggctgaagtattacggtctgcggaaagaatggttgctgggaatgctgggtgctgaatccgcaaagttaaataaccaggcccgcttcatccttgaaaaaattgacggtaagatcatcatcgaaaacaaaccaaaaaaggaactcatcaaagtgcttatccaacggggctatgactccgatccggtgaaagcctggaaggaagctcagcagaaggtgccagacgaggaagagaacgaggagagtgacaacgaaaaggagacggaaaagagcgatagcgtaacagactctggccccaccttcaactatctgcttgacatgcccctctggtacctgactaaggaaaagaaagatgaactatgccgattgagaaatgagaaagagcaggaactcgatacactgaagcgcaagagtccatccgatctatggaaagaggatttagcaacgttcattgaggaactggaagctgtcgaggccaaggaaaaacaggacgaacaggtcggcctgccaggaaagggtggcaaggcaaagggcaaaaaaacgcagatggccgaggtgttgccatccccgcggggacaacgggtgatcccacggattaccattgaaatgaaagccgaggccgagaagaaaaataagaagaaaataaaaaacgagaataccgaagggtcccctcaagaggacggcgtcgagctggaaggcctgaagcagcgactcgaaaagaaacagaagcgcgagccaggtacaaaaacaaaaaagcaaacaactttggcttttaaacctattaaaaagggaaaaaagcgcaacccgtggtcagattccgagtctgaccgctcttccgatgaatctaattttgacgttccgccccgtgagacggagccaaggagagcagccactaagacaaaattcaccatggacctggactccgacgaggatttctccgacttcgacgaaaagacagatgatgaagactttgtgccaagcgacgcaagcccacctaagaccaaaacttctccaaagcttagcaacaaagagctgaagccgcaaaaatccgtggtgagtgatttggaggccgatgacgtcaaagggtcagttcccctgtctagttccccacccgctacccactttccagacgagaccgaaataaccaacccagtccctaaaaagaacgtgactgtcaagaagaccgcagccaaatctcagagttccacctcgaccacgggggcaaaaaaacgcgcggcgcctaagggcaccaaacgcgatcccgcccttaactctggtgtcagccagaaacccgatcccgctaagacgaaaaaccgccgcaagagaaagccctcaaccagcgatgacagcgattctaacttcgaaaagatagtcagcaaggccgtcaccagtaaaaagtctaagggggagagtgatgattttcatatggattttgacagtgccgtcgcccccagagcgaagagtgtacgggccaagaaacctataaaatacctcgaagagagtgatgaagatgacctattctag

SEQ ID NO: 275338 - DNA, 4836 bp, Artificial Sequence
  derived and/or modified sequence
caggtgagccctagtcaccccgttaatgaaaacatgcaagtcaataaaatcaagaaaaacgaggacgctaagaagagactatctgtcgagcggatctatcaaaaaaagacccaactcgagcatatcctgctgcgtcctgatacttatatcgggtctgttgagctcgtcacccagcaaatgtgggtgtacgatgaagatgtcggcatcaactaccgcgaggtcacattcgtccctgggctctacaagatattcgacgaaattctggtgaacgctgccgacaacaaacagagagaccccaagatgagctgtattcgggtgaccattgatcctgagaataacttgatttccatctggaacaacgggaagggaatccccgtggtagagcataaggtggaaaagatgtacgttcctgcccttatcttcgggcagctcctgacctcgtccaattacgatgacgacgagaaaaaagtgacaggaggaaggaacggctatggagccaagctgtgcaatatctttagcacgaaattcactgtggagacggctagccgggaatacaagaaaatgtttaagcagacatggatggacaacatgggacgggcaggggaaatggaactcaagccattcaacggggaagattacacatgcatcacctttcaaccagatctgtccaaatttaaaatgcagtctctggacaaagacatcgttgcactgatggtgaggcgcgcttatgacattgccggaagcaccaaggacgtgaaggtctttctcaacgggaataaactgcctgttaagggtttcaggagctacgtagatatgtaccttaaggataagctggatgagactggtaactcccttaaagtcatccacgaacaggtgaaccacaggtgggaggtgtgcttgaccatgtcggagaaaggcttccaacagattagtttcgttaactctatcgcaacatctaaggggggacggcatgtggattacgtggccgatcagatcgtgaccaaattggtggacgttgtcaagaagaagaataaggggggagtcgcagtcaaagcacatcagcggctcgagtgcagtggcacgatcagcgcacattgcaacctgcgcctacttggattctcggacagcctagcatctgcctcccgcgtggccgaaatcactgacatgcaccatcatatccagctgatcttcgtgtttctcatcgaaatgggcttttaccacgtcggtcaggctggcctcgagctgctcgcatccctggatccaccctcctcggcatcctgcgtatcccactgcacccagctgtttgtatcaaacttcatctacctgtttctcatctttctccggaggagcttcacattcgttactcaggccggagtgcagtgcacaatcagcccgacctcttctagcgtgctcgcccagtttttcgaatcattcttattcgttgccataggatgtgggatcgtcgagtccatcctcaactgggttaaattcaaggcccaggtacagttgaacaaaaaatgttctgccgtcaaacacaaccggatcaagggcattcctaaacttgacgacgctaacgacgccggaggaaggaattctacagaatgcacactgattctgacagagggagactctgccaagactctggccgtgtcagggctgggggttgtaggacgggataagtatggggtgtttccgctgagaggcaagattcttaacgtcagagaagcctcccataagcagattatggaaaacgcggagatcaacaatatcatcaaaatcgtgggactccagtacaagaaaaattatgaggatgaggacagtcttaagacgctgcgctacgggaagataatgatcatgaccgaccaggaccaggacgggtcccacatcaagggtcttttgatcaactttattcatcataattggccaagcttgttaaggcataggtttctggaggaatttataacccctatcgtcaaggtgtccaaaaataagcaggaaatggccttttactcgctccctgaattcgaagagtggaagtcttccacccctaatcacaagaaatggaaagtaaaatactacaaaggactcgggacaagtaccagcaaagaagctaaggaatactttgcagacatgaagaggcaccggatccagtttaaatacagtggcccagaggatgacgcagctatctcactggccttctctaagaagcagattgacgatcggaaggagtggttgaccaacttcatggaggacaggcgacagcggaaactgttaggcctcccagaggattacctctatggccagacgacaacctacctcacttataatgattttatcaacaaggaactaatcctattttccaattcagacaacgaacgcagtatccccagcatggtggatggacttaaaccagggcagaggaaggtactctttacatgctttaaaagaaatgataaaagagaggtgaaggtggcccagttggccggatccgtcgctgagatgagctcataccaccacggcgagatgagtcttatgatgacgattataaatttggcacaaaatttcgttggttccaataatctgaacttgttgcagcccattggtcagttcgggacgcgccttcacggaggaaaagactccgcctccccacgctacatttttacgatgctctcatcactagcacggctgctttttccgcctaaggacgatcataccttgaagtttctgtacgacgacaaccagcgcgtagaacctgagtggtatattcccattatacccatggtgctaattaacggcgcagagggtatcggaaccggttggtcatgcaaaataccaaattttgatgtccgagagatcgtaaacaatataaggcgattgatggatggagaggaaccgctcccaatgctgccttcatacaaaaatttcaagggaaccattgaggaattggccccaaaccaatacgttatctctggcgaggtagccatcctgaactcgacaaccatcgagatatccgaacttcctgtgcgaacgtggactcagacttacaaagaacaggtccttgagcccatgctgaatggcaccgagaagactccacctcttatcactgactatagagaatatcatacagatacaaccgttaagttcgtggtgaaaatgacagaagaaaagttggcagaagctgagcgcgtgggtcttcacaaagtgtttaagctccagaccagccttacttgtaactctatggttttgtttgatcatgttggctgcctgaagaagtatgatactgtccttgatatcttgagagactttttcgagctgcggttgaagtactatggtctgcgaaaggagtggctactgggcatgcttggggctgagagtgccaaactcaataaccaagcacgtttcatcctggaaaagattgatgggaagatcatcatcgaaaacaagcccaaaaaagaattaatcaaagtgcttatccagaggggatacgatagcgacccagtgaaggcatggaaggaggcccaacagaaggtccccgatgaggaggaaaacgaagagtctgataatgaaaaagaaacagagaagagcgacagtgtgacagactccggaccgacatttaactacctgctcgacatgcccctgtggtatctcactaaggagaaaaaggacgaactctgtagactgcggaacgagaaggagcaggagctagatactttgaaacggaaatcccccagtgatctctggaaggaagacctcgccacttttatagaagaactggaagccgtcgaggcgaaggagaagcaggacgaacaagtgggcttgcccggtaaaggtgggaaggcaaaaggcaagaagacgcaaatggccgaggtacttccctcgcctcgcggacagcgggtgatccccaggatcacgatcgaaatgaaagctgaagctgaaaaaaaaaataagaagaagattaaaaatgaaaacaccgaggggagtcctcaagaagacggagtagaactcgagggactgaaacaacgacttgaaaaaaaacagaagagggagccaggaaccaaaaccaagaaacagacaactctcgccttcaaacccatcaaaaaaggaaagaagcgcaacccctggtcagactccgaaagtgatcgcagctccgatgaatctaacttcgacgtgccaccacgagagactgagccacggagagctgctacaaaaaccaagtttacaatggatttagattccgacgaggactttagtgattttgatgaaaagacggatgacgaggactttgtcccaagcgacgcatccccgcctaaaacgaagacgagcccaaagttgagcaataaagagcttaaaccacagaaatcagttgtttccgatctggaagccgatgatgtgaagggttctgtgcctctcagcagttcaccgcctgccactcattttcctgacgaaacagaaataacaaatcccgtgcctaagaagaatgtcacagtgaaaaaaacagcagccaagagtcagtcaagcacatcaacgactggggcaaagaaacgggcagctcctaaagggactaaaagagatccagcattgaactctggagtgtctcagaaacccgaccccgcaaagaccaagaatcgtagaaaaaggaaaccgtccaccagtgacgattcagactccaatttcgagaaaatcgtgagcaaggcggtcacgagcaaaaagtctaagggtgagagtgacgatttccatatggatttcgatagcgcggttgcacctcgggctaagtccgttcgtgcaaagaagccgattaagtatctagaggagtccgacgaagatgaccttttctag

SEQ ID NO: 275339 - DNA, 5812 bp, Artificial Sequence
  derived and/or modified sequence
caagtgagcccttctcatcctgtaaatgaaaatatgcaagtcaacaaaataaagaaaaatgaagatgctaagaaaagactgtctgttgaaagaatctatcaaaagaaaacacaattggaacatattttgctccgcccagacacctacattggttctgtggaattagtgacccagcaaatgtgggtttacgatgaagatgttggcattaactatagggaagtcacttttgttcctggtttgtacaaaatctttgatgagattctagttaatgctgcggacaacaaacaaagggacccaaaaatgtcttgtattagagtcacaattgatccggaaaacaatttaattagtatatggaataatggaaaaggtattcctgttgttgaacacaaagttgaaaagatgtatgtcccagctctcatatttggacagctcctaacttctagtaactatgatgatgatgaaaagaaagtgacaggtggtcgaaatggctatggagccaaattgtgtaacatattcagtaccaaatttactgtggaaacagccagtagagaatacaagaaaatgttcaaacagacatggatggataatatgggaagagctggtgagatggaactcaagcccttcaatggagaagattatacatgtatcacctttcagcctgatttgtctaagtttaaaatgcaaagcctggacaaagatattgttgcactaatggtcagaagagcatatgatattgctggatccaccaaagatgtcaaagtctttcttaatggaaataaactgccagtaaaaggatttcgtagttatgtggacatgtatttgaaggacaagttggatgaaactggtaactccttgaaagtaatacatgaacaagtaaaccacaggtgggaagtgtgtttaactatgagtgaaaaaggctttcagcaaattagctttgtcaacagcattgctacatccaagggtggcagacatgttgattatgtagctgatcagattgtgactaaacttgttgatgttgtgaagaagaagaacaagggtggtgttgcagtaaaagcacatcagaggctggaatgcagtggcacgatctcggctcactgcaacctccgcctcctaggtttcagtgattctcttgcctcagcctcccgagtagctgagattacagacatgcaccatcacatccagctaatttttgtatttttaatagagatggggttttaccatgttggccaggctggtcttgaactcctggcctcacttgatccaccatcctcggcctcctgcgtaagccactgcacccagctatttgtgtctaattttatttatttatttttaatttttttgagacggagtttcacttttgtcacccaggctggagtgcaatgcactatatctccaacaagtagctcagtgctagcacaattttttgaatcatttttatttgtagccattggctgtggtattgtagaaagcatactaaactgggtgaagtttaaggcccaagtccagttaaacaagaagtgttcagctgtaaaacataatagaatcaagggaattcccaaactcgatgatgccaatgatgcagggggccgaaactccactgagtgtacgcttatcctgactgagggagattcagccaaaactttggctgtttcaggccttggtgtggttgggagagacaaatatggggttttccctcttagaggaaaaatactcaatgttcgagaagcttctcataagcagatcatggaaaatgctgagattaacaatatcatcaagattgtgggtcttcagtacaagaaaaactatgaagatgaagattcattgaagacgcttcgttatgggaagataatgattatgacagatcaggaccaagatggttcccacatcaaaggcttgctgattaattttatccatcacaactggccctctcttctgcgacatcgttttctggaggaatttatcactcccattgtaaaggtatctaaaaacaagcaagaaatggcattttacagccttcctgaatttgaagagtggaagagttctactccaaatcataaaaaatggaaagtcaaatattacaaaggtttgggcaccagcacatcaaaggaagctaaagaatactttgcagatatgaaaagacatcgtatccagttcaaatattctggtcctgaagatgatgctgctatcagcctggcctttagcaaaaaacagatagatgatcgaaaggaatggttaactaatttcatggaggatagaagacaacgaaagttacttgggcttcctgaggattacttgtatggacaaactaccacatatctgacatataatgacttcatcaacaaggaacttatcttgttctcaaattctgataacgagagatctatcccttctatggtggatggtttgaaaccaggtcagagaaaggttttgtttacttgcttcaaacggaatgacaagcgagaagtaaaggttgcccaattagctggatcagtggctgaaatgtcttcttatcatcatggtgagatgtcactaatgatgaccattatcaatttggctcagaattttgtgggtagcaataatctaaacctcttgcagcccattggtcagtttggtaccaggctacatggtggcaaggattctgctagtccacgatacatctttacaatgctcagctctttggctcgattgttatttccaccaaaagatgatcacacgttgaagtttttatatgatgacaaccagcgtgttgagcctgaatggtacattcctattattcccatggtgctgataaatggtgctgaaggaatcggtactgggtggtcctgcaaaatccccaactttgatgtgcgtgaaattgtaaataacatcaggcgtttgatggatggagaagaacctttgccaatgcttccaagttacaagaacttcaagggtactattgaagaactggctccaaatcaatatgtgattagtggtgaagtagctattcttaattctacaaccattgaaatctcagagcttcccgtcagaacatggacccagacatacaaagaacaagttctagaacccatgttgaatggcaccgagaagacacctcctctcataacagactatagggaataccatacagataccactgtgaaatttgttgtgaagatgactgaagaaaaactggcagaggcagagagagttggactacacaaagtcttcaaactccaaactagtctcacatgcaactctatggtgctttttgaccacgtaggctgtttaaagaaatatgacacggtgttggatattctaagagacttttttgaactcagacttaaatattatggattaagaaaagaatggctcctaggaatgcttggtgctgaatctgctaaactgaataatcaggctcgctttatcttagagaaaatagatggcaaaataatcattgaaaataagcctaagaaagaattaattaaagttctgattcagaggggatatgattcggatcctgtgaaggcctggaaagaagcccagcaaaaggttccagatgaagaagaaaatgaagagagtgacaacgaaaaggaaactgaaaagagtgactccgtaacagattctggaccaaccttcaactatcttcttgatatgcccctttggtatttaaccaaggaaaagaaagatgaactctgcaggctaagaaatgaaaaagaacaagagctggacacattaaaaagaaagagtccatcagatttgtggaaagaagacttggctacatttattgaagaattggaggctgttgaagccaaggaaaaacaagatgaacaagtcggacttcctgggaaaggggggaaggccaaggggaaaaaaacacaaatggctgaagttttgccttctccgcgtggtcaaagagtcattccacgaataaccatagaaatgaaagcagaggcagaaaagaaaaataaaaagaaaattaagaatgaaaatactgaaggaagccctcaagaagatggtgtggaactagaaggcctaaaacaaagattagaaaagaaacagaaaagagaaccaggtacaaagacaaagaaacaaactacattggcatttaagccaatcaaaaaaggaaagaagagaaatccctggtctgattcagaatcagataggagcagtgacgaaagtaattttgatgtccctccacgagaaacagagccacggagagcagcaacaaaaacaaaattcacaatggatttggattcagatgaagatttctcagattttgatgaaaaaactgatgatgaagattttgtcccatcagatgctagtccacctaagaccaaaacttccccaaaacttagtaacaaagaactgaaaccacagaaaagtgtcgtgtcagaccttgaagctgatgatgttaagggcagtgtaccactgtcttcaagccctcctgctacacatttcccagatgaaactgaaattacaaacccagttcctaaaaagaatgtgacagtgaagaagacagcagcaaaaagtcagtcttccacctccactaccggtgccaaaaaaagggctgccccaaaaggaactaaaagggatccagctttgaattctggtgtctctcaaaagcctgatcctgccaaaaccaagaatcgccgcaaaaggaagccatccacttctgatgattctgactctaattttgagaaaattgtttcgaaagcagtcacaagcaagaaatccaagggggagagtgatgacttccatatggactttgactcagctgtggctcctcgggcaaaatctgtacgggcaaagaaacctataaagtacctggaagagtcagatgaagatgatctgttttaaaatgtgaggcgattattttaagtaattatcttaccaagcccaagactggttttaaagttacctgaagctcttaacttcctcccctctgaatttagtttggggaaggtgtttttagtacaagacatcaaagtgaagtaaagcccaagtgttctttagctttttataatactgtctaaatagtgaccatctcatgggcattgttttcttctctgctttgtctgtgttttgagtctgctttcttttgtctttaaaacctgatttttaagttcttctgaactgtagaaatagctatctgatcacttcagcgtaaagcagtgtgtttattaaccatccactaagctaaaactagagcagtttgatttaaaagtgtcactcttcctccttttctactttcagtagatatgagatagagcataattatctgttttatcttagttttatacataatttaccatcagatagaactttatggttctagtacagatactctactacactcagcctcttatgtgccaagtttttctttaagcaatgagaaattgctcatgttcttcatcttctcaaatcatcagaggccgaagaaaaacactttggctgtgtctataacttgacacagtcaatagaatgaagaaaattagagtagttatgtgattatttcagctcttgacctgtcccctctggctgcctctgagtctgaatctcccaaagagagaaaccaatttctaagaggactggattgcagaagactcggggacaacatttgatccaagatcttaaatgttatattgataaccatgctcagcaatgagctattagattcattttgggaaatctccataatttcaatttgtaaactttgttaagacctgtctacattgttatatgtgtgtgacttgagtaatgttatcaacgtttttgtaaatatttactatgtttttctattagctaaattccaacaattttgtactttaataaa

SEQ ID NO: 275340 - protein, 329 aa, Artificial Sequence
  derived and/or modified sequence
MRPPPALALAGLCLLALPAAAASYFGLTGREVLTPFPGLGTAAAPAQGGAHLKQCDLLKLSRRQKQLCRREPGLAETLRDAAHLGLLECQFQFRHERWNCSLEGRMGLLKRGFKETAFLYAVSSAALTHTLARACSAGRMERCTCDDSPGLESRQAWQWGVCGDNLKYSTKFLSNFLGSKRGNKDLRARADAHNTHVGIKAVKSGLRTTCKCHGVSGSCAVRTCWKQLSPFRETGQVLKLRYDSAVKVSSATNEALGRLELWAPARQGSLTKGLAPRSGDLVYMEDSPSFCRPSKYSPGTAGWSAVARSQLITTSTSRIQAILPSQLPE

SEQ ID NO: 275341 - DNA, 990 bp, Artificial Sequence
  derived and/or modified sequence
atgcgcccacccccagccctggccttagccggactgtgccttctcgcgctgccggctgctgcagcctcatactttggcctgactggccgagaagtgctcacaccattccccggacttggaaccgcagcggctcctgcgcagggaggagcacacctaaaacagtgcgacctattgaagctcagccgtcggcagaagcaactgtgtcgacgtgaaccaggcctggctgagacattgagagatgcagcacatctcgggctcttggaatgccaattccagttcagacacgagcggtggaattgttcattggagggcaggatgggtttactgaaacgcggattcaaagagacagcattcctttacgccgtgtcttccgctgcacttactcacacccttgctagagcgtgttcagccggaaggatggagcgctgtacatgtgatgacagccctggtttggagtccagacaggcctggcaatggggggtgtgcggcgacaatctgaagtacagcacaaaattcctgtcgaatttcttgggttccaagcggggaaacaaggatctgcgggcacgggcagacgcccataatacccacgtgggcatcaaagctgtcaaatccgggctgagaaccacctgtaagtgccacggagtctcagggagctgcgccgtgagaacttgttggaaacagctcagcccctttagggagacgggccaggtcctgaagcttcgctacgattccgccgtgaaagtgagcagcgcaacgaacgaggcactcggcaggctggagctctgggcccctgctagacaggggtcactgaccaaaggcttagcacctcgctccggagatctagtgtacatggaagactcgccatccttctgccgcccatctaaatattcaccaggaacagcgggatggtctgctgtcgctaggagtcaactgatcacgacgtcaaccagtaggattcaagctatcttgccctcccaactgccggaatag

SEQ ID NO: 275342 - DNA, 990 bp, Artificial Sequence
  derived and/or modified sequence
atgcgcccgccaccagccctggccctcgccggtctgtgcctgctggctctgcccgccgccgccgcttcctatttcggattgacggggcgggaagtcctgactccgttcccaggcctcggcacggctgccgcccctgcccagggaggagcgcatttaaagcagtgtgacttgttgaaactgtcacggcgacagaagcagctttgccgccgcgagccaggtctggccgagaccctgagagatgccgcacatctcggattactggagtgccaattccagttcagacatgaacgatggaactgctcgctcgagggtcggatgggtcttctgaagagggggttcaaggagaccgctttcctttatgccgtatccagtgctgcacttacgcataccctggcacgcgcctgtagcgccggtcgaatggagcgatgcacctgcgatgatagccccggactcgaatccaggcaggcatggcagtggggtgtgtgcggcgacaaccttaagtattcgactaaatttctgagcaatttcctggggagtaagagagggaataaggacctaagagcgcgggccgatgcacataatacccatgtcggtatcaaagccgtgaagtcgggccttaggaccacatgcaagtgtcacggcgtgtctggatcctgcgccgtgagaacctgctggaagcagctcagcccgttcagagagacaggacaggtactgaagttacgctatgattctgccgtgaaagtgtcgagtgccacaaatgaggccttggggcgtctggaactgtgggcaccggccagacaggggagtttaaccaaaggacttgcgccccgcagcggtgatcttgtttacatggaggattccccgtctttctgtaggccctcaaaatattctcccgggacagctggatggagcgctgtcgcaaggtcccaattaataacaacgtctacttcccggatccaagcaatacttccttcgcagctgcctgagtag

SEQ ID NO: 275343 - DNA, 990 bp, Artificial Sequence
  derived and/or modified sequence
atgcggccacctcccgcactggcactagccggcttgtgccttcttgccttacccgctgctgctgcctcctatttcggtctgacaggtagagaagttttgacaccctttcccggactgggaaccgccgctgcacctgcacaggggggagcccacctcaagcagtgtgatttgttaaaactgagtcgcagacaaaagcaactttgtcgcagggagcctggactggccgagacactcagggacgccgctcacctgggtttactggaatgtcagtttcagtttcgccacgagcgctggaattgttctctggaaggacgtatgggcttgctaaaaagaggctttaaggaaactgcctttctgtatgccgtcagtagcgccgcgctgacacacaccttagctcgagcttgttctgcaggtcgcatggagcgctgcacctgtgacgatagccccggcctagagtctcgacaggcctggcagtggggggtgtgtggtgacaacctgaaatacagtactaaatttctctccaattttctggggtcaaaaagaggaaataaggatctgagagcccgggccgatgctcacaatacacatgttggcattaaggcagttaagtcaggccttagaaccacatgcaaatgtcacggcgtcagcggctcgtgcgcagttagaacttgctggaagcagctgagtccattccgtgaaaccggacaagtcctaaaacttcgatatgactccgccgtaaaagtatcctcagccactaacgaagctttagggcgtttggaactgtgggctccagctagacagggatcacttaccaagggactagccccccggtctggggatctggtttacatggaggatagtcctagtttttgccggccgagcaagtacagcccaggcaccgcaggttggtccgcagttgcccggtcgcagctcatcaccacaagcacaagtagaatccaggccatattaccatcccaacttcctgaatag

SEQ ID NO: 275344 - DNA, 990 bp, Artificial Sequence
  derived and/or modified sequence
atgagacccccccccgccctggccctggccggcctgtgcctgctggccctgcccgccgccgccgccagctacttcggcctgaccggcagagaggtgctgacccccttccccggcctgggcaccgccgccgcccccgcccagggcggcgcccacctgaagcagtgcgacctgctgaagctgagcagaagacagaagcagctgtgcagaagagagcccggcctggccgagaccctgagagacgccgcccacctgggcctgctggagtgccagttccagttcagacacgagagatggaactgcagcctggagggcagaatgggcctgctgaagagaggcttcaaggagaccgccttcctgtacgccgtgagcagcgccgccctgacccacaccctggccagagcctgcagcgccggcagaatggagagatgcacctgcgacgacagccccggcctggagagcagacaggcctggcagtggggcgtgtgcggcgacaacctgaagtacagcaccaagttcctgagcaacttcctgggcagcaagagaggcaacaaggacctgagagccagagccgacgcccacaacacccacgtgggcatcaaggccgtgaagagcggcctgagaaccacctgcaagtgccacggcgtgagcggcagctgcgccgtgagaacctgctggaagcagctgagccccttcagagagaccggccaggtgctgaagctgagatacgacagcgccgtgaaggtgagcagcgccaccaacgaggccctgggcagactggagctgtgggcccccgccagacagggcagcctgaccaagggcctggcccccagaagcggcgacctggtgtacatggaggacagccccagcttctgcagacccagcaagtacagccccggcaccgccggctggagcgccgtggccagaagccagctgatcaccaccagcaccagcagaatccaggccatcctgcccagccagctgcccgagtag

SEQ ID NO: 275345 - DNA, 990 bp, Artificial Sequence
  derived and/or modified sequence
atgcgtccccccccggccctggcattagctggtctgtgtcttctggccctgccagcagctgctgcttcgtacttcggtctcaccggcagagaagtgctgaccccattcccaggcctgggaactgccgcagccccagctcaaggcggggcccatctcaagcagtgtgatcttttgaaactgtcccgccggcagaaacagctctgtcgacgggagccaggtctggctgagacattaagagacgctgcgcacctgggcctgctggagtgtcaatttcagttcaggcacgaaaggtggaattgtagtctggagggcagaatgggcctgctaaagcggggcttcaaggagaccgccttcctgtatgctgtctcctccgccgccctcacccacactctcgcaagggcatgctcagcaggtaggatggagaggtgcacctgtgacgattcgccaggcctggaatcccggcaggcttggcaatggggcgtgtgcggcgacaacttgaagtattctaccaagttcctgagtaactttcttggaagtaagcgaggaaacaaagacctgagagcgagggccgacgcacacaatactcacgtgggcatcaaagccgtgaaatctgggcttagaaccacgtgcaagtgtcatggcgtgagcggctcctgtgccgtgaggacttgttggaagcagttgtccccattcagggagaccgggcaagtcctgaaactccgctatgacagcgcagtcaaggtctcctcagcaacaaacgaggccctggggcggcttgaactgtgggcaccggcgcggcagggcagtctgaccaaaggactagctccccgtagcggagacctagtctacatggaggacagtccgtctttctgtagaccctcgaaatatagccccggtacagcagggtggtccgccgtggctcggagccagctgatcaccaccagtacgagtcgcattcaagccattctgccgagccagctgcccgagtag

SEQ ID NO: 275346 - DNA, 990 bp, Artificial Sequence
  derived and/or modified sequence
atgaggcctcctccagccctggccctggccggcctgtgcctgctggccctgcctgctgctgctgccagctacttcggcctgaccggccgggaggtgctgacccccttccctggcctgggcacagctgctgccccagcccagggcggggcccacctgaagcagtgtgacctgctgaagctgagccggcggcagaagcagctgtgcagaagagagcccggcctggccgagaccctgagagatgctgcccacctgggcctgctggagtgccagttccagttcagacatgagcgctggaactgcagcctggagggccgcatgggcctgctgaagaggggcttcaaggagacagccttcctgtatgctgtgagcagcgctgccctgacccacaccctggcccgggcctgcagcgctggccgcatggagcgctgcacctgtgatgacagccctggcctggagagccggcaggcctggcagtggggcgtgtgtggggacaacctgaagtacagcaccaagttcctgagcaacttcctgggcagcaagaggggcaacaaggacctgcgggcccgggcagatgcccacaacacccacgtgggcatcaaggctgtgaagagcggcctgcggaccacctgcaagtgccacggcgtgtctggcagctgtgctgtgaggacctgctggaagcagctgagccccttccgggagaccggccaggtgctgaagctgcgctatgacagcgctgtgaaggtgagcagcgccaccaatgaggccctgggccgcctggagctgtgggccccagcccggcagggcagcctgaccaagggcctggcccccaggtctggggacctggtgtacatggaggacagccccagcttctgccggcccagcaagtacagccctggaacagctggctggagcgctgtggcccggagccagctgatcaccaccagcaccagccgcatccaggccatcctgcccagccagctgcctgagtag

SEQ ID NO: 275347 - DNA, 990 bp, Artificial Sequence
  derived and/or modified sequence
atgcggcccccccccgccctggccctggccggcctgtgcctgctggccctgccggctgcggcagcctcttattttggcctcacaggacgagaagtactgactccgttccccgggctaggtaccgctgctgcacctgctcagggcggggcacacctcaagcagtgcgaccttttaaagctttcacgtaggcagaagcagttgtgcagacgcgaacctggcctggcagagaccttgagagatgcagcgcacttagggttactggaatgtcaatttcagtttcgacatgagcgatggaactgctccctggaagggcgaatgggcctcctgaaaagagggttcaaagagaccgcatttctctacgccgtgagcagcgcagctctaactcacacactagctagggcatgttctgctggacgaatggaacggtgcacatgcgacgacagcccaggactcgaatcacgtcaggcctggcagtggggcgtgtgcggggacaacctcaagtactctacaaagttcctgagtaatttcttggggtctaagagaggtaacaaggacttaagggcacgtgcggacgctcataatacacacgtgggcattaaggccgtgaagtcaggactgagaacaacttgcaaatgtcacggcgtgagtggctcgtgcgctgtgcgaacatgctggaagcagctatcccccttccgagagacgggccaagtcctgaaactgaggtatgattcggcagtcaaggtgagcagtgcgactaatgaagcacttggtcggcttgaactctgggctcctgcccggcaggggagcctcacgaagggattagctcccagatcaggggacctcgtatatatggaggacagtccatcgttttgcagaccttcaaagtacagcccaggcaccgcaggctggagcgcagtcgcgaggtcacagctgatcaccacatctacctctagaattcaggcgatcctccctagccagctgcctgaatag

SEQ ID NO: 275348 - DNA, 2654 bp, Artificial Sequence
  derived and/or modified sequence
tgcgagcttgagcggcgcgaggagatgctagagggcgcagcgccgccagcaccatgcgccccccgcccgcgctggccctggccgggctctgcctgctggcgctgcccgccgccgccgcctcctacttcggcctgaccgggcgggaagtcctgacgcccttcccaggattgggcactgcggcagccccggcacagggcggggcccacctgaagcagtgtgacctgctgaagctgtcccggcggcagaagcagctctgccggagggagcccggcctggctgagaccctgagggatgctgcgcacctcggcctgcttgagtgccagtttcagttccggcatgagcgctggaactgtagcctggagggcaggatgggcctgctcaagagaggcttcaaagagacagctttcctgtacgcggtgtcctctgccgccctcacccacaccctggcccgggcctgcagcgctgggcgcatggagcgctgcacctgtgatgactctccggggctggagagccggcaggcctggcagtggggcgtgtgcggtgacaacctcaagtacagcaccaagtttctgagcaacttcctggggtccaagagaggaaacaaggacctgcgggcacgggcagacgcccacaatacccacgtgggcatcaaggctgtgaagagtggcctcaggaccacgtgtaagtgccatggcgtatcaggctcctgtgccgtgcgcacctgctggaagcagctctccccgttccgtgagacgggccaggtgctgaaactgcgctatgactcggctgtcaaggtgtccagtgccaccaatgaggccttgggccgcctagagctgtgggcccctgccaggcagggcagcctcaccaaaggcctggccccaaggtctggggacctggtgtacatggaggactcacccagcttctgccggcccagcaagtactcacctggcacagcaggttggagtgcagtggcaagatctcagctcatcacaacctccacctcccggattcaagcgattctcccgtctcagctgcctgagtaactgggattacaggcatgcaccaccacgcctgactaattttgtatttttggctaattttgtatttttagtagagatgaggtttctccatgttggtcaggctggtctcgaactcccgacctcaggtgatccacccgcctcggcctcccaaagtgctgggattaccggtgtgagccactgcgcctggccagcatttttttttttgagacagagtctcgctctgtcacccaggctggagtgcactggcatgatctctgctcactgcaacctccacctcccaggttcaagtgactctcttggctcagcctcccaagtagctgggactacaggcgtgcaccaccacgctcagctaatttttgtattttcagtagagatggacttttatcatgttggccaggctggtctcgaactcctggtctcaagtgatctgccagcctcagtctcccagggtgctgggattacaggtatgagccactgtgcccggccgccttagcattttgtgtatgttttgagtgacagccatctgtcaatattggcatcttttgttttattggatgaatgaatgaacaaatgaatttataaatcttgttctccatactgtttacccatcctcatttccctcacttggcagtgtcttgccatagcaggcttcctggtgtagctggcaccacatccctccctgacacacggcctccttattgcccctgctacttgcctttttctctcctccctttccttcccttcattccccctggcttccccttcccaactctcagaatccctggctgcctcaaccacaagaacaaagctgtgcagaagcctgaacctggagcttctgcaagatgaggtggggaatgagctaacccagctggaaagcagcctgctgatccctgggagagacggcgcttgggccaacccaccctccccaaggtggtcccctgcctcagctccacccgcttccccagatgaacttctttctctccctccagcgcttcagaggatgcacagctgtgtgtacttgaccctgagcctgggctagtgctggggacatagccagtctggctgatacccatatcagtacagaaagctgtcctcacccacttcatgcactagttgcattggtatgaagcattagctttataactatcccatttactgcaggcataaacctatatcaattggtggggatggaggttaaatgagagaagacatcaaagatgcatagaactattgggcccctttcaattaataaataaaatttgtaggaggccattagtttgtactgtgctcctgtaatggacccaacagaccaaacaaatatggagtcactcatgctaaatgcaattaacttgggagtatactcctaagttgcaaaaagtggtaacaaatagctgagttttggggcagttacagcagctgagcatctgtcaatgtaggtggccaggtgattcaattaaggatgctgtaaccaattaagctgtatctacacctcacttctgttttctatctacaaatactgcgtgatcatgttgctggttggagttctttgaataagctgtggttcggagggatgcccaattctagaatcatgaataaaagcctattaagatcttt

SEQ ID NO: 275349 - RNA, 990 nt, Artificial Sequence
  derived and/or modified sequence
augcgcccgccaccagcccuggcccucgccggucugugccugcuggcucugcccgccgccgccgcuuccuauuucggauugacggggcgggaaguccugacuccguucccaggccucggcacggcugccgccccugcccagggaggagcgcauuuaaagcagugugacuuguugaaacugucacggcgacagaagcagcuuugccgccgcgagccaggucuggccgagacccugagagaugccgcacaucucggauuacuggagugccaauuccaguucagacaugaacgauggaacugcucgcucgagggucggaugggucuucugaagaggggguucaaggagaccgcuuuccuuuaugccguauccagugcugcacuuacgcauacccuggcacgcgccuguagcgccggucgaauggagcgaugcaccugcgaugauagccccggacucgaauccaggcaggcauggcaguggggugugugcggcgacaaccuuaaguauucgacuaaauuucugagcaauuuccuggggaguaagagagggaauaaggaccuaagagcgcgggccgaugcacauaauacccaugucgguaucaaagccgugaagucgggccuuaggaccacaugcaagugucacggcgugucuggauccugcgccgugagaaccugcuggaagcagcucagcccguucagagagacaggacagguacugaaguuacgcuaugauucugccgugaaagugucgagugccacaaaugaggccuuggggcgucuggaacugugggcaccggccagacaggggaguuuaaccaaaggacuugcgccccgcagcggugaucuuguuuacauggaggauuccccgucuuucuguaggcccucaaaauauucucccgggacagcuggauggagcgcugucgcaaggucccaauuaauaacaacgucuacuucccggauccaagcaauacuuccuucgcagcugccugaguag

SEQ ID NO: 275350 - RNA, 990 nt, Artificial Sequence
  derived and/or modified sequence
augcggccaccucccgcacuggcacuagccggcuugugccuucuugccuuacccgcugcugcugccuccuauuucggucugacagguagagaaguuuugacacccuuucccggacugggaaccgccgcugcaccugcacaggggggagcccaccucaagcagugugauuuguuaaaacugagucgcagacaaaagcaacuuugucgcagggagccuggacuggccgagacacucagggacgccgcucaccuggguuuacuggaaugucaguuucaguuucgccacgagcgcuggaauuguucucuggaaggacguaugggcuugcuaaaaagaggcuuuaaggaaacugccuuucuguaugccgucaguagcgccgcgcugacacacaccuuagcucgagcuuguucugcaggucgcauggagcgcugcaccugugacgauagccccggccuagagucucgacaggccuggcagugggggguguguggugacaaccugaaauacaguacuaaauuucucuccaauuuucuggggucaaaaagaggaaauaaggaucugagagcccgggccgaugcucacaauacacauguuggcauuaaggcaguuaagucaggccuuagaaccacaugcaaaugucacggcgucagcggcucgugcgcaguuagaacuugcuggaagcagcugaguccauuccgugaaaccggacaaguccuaaaacuucgauaugacuccgccguaaaaguauccucagccacuaacgaagcuuuagggcguuuggaacugugggcuccagcuagacagggaucacuuaccaagggacuagccccccggucuggggaucugguuuacauggaggauaguccuaguuuuugccggccgagcaaguacagcccaggcaccgcagguugguccgcaguugcccggucgcagcucaucaccacaagcacaaguagaauccaggccauauuaccaucccaacuuccugaauag

SEQ ID NO: 275351 - protein, 344 aa, Artificial Sequence
  derived and/or modified sequence
MHRTTRIKITELNPHLMCALCGGYFIDATTIVECLHSFCKTCIVRYLETNKYCPMCDVQVHKTRPLLSIRSDKTLQDIVYKLVPGLFKDEMKRRRDFYAAYPLTEVPNGSNEDRGEVLEQEKGALSDDEIVSLSIEFYEGARDRDEKKGPLENGDGDKEKTGVRFLRCPAAMTVMHLAKFLRNKMDVPSKYKVEVLYEDEPLKEYYTLMDIAYIYPWRRNGPLPLKYRVQPACKRLTLATVPTPSEGTNTSGASECESVSDKAPSPATLPATSSSLPSPATPSHGSPSSHGPPATHPTSPTPPSTASGATTAANGGSLNCLQTPSSTSRGRKMTVNGAPVPPLT

SEQ ID NO: 275352 - DNA, 2622 bp, Artificial Sequence
  derived and/or modified sequence
tctcccctcccgccgcccgggcgagcgacacggctgcggcccccctcccctcccttccctccctccctcccatccccccctccccgagacccaccggaccccgaacccagatggccgaaacgggctccccgtcttaacgatttggcgtctccctcgaccaccacctctttgtgcagcagcccccgggcagaccctgttccgagggcaacgctccccagtccccccacccccgaccccggaatcatgcatcggactacacggatcaaaatcacagagctgaacccccacctcatgtgtgccctctgcggggggtacttcatcgacgccaccactatcgtggagtgcctgcattccttctgcaaaacctgcatcgtgcgctacctggagaccaacaaatactgccccatgtgtgacgtgcaggtccataaaacccggccgctgctgagcatcaggtctgacaaaacacttcaagacattgtctacaaattggtccctgggctttttaaagatgagatgaaacggcggcgggatttctatgcagcgtaccccctgacggaggtccccaacggctccaatgaggaccgcggcgaggtcttggagcaggagaagggggctctgagtgatgatgagattgtcagcctctccatcgaattctacgaaggtgccagggaccgggacgagaagaagggccccctggagaatggggatggggacaaagagaaaacaggggtgcgcttcctgcgatgcccagcagccatgaccgtcatgcatcttgccaagtttctccgcaacaagatggatgtgcccagcaagtacaaggtggaggttctgtacgaggacgagccactgaaggaatactacaccctcatggacatcgcctacatctacccctggcggcggaacgggcctctccccctcaagtaccgtgtccagccagcctgcaagcggctcaccctagccacggtgcccaccccctccgagggcaccaacaccagcggggcgtccgagtgtgagtcagtcagcgacaaggctcccagccctgccaccctgccagccacctcctcctccctgcccagcccagccaccccatcccatggctctcccagttcccatgggcctccagccacccaccctacctcccccactcccccttcgacagccagtggggccaccacagctgccaacgggggtagcttgaactgcctgcagacaccatcctccaccagcagggggcgcaagatgactgtcaacggcgctcccgtgccccccttaacttgaggccagggaccctctcccttcttccagccaagcctctccactccttccactttttctgggcccttttttccacctcttctactttccccagctcttcccaccttgggggtggggggcgggttttataaataaatatatatatatatgtacataggaaaaaccaaatatacatacttattttctatggaccaaccagattaatttaaatgccacaggaaacaaactttatgtgtgtgtgtatgtgtggaaaatggtgttcattttttttggggggggtcttgtgtaatttgctgtttttgggggtgcctggagatgaactggatgggccactggagtctcaataaagctctgcaccatcctcgctgtttcccaaggcaggtggtgtgttgggggccccttcagacccaaagctttaggcatgattccaactggctgcatataggagtcagttagaatcgtttctttctctccccgtttctctccccatcttggctgctgtcctgcctctgaccagtggccgccccccacgttgttgaatgtccagaaattgctaagaacagtgccttttacaaatgcagtttatccctggttctgaggagcaagtgcagggtggaggtggcacctgcatcacctcctcctcttgcagtggaaactttgtgcaaagaatagatagttctgcctctttttttttttttcctgtgtgtgtggcctttgcatcatttatcttgtggaaaagaagattcaggccctgagaggtctcagctcttggaggagggctaaggctttagcattgtgaagcgctgcacccccaccaaccttaccctcaccggggaaccctcactagcaggactggtggtggagtctcacctggggcctagagtggaagtgggggtgggttaacctcacacaagcacagatcccagactttgccagaggcaaacagccttccaattgcccctccacccccagctgaggcccggtcacctggtcaggacagagcaactgcatctaaaagcacaagaagacagaaacctgtaagctctgaccccacccccaccccttgagaggtcagcggaccacctccttagggacagaccctggcaggtcgctgcccaccgagatttcctcaagtgtgcatagatctgagaggagtcgggagtcgagactcgagattccatcatagcgtaggtgtgtggggttgggagccccctgatgggcttgtctgtgtttgcaccttgtcctgtgtctgaggtcctgtgactgtaccctcctttgccctgggacatctgtatctcttggctttgtaataaatgctgcatactttctaaaaaaaaaaaaaaaaaa

SEQ ID NO: 275353 - DNA, 1035 bp, Artificial Sequence
  derived and/or modified sequence
atgcacaggacaactcgtattaagattacggagcttaatccccatctcatgtgcgccctgtgcggcggttattttatcgacgcaactaccatagtggagtgtctccacagtttctgcaaaacttgtattgtccgttaccttgaaacaaacaagtactgccccatgtgtgacgtacaagtgcataagacaagacccctactgagcatccgctcagataagacactgcaggacatcgtgtataaacttgtacctggtctcttcaaggatgagatgaaacgccgccgggacttctatgctgcttatcccttgactgaggttcctaacgggagcaatgaagaccggggggaggttcttgaacaggaaaagggggcattaagtgacgacgaaattgtgtctctctccattgagttttacgagggtgcccgcgacagggacgagaaaaaaggccccctggagaacggggatggggacaaggaaaagaccggggtgaggttcctgcgctgtcccgctgcgatgacagtgatgcatttagcgaaattcctgaggaataagatggacgtccccagtaagtacaaagtagaggtgctgtacgaagacgagccattgaaagagtattataccctgatggatattgcctatatctacccgtggcgccgcaacggacccttgccactgaagtaccgagttcagccggcatgtaaacgactgactctggccacagtgccaacacctagtgaaggcacaaatacatctggtgccagcgagtgcgaaagtgtgtctgacaaggctcctagcccagcaacactgcccgccacgtcttctagtcttcccagtccagccacaccaagtcacgggtcacccagcagccacggaccacccgctacccacccaacctctcccactcccccgagcaccgccagcggggctaccaccgcagctaatggcgggtccctgaattgtctgcagactccatccagcacatcccggggtagaaagatgactgtaaatggggctcctgtgccccccttaacatag

SEQ ID NO: 275354 - DNA, 2604 bp, Artificial Sequence
  derived and/or modified sequence
tctcccctcccgccgcccgggcgagcgacacggctgcggcccccctcccctcccttccctccctccctcccatccccccctccccgagacccaccggaccccgaacccagatggccgaaacgggctccccgtcttaacgatttggcgtctccctcgaccaccacctctttgtgcagcagcccccgggcagaccctgttccgagggcaacgctccccagtccccccacccccgaccccggaatcatgcatcggactacacggatcaaaatcacagagctgaacccccacctcatgtgtgccctctgcggggggtacttcatcgacgccaccactatcgtggagtgcctgcattccttctgcaaaacctgcatcgtgcgctacctggagaccaacaaatactgccccatgtgtgacgtgcaggtccataaaacccggccgctgctgagcatcaggtctgacaaaacacttcaagacattgtctacaaattggtccctgggctttttaaagatgagatgaaacggcggcgggatttctatgcagcgtaccccctgacggaggtccccaacggctccaatgaggaccgcggcgaggtcttggagcaggagaagggggctctgagtgatgatgagattgtcagcctctccatcgaattctacgaaggtgccagggaccgggacgagaagaagggccccctggagaatggggatggggacaaagagaaaacaggggtgcgcttcctgcgatgcccagcagccatgaccgtcatgcatcttgccaagtttctccgcaacaagatggatgtgcccagcaagtacaaggtggaggttctgtacgaggacgagccactgaaggaatactacaccctcatggacatcgcctacatctacccctggcggcggaacgggcctctccccctcaagtaccgtgtccagccagcctgcaagcggctcaccctagccacggtgcccaccccctccgagggcaccaacaccagcggggcgtccgagtgtgagtcagtcagcgacaaggctcccagccctgccaccctgccagccacctcctcctccctgcccagcccagccaccccatcccatggctctcccagttcccatgggcctccagccacccaccctacctcccccactcccccttcgacagccagtggggccaccacagctgccaacgggggtagcttgaactgcctgcagacaccatcctccaccagcagggggcgcaagatgactgtcaacggcgctcccgtgccccccttaacttgaggccagggaccctctcccttcttccagccaagcctctccactccttccactttttctgggcccttttttccacctcttctactttccccagctcttcccaccttgggggtggggggcgggttttataaataaatatatatatatatgtacataggaaaaaccaaatatacatacttattttctatggaccaaccagattaatttaaatgccacaggaaacaaactttatgtgtgtgtgtatgtgtggaaaatggtgttcattttttttggggggggtcttgtgtaatttgctgtttttgggggtgcctggagatgaactggatgggccactggagtctcaataaagctctgcaccatcctcgctgtttcccaaggcaggtggtgtgttgggggccccttcagacccaaagctttaggcatgattccaactggctgcatataggagtcagttagaatcgtttctttctctccccgtttctctccccatcttggctgctgtcctgcctctgaccagtggccgccccccacgttgttgaatgtccagaaattgctaagaacagtgccttttacaaatgcagtttatccctggttctgaggagcaagtgcagggtggaggtggcacctgcatcacctcctcctcttgcagtggaaactttgtgcaaagaatagatagttctgcctctttttttttttttcctgtgtgtgtggcctttgcatcatttatcttgtggaaaagaagattcaggccctgagaggtctcagctcttggaggagggctaaggctttagcattgtgaagcgctgcacccccaccaaccttaccctcaccggggaaccctcactagcaggactggtggtggagtctcacctggggcctagagtggaagtgggggtgggttaacctcacacaagcacagatcccagactttgccagaggcaaacagccttccaattgcccctccacccccagctgaggcccggtcacctggtcaggacagagcaactgcatctaaaagcacaagaagacagaaacctgtaagctctgaccccacccccaccccttgagaggtcagcggaccacctccttagggacagaccctggcaggtcgctgcccaccgagatttcctcaagtgtgcatagatctgagaggagtcgggagtcgagactcgagattccatcatagcgtaggtgtgtggggttgggagccccctgatgggcttgtctgtgtttgcaccttgtcctgtgtctgaggtcctgtgactgtaccctcctttgccctgggacatctgtatctcttggctttgtaataaatgctgcatactttct

SEQ ID NO: 275355 - DNA, 1035 bp, Artificial Sequence
  derived and/or modified sequence
atgcacaggaccacccgcatcaagatcacagagctgaacccccacctgatgtgtgccctgtgtggcggctacttcattgatgccaccaccatcgtggagtgcctgcacagcttctgcaagacctgcatcgtgcgctacctggagaccaacaagtactgccccatgtgtgatgtgcaggtgcacaagacccggcccctgctgagcatccgcagtgacaagaccctgcaggacatcgtgtacaagctggtgcccggcctcttcaaggatgagatgaagagaagaagagacttctatgctgcctaccccctgacagaggtgcccaacggcagcaatgaagatagaggagaggtgctggagcaggagaagggggccctgagtgatgatgagatcgtgtccctgagcattgagttctatgagggcgcccgggacagagatgagaagaagggccccctggagaatggagatggagacaaggagaagacaggagtgcgcttcctgcgctgcccagctgccatgacagtgatgcacctggccaagttcctgaggaacaagatggatgtgcccagcaagtacaaggtggaggtgctgtatgaagatgagcccctgaaggagtactacaccctgatggacatcgcctacatctacccctggaggagaaatggccccctgcccctgaagtacagagtgcagcctgcctgcaagaggctgaccctggccaccgtgcccaccccatctgagggcaccaacaccagcggggcctctgaatgtgagagcgtgtctgacaaggcccccagccctgccaccctgcctgccaccagcagcagcctgcccagccctgccacccccagccacggcagccccagcagccacggccccccagccacccaccccaccagccccaccccacccagcacagccagcggggccaccacagctgccaacggcggcagcctgaactgcctgcagacccccagcagcaccagccggggcaggaagatgacagtgaatggagcccctgtgccccccctgacctag

SEQ ID NO: 275356 - DNA, 1035 bp, Artificial Sequence
  derived and/or modified sequence
atgcaccggaccacccggatcaagatcaccgagctgaacccccacctcatgtgcgctttatgcggagggtattttattgacgctacaaccattgtggagtgtctgcacagtttttgtaagacctgtattgtgagataccttgaaacaaataagtactgccctatgtgcgacgtgcaggtacacaagacccggccgcttctgagcataagaagtgacaagactctgcaagacatcgtgtacaaacttgtccctggattattcaaggacgaaatgaaaagacgaagagacttttatgccgcttacccccttacagaagtccctaatgggtctaacgaagataggggtgaggtcctggagcaggaaaaaggtgcactttccgatgatgagatcgtgtcacttagcattgagttctacgagggggcgcgggaccgcgacgagaaaaagggcccactcgaaaatggagacggtgacaaagagaaaacaggcgtgcgatttttgcgttgtccagcggcaatgactgtgatgcacctggcaaagtttctgagaaataagatggacgttccaagcaaatataaggtcgaggtgctctatgaagacgagcccctcaaagaatactacacattgatggacatcgcttacatctatccctggagaaggaacgggccacttcctttgaaataccgggtgcagcccgcatgcaagagactgacgctggctactgtgccaacacctagcgagggcacaaacactagtggcgcatctgaatgtgagtctgtctcggataaggctccttctcctgccacgctgcccgcgacaagctcctctctcccatcacctgctacaccctcccatggcagcccatcatcacacggtccgcccgccacccacccaacgtcgccaacccccccaagcactgcgtccggggctacgacagccgctaatggcggcagtctgaactgcctccagacccccagctcgacatctagaggacgcaaaatgaccgtgaatggcgcgcctgtgccacctctcacttag

SEQ ID NO: 275357 - DNA, 1035 bp, Artificial Sequence
  derived and/or modified sequence
atgcaccggactacacgcatcaaaattacagagctgaatccccacctgatgtgcgccctgtgtggaggctacttcattgacgcaaccaccatagttgaatgtcttcatagcttctgcaagacttgtatcgtgagatatctcgaaactaacaagtattgccctatgtgtgacgtgcaggtccacaagacccgcccacttctgtcaattagatcagataaaacattacaagacatcgtctacaagctggtgccgggtctctttaaggatgaaatgaaacgaagaagagacttctatgctgcatacccattaactgaggttcctaatgggagtaacgaggaccgcggagaggtgctggagcaggaaaagggcgctctttctgacgatgaaattgttagtctgtcaattgaattctatgaaggcgcacgcgaccgggacgaaaagaagggaccactggagaatggggatggggacaaagagaaaaccggtgtgagattccttagatgccccgctgcaatgacggtcatgcacctggctaaatttttgcgaaataagatggatgttccgagcaagtataaagtggaagtcttatatgaagacgagccccttaaagagtattacaccctcatggacatcgcttacatttatccctggaggcgaaatggaccgctgcctctgaagtaccgcgttcagcccgcttgcaagcgactgacattggccactgtcccaacaccatctgaaggcactaacactagcggagctagcgagtgtgagtccgtgagcgataaagccccttctccggctacactgcctgctacttcctccagcctcccctctccagccacgccctcccatggtagccctagttcacacggaccacccgcaacccacccaacgtctccaacccctcccagtacagcgtctggagcgaccactgccgcaaatggtggaagtcttaattgcttgcaaacccccagttcgacaagcagaggcaggaagatgaccgtcaatggtgccccagtccccccactgacatag

SEQ ID NO: 275358 - DNA, 1035 bp, Artificial Sequence
  derived and/or modified sequence
atgcacagaaccaccagaatcaagatcaccgagctgaacccccacctgatgtgcgccctgtgcggcggctacttcatcgacgccaccaccatcgtggagtgcctgcacagcttctgcaagacctgcatcgtgagatacctggagaccaacaagtactgccccatgtgcgacgtgcaggtgcacaagaccagacccctgctgagcatcagaagcgacaagaccctgcaggacatcgtgtacaagctggtgcccggcctgttcaaggacgagatgaagagaagaagagacttctacgccgcctaccccctgaccgaggtgcccaacggcagcaacgaggacagaggcgaggtgctggagcaggagaagggcgccctgagcgacgacgagatcgtgagcctgagcatcgagttctacgagggcgccagagacagagacgagaagaagggccccctggagaacggcgacggcgacaaggagaagaccggcgtgagattcctgagatgccccgccgccatgaccgtgatgcacctggccaagttcctgagaaacaagatggacgtgcccagcaagtacaaggtggaggtgctgtacgaggacgagcccctgaaggagtactacaccctgatggacatcgcctacatctacccctggagaagaaacggccccctgcccctgaagtacagagtgcagcccgcctgcaagagactgaccctggccaccgtgcccacccccagcgagggcaccaacaccagcggcgccagcgagtgcgagagcgtgagcgacaaggcccccagccccgccaccctgcccgccaccagcagcagcctgcccagccccgccacccccagccacggcagccccagcagccacggcccccccgccacccaccccaccagccccaccccccccagcaccgccagcggcgccaccaccgccgccaacggcggcagcctgaactgcctgcagacccccagcagcaccagcagaggcagaaagatgaccgtgaacggcgcccccgtgccccccctgacctag

SEQ ID NO: 275359 - DNA, 780 bp, Artificial Sequence
  derived and/or modified sequence
atgcgcgagttcttgctcctcgagtacgcctcgggattgtttgcccatcccagcctttggcagctcggcgtagattacttcgactactgcccagagttgggaagggtctctctggagttgcatatcgagcggattcccctgaacaccgagcaaaaggcactgaaagtcctcaggatttgcgaacagaggcaaatgactgagcaggtgagatctatctgtaagattctggctatgaaggccgtaagaaacaaccggctggggagtgcgttgagttggtctattagggccaaagacgccgcctttgcaacgttggtctccgatcggttcctccgagactattgtgaacggggttgtttttctgacctcgatttgattgataacctcggacctgccatgatgctctcagatagactcacatttctcgggaagtacagggagttccacaggatgtacggcgagaaacgcttcgctgacgccgccagcctcttgctcagtctcatgacctccagaattgctccacggagcttttggatgacgctattaactgatgccttaccacttttagaacagaaacaagtgatcttcagcgcggaacagacctatgagctgatgcgctgcttagaggatctgactagccgccgcccagtccatggtgagagcgacaccgaacaattacaggatgatgacatcgagactactaaagtggagatgctgaggctcagtcttgcccggaaccttgctcgcgctatcattagggaggggtctctcgaaggctcctag

SEQ ID NO: 275360 - DNA, 780 bp, Artificial Sequence
  derived and/or modified sequence
atgagggagttcctgctgctggagtatgccagcggcctgtttgcccaccccagcctgtggcagctgggcgtggactactttgactactgcccagagctgggccgggtgtccctggagctgcacatcgagcgcatccccctgaacacagagcagaaggccctgaaggtgctgcgcatctgtgagcagaggcagatgacagagcaggtgcgcagcatctgcaagatcctggccatgaaggctgtgaggaacaaccggctgggcagcgccctgtcctggagcatccgggccaaggatgctgcctttgccaccctggtgtctgaccgcttcctgcgggactactgtgagcggggctgcttcagtgacctggacctgattgacaacctgggccctgccatgatgctgagtgaccggctgaccttcctgggcaagtaccgggagttccacaggatgtatggagagaagagatttgctgatgctgccagcctgctgctgagcctgatgaccagcagaattgcccccaggagcttctggatgaccctgctgacagatgccctgcccctgctggagcagaagcaggtgatcttctctgctgagcagacctatgagctgatgcgctgcctggaggacctgaccagcagaagacctgtgcatggagagagtgacacagagcagctgcaggatgatgacatcgagaccaccaaggtggagatgctgcggctgagcctggccaggaacctggcccgggccatcatccgggagggcagcctggagggcagctag

SEQ ID NO: 275361 - DNA, 780 bp, Artificial Sequence
  derived and/or modified sequence
atgcgggagttcctgctgctggagtacgccagcggcctgttcgcccacccatctttgtggcagctgggcgttgattactttgattattgcccggaactgggccgggtttcactggaacttcacatcgaacgcatccctctgaacaccgaacagaaagctcttaaagtcctgagaatatgtgaacagcgccagatgaccgaacaagttcgcagtatttgcaaaattctggcgatgaaggccgttaggaacaaccgtttgggaagcgctctgtcctggtctattcgcgcaaaagacgccgcatttgcaactctggtgtcagaccggttcttacgagattactgtgaacggggctgtttcagcgacctggacctgatcgacaacttagggccagctatgatgctcagcgacagactcacattcttgggaaaatatcgagagttccacaggatgtacggcgaaaagcgctttgctgatgcagcatccctcttgttgtccctcatgacatcaaggatcgcccctcgctcattctggatgactctactcacggacgccctccctctgctcgaacagaagcaggtaattttctctgccgagcaaacgtacgaactcatgcgatgcctcgaggacctgaccagccgccgccctgtgcacggagagtctgacaccgagcagctgcaggacgacgacattgagaccactaaagttgagatgctgaggctatcactggctaggaaccttgctagggccattatcagagagggatctctggagggatcctag

SEQ ID NO: 275362 - DNA, 1926 bp, Artificial Sequence
  derived and/or modified sequence
tttaggaataaaacagatttgagcagaagaagtctgttggatgcagggagtataaaaggggaaagcatcctgctgtttccagtggcagaagagaaagagaagtaccatgaagaggggtgaacaacatcactctcgtgccggacacagacaaggaatgattaggcttgcagtcccccagtctcagcctctctccactctcacaagcaggaagggatctgagctctgttagtgggaaatcttggagtttgcatttctctgatcacgaggctacctcctatcctgttttgaaagaggaacagaaaagcagagcttgtcccaggaattgtgaaatgggctgcaatgtcttcagaggcagtagcagttttaggaagtgtgccctcctggctctggggaaaggttgaattggggtcttgtgggcacttgttttctcatgggatgtatcagtcagacccatgcacagttctgggcggcagggaagtgtgtctctttctggacttgagccagtgagctgttggcatgcctttttaaaggcattagaaaaaaggtttctttcttttttttcctttcctgttcacaccaccttcatatgaacatggagaagggaggtttctaagtgggcccctgatttactcctatgtcaataatcgtgccagaccctaaggggcagaaaaggcagccaggggatcctgactcagaggctgtagttcgtcagccctgctaaagggccaggggtttgtctctcagtgcctgggtgggcatgcttgactgctaaccccttagctgaaaggagatggcaggagtcctccacagggtcccttcttccctcctggcttacagcttcctctgaagacgggccagttccttgctgtctggcaagaggaaacagctggggtgcacttcactgggagttgggcaagatgtcggcagtttcctggtgcccttcaagtcctccaaaagtatcgagctaaaagcatcgccctgagcaactggtggtttgtggcccacctgacagacctgctggaccactgcaagctcctccagtcacacaacctctatttcggttccaacatgagagagttcctcctgctggagtacgcctcgggactgtttgctcatcccagcctgtggcagctgggggtcgattactttgattactgccccgagctgggccgagtctccctggagctgcacattgagcggatacctctgaacaccgagcagaaagccctgaaggtgctgcggatctgtgagcagcggcagatgactgaacaagttcgcagcatttgtaagatcttagccatgaaagccgtccgcaacaatcgcctgggttctgccctctcttggagcatccgtgctaaggatgccgcctttgccacgctcgtgtcagacaggttcctcagggattactgtgagcgaggctgcttttctgatttggatctcattgacaacctggggccagccatgatgctcagtgaccgactgacattcctgggaaagtatcgcgagttccaccgtatgtacggggagaagcgttttgccgacgcagcttctctccttctgtccttgatgacgtctcggattgcccctcggtctttctggatgactctgctgacagacgccttgccccttttggaacagaaacaggtgattttctcagcagaacagacttatgagttgatgcggtgtctggaggacttgacgtcaagaagacctgtgcatggagaatctgataccgagcagctccaggatgatgacatagagaccaccaaggtggaaatgctgagactttctctggcacgaaatcttgctcgggcaattataagagaaggctcactggaaggttcctgagaactgcttcaatgtggtatctttgtatggcaatgtatatagatttttttaaaagaataaatgttgttttgcaaatgt

SEQ ID NO: 275363 - DNA, 780 bp, Artificial Sequence
  derived and/or modified sequence
atgcgggagtttttgctgttggagtacgccagcggactcttcgcccacccatccctttggcagttgggggtggactattttgattactgtcccgaactgggacgtgtgtctctggagctacacatcgaacggattccgctcaacacagaacagaaagcactgaaagtgctaagaatctgtgagcagagacagatgactgaacaggtccgaagtatctgcaaaatccttgcaatgaaagctgtccgtaacaaccggctgggtagtgcactgtcctggagcattcgggcaaaagacgcagcattcgcaacgctggtatccgataggtttttacgggactattgcgagcggggttgcttcagcgatctggatctcatcgataatctgggtccggcaatgatgttatccgacaggctcactttcctcggcaagtatcgcgagtttcaccggatgtatggagagaagagatttgcagacgccgcttctctcctcctttcactgatgaccagccggattgcacctagaagcttctggatgacactcctcacagacgctctgcctctcctggaacagaaacaggtgattttttcagctgaacaaacatatgaactcatgcggtgtttggaagacctcaccagccggagacctgtccatggtgagagcgatacagagcagcttcaggatgacgacatcgagacgaccaaggttgaaatgctccggctgtctcttgcaagaaatctggctcgggcaattatcagagaaggttccctggaaggctcatag

SEQ ID NO: 275364 - DNA, 780 bp, Artificial Sequence
  derived and/or modified sequence
atgagagagttcctgctgctggagtacgccagcggcctgttcgcccaccccagcctgtggcagctgggcgtggactacttcgactactgccccgagctgggcagagtgagcctggagctgcacatcgagagaatccccctgaacaccgagcagaaggccctgaaggtgctgagaatctgcgagcagagacagatgaccgagcaggtgagaagcatctgcaagatcctggccatgaaggccgtgagaaacaacagactgggcagcgccctgagctggagcatcagagccaaggacgccgccttcgccaccctggtgagcgacagattcctgagagactactgcgagagaggctgcttcagcgacctggacctgatcgacaacctgggccccgccatgatgctgagcgacagactgaccttcctgggcaagtacagagagttccacagaatgtacggcgagaagagattcgccgacgccgccagcctgctgctgagcctgatgaccagcagaatcgcccccagaagcttctggatgaccctgctgaccgacgccctgcccctgctggagcagaagcaggtgatcttcagcgccgagcagacctacgagctgatgagatgcctggaggacctgaccagcagaagacccgtgcacggcgagagcgacaccgagcagctgcaggacgacgacatcgagaccaccaaggtggagatgctgagactgagcctggccagaaacctggccagagccatcatcagagagggcagcctggagggcagctag

SEQ ID NO: 275365 - DNA, 387 bp, Artificial Sequence
  derived and/or modified sequence
atgagacccgtgcccgtgagaggcgtgcacagcctgcaccccagacccttcggcggccccgtgagcctgccctggctgagaaccggcagatgcagatggggcctgggcctgtacagacagcccagcctgctgcccgaggagatctgcggcgtgttcttcagaagacactaccccctgaccaccctgagattctgcggcatggaccccgagcagagaaagtggcagaagtactgcaagcccagctggatcttcggcttcgtggccaagagccagaccgagccccaggagaacgtgtgccacctgttcgccgagtacgacatggtgcagcccgccagccaggtgatcggcctggtgaccgccctgctgcaggacgccgagagaatgtag

SEQ ID NO: 275366 - DNA, 387 bp, Artificial Sequence
  derived and/or modified sequence
atgaggccagtgcccgtgcggggcgtgcatagtctgcacccgcgaccttttggagggcctgtctcactgccctggcttcgcaccggcagatgccggtggggactggggctgtaccgacagcctagcctgttgcctgaagaaatctgtggcgtattcttcagacgccactatccattgaccacattgcgcttctgcggtatggacccggaacagagaaaatggcagaaatactgtaaaccctcttggatcttcggattcgtcgccaaatcccaaaccgagccacaagaaaatgtgtgccacctgtttgctgaatacgatatggtacaacctgcttcccaagttatcggtttggttactgccctattacaggatgcggagagaatgtag

SEQ ID NO: 275367 - DNA, 387 bp, Artificial Sequence
  derived and/or modified sequence
atgaggcctgtgcctgtgcggggcgtgcacagcctgcacccccggccctttggaggccctgtgtccctgccctggctgaggacaggccgctgccgctggggcctgggcctgtaccggcagcccagcctgctgcctgaggagatctgtggggtcttcttccgccgccactaccccctgaccaccctgcgcttctgtggcatggaccctgagcagaggaagtggcagaagtactgcaagcccagctggatcttcggctttgtggccaagagccagacagagccccaggagaatgtgtgccacctgtttgctgaatatgacatggtgcagcctgccagccaggtgattggcctggtgacagccctgctgcaggatgctgagaggatgtag

SEQ ID NO: 275368 - DNA, 387 bp, Artificial Sequence
  derived and/or modified sequence
atgcggcccgtgcccgtgcggggcgtgcacagcctgcacccccggcccttcggggggcccgtgagcctgccctggctgcgcaccgggaggtgtcgttgggggctgggtctgtacagacagcctagcttgctgcccgaggagatttgcggggtgttcttccgccggcactatcctctgactactttgcgattttgtggtatggatccagagcaacggaaatggcagaaatactgtaaaccctcctggatatttggattcgtggcaaaatctcaaacagaaccacaggaaaacgtgtgtcacctattcgcagaatacgacatggtgcagccggcgtcacaggtcattggactggtgaccgcactcctccaggatgccgagaggatgtag

SEQ ID NO: 275369 - DNA, 387 bp, Artificial Sequence
  derived and/or modified sequence
atgcgccctgtccccgtgaggggggtacattctctccatcccagaccattcggtggaccagtctctttgccctggctgcgcacaggtcgctgccgctggggcctgggcctatacagacagcccagtctgctgccagaagagatttgcggagtctttttcagaagacattatcctttgacaactctgcgattctgcgggatggatccagagcaaagaaagtggcagaaatattgcaagccctcctggattttcggctttgtcgctaagtcccagacagagcctcaggagaacgtgtgccacctctttgcggaatacgacatggtccagcccgctagtcaggtcatcggactggttactgcgctactccaggatgctgaacgtatgtag

SEQ ID NO: 275370 - DNA, 2174 bp, Artificial Sequence
  derived and/or modified sequence
ggaggtgggagatcttcaaagggattcatgaggcctgttcctgtgagaggggtccattcactccacccccgcccctttggggggcctgtttctttgccttggctcagaactgggaggtgcagatggggcctcggactctacagacagcccagcctcctgccagaagaaatctgcggggtgtttttccggcgccattacccactcaccaccctccgcttctgtggtatggaccctgagcaacggaagtggcagaagtactgcaaaccctcctggatctttgggtttgtggccaagagccagacagagcctcaggagaacgtatgccacctctttgcggagtatgacatggtccagccagcctcgcaggtcatcggcctggtgactgctctgctgcaggacgcagaaaggatgtaggggagagactgcctgtgcacctaaccaacacctccaggggctcgctaaggagcccccctccaccccctgaatgggtgtggcttgtggccatattgacagaccaatctatgggactagggggattggcatcaagttgacacccttgaacctgctatggccttcagcagtcaccatcatccagaccccccgggcctcagtttcctcaatcatagaagaagaccaatagacaagatcagctgttcttagatgctggtgggcatttgaacatgctcctccatgattctgaagcatgcacacctctgaagacccctgcatgaaaataacctccaaggaccctctgaccccatcgacctgggccctgcccacacaacagtctgagcaagagacctgcagcccctgtttcgtggcagacagcaggtgcctggcggtgacccacggggctcctggcttgcagctggtgatggtcaagaactgactacaaaacaggaatggatagactctatttccttccatatctgttcctctgttccttttcccactttctgggtggctttttgggtccacccagccaggatgctgcaggccaagctgggtgtggtatttagggcagctcagcagggggaacttgtccccatggtcagaggagacccagctgtcctgcacccccttgcagatgagtatcaccccatcttttctttccacttggtttttatttttatttttttttgagacagagtctcactgtcacccaggctgaactgcagtggtgtgatctaggctcactgcaacctccacctcccaggttcaagcaattatcctgcctcaggctcccaagtagctgggattacaggcatgtgcaactcacccagctaattttgtatttttagtagagacagggtttcaccatgttggccaggctggtcttgaactcctgaccgcaggtaatccacctgcttcggcctcccaaagtgctgggattacaggcgcaagccacccagcccagcttctttccattccttgataggcgagtattccaaagctggtatcgtagctgccctaatgttgcatattaggcggcgggggcagagataagggccatctctctgtgattctgcctcagctcctgtcttgctgagccctcccccaacccacgctccaacacacacacacacacacacacacacacacacacacacacacacacacacacacacacacgcccctctactgctatgtggcttcaaccagcctcacagccacacgggggaagcagagagtcaagaatgcaaagaggccgcttccctaagaggcttggaggagctgggctctatcccacacccacccccaccccacccccacccagcctccagaagctggaaccatttctcccgcaggcctgagttcctaaggaaaccaccctaccggggtggaagggagggtcagggaagaaacccactcttgctctacgaggagcaagtgcctgccccctcccagcagccagccctgccaaagttgcattatctttggccaaggctgggcctgacggttatgatttcagccctgggcctgcaggagaggctgagaccagcccacccagccagtggtcgagcactgccccgccgccaaagtctgcagaatgtgagatgaggttctcaaggtcacaggccccagtcccagcctgggggctggcagaggcccccatatactctgctacagctcctatcatgaaaaataaaatgtttgtctttgcaaaacagtaa

SEQ ID NO: 275371 - protein, 274 aa, Artificial Sequence
  derived and/or modified sequence
MELEDGVVYQEEPGGSGAVMSERVSGLAGSIYREFERLIGRYDEEVVKELMPLVVAVLENLDSVFAQDQEHQVELELLRDDNEQLITQYEREKALRKHAEEKFIEFEDSQEQEKKDLQTRVESLESQTRQLELKAKNYADQSAMSPGCMLLFVFGFVGGAVVINSAILVSLSVLLLVHFSISTGVPALTQNLPRILRKERPISLGIFPLPAGDGLLTPDAQKGGETPGSEQWKFQELSQPRSHTSLKVSNSPEPQKAVEQEVRMVLLNILQKVY

SEQ ID NO: 275372 - protein, 635 aa, Artificial Sequence
  derived and/or modified sequence
SLKDELSDVSQGGSKATTPASTANSDVATIPTDTPLKEENEGFVKVTDAPNKSEISKHIEVQVAQETRNVSTGSAENEEKSEVQAIIESTPELDMDKDLSGYKGSSTPTKGIENKAFDRNTESLFEKRSSTLSQLPGDKSKAFDFLSEETEASLASRREQKREQYRQVKAHVQKEDGRVQAFGWSLPQKYKQVTNGQGENKMKNLPVPVYLRPLDEKDTSMKKLWCAVGVNLSGGKTRDGGSVVGASVFYKDVAGLDTEGSKQRSASQSSLDKLDQELKEQQKELKNQEELSSLVWICTSTHSATKVLIIDAVQPGNILDSFTVCNSHVLCIASVPGARETDYPAGEDLSESGQVDKASLCGSMTSNSSAETDSLLGGITVVGCSAEGVTGAATSPSTNGASPVMDKPPEMEAENSEVDENVPTAEEATEATEGNAGSAEDTVDISQTGVYTEHVFTDPLGVQIPEDLSPVYQSSNDSDAYKDQISVLPNEQDLVREEAQKMSSLLPTMWLGAQNGCLYVHSSVAQWRKCLHSIKLKDSILSIVHVKGIVLVALADGTLAIFHRGVDGQWDLSNYHLLDLGRPHHSIRCMTVVHDKVWCGYRNKIYVLHSSLGDGARPCLKTDKQAKNRLKSGFH

SEQ ID NO: 275373 - DNA, 1908 bp, Artificial Sequence
  derived and/or modified sequence
agcctgaaggacgagctgagcgacgtgagccagggcggcagcaaggccaccacccccgccagcaccgccaacagcgacgtggccaccatccccaccgacacccccctgaaggaggagaacgagggcttcgtgaaggtgaccgacgcccccaacaagagcgagatcagcaagcacatcgaggtgcaggtggcccaggagaccagaaacgtgagcaccggcagcgccgagaacgaggagaagagcgaggtgcaggccatcatcgagagcacccccgagctggacatggacaaggacctgagcggctacaagggcagcagcacccccaccaagggcatcgagaacaaggccttcgacagaaacaccgagagcctgttcgagaagagaagcagcaccctgagccagctgcccggcgacaagagcaaggccttcgacttcctgagcgaggagaccgaggccagcctggccagcagaagagagcagaagagagagcagtacagacaggtgaaggcccacgtgcagaaggaggacggcagagtgcaggccttcggctggagcctgccccagaagtacaagcaggtgaccaacggccagggcgagaacaagatgaagaacctgcccgtgcccgtgtacctgagacccctggacgagaaggacaccagcatgaagaagctgtggtgcgccgtgggcgtgaacctgagcggcggcaagaccagagacggcggcagcgtggtgggcgccagcgtgttctacaaggacgtggccggcctggacaccgagggcagcaagcagagaagcgccagccagagcagcctggacaagctggaccaggagctgaaggagcagcagaaggagctgaagaaccaggaggagctgagcagcctggtgtggatctgcaccagcacccacagcgccaccaaggtgctgatcatcgacgccgtgcagcccggcaacatcctggacagcttcaccgtgtgcaacagccacgtgctgtgcatcgccagcgtgcccggcgccagagagaccgactaccccgccggcgaggacctgagcgagagcggccaggtggacaaggccagcctgtgcggcagcatgaccagcaacagcagcgccgagaccgacagcctgctgggcggcatcaccgtggtgggctgcagcgccgagggcgtgaccggcgccgccaccagccccagcaccaacggcgccagccccgtgatggacaagccccccgagatggaggccgagaacagcgaggtggacgagaacgtgcccaccgccgaggaggccaccgaggccaccgagggcaacgccggcagcgccgaggacaccgtggacatcagccagaccggcgtgtacaccgagcacgtgttcaccgaccccctgggcgtgcagatccccgaggacctgagccccgtgtaccagagcagcaacgacagcgacgcctacaaggaccagatcagcgtgctgcccaacgagcaggacctggtgagagaggaggcccagaagatgagcagcctgctgcccaccatgtggctgggcgcccagaacggctgcctgtacgtgcacagcagcgtggcccagtggagaaagtgcctgcacagcatcaagctgaaggacagcatcctgagcatcgtgcacgtgaagggcatcgtgctggtggccctggccgacggcaccctggccatcttccacagaggcgtggacggccagtgggacctgagcaactaccacctgctggacctgggcagaccccaccacagcatcagatgcatgaccgtggtgcacgacaaggtgtggtgcggctacagaaacaagatctacgtgctgcacagcagcctgggcgacggcgccagaccctgcctgaagaccgacaagcaggccaagaacagactgaagagcggcttccactag

SEQ ID NO: 275374 - DNA, 1908 bp, Artificial Sequence
  derived and/or modified sequence
agcttgaaggatgagttgagcgacgtgagtcagggggggtcaaaggcgaccacccccgcttctaccgccaattccgacgtagctacaatccccactgatacgccgttgaaggaagagaacgaaggtttcgtcaaggtgaccgacgccccgaacaaatcagagatttctaagcacattgaggtacaggtggcccaggagactaggaacgtgtccaccggatctgcagagaacgaggaaaaatctgaggtgcaggctataatagagtctacacccgagctagacatggataaggatctgtcagggtacaagggaagctcgaccccaaccaaggggatcgaaaacaaagctttcgatcggaatactgaatctttgtttgaaaaacgtagttctaccctcagtcagttacccggggacaaaagcaaggctttcgatttcttgtccgaagaaaccgaagcatccctcgcatcacggcgcgaacagaaacgggagcagtatcgccaggtgaaagctcacgtgcagaaggaggatggaagggtacaagcattcggctggtcactaccgcagaaatataagcaagtcactaatgggcaaggcgaaaataagatgaaaaacctgcctgtgcctgtctatttgagacccctggacgagaaagatacttccatgaaaaaactgtggtgtgccgtgggcgtgaatctttccggagggaaaactcgagatggcgggtctgtggtgggggctagcgtgttttacaaagacgtggcaggcttggacacagaaggatctaagcaacgatcagcgtctcagtcatcgctagataagctggaccaggagctaaaagagcaacagaaggaattaaagaatcaagaagaattgtcaagcttggtgtggatctgtacaagcactcatagtgcaaccaaagtattgatcatcgacgcggtacagccagggaatatcctagatagttttacagtttgtaactcccacgtactttgtatagcgagcgtgccgggcgcccgggagaccgactatccagcaggcgaagatctgtccgaatctggccaggtagacaaggccagtctctgcggttcaatgacaagcaactccagcgcagagacggatagcctcctgggcggtattaccgtggtaggatgtagtgctgagggcgtaaccggagcagccacatctccatcaaccaatggcgctagtcccgtcatggataaacctccagaaatggaagcagaaaatagcgaggtggacgagaatgttccaactgcagaagaagctactgaggctaccgaggggaacgccggatccgctgaggacactgtggatatttcccagaccggggtatacactgagcatgtttttaccgatcctcttggtgtccagataccagaggacctctcaccagtgtatcagagcagtaacgacagtgacgcttataaggatcagatcagcgtcctgccaaatgagcaggacctcgtacgcgaagaagcgcagaagatgagctcattgctcccaactatgtggctgggggctcagaatggctgtctctatgttcacagctccgtggctcagtggcggaagtgcctgcatagcatcaagctgaaggactccattttatctatcgttcacgtgaaaggaattgtacttgtggctctggctgatggcacattggcgattttccacagaggtgttgatgggcagtgggacctgtcgaattaccacctgctggatttagggcgtccacaccatagtattaggtgtatgaccgtggtccatgacaaagtgtggtgcggctacagaaataagatttatgtgctgcactcaagccttggcgacggggcccgaccatgcctaaaaaccgataaacaggccaaaaaccgtttgaagtctgggtttcattag

SEQ ID NO: 275375 - DNA, 1908 bp, Artificial Sequence
  derived and/or modified sequence
agcctgaaggatgagctgagtgatgtgtcccagggcggcagcaaggccaccaccccagccagcacagccaacagtgatgtggccaccatccccacagacacccccctgaaggaggagaatgaaggatttgtgaaggtgacagatgcccccaacaagtctgagatcagcaagcacatcgaggtgcaggtggcccaggagaccagaaatgtgtccacaggcagcgcagaaaatgaggagaagtctgaggtgcaggccatcatcgagagcaccccagagctggacatggacaaggacctgagcggctacaagggcagcagcacccccaccaagggcatcgagaacaaggcctttgacaggaacacagagagcctgtttgagaagaggagcagcaccctgagccagctgcccggggacaagagcaaggcctttgacttcctgtctgaggagacagaggccagcctggccagcagaagagagcagaagcgggagcagtaccggcaggtgaaggcccacgtgcagaaggaggatggccgggtgcaggccttcggctggagcctgccccagaagtacaagcaggtgaccaacggccagggcgagaacaagatgaagaacctgcctgtgcctgtgtacctgcggcccctggatgagaaggacacctccatgaagaagctgtggtgtgctgtgggcgtgaacctgagcggcggcaagaccagagatggcggctctgtggtgggcgcctctgtgttctacaaggatgtggccggcctggacacagagggcagcaagcagaggtctgccagccagagcagcctggacaagctggaccaggagctgaaggagcagcagaaggagctgaagaaccaggaggagctgagcagcctggtgtggatctgcaccagcacccacagcgccaccaaggtgctgatcattgatgctgtgcagcccggcaacatcctggacagcttcaccgtgtgcaacagccacgtgctgtgcatcgcctctgtgcctggggcccgggagacagactacccagctggggaggacctgtctgagagcggccaggtggacaaggccagcctgtgtggctccatgaccagcaacagcagcgctgagacagacagcctgctgggcggcatcaccgtggtgggctgcagcgctgagggcgtgactggagctgccaccagccccagcaccaatggagccagccctgtgatggacaagcccccagagatggaggccgagaacagcgaggtggatgaaaatgtgcccacagctgaggaggccacagaggccacagagggcaatgccggcagcgctgaggacacagtggacatcagccagacaggagtgtacacagagcacgtgttcacagaccccctgggcgtgcagatccctgaggacctgagccctgtgtaccagagcagcaatgacagtgatgcctacaaggaccagatctctgtgctgcccaatgagcaggacctggtgcgggaggaggcccagaagatgagcagcctgctgcccaccatgtggctgggcgcccagaatggctgcctgtatgtgcacagctctgtggcccagtggaggaagtgcctgcacagcatcaagctgaaggacagcatcctgagcatcgtgcacgtgaagggcatcgtgctggtggccctggctgatggcaccctggccatcttccacagaggagtggatggccagtgggacctgagcaactaccacctgctggacctgggccggccccaccacagcatccgctgcatgacagtggtgcatgacaaggtgtggtgtggctacagaaacaagatctacgtgctgcacagcagcctgggagatggagcccggccctgcctgaagacagacaagcaggccaagaaccggctgaagagcggcttccactag

SEQ ID NO: 275376 - DNA, 1908 bp, Artificial Sequence
  derived and/or modified sequence
agcctgaaggacgagctgagcgacgtgagccagggcggcagcaaggcaacgaccccagcctccacagctaacagtgatgttgccactattcccacagacacccctcttaaggaggagaacgaaggttttgtgaaagtaactgatgccccaaataagtccgagatcagcaaacacattgaagtgcaagtggcccaggaaacaagaaatgtttctactggttccgccgagaatgaggagaagtctgaggtgcaggcaatcatcgagagcacacccgagctggacatggataaggatctctccggctacaaggggagcagcactccaaccaaggggatagagaacaaggccttcgatagaaacacagagtctctgtttgagaagaggtcttccacactgtcacagctcccaggagataagagtaaggcctttgacttcctgtccgaggagacagaagcgagcttggcctccaggcgcgaacagaaacgagagcagtaccggcaagtgaaagctcacgtccagaaagaagatgggcgggttcaggcttttggctggagtttgccccagaaatacaaacaggttaccaacggtcaaggagaaaacaagatgaaaaaccttccggttcccgtctaccttcgacctttggatgagaaggatacatccatgaaaaagttgtggtgcgccgtgggcgttaacctgagtgggggaaagaccagggacggtggatccgtggtcggcgccagtgtcttctataaggatgtggcaggactagataccgagggctcaaagcagagaagcgctagccagtcgtcactggacaagctggatcaggagctcaaggagcagcagaaggagctgaagaaccaggaggaactcagcagtctcgtgtggatttgtaccagcacccactccgcgacaaaggtgctcataatcgacgctgtccagcccgggaatatcctggatagttttaccgtctgtaattcccatgtgctatgcatcgcatctgttcctggagcacgggagaccgactacccagctggtgaagacctgtctgagagcggacaggtcgacaaggcctctctgtgtgggagtatgacaagcaactcttctgctgaaaccgatagcctgctgggcggcatcactgttgtaggctgctcagcggagggggtaactggagcggcaacttccccctctactaacggtgcttcacccgttatggacaagccacctgagatggaggcagaaaattctgaggtcgacgagaacgtgcccacagctgaggaggccaccgaagctaccgagggcaacgcgggcagtgcagaggacacggtcgacataagccagaccggggtgtatacagagcatgtttttacggatcctcttggagtgcagatcccagaagacctttccccagtctaccagagctctaacgacagcgatgcctacaaggaccagatatctgtgctaccaaacgaacaggacctagttcgggaagaggcacagaaaatgagctccctccttcccaccatgtggttgggggcacaaaacggttgcctatacgtgcatagctcagtggcccagtggaggaaatgtctgcattccatcaaactcaaggacagcatactgtctatagtgcacgttaagggcatcgtccttgtcgctttggcagacggcacattggctatcttccacagaggtgtcgacggccagtgggatctatccaattaccatctactggacctcgggcgcccgcatcattcgatccgctgtatgacagtggttcatgataaagtctggtgtggttaccgcaacaaaatttacgtcctgcacagcagcctgggggacggcgcgaggccctgcctgaaaacagataagcaggcgaagaaccggttgaagagcggctttcactag

SEQ ID NO: 275377 - DNA, 1908 bp, Artificial Sequence
  derived and/or modified sequence
tccctgaaagatgaactgtctgatgttagtcagggtggtagtaaagcaaccacacctgcgtctaccgccaactccgacgtggcaacgatcccaactgacaccccactgaaggaggagaatgagggctttgttaaagtgacagacgcaccaaacaaatctgaaatcagcaagcacatcgaagtccaggtcgcccaggagacacgaaacgtttccactgggagcgctgagaacgaagaaaagagcgaggtccaggcaattatcgaatctacccctgaactggacatggataaggacctgagtgggtataagggaagctccacacctactaaaggaatcgagaataaggccttcgatcggaacacagagtccctgtttgaaaaacgaagctccaccctatcccagctccccggagacaagtcaaaggccttcgactttttatcagaggagactgaggccagcttggcctcccggagagaacaaaaaagggaacagtaccgacaggtgaaggcacacgtgcagaaggaagacggcagggtacaggctttcgggtggagcctaccacagaagtacaagcaggttaccaacggccaaggagagaataaaatgaagaatctgcctgtccctgtctatctgaggcctctggacgaaaaagacacctctatgaaaaagctctggtgcgccgttggcgtgaatttgtcagggggtaaaacaagagatggcggttccgtggttggtgcgtctgtattttacaaggatgtggcaggcttagacactgagggctcaaagcagcggtctgctagccagtcgtccctcgacaagctcgatcaggagcttaaggaacagcagaaggagctgaagaaccaggaagaactctctagcctggtttggatatgtacatcaacgcactcagcgactaaggtgctcattattgatgccgtgcagcccggtaatattctcgactcgttcactgtatgtaattcacacgtcttgtgcattgccagcgtccctggagctcgtgagaccgactaccctgccggtgaagacctgagtgagtcaggccaagttgacaaagcctccctgtgcgggagcatgacttctaatagctctgctgagaccgatagtttgttgggagggatcacagttgtggggtgtagtgccgagggagtgacgggcgctgccacaagcccgagcactaatggtgccagccctgtgatggacaaacctcccgaaatggaagctgagaatagtgaggtcgatgagaacgtgccaaccgcagaagaagctacagaggcgactgagggcaacgccggatcggccgaggacacggtggatattagccagaccggggtgtacactgaacacgtctttaccgatccgcttggcgtgcagattcctgaagatctatcccccgtatatcagagctcaaatgatagtgatgcttataaggatcagataagcgtgttgcctaatgaacaggatctggtgcgtgaagaagcccagaagatgtcatccctgctaccaaccatgtggctcggtgcacaaaacggatgcttatacgtccactcaagcgtagctcaatggagaaaatgtttgcattccatcaagttgaaggacagtatactgagcatcgtgcacgtgaagggcatagtgctcgtcgccctggccgatggtaccctcgctatctttcataggggggtagatggccagtgggatctgtctaactaccacttgctggaccttgggagaccccaccactcaatcaggtgcatgactgtggtccacgacaaagtttggtgcggctaccgaaataaaatctacgtgctccattcttccctgggggacggtgctcggccatgtctgaaaactgataagcaagccaagaacagactcaaatccggatttcattag

SEQ ID NO: 275378 - DNA, 1908 bp, Artificial Sequence
  derived and/or modified sequence
tcccttaaggatgagctttctgatgttagccaaggcggatctaaagctaccactccagcatcaacagctaattcagatgtggcaacaattcctactgatactcccttaaaggaagaaaacgaaggatttgtgaaggttacagatgcgccaaataaatcagagataagcaaacacattgaagtacaggtagcccaggaaactagaaatgtatctactggctctgctgaaaatgaagaaaagtcagaagttcaagcaatcatcgaatctactcctgagctggatatggacaaagatctcagtggatataaaggttcaagcactcccaccaaaggcatagagaacaaagcttttgatcgcaatacagaatctctctttgaaaaaagaagcagcaccttatctcagctccctggggataagtccaaagcctttgatttccttagtgaagaaactgaagctagtttagcctcacgcagagaacaaaagagagagcagtatcgtcaggtaaaagcacatgttcagaaggaagacggtagagtgcaggcttttggctggagtctgcctcagaagtacaaacaggtaaccaatggtcaaggtgaaaataagatgaaaaatttacctgtgcctgtctatctcagacctctggatgaaaaagatacatcaatgaagaagctgtggtgtgctgttggagtcaatttatctggtgggaagaccagagatggtggttctgttgttggagcaagtgtattttacaaggatgttgctggtttggatacagaaggcagtaaacagcgaagtgcctctcagagtagtttagataagttagatcaggaacttaaggaacagcagaaggagttaaaaaatcaagaagaattatccagtctagtttggatctgtaccagcactcattcggctacaaaagttcttattattgatgctgttcaacctggcaacatcctagacagtttcactgtttgcaactctcatgttctgtgcattgcaagtgtgccaggtgcacgagaaacagactaccctgcaggagaagatctttcagaatctggtcaggtagacaaagcatctttatgtggaagtatgacaagcaacagctcagcagagacagacagcctgttaggaggcatcacagtggttggttgttctgcagaaggtgtgacgggagctgccacttcccctagtacaaatggtgcttctccagtgatggataaaccaccagaaatggaagcagaaaatagtgaggttgatgaaaatgttccaacagcagaagaagcaactgaagctacagaagggaatgcggggtcagctgaagacacagtggacatctcccaaactggcgtctacacagagcatgtctttacagatcctttgggagttcagatcccagaagacctctccccagtgtatcagtcgagcaatgactcagatgcatataaagatcaaatatcagtactgccaaatgaacaagacttggtgagagaagaagcccagaaaatgagtagtcttttaccaactatgtggcttggagctcaaaatggctgtttgtatgtccattcatctgtagcccagtggaggaaatgtctccattccattaaacttaaagattcgattctcagtattgtacacgtgaagggaatcgtgttagtagccctggctgacggcacccttgcaatctttcacagaggagtggatgggcagtgggatttgtcaaactatcacctcttagaccttggacggcctcatcattccatccgttgcatgactgtggtacatgacaaagtctggtgtggctataggaacaaaatctatgtgctgcactccagcctgggtgacggagcaagaccctgtctcaaaacagacaaacaagcaaaaaatagattaaagtctggatttcactga

SEQ ID NO: 275379 - protein, 523 aa, Artificial Sequence
  derived and/or modified sequence
MTQNKLKLCSKANVYTEVPDGGWGWAVAVSFFFVEVFTYGIIKTFGVFFNDLMDSFNESNSRISWIISICVFVLTFSAPLATVLSNRFGHRLVVMLGGLLVSTGMVAASFSQEVSHMYVAIGIISGLGYCFSFLPTVTILSQYFGKRRSIVTAVASTGECFAVFAFAPAIMALKERIGWRYSLLFVGLLQLNIVIFGALLRPIFIRGPASPKIVIQENRKEAQYMLENEKTRTSIDSIDSGVELTTSPKNVPTHTNLELEPKADMQQVLVKTSPRPSEKKAPLLDFSILKEKSFICYALFGLFATLGFFAPSLYIIPLGISLGIDQDRAAFLLSTMAIAEVFGRIGAGFVLNREPIRKIYIELICVILLTVSLFAFTFATEFWGLMSCSIFFGFMVGTIGGTHIPLLAEDDVVGIEKMSSAAGVYIFIQSIAGLAGPPLAGLLVDQSKIYSRAFYSCAAGMALAAVCLALVRPCKMGLCQHHHSGETKVVSHRGKTLQDIPEDFLEMDLAKNEHRVHVQMEPV

SEQ ID NO: 275380 - DNA, 3828 bp, Artificial Sequence
  derived and/or modified sequence
gggtggagggcccgggcgctcgggcctcaccagcccgagccaacttgcgctagagtcgggcccgccccctaaggggttaatccttttctcatgttaccgagcggcttataaggagggggaggccaagcctccgccttattgggagcctttgggggtttattctcttcccttctaacttgattaagaatgacccaaaataaattaaagctttgttccaaagccaatgtgtatactgaagtgcctgatggaggatggggctgggcggtagctgtttcatttttcttcgttgaagtcttcacctacggcatcatcaagacatttggtgtcttctttaatgacttaatggacagttttaatgaatccaatagcaggatctcatggataatctcaatctgtgtgtttgtcttaacattttcagctcccctcgccacagtcctgagcaatcgtttcggacaccgtctggtagtgatgttgggggggctacttgtcagcaccgggatggtggccgcctccttctcacaagaggtttctcatatgtacgtcgccatcggcatcatctctggtctgggatactgctttagttttctcccaactgtaaccatcctatcacaatattttggcaaaagacgttccatagtcactgcagttgcttccacaggagaatgtttcgctgtgtttgctttcgcaccagcaatcatggctctgaaggagcgcattggctggagatacagcctcctcttcgtgggcctactacagttaaacattgtcatcttcggagcactgctcagacccatctttatcagaggaccagcgtcaccgaaaatagtcatccaggaaaatcggaaagaagcgcagtatatgcttgaaaatgagaaaacacgaacctcaatagactccattgactcaggagtagaactaactacctcacctaaaaatgtgcctactcacactaacctggaactggagccgaaggccgacatgcagcaggtcctggtgaagaccagccccaggccaagcgaaaagaaagccccgctattagacttctccattttgaaagagaaaagttttatttgttatgcattatttggtctctttgcaacactgggattctttgcaccttccttgtacatcattcctctgggcattagtctgggcattgaccaggaccgcgctgcttttttattatctacgatggccattgcagaagttttcggaaggatcggagctggttttgtcctcaacagggagcccattcgtaagatttacattgagctcatctgcgtcatcttattgactgtgtctctgtttgcctttacttttgctactgaattctggggtctaatgtcatgcagcatattttttgggtttatggttggaacaataggagggactcacattccactgcttgctgaggatgatgtcgtgggcattgagaagatgtcttctgcagctggggtctacatcttcattcagagcatagcaggactggctggaccgccccttgcaggtttgttggtggaccaaagtaagatctacagcagggccttctactcctgcgcagctggcatggccctggctgctgtgtgcctcgccctggtgagaccgtgtaagatgggactgtgccagcatcatcactcaggtgaaacaaaggtagtgagccatcgtgggaagactttacaggacatacctgaagactttctggaaatggatcttgcaaaaaatgagcacagagttcacgtgcaaatggagccggtatgacacactttcttacaacaacagccactgtgttggctggagagggatggggtgggcccaacggggacacaaggaggcagaggagctaacccctctactccactttcaaaactacattttaaagggaatgtgtatgtgaagagcactaccaacatcgcttttgttttgttttgttttgttttaagctttttttttttgcttgtttttaaagccaaaacaaaaaacaaccaagcactcttccatatataaatctggctgtattcagtagcaatacaagagatatgtagaaagactctttggttcacattccgatattaaaatagtgacatgaactggcaaagtggttttaaaagctttcacgtgggataaatgattttctttttttcttttctttcttcctatggtcttgtctgaataaactactctcctgaataaaacaacatccaacccaggtcattgaaatgaaattggccagtcaaaaaaaaaaagacttcaatcatttttaaaattcctaattttcagaaatatgaataaatagtttttgttaaaccctttgtaaaataccaaggttcccgttaacaaattacggcctctgcttgctggaaatgaaatatagtttaagaccaaacattttactaataaacaaattttaagtatatatatatatatataacttgaacttcataaatgtgaagattaccacttctttttatggccagtccttatcagaagtgtttcagtacagaatatacaaaatggcatttaaaaatgtgtttcctgttgcttttagttatacagaaatatgtgactgtagtgtctttaatttaaaccgctatttattattaagttattctaggatgattaaagtaatcaaaagaaataaaatctgagacataagcagcatttttacctcctttctgcaatcctttaaatgcctcacagaatacgtcttatcttgtaaaaatactttcataaaaggccaagttgtcatgattcttccatttgattaggggcaacgtgtgctattaaaggggaaaaaataatggattgcaaatcgccttagctttcaaaactaatttgttttatcatttaagaatacttgaggaacttctttgatcagaattatatttcagagaattgttaaagcatttctgatttaaagaaaaaaccatctaattattgaagcatttctgtatttcacatgggggtaacagagacaattatgttatagcgagttacaagttgcaatttacatcttctataacacatgacttgattggtctaagttgccagaggtatcgggtaactggtcattgttttgttttgtttgttttattcttcctttttttttggagtcacactacatgtatagtattgctcacgttagcagttttctgtaaggagggcaagtgtcaggataataggtggactttttactcacctattttaccacaatctcaccctgcaggtgatggtcaatgcttgctgctccatctttattcatcgttaatgttaatttatgacaactcagggggaaaaacataacaagcctagtttggttacaggtacacacaagcttgaatatttctctgcactgaaatgaaagtggcatagttcatcaccacctgctacattttgtagagcatcttatcagccatagaaataggacaatctataaaactttggggagggtgggggaggaaatgacaaagtgtctgtcaaaaacaggcataatctaaaacaaggtggatgtagcaaatctctgtcactgcttgagaactttgagcttgtggcagttttgcagacttacatgacttcagcactttacgacatattttttactatgaatgttcaatacaatttaatatttataactgatttctgagggatctgctccatgtctattctgttatctgcatgaaaacaaaatgtatgccaatttcagtatgtcaataatcaaggttttaaatgtttggaagaaaatacaaacaagattgctgatctgttctgtattagtgacattctggtacttctagatttgcaataaatttatggattttttatttaaagaga

SEQ ID NO: 275381 - DNA, 3807 bp, Artificial Sequence
  derived and/or modified sequence
ttgggggtttattctcttcccttctaacttgacagggtcttgctctgtcattcaggcaagagtgcagtagtgtgatcacttcttactgccgcctcaagcttccagcctcaactcaagcaatcctcccacctcagccacccaagtggctgggactacagattaagaatgacccaaaataaattaaagctttgttccaaagccaatgtgtatactgaagtgcctgatggaggatggggctgggcggtagctgtttcatttttcttcgttgaagtcttcacctacggcatcatcaagacatttggtgtcttctttaatgacttaatggacagttttaatgaatccaatagcaggatctcatggataatctcaatctgtgtgtttgtcttaacattttcagctcccctcgccacagtcctgagcaatcgtttcggacaccgtctggtagtgatgttgggggggctacttgtcagcaccgggatggtggccgcctccttctcacaagaggtttctcatatgtacgtcgccatcggcatcatctctggtctgggatactgctttagttttctcccaactgtaaccatcctatcacaatattttggcaaaagacgttccatagtcactgcagttgcttccacaggagaatgtttcgctgtgtttgctttcgcaccagcaatcatggctctgaaggagcgcattggctggagatacagcctcctcttcgtgggcctactacagttaaacattgtcatcttcggagcactgctcagacccatctttatcagaggaccagcgtcaccgaaaatagtcatccaggaaaatcggaaagaagcgcagtatatgcttgaaaatgagaaaacacgaacctcaatagactccattgactcaggagtagaactaactacctcacctaaaaatgtgcctactcacactaacctggaactggagccgaaggccgacatgcagcaggtcctggtgaagaccagccccaggccaagcgaaaagaaagccccgctattagacttctccattttgaaagagaaaagttttatttgttatgcattatttggtctctttgcaacactgggattctttgcaccttccttgtacatcattcctctgggcattagtctgggcattgaccaggaccgcgctgcttttttattatctacgatggccattgcagaagttttcggaaggatcggagctggttttgtcctcaacagggagcccattcgtaagatttacattgagctcatctgcgtcatcttattgactgtgtctctgtttgcctttacttttgctactgaattctggggtctaatgtcatgcagcatattttttgggtttatggttggaacaataggagggactcacattccactgcttgctgaggatgatgtcgtgggcattgagaagatgtcttctgcagctggggtctacatcttcattcagagcatagcaggactggctggaccgccccttgcaggtttgttggtggaccaaagtaagatctacagcagggccttctactcctgcgcagctggcatggccctggctgctgtgtgcctcgccctggtgagaccgtgtaagatgggactgtgccagcatcatcactcaggtgaaacaaaggtagtgagccatcgtgggaagactttacaggacatacctgaagactttctggaaatggatcttgcaaaaaatgagcacagagttcacgtgcaaatggagccggtatgacacactttcttacaacaacagccactgtgttggctggagagggatggggtgggcccaacggggacacaaggaggcagaggagctaacccctctactccactttcaaaactacattttaaagggaatgtgtatgtgaagagcactaccaacatcgcttttgttttgttttgttttgttttaagctttttttttttgcttgtttttaaagccaaaacaaaaaacaaccaagcactcttccatatataaatctggctgtattcagtagcaatacaagagatatgtagaaagactctttggttcacattccgatattaaaatagtgacatgaactggcaaagtggttttaaaagctttcacgtgggataaatgattttctttttttcttttctttcttcctatggtcttgtctgaataaactactctcctgaataaaacaacatccaacccaggtcattgaaatgaaattggccagtcaaaaaaaaaaagacttcaatcatttttaaaattcctaattttcagaaatatgaataaatagtttttgttaaaccctttgtaaaataccaaggttcccgttaacaaattacggcctctgcttgctggaaatgaaatatagtttaagaccaaacattttactaataaacaaattttaagtatatatatatatatataacttgaacttcataaatgtgaagattaccacttctttttatggccagtccttatcagaagtgtttcagtacagaatatacaaaatggcatttaaaaatgtgtttcctgttgcttttagttatacagaaatatgtgactgtagtgtctttaatttaaaccgctatttattattaagttattctaggatgattaaagtaatcaaaagaaataaaatctgagacataagcagcatttttacctcctttctgcaatcctttaaatgcctcacagaatacgtcttatcttgtaaaaatactttcataaaaggccaagttgtcatgattcttccatttgattaggggcaacgtgtgctattaaaggggaaaaaataatggattgcaaatcgccttagctttcaaaactaatttgttttatcatttaagaatacttgaggaacttctttgatcagaattatatttcagagaattgttaaagcatttctgatttaaagaaaaaaccatctaattattgaagcatttctgtatttcacatgggggtaacagagacaattatgttatagcgagttacaagttgcaatttacatcttctataacacatgacttgattggtctaagttgccagaggtatcgggtaactggtcattgttttgttttgtttgttttattcttcctttttttttggagtcacactacatgtatagtattgctcacgttagcagttttctgtaaggagggcaagtgtcaggataataggtggactttttactcacctattttaccacaatctcaccctgcaggtgatggtcaatgcttgctgctccatctttattcatcgttaatgttaatttatgacaactcagggggaaaaacataacaagcctagtttggttacaggtacacacaagcttgaatatttctctgcactgaaatgaaagtggcatagttcatcaccacctgctacattttgtagagcatcttatcagccatagaaataggacaatctataaaactttggggagggtgggggaggaaatgacaaagtgtctgtcaaaaacaggcataatctaaaacaaggtggatgtagcaaatctctgtcactgcttgagaactttgagcttgtggcagttttgcagacttacatgacttcagcactttacgacatattttttactatgaatgttcaatacaatttaatatttataactgatttctgagggatctgctccatgtctattctgttatctgcatgaaaacaaaatgtatgccaatttcagtatgtcaataatcaaggttttaaatgtttggaagaaaatacaaacaagattgctgatctgttctgtattagtgacattctggtacttctagatttgcaataaatttatggattttttatttaaagaga

SEQ ID NO: 275382 - DNA, 291 bp, Artificial Sequence
  derived and/or modified sequence
atgaccccctgcctggagagcttctgccagagagccaaggactgcaagcagaacatccccctgcccttcctgatccaggactggcccctgagcgagagcaagccccagggccaggacttctggaccccccagcccctgcaggccgccgcccccagccacgagttccagcaggtggccctgcaccccgccagaaccagactggccagcagaccccagggcggcagactgatgagcagcagagaggtgggcctgagagcccccagatgcagctgcggcaagagaaagagatag

SEQ ID NO: 275383 - DNA, 108 bp, Artificial Sequence
  derived and/or modified sequence
agcccaaacaaactgttgttcgatcctcgggtggggggaagagtttctcatgtgttcttcctttttcccccttttgttttgctgcctggcccccctggactgccctag

SEQ ID NO: 275384 - protein, 373 aa, Artificial Sequence
  derived and/or modified sequence
MSSFLPEGGCYELLTVIGKGFEDLMTVNLARYKPTGEYVTVRRINLEACSNEMVTFLQGELHVSKLFNHPNIVPYRATFIADNELWVVTSFMAYGSAKDLICTHFMDGMNELAIAYILQGVLKALDYIHHMGYVHRSVKASHILISVDGKVYLSGLRSNLSMISHGQRQRVVHDFPKYSVKVLPWLSPEVLQQNLQGYDAKSDIYSVGITACELANGHVPFKDMPATQMLLEKLNGTVPCLLDTSTIPAEELTMSPSRSVANSGLSDSLTTSTPRPSNGDSPSHPYHRTFSPHFHHFVEQCLQRNPDARPSASTLLNHSFFKQIKRRASEALPELLRPVTPITNFEGSQSQDHSGIFGLVTNLEELEVDDWEF

SEQ ID NO: 275385 - DNA, 1122 bp, Artificial Sequence
  derived and/or modified sequence
atgagcagcttcctgcccgagggcggctgctacgagctgctgaccgtgatcggcaagggcttcgaggacctgatgaccgtgaacctggccagatacaagcccaccggcgagtacgtgaccgtgagaagaatcaacctggaggcctgcagcaacgagatggtgaccttcctgcagggcgagctgcacgtgagcaagctgttcaaccaccccaacatcgtgccctacagagccaccttcatcgccgacaacgagctgtgggtggtgaccagcttcatggcctacggcagcgccaaggacctgatctgcacccacttcatggacggcatgaacgagctggccatcgcctacatcctgcagggcgtgctgaaggccctggactacatccaccacatgggctacgtgcacagaagcgtgaaggccagccacatcctgatcagcgtggacggcaaggtgtacctgagcggcctgagaagcaacctgagcatgatcagccacggccagagacagagagtggtgcacgacttccccaagtacagcgtgaaggtgctgccctggctgagccccgaggtgctgcagcagaacctgcagggctacgacgccaagagcgacatctacagcgtgggcatcaccgcctgcgagctggccaacggccacgtgcccttcaaggacatgcccgccacccagatgctgctggagaagctgaacggcaccgtgccctgcctgctggacaccagcaccatccccgccgaggagctgaccatgagccccagcagaagcgtggccaacagcggcctgagcgacagcctgaccaccagcacccccagacccagcaacggcgacagccccagccacccctaccacagaaccttcagcccccacttccaccacttcgtggagcagtgcctgcagagaaaccccgacgccagacccagcgccagcaccctgctgaaccacagcttcttcaagcagatcaagagaagagccagcgaggccctgcccgagctgctgagacccgtgacccccatcaccaacttcgagggcagccagagccaggaccacagcggcatcttcggcctggtgaccaacctggaggagctggaggtggacgactgggagttctag

SEQ ID NO: 275386 - DNA, 1122 bp, Artificial Sequence
  derived and/or modified sequence
atgagcagcttcctaccagaaggcggttgttatgaactcttaaccgtgattggcaagggctttgaggacctgatgaccgtgaatctcgccagatataaaccaaccggcgagtatgtcactgtccgcaggattaacctcgaggcatgttctaatgagatggtgacattcctgcaaggcgagcttcatgtctctaagctcttcaatcaccccaatatcgttccataccgtgcaaccttcatagctgataatgaactgtgggtggtaacctccttcatggcctacggaagtgcgaaggatctaatctgtactcactttatggatggtatgaacgaactagcaattgcgtacattcttcagggtgtcctgaaggcactggattacatacaccacatgggatatgtgcaccgtagcgttaaagcctcccacattctgatctccgtcgacggcaaggtctacctctccggcctgagaagcaacttaagtatgatttctcacgggcagagacagagagttgtgcatgacttccctaagtatagtgtgaaagtactgccttggctttcccctgaagtcctccagcagaacctccagggttacgacgccaaatctgatatctatagtgtgggtatcacagcctgcgagcttgccaatggccacgtcccttttaaggacatgcccgctacacaaatgctcctggaaaaactaaacggaacagtgccttgcctattggacacgtctaccataccagccgaggaactgacgatgtctccgagcaggagtgtggccaactccggcttgtccgacagcctgaccacttctacgccccgaccaagtaacggagactcgccctcccacccatatcatagaacattcagtccccattttcaccactttgtcgagcaatgtttacaaaggaacccagacgcccggccttccgccagcacgttgctgaaccatagcttttttaaacagattaagaggcgagcctctgaagctttgccagagctcctgaggcctgtcactcctattaccaactttgaggggtctcagtcacaagaccattcaggaatcttcggtctggtgactaacctcgaagaactggaggtcgacgactgggagttttag

SEQ ID NO: 275387 - DNA, 1122 bp, Artificial Sequence
  derived and/or modified sequence
atgagcagcttcctgcctgagggcggctgctatgagctgctgactgtgattggaaaaggatttgaggacctgatgacagtgaacctggcccgctacaagcccactggagaatatgtgacagtgcggcgcatcaacctggaggcctgcagcaatgagatggtgaccttcctgcagggcgagctgcacgtgtccaagctgttcaaccaccccaacatcgtgccctaccgggccaccttcatcgctgacaatgagctgtgggtggtgaccagcttcatggcctacggcagcgccaaggacctgatctgcacccacttcatggatggcatgaatgagctggccatcgcctacatcctgcagggcgtgctgaaggccctggactacatccaccacatgggctacgtgcacaggtctgtgaaggccagccacatcctgatctctgtggatggcaaggtgtacctgagcggcctgcggagcaacctgtccatgatcagccacggccagaggcagagggtggtgcatgacttccccaagtacagcgtgaaggtgctgccctggctgagccctgaggtgctgcagcagaacctgcagggctatgatgccaagagtgacatctacagcgtgggcatcacagcctgtgagctggccaacggccacgtgcccttcaaggacatgcctgccacccagatgctgctggagaagctgaatggaacagtgccctgcctgctggacaccagcaccatcccagctgaggagctgaccatgagccccagccgctctgtggccaacagcggcctgagtgacagcctgaccaccagcaccccccggcccagcaatggagacagccccagccacccctaccacaggaccttcagcccccacttccaccactttgtggagcagtgcctgcagaggaacccagatgcccggcccagcgccagcaccctgctgaaccacagcttcttcaagcagatcaagaggcgggccagcgaggccctgcctgagctgctgcggcctgtgacccccatcaccaactttgagggcagccagagccaggaccacagcggcatcttcggcctggtgaccaacctggaggagctggaggtggatgactgggagttctag

SEQ ID NO: 275388 - DNA, 1122 bp, Artificial Sequence
  derived and/or modified sequence
atgagcagcttcctgcccgagggcggctgctacgagctgctgaccgtaatcggaaagggattcgaagacctgatgactgtgaacctcgctaggtataagcccacgggggagtacgtgacagttcgtagaataaacctggaagcttgctctaatgagatggttaccttcctccaaggcgaactgcacgtgagtaagctgtttaaccacccaaacatcgtcccatatcgggccacattcatcgccgacaatgagctgtgggtcgtgacaagctttatggcgtatggctccgccaaggatcttatttgtactcattttatggacggtatgaacgaacttgccatcgcctatatcttgcagggggtgctcaaggctctggattatatccaccacatgggatacgtgcacaggtccgtaaaggcctcccacatcttaatctctgtcgatggtaaagtatatctaagcggtctgaggagcaatctgtccatgatctctcacggacagcgccagcgggtggtgcacgattttccgaagtattcagttaaagtcctcccttggctgtcccctgaggttcttcagcagaatctacaagggtatgatgcgaagtcagacatatattccgttggcatcacagcatgtgaactggctaatggtcacgtgccattcaaggatatgcccgcaactcagatgctgctcgagaagctgaatggcaccgtgccatgcctgcttgataccagcacgatacccgccgaggagcttactatgagcccgtctcgcagtgtggcaaattcaggactgtccgactccctgactacctctaccccacggccatcaaatggagacagtccttcacatccttaccaccgcactttttcacctcactttcatcactttgtggagcagtgtctccaaagaaatcctgacgcacgtccatctgctagtactctgctcaatcatagcttcttcaagcagatcaaacgtagagcctccgaggcactgccagagctcttacgtccagttacacctataaccaacttcgagggctctcagtctcaggatcactctgggatttttggcctggtcaccaatttagaggagctagaggtggacgattgggaattctag

SEQ ID NO: 275389 - DNA, 1122 bp, Artificial Sequence
  derived and/or modified sequence
atgagcagctttctgccagaggggggatgttacgagctccttaccgtgatcgggaaaggttttgaggatctaatgactgtgaatcttgcaaggtacaaacctacgggcgagtacgtgacagtccggaggataaacctcgaagcttgctcaaacgagatggtgacgtttctgcagggcgagctgcacgtttccaaattgtttaaccaccctaacattgttccttaccgggcaaccttcattgccgacaacgaactttgggtagtgacctcatttatggcatacggctccgctaaagaccttatctgcacccacttcatggatggaatgaatgaactggcgatcgcctacatcctgcagggcgtgctcaaggccctagattacatacatcatatgggatacgttcatcgttctgtgaaagctagccacattcttatctccgttgatggcaaggtgtacttgtcgggtctccgatccaatctaagtatgatctctcatggacagcggcagagagtagtacatgacttccctaaatattcagtgaaagtactgccttggctcagccccgaggttctgcagcagaatctgcagggctatgatgccaagtccgatatttattctgtgggcattactgcctgcgagctcgccaacggtcacgtgccatttaaagatatgccggcaacccaaatgttgctcgagaagttgaacgggaccgtaccgtgcctcctggatacttcgacaatacccgctgaggaattgacaatgtccccaagcaggtcggttgctaattccggactgtccgactcattaacgacgtctacccccagaccaagcaacggagatagtccctcccacccgtatcatagaactttcagtccacacttccaccatttcgtcgagcaatgcctccagcgtaaccctgacgccaggcctagtgcatctactctgctgaatcactcattctttaagcagattaagaggcgggcatccgaggcactgcccgagctcctgaggcctgtcacgcctatcactaacttcgaggggtcccagagccaggaccacagcgggatttttggcctggtgaccaacctcgaggaactcgaagtggacgactgggagttttag

SEQ ID NO: 275390 - protein, 586 aa, Artificial Sequence
  derived and/or modified sequence
MFLVRCRHAAIAKYFGDALPACAKGCDHCQNPTAVRRRLEALERSSSWSKTCIGPSQGNGFDPELYEGGRKGYGDFSRYDEGSGGSGDEGRDEAHKREWNLFYQKQMQLRKGKDPKIEEFVPPDENCPLKEASSRRIPRLTVKAREHCLRLLEEALSSNRQSTRTADEADLRAKAVELEHETFRNAKVANLYKASVLKKVADIHRASKDGQPYDMGGSAKSCSAQAEPPEPNEYDIPPASHVYSLKPKRVGAGFPKGSCPFQTATELMETTRIREQAPQPERGGEHEPPSRPCGLLDEDGSEPLPGPRGEVPGGSAHYGGPSPEKKAKSSSGGSSLAKGRASKKQQLLATAAHKDSQSIARFFCRRVESPALLASAPEAEGACPSCEGVQGPPMAPEKYTGEEDGAGGHSPAPPQTEECLRERPSTCPPRDQGTPEVQPTPAKDTWKGKRPRSQQENPESQPQKRPRPSAKPSVVAEVKGSVSASEQGTLNPTAQDPFQLSAPGVSLKEAANVVVKCLTPFYKEGKFASKELFKGFARHLSHLLTQKTSPGRSVKEEAQNLIRHFFHGRARCESEADWHGLCGPQR

SEQ ID NO: 275391 - DNA, 1761 bp, Artificial Sequence
  derived and/or modified sequence
atgttcctggttagatgcagacacgcagcaatcgcaaagtatttcggcgacgctctgcctgcctgcgcgaaggggtgtgatcactgtcagaatcccacagccgtgaggcggcgtttggaggcactggagagatcaagttcctggagcaagacctgcataggaccatcccaaggcaatggattcgatcccgaactttacgaaggcggacgcaagggttatggcgacttctcacgatacgatgagggatctgggggatccggggacgaaggtagagacgaggcccataaacgtgagtggaacctgttttatcagaaacagatgcaactgcgcaagggaaaagatcccaaaattgaggaattcgtgcctcccgatgagaactgtccgctgaaagaggcttcatcccgccgcatacccagactcaccgtcaaggcgcgtgagcactgcctgaggctactggaggaagcgctttctagcaataggcaatccacccggaccgccgacgaggctgacctgagggccaaagctgtcgagctggagcacgaaaccttcagaaatgcgaaagtggctaacctctacaaagcatccgtcctcaaaaaggtggctgatatccacagggcaagtaaagacgggcagccctatgacatgggcggctccgccaagtcttgctctgcacaggccgaacctcccgaaccgaatgagtacgatattcctcccgcaagtcatgtttattccctgaagcctaaacgtgtcggcgctgggttccctaagggcagttgccctttccagacagctaccgagctgatggaaactactagaataagagaacaagccccgcagcccgaaagaggcggtgaacacgaacccccctcccgcccctgcggacttctggacgaagacgggagcgaaccactgccggggcctcgaggtgaggtgcctggaggctccgctcactatggtggccccagcccagagaaaaaggcaaagtcatcgtccggagggtctagccttgccaagggtcgtgcaagcaagaagcagcagctcttggctacagccgcccataaagattcgcaatccatagccaggtttttctgtagacgagtggaaagccctgcccttctcgcctctgcccccgaggccgaaggcgcctgccccagctgcgagggcgtccagggaccgcccatggctccagagaagtatacgggtgaggaagatggcgccggcggacactccccagccccaccacagacagaggaatgccttcgcgagaggccctcaacgtgtccacctagggatcagggcacccccgaggtccagcccacacccgccaaagacacctggaaaggcaagaggccgcggtctcaacaagaaaacccagaatctcaaccccaaaagagaccacgcccatctgccaaaccatcagtggtagctgaggtgaagggatccgttagtgcctccgagcaagggaccctgaatcccacggcccaggacccctttcagctctcagcccctggtgtgagtttgaaagaagcggccaacgtggtcgttaaatgtttaacgcctttttacaaggaaggcaagtttgccagcaaggaattatttaaagggtttgcccgacatctgagccacctgctcacacaaaaaacctcccccggccggagcgtgaaggaggaggcccagaacctgattcgccatttcttccacggcagagcccggtgtgagtccgaggcagattggcacggcctgtgtggacctcagaggtag

SEQ ID NO: 275392 - DNA, 1761 bp, Artificial Sequence
  derived and/or modified sequence
atgttcctggtgcgctgcagacatgctgccatcgccaagtactttggagatgccctgcctgcctgtgccaagggctgtgaccactgccagaaccccacagctgtgagaagaaggctggaggccctggagaggagcagctcctggagcaagacctgcatcggccccagccagggcaatggatttgatcctgagctgtatgagggcggcaggaagggctatggagacttcagccgctatgatgagggcagcggcggcagcggagatgagggcagagatgaggcccacaagcgggagtggaacctcttctaccagaagcagatgcagctgaggaagggcaaggaccccaagattgaggagtttgtgcccccagatgagaactgccccctgaaggaggccagcagccgccgcatcccccggctgactgtgaaggcccgggagcactgcctgcggctgctggaggaggccctgagcagcaaccggcagagcaccaggacagcagatgaagctgacctgcgggccaaggctgtggagctggagcacgagaccttcagaaatgccaaggtggccaacctgtacaaggcctctgtgctgaagaaggtggccgacatccaccgggccagcaaggatggccagccctatgacatgggcggcagcgccaagagctgcagcgcccaggccgagcccccagagcccaatgaatatgacatccccccagccagccacgtgtacagcctgaagcccaagagggtgggcgccggcttccccaagggcagctgccccttccagacagccacagagctgatggagaccacccgcatccgggagcaggccccccagcctgagcggggcggggagcacgagccccccagccggccctgtggcctgctggatgaagatggcagcgagcccctgcccggccccagaggagaggtgcctgggggcagcgcccactacggcggccccagccctgagaagaaggccaagagcagcagcggcggcagcagcctggccaagggccgggccagcaagaagcagcagctgctggccacagctgcccacaaggacagccagagcatcgcccgcttcttctgcagaagagtggagagccctgccctgctggccagcgcccctgaggccgagggcgcctgccccagctgtgagggcgtgcagggcccccccatggcccctgagaagtacaccggggaggaggatggagctgggggccacagccctgccccaccccagacagaggagtgcctgcgggagcggcccagcacctgccccccccgggaccagggcaccccagaggtgcagcccaccccagccaaggacacctggaagggcaagaggcccaggagccagcaggagaaccctgagagccagccccagaagaggccccggcccagcgccaagcccagcgtggtggccgaggtgaagggctctgtgtctgccagcgagcagggcaccctgaaccccacagcccaggaccccttccagctgagcgcccctggggtgtccctgaaggaggccgccaacgtggtggtgaagtgcctgacccccttctacaaggagggcaagtttgccagcaaggagctgttcaagggctttgcccggcacctgagccacctgctgacccagaagaccagccctggccgctctgtgaaggaggaggcccagaacctgatccgccacttcttccacggccgggcccgctgtgagagcgaggccgactggcacggcctgtgtggcccccagaggtag

SEQ ID NO: 275393 - DNA, 1761 bp, Artificial Sequence
  derived and/or modified sequence
atgttcctggtgcggtgccggcacgccgccatcgccaagtacttcggagatgctctccctgcttgtgccaagggctgcgaccattgccaaaatcccaccgccgttagacgccggcttgaagcactggagagatcaagcagctggtccaaaacatgcattgggccttcacaaggaaacggatttgacccggagttgtatgaaggcgggagaaaggggtatggggacttcagcagatacgacgagggaagcggaggaagtggcgatgagggccgcgacgaagcccacaaacgtgaatggaatctgttttatcaaaaacagatgcaactgaggaaggggaaggatccgaagatcgaggaattcgttccgcccgacgagaattgtcctttgaaggaggcaagcagtcgtagaattccccgcttaaccgtgaaagcccgagagcactgcttgagactccttgaggaggctctgagcagcaacaggcagtcaactcgaacggccgacgaggcagacctacgtgcaaaggcagtggagctcgaacatgaaacctttcggaacgccaaagtggcaaacctatacaaggcctccgtgttgaagaaagtggccgacatccacagagcaagcaaagatggccagccatacgatatgggagggagtgctaagtcctgttctgcgcaggccgagccgccagaacctaatgagtacgacataccaccagccagccacgtgtatagcctgaagcccaagagagtcggggccggcttccctaaagggtcctgtcctttccaaaccgccacagaactgatggagacaacaagaatccgggagcaggccccccagcctgagcggggcggggagcatgagccacccagccggccttgcggattgctggatgaggatggatccgagcctctgcccggtccccgcggagaagtgccagggggctcggcccactacggaggtccatcccctgagaagaaagctaaaagcagttccggcggaagtagcctagcaaagggtagagcttcgaagaagcaacagctcctggccacagccgcccacaaggattcgcagtctattgcccggtttttttgccgtcgggtggagtcccctgccctgcttgcttcggcaccagaagccgagggagcctgtccttcctgcgagggcgtccagggaccccctatggcgccggagaagtacacaggcgaggaagatggcgccggtggccattctcccgcccccccccaaactgaagagtgcctgcgggagagaccatccacctgtccccccagggatcagggtacccccgaagtgcagccaactcccgccaaagacacctggaaggggaagaggccacggagccaacaggaaaatccggagtcacagcctcagaaacggccacggccctctgccaaacccagcgtggtcgccgaggttaagggctccgtaagtgcttcagagcaggggaccttgaacccaacggcgcaagatcccttccagctgtccgcaccaggcgtgtccctgaaagaggctgctaacgtggtggtcaaatgcctgacccctttttataaggaaggaaaatttgcaagcaaagagctgttcaaggggtttgctcgacacttgagccatttactcacgcagaagaccagcccagggcggagtgtgaaggaagaggcccaaaatctgatcaggcacttctttcatggccgcgcccggtgtgagtccgaggctgattggcatggtttgtgcggcccacagaggtag

SEQ ID NO: 275394 - DNA, 1761 bp, Artificial Sequence
  derived and/or modified sequence
atgtttctggtgcgttgtaggcacgctgccatcgccaaatatttcggagatgccttgcccgcttgcgctaaagggtgtgatcactgtcagaatcccacagccgtccgtaggcgcttggaggcactcgaacggagctcctcttggagcaagacttgcattggtccttctcaaggcaacggcttcgaccctgaactgtacgagggcggaaggaagggatacggagatttcagccgctacgacgaggggtccgggggaagcggggatgagggacgggatgaggcccacaagagggagtggaatctcttttaccagaagcagatgcaactgaggaagggtaaggaccctaaaattgaagaatttgtgccgccagatgagaattgccctctcaaagaggcctctagccgcagaatcccacgactaacagtcaaggccagggagcactgtcttagattactggaagaagccctttccagtaaccgccagtcaactagaaccgctgatgaagcggatttaagggccaaagccgtggagctggaacacgagacatttcgcaacgccaaagtggccaacctgtacaaggcctctgtgctcaaaaaagtagccgatatacatagagcgagcaaggatgggcagccgtacgacatgggaggaagtgcaaaaagttgcagtgctcaggctgagccgcctgaacccaacgagtacgacatccctcctgcatcgcatgtctattccctcaagccaaaacgggttggagcagggtttccgaagggatcttgtccttttcagaccgcgactgaactcatggaaacaactagaatcagggaacaagcgcctcaaccggaaagaggtggcgagcatgagccaccctctagaccgtgcgggttattggatgaagatggttcagagcccctccccggacctcgcggagaggtgccgggaggctccgcacattatgggggaccgtcgcctgaaaaaaaagccaagagtagttccggaggctcctccctagccaaaggtagagcttcaaaaaaacagcagctgcttgccaccgcagcacataaggattcccagagcattgcacggttcttctgtcgcagggttgaaagccctgctctcctagcaagcgctccagaagccgagggtgcgtgtcctagctgcgagggtgtgcagggcccaccgatggcacccgaaaaatacacaggcgaggaagatggggcaggaggacactcgccagctccccctcagactgaagagtgccttagggagaggccatctacctgcccccctagggaccagggcacccccgaagttcagcccacccctgcaaaggacacatggaaaggaaaaaggcctagaagtcaacaagagaacccggaaagccagccacaaaaaagaccacggccttcggccaagccctccgtggtcgccgaggtgaagggatccgtgagtgcatccgagcagggtaccctgaacccaacggctcaggacccgtttcagttgagtgcccctggggtcagcctcaaggaggctgctaatgtggttgtgaaatgcctcacacctttctataaggaagggaaattcgcttccaaggagctgttcaaaggatttgctaggcacctcagccatttactgacccagaagaccagtccagggcgatctgtcaaggaggaagcccagaatctgatcagacattttttccacggcagggccaggtgcgagtctgaggcagactggcacggcctgtgtgggcctcagcggtag

SEQ ID NO: 275395 - DNA, 3089 bp, Artificial Sequence
  derived and/or modified sequence
tctgtggccattgccactcacctgggagctcaggtgttgggggctgagcagcagtgccccagcgcggagcctccacgtgctgtcctcgtacttccttcgtgggcgccgctgctcccctgggcgcctcagcccagctcctctgctgacagccagctgctgtctctgcctggcttttttgttgttggtcgtcctggagatccaagtgtcaaattaccgtcgcgagggggagcccgaggaagccctgcttgggaacttgtcctccaacttcatgtcccggtgcctcacctctgccctgagagcgctgctcagggacaagacaagctccctctctcctcctccttcctcctcctctccctctccccgactcccacgccgtgggctgggcctgggttgggagctgaagaaagaagtcggctctctgccttcctggccaggaggaccctggggaggctccacctgagcctgtggaggggagtcctgcagcgctctcaggtctggggcacccaccctgccctcaggaaggccaccccttctgtccctctggccactccctggctggtccctccctctggcctctctcaggaacaacagtaaacagtggggagctggtggccctctcaagctgagcaggaggctttgcaaccagtccctggggaggcccttgtgccgctcagcatctgaaggcgtcttgggggagaacttggaatcctgagtgacctgggagtggcctgcgcgcccggcaaggcgcctcatgttccttgtgaggtgccgccatgccgccattgccaagtacttcggggatgcgctgcctgcctgcgccaaaggctgcgaccactgccagaaccccacggccgtgcggaggcggctggaggccttggagcgcagcagcagctggagcaagacctgcatcgggccctcccaggggaacggctttgaccccgagctgtatgagggaggccgcaagggctacggggacttcagcaggtatgacgaaggttctggaggcagcggggatgaaggcagagatgaggcccacaagcgggagtggaacctcttctatcagaagcagatgcagctgcgcaagggcaaagaccccaagatagaagaatttgtacccccagatgagaactgtcccctgaaagaggcttctagcaggaggatccccaggctgactgtgaaggcacgggagcactgcctgcggcttctggaggaggcgctgagcagcaaccgccagtcaacacgtaccgctgatgaagctgacctccgggccaaggccgtggagctggaacatgagacattccggaacgccaaggtggccaacctctacaaggccagcgtgctgaagaaggtggccgatatccacagagcctccaaggatgggcagccctatgacatgggaggcagtgccaagagctgcagtgcccaagctgagcccccggagcccaatgagtatgacattccaccagcctcccatgtgtactcgctcaaacccaagcgggtgggagctggtttccccaaaggctcctgcccgttccagacggccacggaactgatggagacaactcggatcagggagcaagccccccagcccgagcggggaggcgagcacgagcccccgagccggccctgtggcctcctggatgaggatgggagtgagcccctccctgggcccagaggggaggtccctggaggcagcgctcactatggggggccctcccctgagaagaaggcaaaaagttcctctgggggcagctcccttgccaagggccgggctagcaagaaacagcagctcctagccacagcggcccacaaggattctcagagcatcgcccgcttcttctgccgaagggtggaaagcccagctctgctggcatcagccccagaggcagaaggtgcctgcccctcctgtgagggggttcagggacccccgatggccccagagaagtacacaggggaggaagatggagccgggggacattcgcctgcccctccccagactgaggagtgcctcagggagaggccaagcacctgcccgcccagagaccagggcacccctgaagtccagcccacccctgcaaaggacacatggaagggcaagcggcctcgatcccagcaggagaacccagagagccagcctcagaagaggccacgcccctcagccaagccctccgtcgtagctgaggtcaagggcagcgtctcggccagcgaacagggcaccttgaatcccacggctcaagaccccttccagctctccgctcctggcgtctccttgaaggaggctgcaaatgttgtggtcaagtgcctcacccctttctacaaggagggcaagtttgcttccaaggagttgtttaaaggctttgcccgccacctctcacacttgctgactcagaagacctctcctggaaggagcgtgaaagaagaggcccagaacctcatcaggcacttcttccatggccgggcccggtgcgagagcgaagctgactggcatggcctgtgtggcccccagagatgaccaactgctggctgggcagggcccgcgtcctcccccagattctagcatgggtcatcctgggcctcacctgctgatgccagggccatcgtcttttctcagtccttctcctttccaaccatacttggctttggggatgaccccagacaccccctgaatccaggtcagaggtcagcccacctttctttctgcttgcaaagcctatagacccttctcagagcggtcctcatggctgggttttctgggacacatgtcgaggacagaaggtggagggtggtggagctgctgctggaagaaggggaaggaagagtggcccctccccgagttctaagtcaggatgaggcccacctgtccaaggtatcggaacctacccaggggaccctcagatcctccacccactcccccatccattacgatgccagcttccagccttgcccaggtcagagctgtggcagaggagaggcagccaggccctgttcctgctcagctcctgctcaggaaggccaggcctgacagatgtttgggagaggaataaagttgtgttgttgtggggcatgcaggcgtgcacacagcccttttc

SEQ ID NO: 275396 - DNA, 1761 bp, Artificial Sequence
  derived and/or modified sequence
atgttcctggtgagatgcagacacgccgccatcgccaagtacttcggcgacgccctgcccgcctgcgccaagggctgcgaccactgccagaaccccaccgccgtgagaagaagactggaggccctggagagaagcagcagctggagcaagacctgcatcggccccagccagggcaacggcttcgaccccgagctgtacgagggcggcagaaagggctacggcgacttcagcagatacgacgagggcagcggcggcagcggcgacgagggcagagacgaggcccacaagagagagtggaacctgttctaccagaagcagatgcagctgagaaagggcaaggaccccaagatcgaggagttcgtgccccccgacgagaactgccccctgaaggaggccagcagcagaagaatccccagactgaccgtgaaggccagagagcactgcctgagactgctggaggaggccctgagcagcaacagacagagcaccagaaccgccgacgaggccgacctgagagccaaggccgtggagctggagcacgagaccttcagaaacgccaaggtggccaacctgtacaaggccagcgtgctgaagaaggtggccgacatccacagagccagcaaggacggccagccctacgacatgggcggcagcgccaagagctgcagcgcccaggccgagccccccgagcccaacgagtacgacatcccccccgccagccacgtgtacagcctgaagcccaagagagtgggcgccggcttccccaagggcagctgccccttccagaccgccaccgagctgatggagaccaccagaatcagagagcaggccccccagcccgagagaggcggcgagcacgagccccccagcagaccctgcggcctgctggacgaggacggcagcgagcccctgcccggccccagaggcgaggtgcccggcggcagcgcccactacggcggccccagccccgagaagaaggccaagagcagcagcggcggcagcagcctggccaagggcagagccagcaagaagcagcagctgctggccaccgccgcccacaaggacagccagagcatcgccagattcttctgcagaagagtggagagccccgccctgctggccagcgcccccgaggccgagggcgcctgccccagctgcgagggcgtgcagggcccccccatggcccccgagaagtacaccggcgaggaggacggcgccggcggccacagccccgcccccccccagaccgaggagtgcctgagagagagacccagcacctgcccccccagagaccagggcacccccgaggtgcagcccacccccgccaaggacacctggaagggcaagagacccagaagccagcaggagaaccccgagagccagccccagaagagacccagacccagcgccaagcccagcgtggtggccgaggtgaagggcagcgtgagcgccagcgagcagggcaccctgaaccccaccgcccaggaccccttccagctgagcgcccccggcgtgagcctgaaggaggccgccaacgtggtggtgaagtgcctgacccccttctacaaggagggcaagttcgccagcaaggagctgttcaagggcttcgccagacacctgagccacctgctgacccagaagaccagccccggcagaagcgtgaaggaggaggcccagaacctgatcagacacttcttccacggcagagccagatgcgagagcgaggccgactggcacggcctgtgcggcccccagagatag

SEQ ID NO: 275397 - protein, 213 aa, Artificial Sequence
  derived and/or modified sequence
MQIQVAGLLQFAVPLFSTAEEDLLAIQLLLNSSESSLHQLTAMVDCRGLHKDYLDALAGICYDGLQGLLYLGLFSFLAALAFSTMICAGPRAWKHFTTRNRDYDDIDDDDPFNPQAWRMAAHSPPRGQLHSFCSYSSGLGSQTSLQPPAQTISNAPVSEYMNQAMLFGRNPRYENVPLIGRASPPPTYSPSMRATYLSVADEHLRHYGNQFPA

SEQ ID NO: 275398 - DNA, 3661 bp, Artificial Sequence
  derived and/or modified sequence
accgtaagtgctgtgatgcactaacctctaggtgctagaaccctgcacggcactgagtaagtactccataaatgtctatcaacttagcaagttagtgagtgatgctctattgtggacccctgaggcagtggctcctgaaggaggacggggccaccggcagagcagggcactcagaggggtcccctgcccggggagcatgtgccagaggagggggacatccctaaggaacaggccagaggacctgagctctccctggctgctctggaaggcggaggccccccagtttatccagtccctagagcaccccaggccagatctggggtgcgcctggcttggaggccatgtccttgctgccgcctctcctggggcctgcgtctgctcccaccctgccgcatgggccttagcaatcacttagccaggccgtgctgtggggccaggtcctccagctcataagtggcagccgcctctcagctccatgcccttcccaccccatgtcttggcaggtgagcacctgcacccaaggctcacagatgcttcagcaccaacctcattctttagaaagagtttgggggaggcttcatagattgaacacccgtccctgtagcacttgatcatagcaagacaaaatgtaaaacagcagatgaggccatggtgtaacgaactcccacacacacagcctgcagctgccctggggcccaggatgctggcccccaaaggtctgtcccagaagaggcattcgggaataagagtaacagcatgcgctctgccccagtcacttttctgagcactttacttgcattgggtgaatagcattatcatctccatgtcacagatgaggcaaccggggcacaggaagaataagtaacttgtccaaggcaacagagctaggaaggggcagagccaggtttgaacccaggaggctggctccagactgtcctttgccacctgggagggagctcaaggggctggggtgatgggctcccggctcctcccagggccccgctgtcctgatacctgattttcctccaccccgtccctctctccctcactcaggccaccagtgacttctgtgtggctcctgacaccttcatcctgaacgtcacggagggccagatcagcacagaggtgactcgctactacctgtattgcagccagagtggaagcagccccttccagcagaccctgaccaccttccagcgcgcacttaccaccatgcagatccaggtcgcggggctgctgcagtttgccgtgcccctcttctccactgcagaggaagacctgcttgcaatccagctcctgctgaactcctcagagtccagccttcaccagctgaccgccatggtggactgccgagggctgcacaaggattatctggacgctcttgctggcatctgctacgacggcctccagggcttgctgtaccttggcctcttctccttcctggccgccctcgccttctccaccatgatctgtgcagggccaagggcctggaagcacttcaccaccagaaacagagactacgatgacattgatgatgatgacccctttaacccccaagcctggcgcatggcggctcacagtcccccgaggggacagcttcacagcttctgcagctacagcagtggcctgggaagtcagaccagcctgcagcccccggcccagaccatctccaacgcccctgtctccgagtacatgaaccaagccatgctctttggtaggaacccacgctacgagaacgtgccactaatcgggagagcctcccctccgcctacgtactctcccagcatgagagccacctacctgtctgtggcggatgagcacctgaggcactacgggaatcagtttccagcctaacagactttcgggggttcctgcctcctttttccgttctggtttttaattagtgcaaatacaagctgcgtttctttaatagaaaccaaaggcatctggagcccgagaggcctcctgctgtggcagaggagcagctgggattcccgaccaaagccccagggggtgcagaagactcaccacgcgggccagcctctctcttttgccctgctctccacaccagaaatgcccccaggtgcttggctgcctcagaggtaccatccctgagctggctgcctggccctgctcacccctacgcctcgcccttgccaggaggggagtggcagtgaggagggggccaggtcaggcaccaccatcaagagagctgtgtgttctctctggtcccacaacgatgactctgcctcttgtcagcccagccaagagcccagacgacccctctgtcctcgttccctgtcctcgttccctgcaggtaacatgagaagggctgatcaggagatgctctttaagaagttcgcacccctgctgacaccagaacagcccaaatcagagttcccagggccagacaggctcttcctgggccacagaggggaggcatcaggaaagctctgcagtggggggctggtggctccggggctgggggatcacaggctggtgaaccccggtgggaacagaggtgaaagcctgccacattccgcctgtctccctaaccctccattgcctcgcctctattccagaatcaatgctgcagaatgtgttagctgcagataggcatggtctcaggtatgaacagacactttgaaacgactttaggtctttcttttctccagtgttttaaacatgttgattatccaaagaattgaaactcctagcacatccagtttttacaacagatttgcagctcattccttaccctggttaggtcactacttttgcagattttgctggcactgatctggagatctgcagatctggaggagacgggaaggagtcgattcttaaataaggatcagtgaggcatcctgtcccaagctactgtttggtggggatctgggttcatctcacccacagagggaggatctttaagaggagaaaaaagccaagagggaaagccagagttccctgttctaggggactagccaaatgcctacatcagctgtcccctccctgttgtctccaagtaagtttgccagaaaaggttttagcaaagtgctacaactgtgtctttataggaggataggcctctgccctgccccacccccaccacctgtccccacccagtgtcccaggccacaggagcttattggccaggagggaataatgtcccccaatactgcctgttgagggaccagagttggggtctttggtgcttccaacctcctgccaacctggagttcacaacaccagagccccacggcctcgcacactgaagcaggggcgtgcggtgactcggtgcttctgttttggaagaaccacctgtcatcaaaacatggacagcagggtgttctcagctcccagcgaagcctccacaacagaatggggccacagggcagccgggactccctgtctcacctacattaacccatgcatactgtatgccataaactcactttggtatatccgcgtcacatgcagagaggaactctgcgacgtcaaagtgttgcttcttaaagtttcattattggcaactagagggttgtttttaatgcatggaaactaaacagattcctcggggagttcctgaaggaaccaggtgggcaaacctttgcttatatacatgcggcctcacctggaagagaaataaaccacttgtact

SEQ ID NO: 275399 - protein, 153 aa, Artificial Sequence
  derived and/or modified sequence
MNVGTAHSEVNPNTRVMNSRGIWLSYVLAIGLLHIVLLSIPFVSVPVVWTLTNLIHNMGMYIFLHTVKGTPFETPDQGKARLLTHWEQMDYGVQFTASRKFLTITPIVLYFLTSFYTKYDQIHFVLNTVSLMSVLIPKLPQLHGVRIFGINKY

SEQ ID NO: 275400 - DNA, 462 bp, Artificial Sequence
  derived and/or modified sequence
atgaatgtgggtacagcccacagcgaggtgaatcccaacaccagggtcatgaacagccggggcatctggctatcctacgtcctggctataggactgctgcacatcgtgctgctgagcattccgtttgtttctgttcccgtcgtgtggaccctgactaatctgatccataatatgggcatgtatatctttctccacacagtcaaagggacaccctttgagacccctgaccaaggcaaagccagattgctgacacattgggaacagatggattatggtgttcagttcacagcttcccgcaagttcctcaccatcactcccatcgtcctgtactttctgacatcattttataccaagtacgatcagattcacttcgtgctgaacaccgttagtctcatgtctgtgttgatacccaaactcccccagctgcatggtgtccgaatctttggcatcaacaaatactag

SEQ ID NO: 275401 - DNA, 462 bp, Artificial Sequence
  derived and/or modified sequence
atgaatgttggcactgcgcatagcgaagtcaaccccaacactcgggttatgaacagcagagggatctggctgtcttatgtcctggctatcggactgctccacatagtcctgcttagcattccctttgtctcggtcccagtggtctggactctcactaaccttatccataatatggggatgtacatttttctccataccgtgaagggaacacccttcgagaccccagatcagggtaaggctcgcctgctgactcactgggaacaaatggattatggcgtccagtttaccgcctctcgtaaatttctgacaatcacacctattgtactgtacttcctgactagcttctacactaagtatgaccagattcattttgtcttgaacaccgtgtccctgatgtccgtgctcatacccaaacttccacagttgcatggcgtccgtatcttcggcattaataagtactag

SEQ ID NO: 275402 - DNA, 462 bp, Artificial Sequence
  derived and/or modified sequence
atgaatgtgggcacagcccacagcgaggtgaaccccaacaccagggtgatgaacagccggggcatctggctgtcctatgtgctggccatcggcctgctgcacatcgtgctgctgagcatcccctttgtgtctgtgcctgtggtgtggaccctgaccaacctgatccacaacatgggcatgtacatcttcctgcacacagtgaagggcaccccatttgagaccccagaccagggcaaggcccggctgctgacccactgggagcagatggactatggagtgcagttcaccgccagcaggaagttcctgaccatcacccccatcgtgctgtacttcctgaccagcttctacaccaagtatgaccagatccactttgtgctgaacacagtgtccctgatgtctgtgctgatccccaagctgccccagctgcatggagtgcgcatcttcggcatcaacaagtactag

SEQ ID NO: 275403 - DNA, 462 bp, Artificial Sequence
  derived and/or modified sequence
atgaacgtgggcaccgcccacagcgaggtgaaccccaacacccgggttatgaactcaagggggatctggctgagttatgtactggctattggcctattgcatatcgtgctgttatccatacccttcgtgtctgtgccggttgtgtggacattaacgaatctgattcataatatgggcatgtacatatttttgcacaccgtgaaaggtacgcctttcgagacacctgatcagggtaaggccagactcctaactcattgggagcagatggactacggagtgcagtttactgcctctaggaagttcctgacaatcacacccatcgtcttgtattttctgacaagcttctacactaaatatgatcaaatccacttcgtgttgaataccgtctccctgatgtcagttttgatcccgaagcttcctcagctgcatggcgtccgcatctttgggatcaacaagtactag

SEQ ID NO: 275404 - DNA, 462 bp, Artificial Sequence
  derived and/or modified sequence
atgaacgtgggcaccgcccacagcgaggtgaaccccaacacccgggtgatgaatagtagaggaatctggctctcctacgttctggctataggcctgctgcacattgtgctcctgtcaatccccttcgtgtcagtgcctgtggtctggacactgacgaaccttattcataacatgggtatgtatatttttctgcacacagtcaaaggtacccctttcgaaacccccgaccaggggaaggccaggctactgacccactgggagcagatggattatggggtccagtttaccgcctcacgcaaatttctgacgataacacctattgtgttatactttttgacgagtttttacacaaaatacgaccagattcattttgtgctaaataccgtgtctctgatgagcgttcttatccctaagttacctcagctgcatggcgtgcgtatcttcggtatcaataagtactag

SEQ ID NO: 275405 - DNA, 2111 bp, Artificial Sequence
  derived and/or modified sequence
gattcggccggagctgccagcggggaggctgcagccgcgggttgttacagctgctggagcagcagcggcccccgctcccgggaaccgttcccgggccgttgatcttcggccccacacgaacagcagagaggggcagcaggatgaatgtgggcacagcgcacagcgaggtgaaccccaacacgcgggtgatgaacagccgtggcatctggctctcctacgtgctggccatcggtctcctccacatcgtgctgctgagcatcccgtttgtgagtgtccctgtcgtctggaccctcaccaacctcattcacaacatgggcatgtatatcttcctgcacacggtgaaggggacaccctttgagaccccggaccagggcaaggcgaggctgctaacccactgggagcagatggattatggggtccagttcacggcctctcggaagttcttgaccatcacacccatcgtgctgtacttcctcaccagcttctacactaagtacgaccagatccattttgtgctcaacaccgtgtccctgatgagcgtgcttatccccaagctgccccagctccacggagtccggatttttggaatcaataagtactgagagtgcagccccttcccctgcccagggtggcaggggaggggtagggtaaaaggcatgtgctgcaacactgaagacagaaagaagaagcctctggacactgccagagatgggggttgagcctctggcctaatttcccccctcgcttcccccagtagccaacttggagtagcttgtagtggggttggggtaggccccctgggctctgaccttttctgaattttttgatcttttccttttgctttttgaatagagactccatggagttggtcatggaatgggctgggctcctgggctgaacatggaccacgcagttgcgacaggaggccaggggaaaaacccctgctcacttgtttgccctcaggcagccaaagcactttaacccctgcatagggagcagagggcggtacggcttctggattgtttcactgtgattcctaggttttttcgatgccacgcagtgtgtgcttttgtgtatggaagcaagtgtgggatgggtctttgcctttctgggtagggagctgtctaatccaagtcccaggcttttggcagcttctctgcaacccaccgtgggtcctggttgggagtggggagggtcaggttggggaaagatggggtagagtgtagatggcttggttccagaggtgagggggccagggctgctgccatcctggcctggtggaggttggggagctgtaggagagctagtgagtcgagacttagaagaatggggccacatagcagcagaggactggtgtaagggagggaggggtagggacagaagctagacccaatctcctttgggatgtgggcagggagggaagcaggcttggagggttaatttacccacagaatgtgatagtaataggggagggaggctgctgtgggtttaactcctgggttggctgttgggtagacaggtggggaaaaggcccgtgagtcattgtaagcacaggtccaacttggccctgactcctgcgggggtatggggaagctgtgacagaaacgatgggtgctgtggtcctctgcaggccctcaccccttaacttcctcatacagactggcactgggcagggcctctcatgtggcagccacatgtggcgttgtgaggccaccccatgtggggtctgtggtgagagtcctgtaggatccctgctcaagcagcacagaggaaggggcaagacgtggcctgtaggcactgtctcagcctgcagagaagaaagtgaggccgggagcctgagcctgggctggagccttctcccctccccagttggactaggggcagtgttaattttgaaaaggtgtgggtccctgtgtcctcttccaggggtccaagggaacgggagaggtcactgggcctgttttctccctcctgaccctgcatctcccaccccgtgtatcatagggaactttcaccttaaaatctttctaagcaaagtgtgaataggatttttactccctttgtacagtattctgagaaacgcaaataaaagggcaacatgtttctgtttc

SEQ ID NO: 275406 - DNA, 2230 bp, Artificial Sequence
  derived and/or modified sequence
gtgctcctcttccagaagacaggaggtttgctgttgtgagggctgctctttcctgggggagggaatgggaagggctcacctggtggctgccctggtggtgctcagccttggcttgagtgtctggcatactggctgggcccggatatttgtatgtggagccaagagggtggggcgggaaggagggggaaagagctaccagcaaaaaagtggttaacacaacagagttgctgcaggctctggtttgaggcaggttatgaaaccacatcagggcccagcactaagcagccacctgccagctatggcagcagaagttttcggctcaactcctgtagacctagtcgacctctgccagcctcttctctctgtttctccccatctagggtaggggccagttggttgttttactaatggaagtgatatgtatccatagtcacacgaaagtctcaagagtgtttcctcattgccagtctttttgttagtttattgatctcttctttttcaggggtctctggtggtttcctgctctcagggcacctagtgtttaggcttcaggaagaagcttctgagggtgttggctaggacctaggtctaggcttttcctaggctcatcaagttttgttggctgccctgtgaaagccagaaaggcgtatggggtcctgtgatctgggattccccaaggcttttggcactcctggacaaatactaggaagggttagtggactttctataccagcacccctgtaggtgcgggttacagagaggtgatggggtggcagtttcaggtcagacttgggaagctctttccctctccttagtcagagttaagtccttcagagccctcacttgtcagccacatgccgccctcccctctcaggtggaggcttttgcgtagcagctgtcccaggggctgctagagtaactgaagccccaaggccctgggaagataaacaatctgagccagctctggctttctagatacttgaatttctgttaggctcaattatccagcctagtgggctgcgctgatgggtcccaggagcatctcttcaatcagaatgcgccccaggctggcgcacgggtgtttgcttgttgggatggcgtgttgtgggtcacattttctctgaggtctctaagcttggagctgtctgagaagaggaaacttgctcctgttatcctggaagtaaataactggcccctgaggactcagtctcctgtgcagggccctcagggatctggggacagccaaactctggataaggggcagatcattccaccccttccttctctacttccctctgctcactgtgggttgcggccacctcctggttcctcctgctgcaggactcctaccgttggtgctgggcaggggaaggcatggtgctaatatacacctggaaacaggtgctgagaggggagactgagtcctcctaagttggggtttggggagatccagaattgaaaaaatcagaggagaacagcagagaggggcagcaggatgaatgtgggcacagcgcacagcgaggtgaaccccaacacgcgggtgatgaacagccgtggcatctggctctcctacgtgctggccatcggtctcctccacatcgtgctgctgagcatcccgtttgtgagtgtccctgtcgtctggaccctcaccaacctcattcacaacatgggcatgtatatcttcctgcacacggtgaaggggacaccctttgagaccccggaccagggcaaggcgaggctgctaacccactgggagcagatggattatggggtccagttcacggcctctcggaagttcttgaccatcacacccatcgtgctgtacttcctcaccagcttctacactaagtacgaccagatccattttgtgctcaacaccgtgtccctgatgagcgtgcttatccccaagctgccccagctccacggagtccggatttttggaatcaataagtactgagagtgcagccccttcccctgcccagggtggcaggggaggggtagggtaaaaggcatgtgctgcaacactgaagacagaaagaagaagcctctggacactgccagagatgggggttgagcctctggcctaatttcccccctcgcttcccccagtagccaacttggagtagcttgtagtggggttggggtaggccccctgggctctgaccttttctgaattttttgatcttttccttttgctttttgaatagagactccatggagttggtcatgg

SEQ ID NO: 275407 - DNA, 462 bp, Artificial Sequence
  derived and/or modified sequence
atgaacgttggcactgcccacagcgaggtgaacccgaataccagagtcatgaatagccggggtatttggctttcatatgtgttggctattggtctccttcacatcgttctgctgtcaataccatttgtgtccgtacctgtcgtctggaccttaaccaacctcattcacaacatgggcatgtacatattcctccacaccgtgaaggggactccctttgagactcccgaccagggaaaagcaaggctgctcacccactgggagcaaatggactatggggtgcaatttaccgcttcaagaaagttccttacgatcacgccaattgtgttatactttctcactagtttttatacaaaatacgaccaaatacactttgttttgaacaccgtttctcttatgagtgttctgatccctaaactgccacagctgcacggggtaaggatattcgggatcaacaaatattag

SEQ ID NO: 275408 - DNA, 462 bp, Artificial Sequence
  derived and/or modified sequence
atgaacgtgggcaccgcccactccgaggtcaatcccaacactagggtaatgaactctcgcggaatctggttgtcgtacgtgttagcaattggcttgctgcatatcgtccttctgtcaattccatttgtgtctgtgcctgtcgtgtggaccctgacaaacctgatacacaacatgggcatgtatattttcttgcatacagtcaagggcactcctttcgaaacaccagaccaggggaaagcacgcttactcacccattgggaacagatggactatggcgttcagtttactgcctcccggaaattcctcacaatcacacccatcgttctctatttcctgacatcattctacactaagtacgatcagatccacttcgtacttaacactgtatccctcatgagtgttcttatccccaagctaccacaactgcacggcgtgagaatctttggaatcaacaagtactag

SEQ ID NO: 275409 - DNA, 462 bp, Artificial Sequence
  derived and/or modified sequence
atgaacgtgggcaccgcccacagcgaggtgaaccccaacaccagagtgatgaacagcagaggcatctggctgagctacgtgctggccatcggcctgctgcacatcgtgctgctgagcatccccttcgtgagcgtgcccgtggtgtggaccctgaccaacctgatccacaacatgggcatgtacatcttcctgcacaccgtgaagggcacccccttcgagacccccgaccagggcaaggccagactgctgacccactgggagcagatggactacggcgtgcagttcaccgccagcagaaagttcctgaccatcacccccatcgtgctgtacttcctgaccagcttctacaccaagtacgaccagatccacttcgtgctgaacaccgtgagcctgatgagcgtgctgatccccaagctgccccagctgcacggcgtgagaatcttcggcatcaacaagtactag

SEQ ID NO: 275410 - protein, 232 aa, Artificial Sequence
  derived and/or modified sequence
MDPLFQQTHKQVHEIQSCMGRLETADKQSVHIVENEIQASIDQIFSRLERLEILSSKEPPNKRQNARLRVDQLKYDVQHLQTALRNFQHRRHAREQQERQREELLSRTFTTNDSDTTIPMDESLQFNSSLQKVHNGMDDLILDGHNILDGLRTQRLTLKGTQKKILDIANMLGLSNTVMRLIEKRAFQDKYFMIETRSHHVAQNGPELLSSRDPPASASRSAGIIEFSEKIT

SEQ ID NO: 275411 - DNA, 699 bp, Artificial Sequence
  derived and/or modified sequence
atggacccactgtttcagcagacccacaaacaggtgcacgagattcaatcatgcatgggaaggctcgagacagccgacaaacagtccgtgcacatcgtcgaaaatgaaattcaggccagtattgatcagatcttcagtcggctggagcggctggagatcctaagctcgaaagagccgcctaataaaagacagaacgctcgccttagggtggaccagctgaagtacgacgtacaacatctacaaacggctctgaggaactttcagcacaggagacacgcgcgggaacaacaggagaggcaacgggaagagctcctgtcaagaaccttcactactaacgattcagatacaacaattccaatggacgaaagcctgcagtttaactcatcgttacaaaaggtccacaacgggatggatgacttgatcctcgatggccacaacattctcgacggactgagaactcagcgcctgaccctgaagggcactcaaaaaaagattttagatatcgcaaacatgctgggccttagtaacactgtgatgaggctgattgagaagcgggctttccaggataaatacttcatgatcgagaccaggagccaccacgtggcccagaacggccccgagctgctgtcgtccagggacccgccagcctccgctagtagaagcgccgggatcattgagttctccgagaaaataacctag

SEQ ID NO: 275412 - DNA, 889 bp, Artificial Sequence
  derived and/or modified sequence
gctgtgaggacgtgttccgaggaagccagagccggagccgtggcctgcggggccggcgacatggatcccctgttccagcaaacgcacaagcaggtccacgagatccagtcttgcatgggacgcctggagacggcagacaagcagtctgtgcacatagtagaaaacgaaatccaagcaagcatagaccagatattcagccgtctagaacgtctggagattttgtccagcaaggagccccctaacaaaaggcaaaatgccagacttcgggttgaccagttaaagtatgatgtccagcacctgcagactgcgctcagaaacttccagcatcggcgccatgcaagggagcagcaggagagacagcgagaagagcttctgtctcgaaccttcaccactaacgactctgacaccaccataccaatggacgaatcactgcagtttaactcctccctccagaaagttcacaacggcatggatgacctcattttagatgggcacaatattttagatggactgaggacccagagactgaccttgaaggggactcagaagaagatccttgacattgccaacatgctgggcttgtccaacacagtgatgcggctcatcgagaagcgggctttccaggacaagtactttatgatagagacaaggtctcaccatgttgcccagaatggacccgaactcctgagctcaagagatcctcctgcatcagcctcccgaagtgctgggattatagaattctcagagaaaataacttgactgaattacacaaggattcatttgaaggcctgctatccctccagtatttagatttatcctgcaataaaatacagtctattgaaagacatacatttgaaccactaccatttttgaagtttatgtaagttac

SEQ ID NO: 275413 - DNA, 699 bp, Artificial Sequence
  derived and/or modified sequence
atggaccccctcttccagcagacccacaagcaggtgcatgagatccagagctgcatgggccgcctggagacagctgacaagcagagcgtgcacatcgtggagaatgagatccaggccagcattgaccagatcttcagccggctggagcggctggagatcctgagcagcaaggagccccccaacaagaggcagaatgcccggctgcgggtggaccagctgaagtatgatgtgcagcacctgcagacagccctgaggaacttccagcacagaagacatgcccgggagcagcaggagcggcagcgggaggagctgctgagcaggaccttcaccaccaatgacagcgacaccaccatccccatggatgagagcctgcagttcaacagcagcctgcagaaggtgcacaacggcatggatgacctgatcctggatggccacaacatcctggatggcctgcggacccagaggctgaccctgaagggcacccagaagaagatcctggacatcgccaacatgctgggcctgagcaacacagtgatgaggctcatcgagaagagggccttccaggacaagtacttcatgattgagaccaggagccaccacgtggcccagaatggacctgagctgctgagcagccgggaccccccagccagcgccagccgctctgctggcatcatcgagttcagcgagaagatcacctag

SEQ ID NO: 275414 - DNA, 699 bp, Artificial Sequence
  derived and/or modified sequence
atggaccccctgttccagcagacccacaagcaggtgcacgagatccagtcttgcatgggccgcctggagactgcggacaagcagagtgtccatatcgttgagaacgaaattcaggcttcaatagatcaaatcttctcaagactcgagcgattagagattttgtcaagcaaagagcctccaaataagcggcaaaacgccaggctgcgcgtcgatcaactgaagtatgacgtgcaacatctgcagactgcattacggaacttccaacaccgtcgacatgcacgggaacaacaggaacggcaacgggaagagttgcttagcagaactttcactacaaatgacagtgatacaaccattcccatggacgagtcactgcaatttaactcaagtctgcagaaggtgcacaatggaatggacgaccttatcctggacgggcataacattctggatggactgagaactcagagactgacattgaaaggtacacagaagaaaatcctggatatcgctaatatgctagggctgtccaacacagtcatgcgactgattgagaaaagagcgttccaggataagtatttcatgatcgagaccagaagtcatcacgtggcacaaaacggcccggagcttctgtcttccagggatccccctgcgtccgcttccaggagtgccggaatcattgaattcagcgagaagatcacttag

SEQ ID NO: 275415 - DNA, 699 bp, Artificial Sequence
  derived and/or modified sequence
atggatcccttatttcagcaaactcacaagcaggtgcatgaaatccagagctgtatgggccgtctggagacagctgacaagcaaagcgtccacatcgtggagaacgaaatacaggcctctatcgatcaaatcttcagcaggttggagcgcctggagattctctcctctaaggagccaccaaacaagcgtcagaacgctaggctgcgcgtggaccagctcaagtacgacgtgcagcatctccagaccgccctgagaaatttccagcatcggagacacgcacgcgagcagcaagagcggcagcgagaagagctgttgagccgcacctttacgacaaacgatagtgataccactattccaatggacgaatctctccagtttaacagtagtctgcagaaagtgcataacggaatggacgatctgattttagacggccacaatattctggacggactaagaacccagaggctcactctaaaggggacccagaaaaagattctagacatcgccaacatgctcggcctgtccaacactgttatgagactcatcgagaaacgtgcctttcaagataagtactttatgatcgaaacaaggagccatcatgttgctcagaacgggccagagctgctgtcaagtcgggatccccctgcgtctgcatcccgatccgcaggcatcattgagtttagtgagaagataacgtag

SEQ ID NO: 275416 - DNA, 699 bp, Artificial Sequence
  derived and/or modified sequence
atggaccccctgttccagcagacccacaagcaggtgcacgagatccagagctgcatgggcagactggagaccgccgacaagcagagcgtgcacatcgtggagaacgagatccaggccagcatcgaccagatcttcagcagactggagagactggagatcctgagcagcaaggagccccccaacaagagacagaacgccagactgagagtggaccagctgaagtacgacgtgcagcacctgcagaccgccctgagaaacttccagcacagaagacacgccagagagcagcaggagagacagagagaggagctgctgagcagaaccttcaccaccaacgacagcgacaccaccatccccatggacgagagcctgcagttcaacagcagcctgcagaaggtgcacaacggcatggacgacctgatcctggacggccacaacatcctggacggcctgagaacccagagactgaccctgaagggcacccagaagaagatcctggacatcgccaacatgctgggcctgagcaacaccgtgatgagactgatcgagaagagagccttccaggacaagtacttcatgatcgagaccagaagccaccacgtggcccagaacggccccgagctgctgagcagcagagacccccccgccagcgccagcagaagcgccggcatcatcgagttcagcgagaagatcacctag

SEQ ID NO: 275417 - protein, 879 aa, Artificial Sequence
  derived and/or modified sequence
MSSSFFNPSFAFSSHFDPDGAPLSELSWPSSLAVVAVSFSGLFAVIVLMLACLCCKKGGIGFKEFENAEGDEYAADLAQGSPATAAQNGPDVYVLPLTEVSLPMAKQPGRSVQLLKSTDVGRHSLLYLKEIGRGWFGKVFLGEVNSGISSAQVVVKELQASASVQEQMQFLEEVQPYRALKHSNLLQCLAQCAEVTPYLLVMEFCPLGDLKGYLRSCRVAESMAPDPRTLQRMACEVACGVLHLHRNNFVHSDLALRNCLLTADLTVKIGDYGLAHCKYREDYFVTADQLWVPLRWIAPELVDEVHSNLLVVDQTKSGNVWSLGVTIWELFELGTQPYPQHSDQQVLAYTVREQQLKLPKPQLQLTLSDRWYEVMQFCWLQPEQRPTAEEVHLLLSYLCAKGATEAEEEFERRWRSLRPGGGGVGPGPGAAGPMLGGVVELAAASSFPLLEQFAGDGFHADGDDVLTELCAPDGAPPGVVPVLSAHSPSLGSEYFIRLEEAAPAAGHDPDCAGCAPSPPATADQDDDSDGSTAASLAMEPLLGHGPPVDVPWGRGDHYPRRSLARDPLCPSRSPSPSAGPLSLAEGGAEDADWGVAAFCPAFFEDPLGTSPLGSSGAPPLPLTGEDELEEVGARRAAQRGHWRSNVSANNNSGSRCPESWDPVSAGGHAEGCPSPKQTPRASPEPGYPGEPLLGLQAASAQEPGCCPGLPHLCSAQGLAPAPCLVTPSWTETASSGGDHPQAEPKLATEAEGTTGPRLPLPSVPSPSQEGAPLPSEEASAPDAPDALPDSPTPATGGEVSAIKLASALNGSSSSPEVEAPSSEDEDTAEATSGIFTDTSSDGLQARRPDVVPAFRSLQKQWPQREESLPRLCLLLRPRG

SEQ ID NO: 275418 - DNA, 2640 bp, Artificial Sequence
  derived and/or modified sequence
atgagtagctccttctttaatccatccttcgctttttcttctcactttgaccctgacggagcgcccttgtctgaactgtcttggccttcttccttagcagtggtggcagtttccttctccggactcttcgcggtcatcgtgctgatgctggcctgcctgtgttgcaagaaaggcgggataggtttcaaagaatttgagaatgccgagggagatgagtatgcagcggatctggcacaaggctctccggccactgccgcacagaacggtcctgatgtgtacgtactccccctgactgaggtctcgcttccaatggcgaaacagcccggccggtccgtccaattattaaaatccaccgatgtgggcagacacagcctcttatacctcaaagaaatcgggagaggttggttcggcaaagtttttctgggggaagtgaactccgggataagtagtgcacaggtcgtggtgaaagagctgcaggcctccgcatcagtgcaggaacaaatgcagtttctggaagaggtccaaccttacagagctttaaaacattcaaacctgctgcagtgcctggcccagtgtgctgaagtgaccccttatctcctcgtgatggagttttgcccactgggagatctgaaaggatatctgcgaagctgccgggtagctgaaagcatggctccagacccccggaccttacagaggatggcttgtgaggtagcttgtggcgtgctgcatttgcatcgaaacaatttcgtgcattccgatctggcactgcgcaactgccttttgactgcagatctcacggtaaagattggagattacggattagcccactgcaagtatagggaggattactttgtgaccgctgaccagctgtgggtgcccttgcgttggatagctcccgagttggtagatgaggtccactctaacctccttgtagtggaccagacaaagagtggaaacgtctggtctcttggagtgacaatttgggagctgtttgaactgggaactcagccttacccgcaacattcagatcagcaggtgctcgcttataccgtgcgcgaacagcagcttaagctgccaaagccgcagctgcagcttacactgtcagatcggtggtacgaggtgatgcagttctgctggctccagcctgagcaacggcctactgctgaggaggtccacctgctcttgtcttacctgtgcgcgaaaggagctactgaagccgaggaggagtttgagcggagatggcgctcactaagacctggtggggggggcgtaggcccaggccctggcgccgctggacctatgttagggggggttgtggaactggcggccgcatcttccttcccattgctggaacagttcgcaggcgacggcttccacgccgatggggacgacgtgcttacagaactctgtgcacccgacggcgcgccgcctggcgttgttccagtgcttagtgctcacagtcctagtctcggcagtgaatactttattcggctggaggaagctgcacccgctgcagggcatgaccccgattgcgccgggtgtgccccgagccctccagctactgccgatcaggatgatgattcggatggctcgaccgctgcatctcttgcaatggaacctctcttggggcacggtccaccagttgatgtcccctgggggcgcggagatcactatccgcgaagatcactggccagagatcctttgtgtccatctcggtcccccagcccctcagcgggccctctgagtcttgcagagggcggcgccgaagacgccgactggggagtagccgccttctgccccgcctttttcgaggatcctcttggcaccagcccattgggctcctccggcgctcccccactccccttgaccggggaagacgagcttgaagaggtgggcgcccggcgagccgcacagagaggccattggcgatctaatgtttcggccaataataactccggatcgcgctgccctgaaagttgggatcccgtcagcgctggggggcatgccgagggatgcccatcccctaagcagacaccccgggcgagtccagagcctggctaccctggggagcccctgctgggtctacaggccgcctctgcacaggagcccggttgttgcccgggacttcctcacctgtgctccgctcaggggctggcccccgcaccttgtttagtcacacccagctggacggaaacagcatcaagcggaggcgatcatccgcaggccgaacccaaactggcaacagaagccgaaggcactacaggcccccgtctgccgctgccctcagtcccatcgccgtctcaggaaggggccccgttaccatccgaagaggccagcgctccagacgcccctgacgctctgcctgatagtcccacgccggcgacgggcggggaagtgtctgccataaagctggcatccgcactcaacgggagttcctctagcccagaagtagaggccccctcatccgaagatgaagatactgctgaagcgacttctggcatcttcactgacacttcatccgatggactgcaggcccgcagacctgatgtggtgccggccttccgaagtctgcagaaacagtggccacagcgggaagagagtttaccaagactgtgcctattattgcgtcctagaggatag

SEQ ID NO: 275419 - DNA, 2640 bp, Artificial Sequence
  derived and/or modified sequence
atgagcagcagcttcttcaaccccagctttgccttcagcagccactttgatcctgatggagcccccctgtctgagctgtcctggcccagcagcctggccgtggtggccgtgtccttcagcggcctgtttgctgtgattgtgctgatgctggcctgcctgtgctgcaagaagggcggcatcggcttcaaggagtttgaaaatgcagaaggagatgaatatgctgctgacctggcccagggcagccctgccacagctgcccagaatggaccagatgtgtatgtgctgcccctgacagaggtgtccctgcccatggccaagcagcccggccgctctgtgcagctgctgaagagcacagatgtgggccgccacagcctgctgtacctgaaggagatcggccggggctggtttgggaaggtgttcctgggggaggtgaacagcggcatcagcagcgcccaggtggtggtgaaggagctgcaggccagcgcctctgtgcaggagcagatgcagttcctggaggaggtgcagccctaccgggccctgaagcacagcaacctgctgcagtgcctggcccagtgtgccgaggtgaccccctacctgctggtgatggagttctgccccctgggggacctgaagggctacctgcggagctgccgggtggccgagagcatggccccagaccccaggaccctgcagaggatggcctgtgaggtggcctgtggggtgctgcacctgcacaggaacaactttgtgcacagcgacctggccctgaggaactgcctgctgacagctgacctgactgtgaagattggagactatggcctggcccactgcaagtaccgggaggactactttgtgacagctgaccagctgtgggtgcccctgcgctggatcgcccctgagctggtggatgaggtgcacagcaacctgctggtggtggaccagaccaagtctggaaatgtgtggagcctgggcgtgaccatctgggagctgtttgagctgggcacccagccctacccccagcacagcgaccagcaggtgctggcctacacagtgcgggagcagcagctgaagctgcccaagccccagctgcagctgaccctgagtgaccgctggtatgaggtgatgcagttctgctggctgcagcctgagcagaggcccacagctgaggaggtgcacctgctgctgagctacctgtgtgccaagggggccacagaggccgaggaggagtttgagcggcgctggaggagcctgcggcctgggggcggcggcgtgggccctggccctggagctgctggccccatgctgggcggcgtggtggagctggccgccgccagcagcttccccctgctggagcagtttgctggagatggcttccacgcagatggagatgatgtgctgacagagctgtgtgccccagatggagcccctcctggggtggtgcctgtgctgagcgcccacagccccagcctgggcagcgagtacttcatccggctggaggaggccgccccagctgctggccatgaccctgactgtgccggctgtgcccccagccccccagccacagctgaccaggatgatgacagtgatggcagcacagctgccagcctggccatggagcccctgctgggccacggcccccctgtggatgtgccctggggccgcggggaccactacccccggcgcagcctggcccgggaccccctgtgccccagccgcagccccagccccagcgctggccccctgagcctggccgagggcggcgcagaagatgctgactggggcgtggccgccttctgcccagccttctttgaggaccccctgggcaccagccccctgggcagcagcggggccccacccctgcccctgactggagaagatgagctggaggaggtgggcgcccggcgggccgcccagaggggccactggaggagcaatgtgtctgccaacaacaacagcggcagccgctgcccagagagctgggaccctgtgtctgctgggggccatgctgagggctgccccagccccaagcagaccccccgggccagccctgagcccggctacccaggagagcccctgctgggcctgcaggccgccagcgcccaggagcccggctgctgccccggcctgccccacctgtgcagcgcccagggcctggccccagccccctgcctggtgacccccagctggacagaaacagccagcagtggaggagaccacccccaggccgagcccaagctggccacagaggccgagggcaccaccggcccccggctgcccctgcccagcgtgcccagccccagccaggagggcgcccccctgcccagcgaggaggccagcgccccagatgccccagatgccctgcctgacagccccaccccagccactggaggagaggtgtctgccatcaagctggccagcgccctgaatggcagcagcagcagccctgaggtggaggcccccagcagtgaagatgaggacacagctgaggccaccagcggcatcttcacagacaccagcagtgatggcctgcaggcccggcggccagatgtggtgcctgccttccgcagcctgcagaagcagtggccccagcgggaggagagcctgccccggctgtgcctgctgctgcggccccggggctag

SEQ ID NO: 275420 - DNA, 2640 bp, Artificial Sequence
  derived and/or modified sequence
atgagcagcagcttcttcaaccccagcttcgccttcagcagccacttcgacccagacggcgccccgttatccgaattgagttggccatcctctctggccgttgtggccgtgtccttttcagggcttttcgctgttatcgttctgatgctcgcatgtctttgctgcaaaaaaggtggtattgggtttaaagagttcgagaacgctgaaggagatgagtacgctgcagatctcgcccagggctctccagctacagccgcacagaacggtcctgacgtatacgtgctccctctgacggaagtgtccttaccaatggcgaaacaacccggtcggtctgtgcagctcctcaaatcgaccgatgtgggtagacattccctgttgtatcttaaagaaatcggaagaggctggttcggtaaggtttttctcggggaggtgaatagcggcatttcatctgctcaggtggtggttaaggagctccaagccagcgcctccgtgcaagaacagatgcagttccttgaagaggttcaaccctaccgggccctaaagcattccaacctgctacagtgtcttgctcagtgcgcagaggtgaccccataccttctggtcatggaattctgtcctttgggagatctgaaggggtatctgcgaagctgtagggtcgctgagtccatggcccctgatccaaggaccctccagaggatggcttgcgaagtcgcatgcggtgtgctccatctccacagaaacaacttcgtacattctgatctcgcactccgcaattgtctgctgactgcagatctaacagtgaaaatcggggattatggcctggctcattgtaaatatagggaggattactttgtaacagccgatcagttgtgggtgccattgcgttggatcgctccagagctagtcgacgaagtgcacagcaacttgctggttgttgaccaaactaagtcaggcaatgtttggtcgctgggggtcacaatatgggagctcttcgaattgggcacccagccctatccccaacactctgaccagcaggtgctggcctacactgtccgagaacagcaactgaaactgccgaaaccccagctgcaactgaccttgtcagacaggtggtatgaagtaatgcagttctgttggttacaacctgagcaacggcccaccgctgaggaggttcacctgcttttaagctacctgtgtgcaaagggtgcaaccgaagcggaggaggagtttgaacggaggtggaggagcctcagacctggtggtggaggagttggaccagggcctggagcagccgggccaatgctgggcggagtggtggaattggctgccgccagttccttcccactgctggagcaatttgccggcgatggctttcacgcagatggggacgatgtgctgaccgaactgtgcgccccagatggggcccctccaggagtagtgcctgtgctcagcgcccattcccctagtctaggttccgagtacttcatcaggcttgaggaagcagcccctgccgcaggtcacgatcccgactgtgcaggttgtgccccgagcccccccgcaacagccgatcaggatgacgactccgacggctctacggcagcgagcctggcgatggagcccctcttgggacatggtcctcccgtggacgtcccttgggggagaggcgatcactacccaaggagaagtctggcccgtgaccctctctgtccgtccagatccccttcccccagtgccggaccactctctctggcggaaggcggcgcagaggatgccgactggggagtcgccgcgttttgccccgcgttttttgaggaccctctcgggactagtcccctcggaagcagtggcgcccctcctctgccattgacaggcgaagatgaactcgaggaagtcggagctagacgggccgctcagcgggggcactggcgtagcaatgtgtccgccaacaacaacagtggttcccgctgtcctgagtcatgggaccccgtctccgccggcggccacgcagaaggttgtccatcacccaagcagacaccccgggccagccccgagccggggtatccgggcgagccattgctcggcctgcaggccgccagtgcccaagagccaggctgctgtcctggacttccacacctgtgttcggcacagggcctcgctcctgctccgtgcttagtgacaccttcatggacggaaacagcatcatccggaggggaccatccacaagccgagccaaagctggccaccgaggccgagggaacgaccgggccaaggctcccgctgccttccgttccatcccctagtcaggagggcgctccactcccctcagaggaagccagtgcccccgacgctccagacgcactgcctgatagccccactccagccactggcggtgaagtgtctgctatcaaactggccagtgccctgaatggcagctccagcagcccagaggtagaggccccaagcagcgaagacgaagatactgcagaggcaacctcaggaatcttcacagacacctctagtgatggcttgcaggcccggcgcccggacgtggtccccgcttttcgctctcttcaaaagcagtggccccagagagaagaatctctgcctcgtctgtgtttgctcctgcggcccagagggtag

SEQ ID NO: 275421 - DNA, 2640 bp, Artificial Sequence
  derived and/or modified sequence
atgagttcgagttttttcaatcccagctttgccttttcatctcactttgatccggatggggctccactgagtgagctctcttggccttcctccctggctgttgttgccgtgtcgttttcggggctctttgccgtgattgtactcatgctggcttgcctatgctgcaagaaaggcggtattggatttaaagagtttgagaatgccgagggggacgaatatgctgcggatctcgcccagggatcacccgcaacggccgcacaaaacggacccgacgtatatgtcctgccactgactgaggtgtccctgcctatggccaagcaaccaggtaggtccgtgcagctcctgaagtcaactgacgttggccgacactccctcctctatctgaaggagattggtagaggctggtttggaaaagtgttcctgggcgaggtgaattccggaatcagtagtgcccaagtcgttgtgaaggaacttcaagctagtgccagcgtgcaggagcagatgcagtttctcgaggaagtgcagccttacagagcattgaagcattcgaatctgctgcagtgcctcgcccagtgtgctgaggtgacgccataccttcttgtgatggagttttgcccgctaggggacctcaagggctacctgcggtcctgcagggtggctgagagcatggctcccgatccacgaacactccagcggatggcatgcgaagtggcctgtggtgttctccacctgcaccgtaacaattttgtacactcagatctggcccttcgtaactgcctcctgaccgctgaccttaccgtgaaaattggtgactatggactggcccattgcaagtatagagaggactacttcgtgaccgcagaccagctgtgggtccccctacggtggatcgctcctgaacttgtcgatgaggtgcactcaaacctgctcgtagtggatcagacaaagagcggcaacgtttggagccttggtgtcaccatatgggagcttttcgagctcgggacacagccttacccacagcatagtgatcagcaggtcctggcatacacagtccgcgagcagcagctcaaactgcctaagccgcagctccaactgaccttgtccgaccgatggtatgaagtgatgcagttttgctggctgcagccagagcagcggcctaccgccgaggaggtccatctgctgctgtcctacctgtgtgccaaaggagcaaccgaggccgaggaagaatttgaaaggaggtggaggagtttaaggcccggtggaggaggggtgggcccagggcctggggctgccggtcccatgctggggggagtggtagagctagctgcggcatcgtctttcccccttttggaacaattcgctggggacggatttcatgctgatggcgatgatgttctaaccgagctttgtgcaccagatggcgcaccgcctggagtggtgcccgttctgagtgctcattccccatcactgggctctgagtatttcattaggttagaagaagccgctccggctgcaggtcatgatcctgattgcgcagggtgtgctccctcacctccggcaactgccgaccaggacgatgatagcgacggctctacagccgcaagcctggccatggagccgctcttagggcatgggccacccgtggacgttccttgggggagaggcgaccattatccgagaaggtctctggctcgcgatcccctgtgccctagccgcagtcccagtccatcggcaggaccgttatcactggcagaaggcggagctgaggatgctgattggggagtggcagccttttgccctgctttttttgaagacccactgggaaccagccctctgggctccagcggcgcaccacctctcccgcttacgggagaagatgagttggaggaggtcggggctcgacgggcagcacaacgcggtcactggcgaagcaatgtgagcgccaataataacagcggatctaggtgccctgagtcttgggacccagtctccgcaggcggacatgccgagggctgtccttcccccaaacagacacctcgcgctagtccagagcccggatatccgggtgaacccttgcttgggctgcaggccgcttctgctcaagaacctggatgttgtccaggcttaccacatctctgttcagcccagggcctagcaccagccccttgtctggtgactcccagctggaccgagaccgccagttctggtggagaccacccacaggcagagcccaagctggcgacggaggctgaggggaccactggcccacggctgcctctgccatctgttcctagtccctctcaagagggcgctccccttccaagtgaagaagcctcggcgccagacgctcccgacgccctgcctgacagccccactccagccactggtggtgaggtttctgcaataaaactggctagcgccttgaatggcagctctagctcccccgaggtggaagccccatctagcgaagatgaggatacagccgaagctacttcagggatattcacagataccagttccgacggtttgcaggcacgaaggcctgacgtggtgccagcatttagaagtcttcagaaacagtggcctcagagggaggaatccctccctcgcctctgcctcctgttgcgccctcgaggttag

SEQ ID NO: 275422 - DNA, 4928 bp, Artificial Sequence
  derived and/or modified sequence
gatgcggcggctcgggccggggccgcgggcgtcctgagcgcagcgccctcccgggatgcccgccggccgctggcccggccatgtcgtcgtccttcttcaaccccagcttcgccttcagctcgcacttcgaccccgacggcgccccgctcagcgagctgtcctggccatcctccctcgccgtggtggctgtgtctttctccgggctcttcgccgtcatcgtcctcatgctggcctgcctgtgctgtaagaagggcggtatcgggttcaaggagtttgagaatgcggagggggacgagtacgcagccgacctggcgcagggctccccggccacggcagcacagaacgggcccgacgtgtacgtcctgccactcacggaggtctccttgcccatggccaagcagcctgggcgctcagtgcagctcctcaagtccacagacgtgggccggcacagcctcctgtacctgaaggaaatcggccgtggctggttcgggaaggtgttcctgggggaggtgaactctggcatcagcagtgcccaggtggtggtgaaggagctgcaggctagtgccagcgtgcaggagcagatgcagttcctggaggaggtgcagccctacagggccctgaagcacagcaacctgctccagtgcctggcccagtgcgccgaggtgacgccctacctgctggtgatggagttctgcccactgggggacctcaagggctacctgcggagctgccgggtggcggagtccatggctcccgacccccggaccctgcagcgcatggcctgtgaggtggcctgtggcgtcctgcaccttcatcgcaacaatttcgtgcacagcgacctggccctgcggaactgcctgctcacggctgacctgacggtgaagattggtgactatggcctggctcactgcaagtacagagaggactacttcgtgactgccgaccagctgtgggtgcctctgcgctggatcgcgccagagctggtggacgaggtgcatagcaacctgctcgtcgtggaccagaccaagagcgggaatgtgtggtccctgggcgtgaccatctgggagctctttgagctgggcacgcagccctatccccagcactcggaccagcaggtgctggcgtacacggtccgggagcagcagctcaagctgcccaagccccagctgcagctgaccctgtcggaccgctggtacgaggtgatgcagttctgctggctgcagcccgagcagcggcccacagccgaggaggtgcacctgctgctgtcctacctgtgtgccaagggcgccaccgaagcagaggaggagtttgaacggcgctggcgctctctgcggcccggcgggggcggcgtggggcccgggcccggtgcggcggggcccatgctgggcggcgtggtggagctcgccgctgcctcgtccttcccgctgctggagcagttcgcgggcgacggcttccacgcggacggcgacgacgtgctgacggagctgtgcgcccccgacggcgcgcccccgggcgtggttccggtgctcagcgcgcacagcccgtcgctgggcagcgagtacttcatccgcctagaggaggccgcacccgccgccggccacgaccctgactgcgccggctgcgcccccagtccacctgccaccgcggaccaggacgacgactctgacggcagcaccgccgcctcgctggccatggagccgctgctgggccacgggccacccgtcgacgtcccctggggccgcggcgaccactaccctcgcagaagcttggcgcgggacccgctctgcccctcacgctctccctcgccctcggcggggcccctgagtctggcggagggaggagcggaggatgcagactggggcgtggccgccttctgtcctgccttcttcgaggacccactgggcacgtcccctttggggagctcaggggcgcccccgctgccgctgactggcgaggatgagctagaggaggtgggagcgcggagggccgcccagcgcgggcactggcgctccaacgtgtcagccaacaacaacagcggcagccgctgtccagagtcctgggaccccgtctctgcgggcggccacgctgagggctgccccagtccaaagcagaccccacgggcctcccccgagccggggtaccctggagagcctctgcttgggctccaggcagcctctgcccaggagccaggctgctgccccggcctccctcatctatgctctgcccagggcctggcacctgctccctgcctggttacaccctcctggacagagacagccagtagtgggggtgaccacccgcaggcagagcccaagcttgccacggaggctgagggcactaccggaccccgcctgccccttccttccgtcccctccccatcccaggagggagccccacttccctcggaggaggccagtgcccccgacgcccctgatgccctgcctgactctcccacgcctgctactggtggcgaggtgtctgccatcaagctggcttctgccctgaatggcagcagcagctctcccgaggtggaggcacccagcagtgaggatgaggacacggccgaggccacctcaggcatcttcaccgacacgtccagcgacggcctgcaggccaggaggccggatgtggtgccagccttccgctctctgcagaagcagtggcctcaacgagaagaatccctaccgagactctgcctacttctcagacctcgaggctgaggccgaggccacctcaggcccagagaagaagtgcggcggggaccgagcccccgggccagagctgggcctgccgagcactgggcagccgtctgagcaggtctgtctcaggcctggggtttccggggaggcacaaggctctggccccggggaggtgctgcccccactgctgcagcttgaagggtcctccccagagcccagcacctgcccctcgggcctggtcccagagcctccggagccccaaggcccagccaaggtgcggcctgggcccagccccagctgctcccagtttttcctgctgaccccggttccgctgagatcagaaggcaacagctctgagttccaggggcccccaggactgttgtcagggccggccccacaaaagcggatggggggcccaggcacccccagagccccactccgcctggctctgcccggcctccctgcggccttggagggccggccggaggaggaggaggaggacagtgaggacagcgacgagtctgacgaggagctccgctgctacagcgtccaggagcctagcgaggacagcgaagaggaggcgccggcggtgcccgtggtggtggctgagagccagagcgcgcgcaacctgcgcagcctgctcaagatgcccagcctgctgtccgagaccttctgcgaggacctggaacgcaagaagaaggccgtgtccttcttcgacgacgtcaccgtctacctctttgaccaggaaagccccacccgggagctcggggagcccttcccgggcgccaaggaatcgccccctacgttccttagggggagccccggctctcccagcgcccccaaccggccgcagcaggctgatggctccccaaatggctccacagcggaagagggtggtgggttcgcgtgggacgacgacttcccgctgatgacggccaaggcagccttcgccatggccctagacccggccgcacccgccccggctgcgcccacgcccacgcccgctcccttctcgcgcttcacggtgtcgcccgcgcccacgtcccgcttctccatcacgcacgtgtctgactcggacgccgagtccaagagaggacctgaagctggtgccgggggtgagagtaaagaggcttgagacctgggcagctcctgcccctcaaggctggcgtcaccggagcccctgccaggcagcagcgaggatggtgaccgagaaggtggggaccacgtcctggtggctgttggcagcagattcaggtgcctctgccccacgcggtgtcctggagaagcccgtgggatgagaggccctggatggtagatcggccatgctccgccccagaggcagaattcgtctgggcttttaggcttgctgctagcccctgggggcgcctggagccacagtgggtgtctgtacacacatacacactcaaaaggggccagtgcccctgggcacggcggcccccaccctctgccctgcctgcctggcctcggaggacccgcatgccccatccggcagctcctccggtgtgctcacaggacacttaaaccaggacgaggcatggccccgagacactggcaggtttgtgagcctcttcccaccccctgtgcccccacccttgcctggttcctggtggctcagggcaaggagtggccctgggcgcccgtgtcggtcctgtttccgctgcccttatctcaaagtccgtggctgtttccccttcactgactcagctagacccgtaagcccacccttcccacagggaacaggctgctcccacctgggtcccgctgtggccacggtgggcagcccaaaagatcaggggtggaggggcttccaggctgtactcctgccccgtgggccccgttctagaggtgcccttggcaggaccgtgcaggcagctcccctctgtggggcagtatctggtcctgtgccccagctgccaaaggagagtgggggccatgccccgcagtcagtgttggggggctcctacctacagggagagggatggtggggaaggggtggagctgggggcagggcagcacagggaatatttttgtaactaactaactgctgtggttggagcgaatggaagttgggtgattttaagttattgttgccaaagagatgtaaagtttattgttgcttcgcagggggatttgttttgtgttttgtttgaggcttagaacgctggtgcaatgttttcttgttccttgttttttaagagaaatgaagct

SEQ ID NO: 275423 - DNA, 2640 bp, Artificial Sequence
  derived and/or modified sequence
atgagcagcagcttcttcaaccccagcttcgccttcagcagccacttcgaccccgacggcgcccccctgagcgagctgagctggcccagcagcctggccgtggtggccgtgagcttcagcggcctgttcgccgtgatcgtgctgatgctggcctgcctgtgctgcaagaagggcggcatcggcttcaaggagttcgagaacgccgagggcgacgagtacgccgccgacctggcccagggcagccccgccaccgccgcccagaacggccccgacgtgtacgtgctgcccctgaccgaggtgagcctgcccatggccaagcagcccggcagaagcgtgcagctgctgaagagcaccgacgtgggcagacacagcctgctgtacctgaaggagatcggcagaggctggttcggcaaggtgttcctgggcgaggtgaacagcggcatcagcagcgcccaggtggtggtgaaggagctgcaggccagcgccagcgtgcaggagcagatgcagttcctggaggaggtgcagccctacagagccctgaagcacagcaacctgctgcagtgcctggcccagtgcgccgaggtgaccccctacctgctggtgatggagttctgccccctgggcgacctgaagggctacctgagaagctgcagagtggccgagagcatggcccccgaccccagaaccctgcagagaatggcctgcgaggtggcctgcggcgtgctgcacctgcacagaaacaacttcgtgcacagcgacctggccctgagaaactgcctgctgaccgccgacctgaccgtgaagatcggcgactacggcctggcccactgcaagtacagagaggactacttcgtgaccgccgaccagctgtgggtgcccctgagatggatcgcccccgagctggtggacgaggtgcacagcaacctgctggtggtggaccagaccaagagcggcaacgtgtggagcctgggcgtgaccatctgggagctgttcgagctgggcacccagccctacccccagcacagcgaccagcaggtgctggcctacaccgtgagagagcagcagctgaagctgcccaagccccagctgcagctgaccctgagcgacagatggtacgaggtgatgcagttctgctggctgcagcccgagcagagacccaccgccgaggaggtgcacctgctgctgagctacctgtgcgccaagggcgccaccgaggccgaggaggagttcgagagaagatggagaagcctgagacccggcggcggcggcgtgggccccggccccggcgccgccggccccatgctgggcggcgtggtggagctggccgccgccagcagcttccccctgctggagcagttcgccggcgacggcttccacgccgacggcgacgacgtgctgaccgagctgtgcgcccccgacggcgccccccccggcgtggtgcccgtgctgagcgcccacagccccagcctgggcagcgagtacttcatcagactggaggaggccgcccccgccgccggccacgaccccgactgcgccggctgcgcccccagcccccccgccaccgccgaccaggacgacgacagcgacggcagcaccgccgccagcctggccatggagcccctgctgggccacggcccccccgtggacgtgccctggggcagaggcgaccactaccccagaagaagcctggccagagaccccctgtgccccagcagaagccccagccccagcgccggccccctgagcctggccgagggcggcgccgaggacgccgactggggcgtggccgccttctgccccgccttcttcgaggaccccctgggcaccagccccctgggcagcagcggcgccccccccctgcccctgaccggcgaggacgagctggaggaggtgggcgccagaagagccgcccagagaggccactggagaagcaacgtgagcgccaacaacaacagcggcagcagatgccccgagagctgggaccccgtgagcgccggcggccacgccgagggctgccccagccccaagcagacccccagagccagccccgagcccggctaccccggcgagcccctgctgggcctgcaggccgccagcgcccaggagcccggctgctgccccggcctgccccacctgtgcagcgcccagggcctggcccccgccccctgcctggtgacccccagctggaccgagaccgccagcagcggcggcgaccacccccaggccgagcccaagctggccaccgaggccgagggcaccaccggccccagactgcccctgcccagcgtgcccagccccagccaggagggcgcccccctgcccagcgaggaggccagcgcccccgacgcccccgacgccctgcccgacagccccacccccgccaccggcggcgaggtgagcgccatcaagctggccagcgccctgaacggcagcagcagcagccccgaggtggaggcccccagcagcgaggacgaggacaccgccgaggccaccagcggcatcttcaccgacaccagcagcgacggcctgcaggccagaagacccgacgtggtgcccgccttcagaagcctgcagaagcagtggccccagagagaggagagcctgcccagactgtgcctgctgctgagacccagaggctag

SEQ ID NO: 275424 - protein, 821 aa, Artificial Sequence
  derived and/or modified sequence
MIGPSPNPLILSYLKYAISSQMVSYSSVLTAISKFDDFSRDLCVQALLDIMDMFCDRLSCHGKAEECIGLCRALLSALHWLLRCTAASAERLREGLEAGTPAAGEKQLAMCLQRLEKTLSSTKNRALLHIAKLEEASSWTAIEHSLLKLGEILANLSNPQLRSQAEQCGTLIRSIPTMLSVHAEQMHKTGFPTVHAVILLEGTMNLTGETQSLVEQLTMVKRMQHIPTPLFVLEIWKACFVGLIESPEGTEELKWTAFTFLKIPQVLVKLKKYSHGDKDFTEDVNCAFEFLLKLTPLLDKADQRCNCDCTNFLLQECGKQGLLSEASVNNLMAKRKADREHAPQQKSGENANIQPNIQLILRAEPTVTNILKTMDADHSKSPEGLLGVLGHMLSGKSLDLLLAAAAATGKLKSFARKFINLNEFTTYGSEESTKPASVRALLFDISFLMLCHVAQTYGSEVILSESRTGAEVPFFETWMQTCMPEEGKILNPDHPCFRPDSTKVESLVALLNNSSEMKLVQMKWHEACLSISAAILEILNAWENGVLAFESIQKITDNIKGKVCSLAVCAVAWLVAHVRMLGLDEREKSLQMIRQLAGPLFSENTLQFYNERVVIMNSILERMCADVLQQTATQIKFPSTGVDTMPYWNLLPPKRPIKEVLTDIFAKVLEKGWVDSRSIHIFDTLLHMGGVYWFCNNLIKELLKETRKEHTLRAVELLYSIFCLDMQQVTLVLLGHILPGLLTDSSKWHSLMDPPGTALAKLAVWCALSSYSSHKGQASTRQKKRHREDIEDYISPKVVLAITDLSLPLGRQVAAKAIAAL

SEQ ID NO: 275425 - protein, 341 aa, Artificial Sequence
  derived and/or modified sequence
MKKFFPKGATWDILNLADALLEQAMIGPSPNPLILSYLKYAISSQMVSYSSVLTAISKFDDFSRDLCVQALLDIMDMFCDRLSCHGKAEECIGLCRALLSALHWLLRCTAASAERLREGLEAGTPAAGEKQLAMCLQRLEKTLSSTKNRALLHIAKLEEASSWTAIEHSLLKLGEILANLSNPQLRSQAEQCGTLIRSIPTMLSVHAEQMHKTGFPTVHAVILLEGTMNLTGETQSLVEQQTATQIKFPSTGVDTMPYWNLLPPKRPIKEVLTDIFAKVLEKGWVDSRSIHIFDTLLHMGGVYWFCNNLIKELLKETRKEHTLRAVELLYSIFCLDMQQVT

SEQ ID NO: 275426 - protein, 931 aa, Artificial Sequence
  derived and/or modified sequence
MKVVNLKQAILQAWKERWSDYQWAINMKKFFPKGATWDILNLADALLEQAMIGPSPNPLILSYLKYAISSQMVSYSSVLTAIMCLQRLEKTLSSTKNRALLHIAKLEEASLHTSQGLGQGGTRANQPTASWTAIEHSLLKLGEILANLSNPQLRSQAEQCGTLIRSIPTMLSVHAEQMHKTGFPTVHAVILLEGTMNLTGETQSLVEQLTMVKRMQHIPTPLFVLEIWKACFVGLIESPEGTEELKWTAFTFLKIPQVLVKLKKYSHGDKDFTEDVNCAFEFLLKLTPLLDKADQRCNCDCTNFLLQECGKQGLLSEASVNNLMAKRKADREHAPQQKSGENANIQPNIQLILRAEPTVTNILKTMDADHSKSPEGLLGVLGHMLSGKSLDLLLAAAAATGKLKSFARKFINLNEFTTYGSEESTKPASVRALLFDISFLMLCHVAQTYGSEVILSESRTGAEVPFFETWMQTCMPEEGKILNPDHPCFRPDSTKVESLVALLNNSSEMKLVQMKWHEACLSISAAILEILNAWENGVLAFESIQKITDNIKGKVCSLAVCAVAWLVAHVRMLGLDEREKSLQMIRQLAGPLFSENTLQFYNERVVIMNSILERMCADVLQQTATQIKFPSTGVDTMPYWNLLPPKRPIKEVLTDIFAKVLEKGWVDSRSIHIFDTLLHMGGVYWFCNNLIKELLKETRKEHTLRAVELLYSIFCLDMQQVTLVLLGHILPGLLTDSSKWHSLMDPPGTALAKLAVWCALSSYSSHKGQASTRQKKRHREDIEDYISLFPLDDVQPSKLMRLLSSNEDDANILSSPTDRSMSSSLSASQLHTVNMRDPLNRVLANLFLLISSILGSRTAGPHTQFVQWFMEECVDCLEQGGRGSVLQFMPFTTVSELVKVSAMSSPKVVLAITDLSLPLGRQVAAKAIAAL

SEQ ID NO: 275427 - DNA, 3735 bp, Artificial Sequence
  derived and/or modified sequence
ctccctcgagtccctgagtctctgtagtgcctcagctcctggatgtcctcccttaaaggagaagaacaatgcgggccgactagacgagtcccttagtttcctcgccggcgcagacaaatacggtttcagtccaaggaactaccattcccagaagacagcggggcgttccttgctgcatttctattggttggcgtttgttactcccagccaatagaaagtgagcttcttgacaagtgccaaaatggcgatgcctaccacctagaactggattgtgcgctggccgccaccgctgccacctgctcagagtgaaataatgaaggtggtcaacctgaagcaagccattttgcaagcctggaaggagcgctggagtgactaccaatgggcaatcaacatgaagaaattctttcctaaaggagccacctgggatattctcaacctggcagatgcgttactagagcaggccatgattggaccatcccccaatcctctcatcttgtcctacctgaagtatgccattagttcccagatggtgtcctactcttctgtcctcacagccatcagtaagtttgatgacttttctcgggacctgtgtgtccaggcattgctggacatcatggacatgttttgtgaccgtctgagctgtcacggcaaagcagaggaatgcatcggactgtgccgagcccttcttagcgccctccactggctgctgcgctgcacggcagcctctgcagagcggctgcgggaggggctggaggccggcactccagccgctggggagaagcagcttgccatgtgccttcagcgcctggagaaaaccctcagcagcaccaagaaccgggccctgctgcacatcgccaaactagaggaggcctcttcttggactgccatcgagcattctctcttgaaacttggagagatcctggccaatctcagcaacccgcagctccggagtcaggccgagcagtgtggcaccctcattaggagcatccccacgatgctgtctgtgcatgcggagcagatgcacaagaccggcttccccactgtccacgccgtgatcctgctcgagggcaccatgaacctgacaggcgagacgcagtccctggtggagcagctgacgatggtgaagcgcatgcagcatatccccaccccactttttgtcctggagatctggaaagcttgcttcgtggggctcattgagtctcccgagggtacggaggagctcaagtggacagctttcactttcctcaagattccacaggttttggtgaagttgaagaagtactctcatggagacaaggacttcactgaggatgtcaactgtgcttttgagttcctgctgaagctcacccccttgttggacaaagctgaccagcgctgcaactgtgactgtacaaacttcctgctccaagaatgtggcaagcaggggcttctgtctgaggccagcgtcaacaaccttatggctaagcgcaaagcggaccgagagcacgcaccccagcagaaatcgggagagaatgccaacatccagcccaacatccagctgatcctccgggcggagcccactgtcacaaacatcctcaagacgatggatgcagaccactctaagtcaccggagggactgctgggagtcctgggccacatgctgtccgggaagagtctggacttgctgctggctgccgccgccgccactggaaagctgaaatccttcgcccggaaattcatcaatttgaatgaattcacaacctatggcagcgaagaaagcaccaaaccggcctccgtccgggccctgctgtttgacatctccttcctcatgctgtgccatgtggcccagacctatggttcagaggtgattctgtccgagtcgcgcacaggagctgaggtgcccttcttcgagacctggatgcagacctgcatgcctgaggagggcaagatcctgaaccctgaccacccctgcttccgccccgactccaccaaagtggagtccctggtggccctgctcaacaactcctcggagatgaagctagtgcagatgaagtggcatgaggcctgtctcagcatctcagccgccatcttggaaatcctcaatgcctgggagaatggggtcctggccttcgagtccatccagaaaatcactgataacatcaaagggaaggtatgcagtctggcggtgtgtgctgtggcttggcttgtggcccacgtccggatgctggggctggatgagcgtgagaagtcgctgcagatgatccgccagctggcagggccactgtttagtgagaacaccctgcagttctacaatgagagggtggtgatcatgaactcgatcctggagcgcatgtgtgccgacgtgctgcagcagacagccacgcagatcaagtttccctccaccggggtggacacaatgccctactggaacctgctgccccccaagcggcccatcaaagaggtgctgacggacatttttgccaaggtgctggagaagggctgggtggacagccgctccatccacatctttgacaccctgctgcacatgggcggcgtctactggttctgcaacaacctgattaaggagctgctgaaggagacgcggaaggagcacacgctgcgggcagtggagctgctctactccatcttctgcctggacatgcagcaagtgaccctggtcctgctgggccacatcctacctggcctgctcactgactcctccaagtggcacagcctcatggaccccccgggcactgctcttgccaagctggccgtgtggtgtgccctcagttcctactcctcccacaagggacaggcgtccacccgccagaagaagagacaccgcgaagacattgaggattatatcagcctcttccccctggacgatgtgcagccttcgaagttgatgcgactgctgagctctaatgaggacgatgccaacatcctttcgagccccacagaccgatccatgagcagctccctctcagcctctcagctccacacggtcaacatgcgggaccctctgaaccgagtcctggccaacctgttcctgctcatctcctccatcctggggtctcgcaccgctggcccccacacccagttcgtgcagtggttcatggaggagtgtgtggactgcctggagcagggtggccgtggcagcgtcctgcagttcatgcccttcaccaccgtgtcggaactggtgaaggtgtcagccatgtccagccccaaggtggttctggccatcacggacctcagcctgcccctgggccgccaggtggctgctaaagccattgctgcactctgaggggcttggcatggccgcagtgggggctggggactggcgcagccccaggcgcctccaagggaagcagtgaggaaagatgaggcatcgtgcctcacatccgctccacatggtgcaagagcctctagcggcttccagttccccgctcctgactcctgacctccaggatgtctcccggtttcttctttcaaaatttcctctccatctgctggcacctgaggagagtgagcagcctggaccacaagcccagtggtcacccctgtgtgcgcccgccccagcccaggagtagtcttacctctgaggaactttctagatgcaaagtgtgtatgtgtgtgtgtgtgtgtgtgtgtgtgtgtttgtgtgtattttgtaatatgtgagggaaatctaccttcgttcatgtataaataaagctcctcgtggctccctttgtgaaaaaaaaaaaaaaaaaaaaa

SEQ ID NO: 275428 - DNA, 3506 bp, Artificial Sequence
  derived and/or modified sequence
aagtgccaaaatggcgatgcctaccacctagaactggattgtgcgctccatttctttcacctcaaagctggccgccaccgctgccacctgctcagagtgaaataatgaaggtggtcaacctgaagcaagccattttgcaagcctggaaggagcgctggagtgactaccaatgggcaatcaacatgaagaaattctttcctaaaggagccacctgggatattctcaacctggcagatgcgttactagagcaggccatgattggaccatcccccaatcctctcatcttgtcctacctgaagtatgccattagttcccagatggtgtcctactcttctgtcctcacagccatcagtaagtttgatgacttttctcgggacctgtgtgtccaggcattgctggacatcatggacatgttttgtgaccgtctgagctgtcacggcaaagcagaggaatgcatcggactgtgccgagcccttcttagcgccctccactggctgctgcgctgcacggcagcctctgcagagcggctgcgggaggggctggaggccggcactccagccgctggggagaagcagcttgccatgtgccttcagcgcctggagaaaaccctcagcagcaccaagaaccgggccctgctgcacatcgccaaactagaggaggcctcttcttggactgccatcgagcattctctcttgaaacttggagagatcctggccaatctcagcaacccgcagctccggagtcaggccgagcagtgtggcaccctcattaggagcatccccacgatgctgtctgtgcatgcggagcagatgcacaagaccggcttccccactgtccacgccgtgatcctgctcgagggcaccatgaacctgacaggcgagacgcagtccctggtggagcagctgacgatggtgaagcgcatgcagcatatccccaccccactttttgtcctggagatctggaaagcttgcttcgtggggctcattgagtctcccgagggtacggaggagctcaagtggacagctttcactttcctcaagattccacaggttttggtgaagttgaagaagtactctcatggagacaaggacttcactgaggatgtcaactgtgcttttgagttcctgctgaagctcacccccttgttggacaaagctgaccagcgctgcaactgtgactgtacaaacttcctgctccaagaatgtggcaagcaggggcttctgtctgaggccagcgtcaacaaccttatggctaagcgcaaagcggaccgagagcacgcaccccagcagaaatcgggagagaatgccaacatccagcccaacatccagctgatcctccgggcggagcccactgtcacaaacatcctcaagacgatggatgcagaccactctaagtcaccggagggactgctgggagtcctgggccacatgctgtccgggaagagtctggacttgctgctggctgccgccgccgccactggaaagctgaaatccttcgcccggaaattcatcaatttgaatgaattcacaacctatggcagcgaagaaagcaccaaaccggcctccgtccgggccctgctgtttgacatctccttcctcatgctgtgccatgtggcccagacctatggttcagaggtgattctgtccgagtcgcgcacaggagctgaggtgcccttcttcgagacctggatgcagacctgcatgcctgaggagggcaagatcctgaaccctgaccacccctgcttccgccccgactccaccaaagtggagtccctggtggccctgctcaacaactcctcggagatgaagctagtgcagatgaagtggcatgaggcctgtctcagcatctcagccgccatcttggaaatcctcaatgcctgggagaatggggtcctggccttcgagtccatccagaaaatcactgataacatcaaagggaaggtatgcagtctggcggtgtgtgctgtggcttggcttgtggcccacgtccggatgctggggctggatgagcgtgagaagtcgctgcagatgatccgccagctggcagggccactgtttagtgagaacaccctgcagttctacaatgagagggtggtgatcatgaactcgatcctggagcgcatgtgtgccgacgtgctgcagcagacagccacgcagatcaagtttccctccaccggggtggacacaatgccctactggaacctgctgccccccaagcggcccatcaaagaggtgctgacggacatttttgccaaggtgctggagaagggctgggtggacagccgctccatccacatctttgacaccctgctgcacatgggcggcgtctactggttctgcaacaacctgattaaggagctgctgaaggagacgcggaaggagcacacgctgcgggcagtggagctgctctactccatcttctgcctggacatgcagcaagtgaccctggtcctgctgggccacatcctacctggcctgctcactgactcctccaagtggcacagcctcatggaccccccgggcactgctcttgccaagctggccgtgtggtgtgccctcagttcctactcctcccacaagggacaggcgtccacccgccagaagaagagacaccgcgaagacattgaggattatatcagcctcttccccctggacgatgtgcagccttcgaagttgatgcgactgctgagctctaatgaggacgatgccaacatcctttcgagccccacagaccgatccatgagcagctccctctcagcctctcagctccacacggtcaacatgcgggaccctctgaaccgagtcctggccaacctgttcctgctcatctcctccatcctggggtctcgcaccgctggcccccacacccagttcgtgcagtggttcatggaggagtgtgtggactgcctggagcagggtggccgtggcagcgtcctgcagttcatgcccttcaccaccgtgtcggaactggtgaaggtgtcagccatgtccagccccaaggtggttctggccatcacggacctcagcctgcccctgggccgccaggtggctgctaaagccattgctgcactctgaggggcttggcatggccgcagtgggggctggggactggcgcagccccaggcgcctccaagggaagcagtgaggaaagatgaggcatcgtgcctcacatccgctccacatggtgcaagagcctctagcggcttccagttccccgctcctgactcctgacctccaggatgtctcccggtttcttctttcaaaatttcctctccatctgctggcacctgaggagagtgagcagcctggaccacaagcccagtggtcacccctgtgtgcgcccgccccagcccaggagtagtcttacctctgaggaactttctagatgcaaagtgtgtatgtgtgtgtgtgtgtgtgtgtgtgtgtgtttgtgtgtattttgtaatatgtgagggaaatctaccttcgttcatgtataaataaagctcctcgtggctccctttgtga

SEQ ID NO: 275429 - DNA, 3896 bp, Artificial Sequence
  derived and/or modified sequence
ggtgcgatctcggctcaccccaacaacctccgcctcccgggttcaagcgattctactgcctcagcctcccgagtagctgggattacaggcatgcaccaccaagcccggctaattttgtatttttagtggagacgaggtttctccatgttggtcaggctagtctcgaactcctgacctccggtgattcgcccgcctctgcctcccgaagtgctgggattacaggtgcgagccactgcgctcggccgatactttcttagtgccccagtttaaggaagggcggttcaggaggagagagtctgacaggatcttactttatccctttagctctttttctttcaaattcctctgtctcgcttaaatcttcccgcatcttctcctttctatttaattctgccttccccggttctccttagaacctcatgtccttttctttagctccatttctttcacctcaaagctggccgccaccgctgccacctgctcagagtgaaataatgaaggtggtcaacctgaagcaagccattttgcaagcctggaaggagcgctggagtgactaccaatgggcaatcaacatgaagaaattctttcctaaaggagccacctgggatattctcaacctggcagatgcgttactagagcaggccatgattggaccatcccccaatcctctcatcttgtcctacctgaagtatgccattagttcccagatggtgtcctactcttctgtcctcacagccatcagtaagtttgatgacttttctcgggacctgtgtgtccaggcattgctggacatcatggacatgttttgtgaccgtctgagctgtcacggcaaagcagaggaatgcatcggactgtgccgagcccttcttagcgccctccactggctgctgcgctgcacggcagcctctgcagagcggctgcgggaggggctggaggccggcactccagccgctggggagaagcagcttgccatgtgccttcagcgcctggagaaaaccctcagcagcaccaagaaccgggccctgctgcacatcgccaaactagaggaggcctcttcttggactgccatcgagcattctctcttgaaacttggagagatcctggccaatctcagcaacccgcagctccggagtcaggccgagcagtgtggcaccctcattaggagcatccccacgatgctgtctgtgcatgcggagcagatgcacaagaccggcttccccactgtccacgccgtgatcctgctcgagggcaccatgaacctgacaggcgagacgcagtccctggtggagcagctgacgatggtgaagcgcatgcagcatatccccaccccactttttgtcctggagatctggaaagcttgcttcgtggggctcattgagtctcccgagggtacggaggagctcaagtggacagctttcactttcctcaagattccacaggttttggtgaagttgaagaagtactctcatggagacaaggacttcactgaggatgtcaactgtgcttttgagttcctgctgaagctcacccccttgttggacaaagctgaccagcgctgcaactgtgactgtacaaacttcctgctccaagaatgtggcaagcaggggcttctgtctgaggccagcgtcaacaaccttatggctaagcgcaaagcggaccgagagcacgcaccccagcagaaatcgggagagaatgccaacatccagcccaacatccagctgatcctccgggcggagcccactgtcacaaacatcctcaagacgatggatgcagaccactctaagtcaccggagggactgctgggagtcctgggccacatgctgtccgggaagagtctggacttgctgctggctgccgccgccgccactggaaagctgaaatccttcgcccggaaattcatcaatttgaatgaattcacaacctatggcagcgaagaaagcaccaaaccggcctccgtccgggccctgctgtttgacatctccttcctcatgctgtgccatgtggcccagacctatggttcagaggtgattctgtccgagtcgcgcacaggagctgaggtgcccttcttcgagacctggatgcagacctgcatgcctgaggagggcaagatcctgaaccctgaccacccctgcttccgccccgactccaccaaagtggagtccctggtggccctgctcaacaactcctcggagatgaagctagtgcagatgaagtggcatgaggcctgtctcagcatctcagccgccatcttggaaatcctcaatgcctgggagaatggggtcctggccttcgagtccatccagaaaatcactgataacatcaaagggaaggtatgcagtctggcggtgtgtgctgtggcttggcttgtggcccacgtccggatgctggggctggatgagcgtgagaagtcgctgcagatgatccgccagctggcagggccactgtttagtgagaacaccctgcagttctacaatgagagggtggtgatcatgaactcgatcctggagcgcatgtgtgccgacgtgctgcagcagacagccacgcagatcaagtttccctccaccggggtggacacaatgccctactggaacctgctgccccccaagcggcccatcaaagaggtgctgacggacatttttgccaaggtgctggagaagggctgggtggacagccgctccatccacatctttgacaccctgctgcacatgggcggcgtctactggttctgcaacaacctgattaaggagctgctgaaggagacgcggaaggagcacacgctgcgggcagtggagctgctctactccatcttctgcctggacatgcagcaagtgaccctggtcctgctgggccacatcctacctggcctgctcactgactcctccaagtggcacagcctcatggaccccccgggcactgctcttgccaagctggccgtgtggtgtgccctcagttcctactcctcccacaagggacaggcgtccacccgccagaagaagagacaccgcgaagacattgaggattatatcagcctcttccccctggacgatgtgcagccttcgaagttgatgcgactgctgagctctaatgaggacgatgccaacatcctttcgagccccacagaccgatccatgagcagctccctctcagcctctcagctccacacggtcaacatgcgggaccctctgaaccgagtcctggccaacctgttcctgctcatctcctccatcctggggtctcgcaccgctggcccccacacccagttcgtgcagtggttcatggaggagtgtgtggactgcctggagcagggtggccgtggcagcgtcctgcagttcatgcccttcaccaccgtgtcggaactggtgaaggtgtcagccatgtccagccccaaggtggttctggccatcacggacctcagcctgcccctgggccgccaggtggctgctaaagccattgctgcactctgaggggcttggcatggccgcagtgggggctggggactggcgcagccccaggcgcctccaagggaagcagtgaggaaagatgaggcatcgtgcctcacatccgctccacatggtgcaagagcctctagcggcttccagttccccgctcctgactcctgacctccaggatgtctcccggtttcttctttcaaaatttcctctccatctgctggcacctgaggagagtgagcagcctggaccacaagcccagtggtcacccctgtgtgcgcccgccccagcccaggagtagtcttacctctgaggaactttctagatgcaaagtgtgtatgtgtgtgtgtgtgtgtgtgtgtgtgtgtttgtgtgtattttgtaatatgtgagggaaatctaccttcgttcatgtataaataaagctcctcgtggctccctttgtga

SEQ ID NO: 275430 - DNA, 3479 bp, Artificial Sequence
  derived and/or modified sequence
aagtgccaaaatggcgatgcctaccacctagaactggattgtgcgctggccgccaccgctgccacctgctcagagtgaaataatgaaggtggtcaacctgaagcaagccattttgcaagcctggaaggagcgctggagtgactaccaatgggcaatcaacatgaagaaattctttcctaaaggagccacctgggatattctcaacctggcagatgcgttactagagcaggccatgattggaccatcccccaatcctctcatcttgtcctacctgaagtatgccattagttcccagatggtgtcctactcttctgtcctcacagccatcagtaagtttgatgacttttctcgggacctgtgtgtccaggcattgctggacatcatggacatgttttgtgaccgtctgagctgtcacggcaaagcagaggaatgcatcggactgtgccgagcccttcttagcgccctccactggctgctgcgctgcacggcagcctctgcagagcggctgcgggaggggctggaggccggcactccagccgctggggagaagcagcttgccatgtgccttcagcgcctggagaaaaccctcagcagcaccaagaaccgggccctgctgcacatcgccaaactagaggaggcctcttcttggactgccatcgagcattctctcttgaaacttggagagatcctggccaatctcagcaacccgcagctccggagtcaggccgagcagtgtggcaccctcattaggagcatccccacgatgctgtctgtgcatgcggagcagatgcacaagaccggcttccccactgtccacgccgtgatcctgctcgagggcaccatgaacctgacaggcgagacgcagtccctggtggagcagctgacgatggtgaagcgcatgcagcatatccccaccccactttttgtcctggagatctggaaagcttgcttcgtggggctcattgagtctcccgagggtacggaggagctcaagtggacagctttcactttcctcaagattccacaggttttggtgaagttgaagaagtactctcatggagacaaggacttcactgaggatgtcaactgtgcttttgagttcctgctgaagctcacccccttgttggacaaagctgaccagcgctgcaactgtgactgtacaaacttcctgctccaagaatgtggcaagcaggggcttctgtctgaggccagcgtcaacaaccttatggctaagcgcaaagcggaccgagagcacgcaccccagcagaaatcgggagagaatgccaacatccagcccaacatccagctgatcctccgggcggagcccactgtcacaaacatcctcaagacgatggatgcagaccactctaagtcaccggagggactgctgggagtcctgggccacatgctgtccgggaagagtctggacttgctgctggctgccgccgccgccactggaaagctgaaatccttcgcccggaaattcatcaatttgaatgaattcacaacctatggcagcgaagaaagcaccaaaccggcctccgtccgggccctgctgtttgacatctccttcctcatgctgtgccatgtggcccagacctatggttcagaggtgattctgtccgagtcgcgcacaggagctgaggtgcccttcttcgagacctggatgcagacctgcatgcctgaggagggcaagatcctgaaccctgaccacccctgcttccgccccgactccaccaaagtggagtccctggtggccctgctcaacaactcctcggagatgaagctagtgcagatgaagtggcatgaggcctgtctcagcatctcagccgccatcttggaaatcctcaatgcctgggagaatggggtcctggccttcgagtccatccagaaaatcactgataacatcaaagggaaggtatgcagtctggcggtgtgtgctgtggcttggcttgtggcccacgtccggatgctggggctggatgagcgtgagaagtcgctgcagatgatccgccagctggcagggccactgtttagtgagaacaccctgcagttctacaatgagagggtggtgatcatgaactcgatcctggagcgcatgtgtgccgacgtgctgcagcagacagccacgcagatcaagtttccctccaccggggtggacacaatgccctactggaacctgctgccccccaagcggcccatcaaagaggtgctgacggacatttttgccaaggtgctggagaagggctgggtggacagccgctccatccacatctttgacaccctgctgcacatgggcggcgtctactggttctgcaacaacctgattaaggagctgctgaaggagacgcggaaggagcacacgctgcgggcagtggagctgctctactccatcttctgcctggacatgcagcaagtgaccctggtcctgctgggccacatcctacctggcctgctcactgactcctccaagtggcacagcctcatggaccccccgggcactgctcttgccaagctggccgtgtggtgtgccctcagttcctactcctcccacaagggacaggcgtccacccgccagaagaagagacaccgcgaagacattgaggattatatcagcctcttccccctggacgatgtgcagccttcgaagttgatgcgactgctgagctctaatgaggacgatgccaacatcctttcgagccccacagaccgatccatgagcagctccctctcagcctctcagctccacacggtcaacatgcgggaccctctgaaccgagtcctggccaacctgttcctgctcatctcctccatcctggggtctcgcaccgctggcccccacacccagttcgtgcagtggttcatggaggagtgtgtggactgcctggagcagggtggccgtggcagcgtcctgcagttcatgcccttcaccaccgtgtcggaactggtgaaggtgtcagccatgtccagccccaaggtggttctggccatcacggacctcagcctgcccctgggccgccaggtggctgctaaagccattgctgcactctgaggggcttggcatggccgcagtgggggctggggactggcgcagccccaggcgcctccaagggaagcagtgaggaaagatgaggcatcgtgcctcacatccgctccacatggtgcaagagcctctagcggcttccagttccccgctcctgactcctgacctccaggatgtctcccggtttcttctttcaaaatttcctctccatctgctggcacctgaggagagtgagcagcctggaccacaagcccagtggtcacccctgtgtgcgcccgccccagcccaggagtagtcttacctctgaggaactttctagatgcaaagtgtgtatgtgtgtgtgtgtgtgtgtgtgtgtgtgtttgtgtgtattttgtaatatgtgagggaaatctaccttcgttcatgtataaataaagctcctcgtggctccctt

SEQ ID NO: 275431 - DNA, 3321 bp, Artificial Sequence
  derived and/or modified sequence
aagtgccaaaatggcgatgcctaccacctagaactggattgtgcgctccatttctttcacctcaaagctggccgccaccgctgccacctgctcagagtgaaataatgaaggtggtcaacctgaagcaagccattttgcaagcctggaaggagcgctggagtgactaccaatgggcaatcaacatgaagaaattctttcctaaaggagccacctgggatattctcaacctggcagatgcgttactagagcaggccatgattggaccatcccccaatcctctcatcttgtcctacctgaagtatgccattagttcccagatggtgtcctactcttctgtcctcacagccatcatgtgccttcagcgcctggagaaaaccctcagcagcaccaagaaccgggccctgctgcacatcgccaaactagaggaggcctcattgcacacatcccagggacttgggcagggtggcacccgagccaatcaaccaacagcttcttggactgccatcgagcattctctcttgaaacttggagagatcctggccaatctcagcaacccgcagctccggagtcaggccgagcagtgtggcaccctcattaggagcatccccacgatgctgtctgtgcatgcggagcagatgcacaagaccggcttccccactgtccacgccgtgatcctgctcgagggcaccatgaacctgacaggcgagacgcagtccctggtggagcagctgacgatggtgaagcgcatgcagcatatccccaccccactttttgtcctggagatctggaaagcttgcttcgtggggctcattgagtctcccgagggtacggaggagctcaagtggacagctttcactttcctcaagattccacaggttttggtgaagttgaagaagtactctcatggagacaaggacttcactgaggatgtcaactgtgcttttgagttcctgctgaagctcacccccttgttggacaaagctgaccagcgctgcaactgtgactgtacaaacttcctgctccaagaatgtggcaagcaggggcttctgtctgaggccagcgtcaacaaccttatggctaagcgcaaagcggaccgagagcacgcaccccagcagaaatcgggagagaatgccaacatccagcccaacatccagctgatcctccgggcggagcccactgtcacaaacatcctcaagacgatggatgcagaccactctaagtcaccggagggactgctgggagtcctgggccacatgctgtccgggaagagtctggacttgctgctggctgccgccgccgccactggaaagctgaaatccttcgcccggaaattcatcaatttgaatgaattcacaacctatggcagcgaagaaagcaccaaaccggcctccgtccgggccctgctgtttgacatctccttcctcatgctgtgccatgtggcccagacctatggttcagaggtgattctgtccgagtcgcgcacaggagctgaggtgcccttcttcgagacctggatgcagacctgcatgcctgaggagggcaagatcctgaaccctgaccacccctgcttccgccccgactccaccaaagtggagtccctggtggccctgctcaacaactcctcggagatgaagctagtgcagatgaagtggcatgaggcctgtctcagcatctcagccgccatcttggaaatcctcaatgcctgggagaatggggtcctggccttcgagtccatccagaaaatcactgataacatcaaagggaaggtatgcagtctggcggtgtgtgctgtggcttggcttgtggcccacgtccggatgctggggctggatgagcgtgagaagtcgctgcagatgatccgccagctggcagggccactgtttagtgagaacaccctgcagttctacaatgagagggtggtgatcatgaactcgatcctggagcgcatgtgtgccgacgtgctgcagcagacagccacgcagatcaagtttccctccaccggggtggacacaatgccctactggaacctgctgccccccaagcggcccatcaaagaggtgctgacggacatttttgccaaggtgctggagaagggctgggtggacagccgctccatccacatctttgacaccctgctgcacatgggcggcgtctactggttctgcaacaacctgattaaggagctgctgaaggagacgcggaaggagcacacgctgcgggcagtggagctgctctactccatcttctgcctggacatgcagcaagtgaccctggtcctgctgggccacatcctacctggcctgctcactgactcctccaagtggcacagcctcatggaccccccgggcactgctcttgccaagctggccgtgtggtgtgccctcagttcctactcctcccacaagggacaggcgtccacccgccagaagaagagacaccgcgaagacattgaggattatatcagcctcttccccctggacgatgtgcagccttcgaagttgatgcgactgctgagctctaatgaggacgatgccaacatcctttcgagccccacagaccgatccatgagcagctccctctcagcctctcagctccacacggtcaacatgcgggaccctctgaaccgagtcctggccaacctgttcctgctcatctcctccatcctggggtctcgcaccgctggcccccacacccagttcgtgcagtggttcatggaggagtgtgtggactgcctggagcagggtggccgtggcagcgtcctgcagttcatgcccttcaccaccgtgtcggaactggtgaaggtgtcagccatgtccagccccaaggtggttctggccatcacggacctcagcctgcccctgggccgccaggtggctgctaaagccattgctgcactctgaggggcttggcatggccgcagtgggggctggggactggcgcagccccaggcgcctccaagggaagcagtgaggaaagatgaggcatcgtgcctcacatccgctccacatggtgcaagagcctctagcggcttccagttccccgctcctgactcctgacctccaggatgtctcccggtttcttctttcaaaatttcctctccatctgctggcacctgaggagagtgagcagcctggaccacaagcccagtggtcacccctgtgtgcgcccgccccagcccaggagtagtcttacctctgaggaactttctagatgcaaagtgtgtatgtgtgtgtgtgtgtgtgtgtgtgtgtgtttgtgtgtattttgtaatatgtgagggaaatctaccttcgttcatgtataaataaagctcctcgtggc

SEQ ID NO: 275432 - DNA, 1047 bp, Artificial Sequence
  derived and/or modified sequence
aagtgccaaaatggcgatgcctaccacctagaactggattgtgcgctccatttctttcacctcaaagctggccgccaccgctgccacctgctcagagtgaaataatgaaggtggtcaacctgaagcaagccattttgcaagcctggaaggagcgctggagtgactaccaatgggcaatcaacatgaagaaattctttcctaaaggagccacctgggatattctcaacctggcagatgcgttactagagcaggccatgattggaccatcccccaatcctctcatcttgtcctacctgaagtatgccattagttcccagatggtgtcctactcttctgtcctcacagccatcagtaagtttgatgacttttctcgggacctgtgtgtccaggcattgctggacatcatggacatgttttgtgaccgtctgagctgtcacggcaaagcagaggaatgcatcggactgtgccgagcccttcttagcgccctccacttcatgcccttcaccaccgtgtcggaactggtgaaggtgtcagccatgtccagccccaaggtggttctggccatcacggacctcagcctgcccctgggccgccaggtggctgctaaagccattgctgcactctgaggggcttggcatggccgcagtgggggctggggactggcgcagccccaggcgcctccaagggaagcagtgaggaaagatgaggcatcgtgcctcacatccgctccacatggtgcaagagcctctagcggcttccagttccccgctcctgactcctgacctccaggatgtctcccggtttcttctttcaaaatttcctctccatctgctggcacctgaggagagtgagcagcctggaccacaagcccagtggtcacccctgtgtgcgcccgccccagcccaggagtagtcttacctctgaggaactttctagatgcaaagtgtgtatgtgtgtgtgtgtgtgtgtgtgtgtgtgtttgtgtgtattttgtaatatgtgagggaaatctaccttcgttcatgtataaataaagctcctcgtggc

SEQ ID NO: 275433 - DNA, 1524 bp, Artificial Sequence
  derived and/or modified sequence
aagtgccaaaatggcgatgcctaccacctagaactggattgtgcgctccatttctttcacctcaaagctggccgccaccgctgccacctgctcagagtgaaataatgaaggtggtcaacctgaagcaagccattttgcaagcctggaaggagcgctggagtgactaccaatgggcaatcaacatgaagaaattctttcctaaaggagccacctgggatattctcaacctggcagatgcgttactagagcaggccatgattggaccatcccccaatcctctcatcttgtcctacctgaagtatgccattagttcccagatggtgtcctactcttctgtcctcacagccatcagtaagtttgatgacttttctcgggacctgtgtgtccaggcattgctggacatcatggacatgttttgtgaccgtctgagctgtcacggcaaagcagaggaatgcatcggactgtgccgagcccttcttagcgccctccactggctgctgcgctgcacggcagcctctgcagagcggctgcgggaggggctggaggccggcactccagccgctggggagaagcagcttgccatgtgccttcagcgcctggagaaaaccctcagcagcaccaagaaccgggccctgctgcacatcgccaaactagaggaggcctcttcttggactgccatcgagcattctctcttgaaacttggagagatcctggccaatctcagcaacccgcagctccggagtcaggccgagcagtgtggcaccctcattaggagcatccccacgatgctgtctgtgcatgcggagcagatgcacaagaccggcttccccactgtccacgccgtgatcctgctcgagggcaccatgaacctgacaggcgagacgcagtccctggtggagcagctgacgatggtgaagcgcatgcagcatatccccaccccactttttggccgtggcagcgtcctgcagttcatgcccttcaccaccgtgtcggaactggtgaaggtgtcagccatgtccagccccaaggtggttctggccatcacggacctcagcctgcccctgggccgccaggtggctgctaaagccattgctgcactctgaggggcttggcatggccgcagtgggggctggggactggcgcagccccaggcgcctccaagggaagcagtgaggaaagatgaggcatcgtgcctcacatccgctccacatggtgcaagagcctctagcggcttccagttccccgctcctgactcctgacctccaggatgtctcccggtttcttctttcaaaatttcctctccatctgctggcacctgaggagagtgagcagcctggaccacaagcccagtggtcacccctgtgtgcgcccgccccagcccaggagtagtcttacctctgaggaactttctagatgcaaagtgtgtatgtgtgtgtgtgtgtgtgtgtgtgtgtgtttgtgtgtattttgtaatatgtgagggaaatctaccttcgttcatgtataaataaagctcctcgtggc

SEQ ID NO: 275434 - DNA, 1094 bp, Artificial Sequence
  derived and/or modified sequence
gggcttgcctcctcctgcgtcctgctagctatttttaaatgtgagctctattttgttccaagatcattaggatatttagccccttcaccaatttccacaagaaaattaattcattccaatattcagaggttccttttttatttcttagccagtgattaaggaatccattatgtaacccagagccattctctctactcttttcttaatttttccttctaaaatggggagttccattttcttaatttttcattctaaattggggagttccaaattttttttctctctctctcttaggcaaagcagttcatgtccttcctggaagttttagtatctgccagtactgatgcccagtttgcattttaaaagctccttctagctgctagatgctgaaaagactgaaaggaggcaaggggataggcaaagggaccagtatcaggttattttaggagatgatggtggcttgaaccaggtagtggcaaagctcgtaaagacaagtgcatgaataggaatattttggaggagatgctgcagtacttgcttatagattggattgtaggtgaccagtttgaaattcagctaaaccagcagctatggtccctcatccccaacaacgatgtgagaaggcttgtttctcatgttatccggaccttgaagacggactgcactgagacccatttgcaactggcctgtgccaagctcatctctaggacaggcctcctaatgaagcttctcagtgagcagcaagaattgagaactgtatcaatgacagcatggaagcccagaatgaacagaaagagcagaagtcgaatgaggtcctgatatggaagaaactactgatgtcagctgaaggaccacactgatgcagctgtcctgaaggactccccgaggagctacctcatcaaaaaatacagtttccactttgcgatgattttatcccccttgccccaaccgaccagcaaccccaattttccagcccctcactctccacaatcctcttaaagccccaggccagaacttcttgggagacagatttgagggtttccttccacttccttgctgggtggcctgtgatcattaaactctttctttgctgc

SEQ ID NO: 275435 - protein, 454 aa, Artificial Sequence
  derived and/or modified sequence
MEDRRAEKSCEQACESLKRQDYEMALKHCTEALLSLGQYSMADFTGPCPLEIERIKIESLLYRIASFLQLKNYVQADEDCRHVLGEGLAKGEDAFRAVLCCMQLKGKLQPVSTILAKSLTGESLNGMVTKDLTRLKTLLSETETATSNALSGYHVEDLDEGSCNGWHFRPPPRGITSSEEYTLCKRFLEQGICRYGAQCTSAHSQEELAEWQKRYASRLIKLKQQNENKQLSGSYMETLIEKWMNSLSPEKVLSECIEGVKVEHNPDLSVTVSTKKSHQTWTFALTCKPARMLYRVALLYDAHRPHFSIIAISAGDSTTQVSQEVPENCQEWIGGKMAQNGLDHYVYKVGIAFNTEIFGTFRQTIVFDFGLEPVLMQRVMIDAASTEDLEYLMHAKQQLVTTAKRWDSSSKTIIDFEPNETTDLEKSLLIRYQIPLSEKKKKKKKKKKKKKKKK

SEQ ID NO: 275436 - DNA, 1365 bp, Artificial Sequence
  derived and/or modified sequence
atggaggaccggcgggcggaaaagtcatgcgagcaggcgtgcgagtctctgaagcgtcaggattatgagatggcgctgaagcactgtaccgaagctttgctttctctcgggcagtattccatggctgattttactggcccatgccctctggaaatcgagcgcataaaaattgaaagtctcctctaccgtatcgcaagcttcttgcagcttaaaaactacgtgcaggcagatgaggattgtcggcacgtcctgggcgaggggctggctaagggagaggatgcttttcgcgcagttctctgttgcatgcagctgaaggggaaactccagcccgtcagcaccatccttgccaagtctctgacaggagaaagccttaacggcatggttacgaaagacctaacacggcttaagacactactgtctgaaacagaaaccgccacctccaatgcactaagtgggtaccatgttgaggatttagacgaaggttcatgtaatgggtggcacttccggcctcccccaaggggcatcacgtcaagcgaggagtataccctgtgtaagcgctttcttgagcaaggcatctgtcgctacggggcccagtgcaccagtgcacattcacaagaagaattagctgaatggcaaaagcgatacgcatctagattgattaagctgaaacagcagaacgagaacaagcaactgtccgggtcctacatggaaactctaatcgaaaagtggatgaatagcctttctcccgagaaggtgttgagcgagtgcatcgaaggggtgaaagtagagcataacccagacctatctgttaccgtgtctacaaagaagtcccaccagacatggaccttcgccctgacctgtaagcccgcgagaatgctttatagggtcgccctgctatatgacgcccaccggccacacttctccattatcgccatcagtgccggggacagtacaactcaggtatcccaggaggtgccagagaactgccaggagtggatcgggggcaaaatggcacagaatggacttgaccactatgtctacaaagtgggcatagcattcaacacagaaatttttggtacttttcgacagactattgtctttgacttcgggcttgagcccgtgttgatgcagcgcgtgatgatcgacgcggcctctacagaagatttagagtacctgatgcatgctaaacaacaactggtcaccacagcaaaaaggtgggactcttcatctaagaccataatcgattttgagcctaacgagaccacagatctggaaaaatcacttctcattcgctaccagatacctttatccgagaaaaaaaaaaagaaaaaaaagaagaagaagaagaagaaaaaaaaaaaatag

SEQ ID NO: 275437 - DNA, 1529 bp, Artificial Sequence
  derived and/or modified sequence
caagtggatccaagatggcgtagaaagtaatgacaggatttggatgaagtaatggatcactaatgaactacagtgctggtgagatgtgtaagaaattataaagagctctgatgggctatttgggtgatacccagtgcagtgaactgcaggatttttgtccctgagtcatggaagacagaagagctgaaaagtcatgtgaacaagcatgtgaatcacttaagaggcaggactatgaaatggccctcaagcactgcacagaggcccttctttctcttggccagtactccatggcagacttcacagggccttgtccattggaaatagaacgcatcaaaatcgagagtcttctctacagaattgcctcatttttgcaactgaaaaattatgtgcaagctgatgaagattgtagacatgtgctgggagaaggactggccaagggagaagatgcctttcgggcagtgctttgctgcatgcagctgaaagggaagctccaacctgtatccaccattcttgccaagtcactcacaggagagtccctgaatgggatggtaacaaaggatttgacaagactaaaaacacttctctcagaaacagagacagcaactagtaacgccctctctggatatcacgtggaagacttagatgaggggtcttgtaatggttggcatttccgcccaccacctaggggaatcacaagcagcgaggaatatactttgtgtaaaagatttttagaacaaggaatctgtaggtatggtgcccagtgtacttcagcacattcccaggaagaactagcagaatggcagaaaagatatgcttcacggctgataaaattgaaacagcaaaatgagaataaacagctctcaggcagttacatggaaaccttgatagaaaagtggatgaattcattgtctcctgagaaagtgcttagtgaatgtatagaaggagtaaaggtagagcacaatcctgacctgtcagttactgtcagcaccaaaaaatcccaccagacatggacctttgctctcacttgtaagcctgcaagaatgctgtatcgtgtagcattgctttatgatgctcatcgtcctcattttagtatcattgcaatatctgccggagatagtactacccaggtatcacaagaagtcccagaaaactgtcaagaatggataggaggaaagatggcccaaaatggattagatcattacgtgtataaagtcgggatagcatttaacacagaaatatttggaacttttcgccaaaccatagttttcgactttggattggaaccagtactcatgcaaagagtaatgattgatgcagcttctacagaagatctcgaatacctgatgcatgcaaaacagcagctagtaaccacagctaaacgttgggattcttcctctaagactattatagattttgaacctaatgaaactactgatttggagaagagccttcttatcagataccaaattcccctctctgaaaaaaaaaaaaaaaaaaaaaaaaaaaaaaaaaaaaaaaaaaaaaagaaa

SEQ ID NO: 275438 - DNA, 1365 bp, Artificial Sequence
  derived and/or modified sequence
atggaggaccggcgggcagagaagagctgtgagcaggcctgtgagagcctgaagaggcaggactatgagatggccctgaagcactgcacagaggccctgctgagcctgggccagtacagcatggctgacttcaccggcccctgccccctggagattgaaagaatcaagattgagagcctgctgtaccgcatcgccagcttcctgcagctgaagaactacgtgcaggctgatgaggactgccgccacgtgctgggggagggcctggccaagggggaggatgccttccgggctgtgctgtgctgcatgcagctgaagggcaagctgcagcctgtgtccaccatcctggccaagagcctgaccggggagagcctgaatggcatggtgaccaaggacctgacccggctgaagaccctgctgtctgaaacagaaacagccaccagcaatgccctgagcggctaccacgtggaggacctggatgagggcagctgcaatggctggcacttccggcccccaccccggggcatcaccagcagcgaggagtacaccctgtgcaagcgcttcctggagcagggcatctgccgctatggagcccagtgcaccagcgcccacagccaggaggagctggccgagtggcagaagagatatgccagccgcctcatcaagctgaagcagcagaatgaaaacaagcagctgagcggcagctacatggagaccctcatcgagaagtggatgaacagcctgagccctgagaaggtgctgtctgaatgtattgaaggagtgaaggtggagcacaacccagacctgtctgtgacagtgtccaccaagaagagccaccagacctggacctttgccctgacctgcaagccagccaggatgctgtacagagtggccctgctgtatgatgcccaccggccccacttcagcatcatcgccatctctgctggggacagcaccacccaggtgtcccaggaggtgcctgagaactgccaggagtggattggaggcaagatggcccagaatggcctggaccactacgtgtacaaggtgggcatcgccttcaacacagagatcttcggcaccttccggcagaccatcgtgtttgattttggcctggagcctgtgctgatgcagagggtgatgattgatgctgccagcacagaggacctggagtacctgatgcacgccaagcagcagctggtgaccacagccaagcgctgggacagcagcagcaagaccatcatcgactttgagcccaatgagaccacagacctggagaagagcctgctgatccgctaccagatccccctgtctgagaagaagaagaagaagaagaagaagaagaagaagaagaagaagaagaagtag

SEQ ID NO: 275439 - DNA, 1365 bp, Artificial Sequence
  derived and/or modified sequence
atggaggaccggcgggccgagaagagctgcgagcaggcctgcgagtccttaaagcgtcaggactacgagatggcactcaagcactgcactgaggcattactgtcactgggccagtactccatggccgacttcaccgggccatgccctctggagattgagcgcatcaaaattgaaagcttgctctatcgcatagcgagcttcttgcagttaaaaaactatgtgcaggccgatgaggattgtcggcacgtcctgggcgagggcctggcgaagggagaagacgcattccgggccgtcctgtgctgcatgcaattgaaaggaaagctgcagcccgtttctacaatattagccaaatcactcaccggcgaatcacttaacggaatggtgaccaaagatctgacacggcttaaaactctgctctctgaaacagaaactgcgacatctaacgctctttctggttatcacgtggaggatttggacgaggggtcttgtaatggatggcacttcagacctcctccacgagggatcacttccagcgaggaatacactctatgtaagaggtttctggagcaaggaatctgtcgatatggtgcccagtgtacatctgcacactcacaggaagaactcgccgagtggcagaaaagatatgcctccaggttgattaagctcaagcaacagaacgagaataagcagttatctggttcctatatggaaactctcattgagaagtggatgaatagcttgtcccccgagaaagtgctctcagagtgtatagagggcgttaaggtggagcacaaccccgacctgtcagtgactgtatcaaccaagaagtcccaccagacatggactttcgccctcacatgcaaaccagcccggatgttatacagagtggcacttctgtatgacgcacataggccccacttttccattatcgcaatttccgccggggattctacgactcaggtgagccaagaagtgcccgaaaattgtcaggaatggattggcggtaagatggcccagaacggactggatcactatgtttacaaagtcgggattgcatttaacacagagatttttggtacttttagacaaaccatcgtctttgacttcggcctggagcccgtgcttatgcaacgcgttatgattgacgctgccagcaccgaagacctggaatacttgatgcatgccaagcagcagctggtgaccaccgcaaagcggtgggattcctccagtaaaactatcatcgattttgagcctaatgaaactacggatcttgagaagagcctgctcattcgatatcagatccctcttagcgaaaagaaaaaaaaaaaaaaaaaaaaaaagaagaaaaaaaaaaaaaagaaatag

SEQ ID NO: 275440 - DNA, 1365 bp, Artificial Sequence
  derived and/or modified sequence
atggaggacaggcgggctgagaaaagttgtgagcaggcctgcgaaagccttaaacgccaggattacgagatggctcttaagcattgcaccgaagccctgctgagcctcggtcaatatagtatggccgatttcacaggcccttgccccctggagatcgagagaataaaaatcgagtccctcctgtatcgtatcgcgagcttcctgcagctgaaaaattatgtgcaggccgacgaggactgtcgccatgtactgggggagggattggccaaaggggaggatgcgtttagagcggtgctttgctgcatgcagctaaaggggaagttgcagcccgtgtctacgatcctggcaaaatcgcttacgggcgagagcctgaatggcatggtcaccaaggacttgacacggctgaagactttgctgtctgagacggaaactgcaacatcaaatgctctgagcggataccacgtggaagatctggacgagggaagttgcaatggttggcacttcaggccccctcctaggggaatcacctctagcgaggagtacaccctctgcaagcgcttcttggagcaggggatttgtcgctatggggctcaatgcactagcgcgcattctcaggaagagctggccgagtggcagaaaagatatgcatctcggttgatcaagctgaagcagcagaacgaaaacaaacaactcagcggcagctatatggagacgctcattgagaagtggatgaattctctgtcaccagaaaaagttctgtctgagtgcattgaaggcgtgaaagttgaacacaatccggatctttccgtcaccgtctctacaaagaagagtcaccagacatggaccttcgccctgacatgtaagcccgctcggatgttgtatagagttgcgctgttgtacgatgctcacagacctcatttctccatcatagctatctcagcgggtgactccaccacgcaggtctctcaggaagtgcctgaaaattgccaggagtggattggcggtaagatggcccaaaacggtttggaccactatgtctacaaagtaggcatagcattcaacaccgagatcttcggcacctttcggcagactatcgttttcgatttcggcctggagcccgtgctgatgcaacgagtgatgatagacgcggctagtacagaagacctcgaatacctaatgcacgccaagcagcagcttgtgaccactgcgaagagatgggattcaagcagtaagactattatcgatttcgagccaaatgagacaaccgatctagagaagtctctcctcatccggtatcagatcccactctcggaaaagaagaaaaagaagaagaagaaaaagaagaagaagaaaaagaaaaagtag

SEQ ID NO: 275441 - DNA, 1365 bp, Artificial Sequence
  derived and/or modified sequence
atggaggacagaagagccgagaagagctgcgagcaggcctgcgagagcctgaagagacaggactacgagatggccctgaagcactgcaccgaggccctgctgagcctgggccagtacagcatggccgacttcaccggcccctgccccctggagatcgagagaatcaagatcgagagcctgctgtacagaatcgccagcttcctgcagctgaagaactacgtgcaggccgacgaggactgcagacacgtgctgggcgagggcctggccaagggcgaggacgccttcagagccgtgctgtgctgcatgcagctgaagggcaagctgcagcccgtgagcaccatcctggccaagagcctgaccggcgagagcctgaacggcatggtgaccaaggacctgaccagactgaagaccctgctgagcgagaccgagaccgccaccagcaacgccctgagcggctaccacgtggaggacctggacgagggcagctgcaacggctggcacttcagacccccccccagaggcatcaccagcagcgaggagtacaccctgtgcaagagattcctggagcagggcatctgcagatacggcgcccagtgcaccagcgcccacagccaggaggagctggccgagtggcagaagagatacgccagcagactgatcaagctgaagcagcagaacgagaacaagcagctgagcggcagctacatggagaccctgatcgagaagtggatgaacagcctgagccccgagaaggtgctgagcgagtgcatcgagggcgtgaaggtggagcacaaccccgacctgagcgtgaccgtgagcaccaagaagagccaccagacctggaccttcgccctgacctgcaagcccgccagaatgctgtacagagtggccctgctgtacgacgcccacagaccccacttcagcatcatcgccatcagcgccggcgacagcaccacccaggtgagccaggaggtgcccgagaactgccaggagtggatcggcggcaagatggcccagaacggcctggaccactacgtgtacaaggtgggcatcgccttcaacaccgagatcttcggcaccttcagacagaccatcgtgttcgacttcggcctggagcccgtgctgatgcagagagtgatgatcgacgccgccagcaccgaggacctggagtacctgatgcacgccaagcagcagctggtgaccaccgccaagagatgggacagcagcagcaagaccatcatcgacttcgagcccaacgagaccaccgacctggagaagagcctgctgatcagataccagatccccctgagcgagaagaagaagaagaagaagaagaagaagaagaagaagaagaagaagaagtag

SEQ ID NO: 275442 - protein, 389 aa, Artificial Sequence
  derived and/or modified sequence
MSLRIDVDTNFPECVVDAGKVTLGTQQRQEMDPRLREKQNEIILRAVCALLNSGGGIIKAEIENKGYNYERHGVGLDVPPIFRSHLDKMQKENHFLIFVKSWNTEAGVPLATLCSNLYHRERTSTDVMDSQEALAFLKCRTQTPTNINVSNSLGPQAAQGSVQYEGNINVSAAALFDRKRLQYLEKLNLPESTHVEFVMFSTDVSHCVKDRLPKCVSAFANTEGGYVFFGVHDETCQVIGCEKEKIDLTSLRASIDGCIKKLPVHHFCTQRPEIKYVLNFLEVHDKGALRGYVCAIKVEKFCCAVFAKVPSSWQVKDNRVRQLPTREWTAWMMEADPDLSRCPEMVLQLSLSSATPRSKPVCIHKNSECLKEQQKRYFPVSARKTSASQ

SEQ ID NO: 275443 - DNA, 1170 bp, Artificial Sequence
  derived and/or modified sequence
atgagcctgagaatcgacgtggacaccaacttccccgagtgcgtggtggacgccggcaaggtgaccctgggcacccagcagagacaggagatggaccccagactgagagagaagcagaacgagatcatcctgagagccgtgtgcgccctgctgaacagcggcggcggcatcatcaaggccgagatcgagaacaagggctacaactacgagagacacggcgtgggcctggacgtgccccccatcttcagaagccacctggacaagatgcagaaggagaaccacttcctgatcttcgtgaagagctggaacaccgaggccggcgtgcccctggccaccctgtgcagcaacctgtaccacagagagagaaccagcaccgacgtgatggacagccaggaggccctggccttcctgaagtgcagaacccagacccccaccaacatcaacgtgagcaacagcctgggcccccaggccgcccagggcagcgtgcagtacgagggcaacatcaacgtgagcgccgccgccctgttcgacagaaagagactgcagtacctggagaagctgaacctgcccgagagcacccacgtggagttcgtgatgttcagcaccgacgtgagccactgcgtgaaggacagactgcccaagtgcgtgagcgccttcgccaacaccgagggcggctacgtgttcttcggcgtgcacgacgagacctgccaggtgatcggctgcgagaaggagaagatcgacctgaccagcctgagagccagcatcgacggctgcatcaagaagctgcccgtgcaccacttctgcacccagagacccgagatcaagtacgtgctgaacttcctggaggtgcacgacaagggcgccctgagaggctacgtgtgcgccatcaaggtggagaagttctgctgcgccgtgttcgccaaggtgcccagcagctggcaggtgaaggacaacagagtgagacagctgcccaccagagagtggaccgcctggatgatggaggccgaccccgacctgagcagatgccccgagatggtgctgcagctgagcctgagcagcgccacccccagaagcaagcccgtgtgcatccacaagaacagcgagtgcctgaaggagcagcagaagagatacttccccgtgagcgccagaaagaccagcgccagccagtag

SEQ ID NO: 275444 - DNA, 1170 bp, Artificial Sequence
  derived and/or modified sequence
atgtccctcaggatcgacgttgacacaaacttcccggaatgtgtcgtggacgccggcaaagtgacgttgggcacccagcagcgacaagagatggacccccggcttcgagagaagcagaatgaaattatcctgcgagccgtgtgcgccctgctcaacagcggcggtggcataattaaagcagaaattgagaacaaaggatataattatgagcgtcatggcgtaggcttagacgtgcccccgatctttcgttctcacctcgacaagatgcagaaagaaaatcatttcctcatcttcgtcaagagttggaataccgaggctggggtgccacttgcaacgctctgcagcaatctgtatcaccgggagcggaccagcaccgatgtcatggatagccaggaggccttagcattcctaaagtgccgcacacaaaccccaacgaacataaatgtcagtaattccctgggaccccaggctgcacaagggtctgtacagtacgagggaaacatcaacgtgtctgctgcagccctgttcgaccgcaagcgcctgcagtacctcgagaaattgaacctccccgagtctacgcatgtggagttcgtgatgttttccaccgacgtctctcattgcgtcaaagaccggcttcctaaatgtgtgtcagcctttgccaacactgaaggagggtacgtgttttttggcgtgcatgacgaaacctgtcaggtcataggatgcgagaaagaaaagattgatctgacaagtttgcgcgcttctatagacggatgtataaaaaagctgccggttcaccacttctgtacacagagacctgagataaagtatgttcttaacttccttgaagtgcatgataagggggctctaaggggctatgtgtgtgctatcaaggtggagaaattttgctgtgcagttttcgcaaaagtgccgtcctcctggcaggtcaaagacaacagggttcgtcagttgcccactcgcgagtggaccgcctggatgatggaagcagaccccgacctttcccggtgtcctgaaatggtgctgcagttgtctttgagcagcgcgactcctcgtagcaagcctgtgtgtattcataagaactcggaatgtctcaaagagcagcaaaaacgctatttcccagtgtccgccaggaaaaccagtgcctctcagtag

SEQ ID NO: 275445 - DNA, 1170 bp, Artificial Sequence
  derived and/or modified sequence
atgagcctgagaattgatgtggacaccaacttcccagaatgtgtggtggatgctgggaaggtgaccctgggcacccagcagaggcaggagatggacccccggctgcgggagaagcagaatgagatcatcctgcgggctgtgtgtgccctgctgaacagcggcggcggcatcatcaaggccgagattgaaaataaaggctacaactatgaaagacatggagtgggcctggatgtgccccccatcttccgcagccacctggacaagatgcagaaggagaaccacttcctgatctttgtgaagtcctggaacacagaggccggcgtgcccctggccaccctgtgcagcaacctgtaccaccgggagaggaccagcacagatgtgatggacagccaggaggccctggccttcctgaagtgcaggacccagacccccaccaacatcaacgtgagcaacagcctgggcccccaggccgcccagggctctgtgcagtatgagggcaacatcaacgtgtctgctgctgccctgtttgacaggaagaggctgcagtacctggagaagctgaacctgcctgagagcacccacgtggagtttgtgatgttcagcacagatgtgagccactgtgtgaaggaccggctgcccaagtgtgtgtctgcctttgccaacacagagggcggctacgtgttctttggagtgcatgatgagacctgccaggtgattggctgtgagaaggagaagattgacctgaccagcctgcgggccagcattgatggctgcatcaagaagctgcctgtgcaccacttctgcacccagaggcctgagatcaagtatgtgctgaacttcctggaggtgcatgacaagggggccctgcggggctacgtgtgtgccatcaaggtggagaagttctgctgtgctgtgtttgccaaggtgcccagctcctggcaggtgaaggacaacagagtgcggcagctgcccacccgggagtggacagcctggatgatggaggccgaccctgacctgagccgctgcccagagatggtgctgcagctgagcctgagcagcgccacccccaggagcaagcctgtgtgcatccacaagaacagcgagtgcctgaaggagcagcagaagcgctacttccctgtgtctgccaggaagaccagcgccagccagtag

SEQ ID NO: 275446 - DNA, 1170 bp, Artificial Sequence
  derived and/or modified sequence
atgagcctgcggatcgacgtggacaccaacttccccgagtgcgtggtcgacgccggcaaggtgacactcggtactcagcagcggcaagagatggatccccgtctgagagagaagcaaaacgagattattctgagagcagtctgcgccctgttaaactccggtggcggcattatcaaagccgaaattgaaaacaaaggctacaactacgaacgacatggggtaggcctggacgttccccccattttccggagtcatttagacaaaatgcagaaagagaaccactttctgatctttgttaagtcctggaacactgaggcaggtgtaccgttagcgacgttgtgctccaatttgtaccatagagagaggacatcaacggatgttatggactcacaggaggccctggcgttcctcaagtgccggacgcagaccccaacaaatatcaatgtatcaaactctttgggacctcaggcggcacagggatctgtccagtacgagggcaacattaacgtctcagctgccgcacttttcgatcggaaacggctacaatacctggagaagctgaatctcccagaatctacccacgttgaatttgtcatgttttccactgacgtttcacactgtgtgaaagatcggttgccgaagtgcgtctccgccttcgccaacacagaaggtgggtacgttttcttcggtgttcacgacgaaacctgccaggttatcgggtgcgagaaagaaaagattgatctgacatctctaagagcttccattgacggatgtattaagaagttacctgtgcaccatttctgtactcaacggcccgagatcaagtatgttttgaattttctggaggttcacgacaagggagccttgaggggatacgtctgcgccatcaaggtggagaaattctgttgtgccgttttcgcaaaagtaccgtcgtcctggcaggtgaaggataatagagtccgtcagttacccacacgggaatggaccgcgtggatgatggaggcagaccccgatctgagcagatgcccggagatggtgctgcagctctcactatctagcgcaacgcccaggagtaaacccgtttgcatccacaaaaactcagagtgcctgaaagagcaacaaaaacgctattttcccgtgagcgccagaaaaaccagcgctagccagtag

SEQ ID NO: 275447 - DNA, 1170 bp, Artificial Sequence
  derived and/or modified sequence
atgagtctgcgtattgatgtcgacacgaatttccctgagtgtgtggtcgacgccggtaaggtcacgctgggcacccaacagaggcaagagatggaccctcgcctgagagagaagcaaaatgagatcattctgagggcagtgtgcgctctgctcaatagtgggggaggcatcattaaggccgaaattgaaaacaaaggctacaactatgaacggcatggtgtcggtctggatgtgccacctatattcagatctcatctggataaaatgcagaaggagaaccactttttgatctttgttaagtcctggaacactgaagctggggtgcctctggcaacgctttgcagtaacctctatcaccgggagcggacttccaccgatgtgatggactctcaggaggctttggcatttctcaaatgtagaacccaaacacctaccaacatcaatgtatccaatagcctgggtccacaagccgctcagggtagcgttcaatacgagggcaatattaatgttagcgcagccgctctgtttgacaggaaacgtctgcagtatctcgagaaactgaatttacctgaatctacacacgtggaattcgtgatgttttccacagatgtaagtcattgcgttaaggacagactgcccaaatgcgtatccgcatttgccaacacggagggcggatatgtattctttggcgtgcatgatgagacttgccaggttattggctgcgaaaaggaaaaaatcgacctgacaagtctgcgggcatccatcgacggctgtatcaaaaaactgcctgtgcaccatttctgcacccagagacccgagatcaagtacgtgcttaatttcctagaagtccatgataagggcgcattacggggatacgtctgcgccatcaaggtcgagaaattctgttgtgcagtttttgccaaggtccccagctcctggcaggtgaaggataatcgagtccggcagctgcccactcgcgagtggacggcttggatgatggaagccgatcctgacctcagcagatgcccagagatggttttgcaactaagcttatcgagtgcaacccctcgatctaagccggtatgtattcataaaaacagtgaatgcctgaaggaacagcagaagcgttatttccctgtgagcgcccgtaaaacctcagctagtcagtag

SEQ ID NO: 275448 - DNA, 2540 bp, Artificial Sequence
  derived and/or modified sequence
tctctgctctggacttgggaggctccgttgcctgctcccggagggagacgcgctgccgaggagaacccagcgggagaacatttcaggataggaataggccaagtgctgagaagatgagtcttaggattgatgtggatacaaactttcctgagtgtgttgtagatgcaggaaaagtcacccttgggactcagcagaggcaggagatggaccctcgcctgcgggagaaacagaatgaaatcatcctgcgagcagtatgtgctctgctgaattctggtgggggcataatcaaggctgagattgagaacaaaggctacaattatgaacgtcatggagtaggattggatgtgcctccaattttcagaagccatttagataagatgcagaaggaaaaccactttttgatttttgtgaaatcatggaacacagaggctggtgtgccacttgctaccttatgctccaatttgtaccacagagagagaacatccaccgatgtcatggattctcaggaagctctggcattcctcaaatgcaggactcagactccaacgaatattaatgtttccaattcattaggtccacaggcagctcagggtagtgtacaatatgaaggtaacataaatgtgtcagctgctgctttatttgatagaaagcggcttcagtatctggaaaaactcaaccttcctgagtccacacatgttgaatttgtaatgttctcgacagacgtgtcacactgtgttaaagacagacttccgaagtgtgtttctgcatttgcaaatactgaaggaggatatgtattttttggtgtgcatgatgagacttgtcaagtgattggatgtgaaaaagagaaaatagaccttacgagcttgagggcttctattgatggctgtattaagaagctacctgtccatcatttctgcacacagaggcctgagataaaatatgtccttaacttccttgaagtgcatgataagggggccctccgtggatatgtctgtgcaatcaaggtggagaaattctgctgtgcggtgtttgccaaagtgcctagttcctggcaggtgaaggacaaccgtgtgagacaattgcccacaagagaatggactgcttggatgatggaagctgacccagacctttccaggtgtcctgagatggttctccagttgagtttgtcatctgccacgccccgcagcaagcctgtgtgcattcataagaattcggaatgtctgaaagagcagcagaaacgctactttccagtttcagcaagaaaaacatctgccagccagtgacccggaaaaccttcatgaaaaacaactttgaacacatccagcacattatcattgatgacgctcagaatttccgtactgaagatggggactggtatgggaaagcaaagttcatcactcagacagcaagggatggcccaggagttctctggatctttctggactactttcagacctatcacttgagttgcagtggcctcccccctccctcagaccagtatccaagagaagagatcaacagagtggtccgcaatgcaggtccaatagctaattacctacaacaagtaatgcaggaagcccgacaaaatcctccacctaacctcccccctgggtccctggtgatgctctatgaacctaaatgggctcaaggtgtcccaggcaacttagagattattgaagacttgaacttggaggagatactgatctatgtagcgaataaatgccgttttctcttgcggaatggttattctccgaaggatattgctgtgcttttcaccaaagcaagtgaagtggaaaaatataaagacaggcttctaacagcaatgaggaagagaaaactgtctcagctccatgaggagtctgatctgttactacagatcggtgatgcgtcggatgttctaaccgatcacattgtgttggacagtgtctgtcgattttcaggcctggaaagaaatatcgtgtttggaatcaatccaggagtagccccaccggctggggcctacaatcttctgctctgtttggcttctagggcaaaaagacatctgtatattctgaaggcttctgtgtgacaggaaacccaagcctaagaaacaattaagtggttctcatctctaattaactgtgaaaccatttaatccaaacatgtaagcacacactcacttattaagtcacatacttttctaggtgctggggattgagaacgaatcgatgtaagattcctcctttagggcagagacagaccactgacaaatacacagatagacaaggaatttcccatggtaaaaagggatatcagtaattagaggaccgtgagactcagagatgtgtgtgtgtgtgtgtgtgtgtgtgtgtgtgtgtgcgcgcgcgcacgtgcacatgtgtgtaggtagatggagggggtgattattttgggtggtcagggaagtgctcagtgagggaagaacttgtcatgagaatctctgagcgtgccaggcagactcggatatttttataaatttttaacatggccacttgcagaagagcttgaatgggacgtgcagc

SEQ ID NO: 275449 - protein, 463 aa, Artificial Sequence
  derived and/or modified sequence
MLFRYAEKITRKYSEMDPKYFILILFCGHLNNTFFSKTETITTEKQSQPTLFTSSMSQVLANSQNTTGNPLGQPTQFSDTFSGQSISPAKVTAGQPTPAVYTSSEKPEAHTSAGQPLAYNTKQPTPIANTSSQQAVFTSARQLPSARTSTTQPPKSFVYTFTQQSSSVQIPSRKQITVHNPSTQPTSTVKNSPRSTPGFILDTTSNKQTPQKNNYNSIAAILIGVLLTSMLVAIIIIVLWKCLRKPVLNDQNWAGRSPFADGETPDICMDNIRENEISTKRTSIISLTPWKPSKSTLLADDLEIKLFESSENIEDSNNPKTEKIKDQVNGTSEDSADGSTVGTAVSSSDDADLPPPPPLLDLEGQESNQSDKPTMTIVSPLPNDSTSLPPSLDCLNQDCGDHKSEIIQSFPPLDSLNLPLPPVDFMKNQEDSNLEIQCQEFSIPPNSDQDLNESLPPPPAELL

SEQ ID NO: 275450 - DNA, 1392 bp, Artificial Sequence
  derived and/or modified sequence
atgctcttccggtacgctgaaaagattacgaggaagtattctgagatggacccaaagtattttatcttgattcttttctgtggccatttgaacaacacatttttctccaaaactgaaaccataacaacggagaagcagtctcagccaaccctgttcacatccagcatgtcccaggtgctggcgaatagtcagaacacgacaggcaaccccctgggccagcctacacagttttcagatactttcagcggccagtctattagcccggccaaagtcaccgcaggacaacctacaccagcagtctacactagtagcgagaagcctgaggcacacacctctgctgggcagcccttggcatataataccaaacagcccactccaattgccaatacaagctctcagcaagcagttttcactagtgcacgtcagttacccagcgcacggacttctaccacccagccacccaagtccttcgtttacacattcacacaacagtcgagttcagtgcaaattccttcgagaaagcagataaccgtgcacaatccctcaactcaacctacttcaaccgtaaaaaactcaccacgatccacgcctggcttcattctcgataccactagcaataaacagactccacagaagaataattacaattccatcgcagccatcttgatcggagtgcttcttaccagcatgctcgtggctatcattataatagtgctctggaaatgcctaagaaaacccgtgcttaatgaccaaaattgggcaggccgctcgcccttcgccgacggcgaaacgcccgacatatgcatggacaatattagagagaacgagatttccaccaagcggactagcatcatcagtctgaccccctggaagccctccaagtccaccctgttggctgatgacctcgagatcaaacttttcgagagctccgaaaatatagaagacagcaacaatcccaaaacagaaaagatcaaagatcaggtgaacggtacgtctgaggactccgccgacggctccacagttggaacagccgtgtccagcagcgacgatgccgatctacctcccccccctcctttgttagatctggagggacaggaatctaatcaatccgacaaaccaacaatgaccatcgtgtctccactcccaaatgatagcacctctctgcctccatccttggactgcctgaaccaggactgtggagatcataaaagcgaaataatccagagtttccctccgttggatagtctgaacttaccattgcccccggtggacttcatgaaaaaccaggaggacagtaatttggagatccagtgccaggaattctccattcccccaaattctgatcaggacctgaacgagagcctcccacctcctcccgctgagttgttgtag

SEQ ID NO: 275451 - DNA, 1392 bp, Artificial Sequence
  derived and/or modified sequence
atgctgttccgctatgcagagaagatcaccaggaagtacagcgagatggaccccaagtacttcatcctgatcctcttctgtggccacctgaacaacaccttcttcagcaagacagagaccatcaccacagagaagcagagccagcccaccctcttcaccagctccatgagccaggtgctggccaacagccagaacaccactggaaaccccctgggccagcccacccagttcagtgacaccttcagcggccagagcatcagccctgccaaggtgacagctggccagcccaccccagctgtgtacaccagcagcgagaagccagaggcccacaccagcgctggccagcccctggcctacaacaccaagcagcccacccccatcgccaacaccagcagccagcaggccgtgttcaccagcgcccggcagctgcccagcgcccggaccagcaccacccagccccccaagagctttgtgtacaccttcacccagcagagcagctctgtgcagatccccagcaggaagcagatcaccgtgcacaaccccagcacccagcccaccagcacagtgaagaacagccccaggagcaccccaggcttcatcctggacaccaccagcaacaagcagaccccccagaagaacaactacaacagcattgctgccatcctgattggagtgctgctgacctccatgctggtggccatcatcatcatcgtgctgtggaagtgcctgaggaagcctgtgctgaatgaccagaactgggccggccgcagcccctttgctgatggagagaccccagacatctgcatggacaacatccgggagaatgagatcagcaccaagaggaccagcatcatcagcctgaccccctggaagcccagcaagagcaccctgctggctgatgacctggagatcaagctgtttgagagcagtgaaaatattgaggacagcaacaaccccaagacagagaagatcaaggaccaggtgaatggcaccagtgaagattctgcagatggcagcacagtgggcacagctgtgagcagcagtgatgatgctgacctgcccccacctccacccctgctggacctggagggccaggagagcaaccagagcgacaagcccaccatgaccatcgtgagccccctgcccaatgacagcaccagcctgccccccagcctggactgcctgaaccaggactgtggggaccacaagtctgagatcatccagagcttcccccccctggacagcctgaacctgcccctgccccctgtggacttcatgaagaaccaggaggacagcaacctggagatccagtgccaggagttcagcatcccccccaacagcgaccaggacctgaatgaaagcctgcccccacctcctgctgagctgctgtag

SEQ ID NO: 275452 - DNA, 1392 bp, Artificial Sequence
  derived and/or modified sequence
atgctgttccggtacgccgagaagatcacccggaagtacagcgagatggatcccaaatatttcattctcattcttttctgtggccacttaaacaacaccttcttcagtaagaccgagaccatcactactgaaaagcagtcccaacccaccctgttcaccagcagtatgagccaggtcctcgctaactcacaaaataccacaggaaaccctctgggccagccgacccaattttccgacacattttccgggcaaagcattagcccggccaaagtaaccgccggtcaacctactcccgccgtctacaccagctctgaaaaacccgaggctcatacttccgcaggacagccccttgcatataataccaagcagcctacacccatcgctaatacatcaagccagcaggcagttttcacatccgctcgccaactccctagcgcccgtactagcaccacccagccgccaaagtcctttgtttacactttcacgcagcagtcctcctcggtgcaaattccttcaaggaaacagattactgtgcataaccccagcacccagcctaccagtacagttaagaattcgccaagatcaacacccggatttatactcgatactactagtaataagcagacccctcagaagaacaattacaacagcattgcagctattctaatcggagtgctgctcacttcaatgttggtcgctatcataattattgtgctgtggaaatgcctcaggaagcccgtgctaaacgatcagaattgggccggaagatccccattcgccgatggcgaaacccctgatatatgtatggataacattagagaaaatgaaattagcacaaaaagaacaagcatcatatcactgacgccctggaaaccctccaagtccacgctcctcgcggatgacctcgaaatcaagctgtttgagtcgagcgagaatatagaagatagcaataatcccaaaacggaaaaaattaaagaccaggtgaacggtacatcagaagattcagcggatggatcgaccgtaggcaccgccgtctccagcagtgatgacgccgacttgccaccaccaccacccctactggacttagaggggcaggagtctaaccagtctgacaagccaactatgaccatcgtgtctccactgcccaatgatagcacatcactccctccgagcttagattgccttaaccaggattgtggcgaccataagtccgaaatcattcaaagtttcccgcccctcgactccctaaatttacccctccccccagtagatttcatgaagaaccaggaagatagcaatcttgagatccagtgccaggagttttcaatcccacccaacagtgatcaggatctgaatgagagtttgccaccaccaccggccgagctactttag

SEQ ID NO: 275453 - DNA, 1392 bp, Artificial Sequence
  derived and/or modified sequence
atgctgtttcgatacgccgagaagattacccgtaaatactcagagatggatccgaaatacttcattcttatcctgttctgcggccatcttaataacacgttcttctctaaaacggaaactatcacaacggagaaacagagtcagcccactctcttcacgtccagcatgagccaggtgctggcaaacagccagaacaccactggtaatcccctgggccaaccaacacagttctctgacacatttagcggccagtccatcagtcccgctaaggttacggctggccagcccaccccagctgtgtatacgtcctctgagaagccagaggcacatacatcagccggtcagcccctcgcttataatactaaacaacccacccctattgccaatacaagcagtcagcaggcagtcttcacttccgctagacagctgccctcagctagaacttctaccactcaaccgccaaaatcctttgtatacacgttcacacaacagtcaagctcagttcagatccccagccgcaaacagattacagtgcacaaccccagcacacagcctacctccacagtgaagaactctccgaggtcaactcctggatttatccttgacactacctcaaataagcaaacaccacagaagaataattacaattctatcgccgctattctcattggcgtgttactgacatctatgctggtggcaatcattataatagtgctatggaaatgcctgaggaaacctgtgctgaatgaccaaaattgggccggtcgcagcccattcgccgacggggaaactcctgatatatgcatggacaacattcgagaaaacgagatttctaccaaaagaacctccattatctctctcacaccctggaaaccctctaagtcaactctcctcgcagatgatctggagattaagttgtttgaaagcagcgaaaacatcgaggattccaataaccccaaaaccgaaaaaatcaaagaccaggttaatggcacgagtgaagactcggctgacggcagcactgtgggaacagccgtctcatcatcagacgacgcagacctgccaccaccccctccactgttagatttagagggtcaggaatcaaaccagtctgacaaacccactatgaccattgtatctccattaccaaatgacagcacctccttgcctccctcactggactgtctcaatcaggactgcggcgaccataaaagtgagatcattcagtccttccctcccctcgatagcctcaacttgccactgccccctgtagattttatgaaaaaccaggaagactctaatctggaaatccagtgccaggagttttccatcccacccaattccgatcaggatcttaacgagagccttcctccacctcctgcagaactattgtag

SEQ ID NO: 275454 - DNA, 1392 bp, Artificial Sequence
  derived and/or modified sequence
atgctgttcagatacgccgagaagatcaccagaaagtacagcgagatggaccccaagtacttcatcctgatcctgttctgcggccacctgaacaacaccttcttcagcaagaccgagaccatcaccaccgagaagcagagccagcccaccctgttcaccagcagcatgagccaggtgctggccaacagccagaacaccaccggcaaccccctgggccagcccacccagttcagcgacaccttcagcggccagagcatcagccccgccaaggtgaccgccggccagcccacccccgccgtgtacaccagcagcgagaagcccgaggcccacaccagcgccggccagcccctggcctacaacaccaagcagcccacccccatcgccaacaccagcagccagcaggccgtgttcaccagcgccagacagctgcccagcgccagaaccagcaccacccagccccccaagagcttcgtgtacaccttcacccagcagagcagcagcgtgcagatccccagcagaaagcagatcaccgtgcacaaccccagcacccagcccaccagcaccgtgaagaacagccccagaagcacccccggcttcatcctggacaccaccagcaacaagcagaccccccagaagaacaactacaacagcatcgccgccatcctgatcggcgtgctgctgaccagcatgctggtggccatcatcatcatcgtgctgtggaagtgcctgagaaagcccgtgctgaacgaccagaactgggccggcagaagccccttcgccgacggcgagacccccgacatctgcatggacaacatcagagagaacgagatcagcaccaagagaaccagcatcatcagcctgaccccctggaagcccagcaagagcaccctgctggccgacgacctggagatcaagctgttcgagagcagcgagaacatcgaggacagcaacaaccccaagaccgagaagatcaaggaccaggtgaacggcaccagcgaggacagcgccgacggcagcaccgtgggcaccgccgtgagcagcagcgacgacgccgacctgcccccccccccccccctgctggacctggagggccaggagagcaaccagagcgacaagcccaccatgaccatcgtgagccccctgcccaacgacagcaccagcctgccccccagcctggactgcctgaaccaggactgcggcgaccacaagagcgagatcatccagagcttcccccccctggacagcctgaacctgcccctgccccccgtggacttcatgaagaaccaggaggacagcaacctggagatccagtgccaggagttcagcatcccccccaacagcgaccaggacctgaacgagagcctgccccccccccccgccgagctgctgtag

SEQ ID NO: 275455 - DNA, 1576 bp, Artificial Sequence
  derived and/or modified sequence
attttaaatctgaattgaaccacccattttcctttcttagccaaatcaccaaaatgtccagttagaacaagaatttagcattctgcaaaagaagttaacagctgagggccatttatcatcactgtgtaccaagtggtagaggagtaagcaatgatatgctgtttagatatgctgaaaagataacgaggaaatattctgaaatggatcccaaatatttcatcttaattttgttttgtggacacctgaacaatacatttttttcaaagacagagacaattacaacagagaagcagtcacagcctaccttattcacatcatcaatgtcacaggtattggctaattctcaaaacacaacagggaatcctttgggtcaaccaacacaattcagcgacactttttctggacaatcaatatcacctgccaaagtcactgctggacaaccaacaccagctgtctatacctcttctgaaaaaccagaagcacatacttctgctggacaaccacttgcctacaacaccaaacaaccaacaccaatagccaacacctcctcccagcaagccgtgttcacctctgccagacaactaccatctgcccgtacttctaccacacaaccaccaaagtcatttgtctatacttttactcaacaatcatcatctgtccagatcccttctagaaaacaaataactgttcataatccatccacacaaccaacatcaactgtcaaaaattcacctaggagtacaccaggatttatcttagatactaccagtaacaaacaaaccccacaaaaaaacaattataattcaatagctgccatactaattggtgtacttctgacttctatgttggtagctataatcatcattgtactttggaaatgcttaaggaaaccagttttaaatgatcaaaattgggcaggtagatctccatttgctgatggagaaacccctgacatttgtatggataacatcagagaaaatgaaatatccacaaaacgtacatcaatcatttcacttacaccctggaaaccaagcaaaagcacacttttagcagatgacttagaaattaagttgtttgaatcaagtgaaaacattgaagactccaacaaccccaaaacagagaaaataaaagatcaagtaaatggtacatcagaagatagtgctgatggttcaacagttggaactgctgtttcttcttcagatgatgcagatctgcctccaccacctccccttctggatttggaaggacaggaaagtaaccaatctgacaaacccacaatgacaattgtatctcctcttccaaatgattctactagtctccctccatctctggactgtctcaatcaagactgtggagatcataaatctgagataatacaatcatttccaccgcttgactcacttaacttgcccctgccaccagtagattttatgaaaaaccaagaagattccaaccttgagatccagtgtcaggagttctctattcctcccaactctgatcaagatcttaatgaatccctgccacctccacctgcagaactgttataaatattacaacttgctttttagctgatctt

SEQ ID NO: 275456 - protein, 69 aa, Artificial Sequence
  derived and/or modified sequence
MTTLIPILSTFLFEDFSKASGFKGQRPETLHERLTLVSVYAPYLLIPFILLIFMLRSPYYKYEEKRKKK

SEQ ID NO: 275457 - protein, 1009 aa, Artificial Sequence
  derived and/or modified sequence
MSLAFKIFFPQTLRALSRKELCLFRKHHWRDVRQFSQWSETDLLHGHPLFLRRKPVLSFQGSHLRSRATYLVFLPGLHVGLCSGPCEMAEQRFCVDYAKRGTAGCKKCKEKIVKGVCRIGKVVPNPFSESGGDMKEWYHIKCMFEKLERARATTKKIEDLTELEGWEELEDNEKEQITQHIADLSSKAAGTPKKKAVVQAKLTTTGQVTSPVKGASFVTSTNPRKFSGFSAKPNNSGEAPSSPTPKRSLSSSKCDPRHKDCLLREFRKLCAMVADNPSYNTKTQIIQDFLRKGSAGDGFHGDVYLTVKLLLPGVIKTVYNLNDKQIVKLFSRIFNCNPDDMARDLEQGDVSETIRVFFEQSKSFPPAAKSLLTIQEVDEFLLRLSKLTKEDEQQQALQDIASRCTANDLKCIIRLIKHDLKMNSGAKHVLDALDPNAYEAFKASRNLQDVVERVLHNAQEVEKEPGQRRALSVQASLMTPVQPMLAEACKSVEYAMKKCPNGMFSEIKYDGERVQVHKNGDHFSYFSRSLKPVLPHKVAHFKDYIPQAFPGGHSMILDSEVLLIDNKTGKPLPFGTLGVHKKAAFQDANVCLFVFDCIYFNDVSLMDRPLCERRKFLHDNMVEIPNRIMFSEMKRVTKALDLADMITRVIQEGLEGLVLKDVKGTYEPGKRHWLKVKKDYLNEGAMADTADLVVLGAFYGQGSKGGMMSIFLMGCYDPGSQKWCTVTKCAGGHDDATLARLQNELDMVKISKDPSKIPSWLKVNKIYYPDFIVPDPKKAAVWEITGAEFSKSEAHTADGISIRFPRCTRIRDDKDWKSATNLPQLKELYQLSKEKADFTVVAGDEGSSTTGGSSEENKGPSGSAVSRKAPSKPSASTKKAEGKLSNSNSKDGNMQTAKPSAMKVGEKLATKSSPVKVGEKRKAADETLCQTKVLLDIFTGVRLYLPPSTPDFSRLRRYFVAFDGDLVQEFDMTSATHVLGSRDKNPAAQQVSPEWIWACIRKRRLVAPC

SEQ ID NO: 275458 - DNA, 3030 bp, Artificial Sequence
  derived and/or modified sequence
atgagcctggccttcaagatcttcttcccccagaccctgagagccctgagcagaaaggagctgtgcctgttcagaaagcaccactggagagacgtgagacagttcagccagtggagcgagaccgacctgctgcacggccaccccctgttcctgagaagaaagcccgtgctgagcttccagggcagccacctgagaagcagagccacctacctggtgttcctgcccggcctgcacgtgggcctgtgcagcggcccctgcgagatggccgagcagagattctgcgtggactacgccaagagaggcaccgccggctgcaagaagtgcaaggagaagatcgtgaagggcgtgtgcagaatcggcaaggtggtgcccaaccccttcagcgagagcggcggcgacatgaaggagtggtaccacatcaagtgcatgttcgagaagctggagagagccagagccaccaccaagaagatcgaggacctgaccgagctggagggctgggaggagctggaggacaacgagaaggagcagatcacccagcacatcgccgacctgagcagcaaggccgccggcacccccaagaagaaggccgtggtgcaggccaagctgaccaccaccggccaggtgaccagccccgtgaagggcgccagcttcgtgaccagcaccaaccccagaaagttcagcggcttcagcgccaagcccaacaacagcggcgaggcccccagcagccccacccccaagagaagcctgagcagcagcaagtgcgaccccagacacaaggactgcctgctgagagagttcagaaagctgtgcgccatggtggccgacaaccccagctacaacaccaagacccagatcatccaggacttcctgagaaagggcagcgccggcgacggcttccacggcgacgtgtacctgaccgtgaagctgctgctgcccggcgtgatcaagaccgtgtacaacctgaacgacaagcagatcgtgaagctgttcagcagaatcttcaactgcaaccccgacgacatggccagagacctggagcagggcgacgtgagcgagaccatcagagtgttcttcgagcagagcaagagcttcccccccgccgccaagagcctgctgaccatccaggaggtggacgagttcctgctgagactgagcaagctgaccaaggaggacgagcagcagcaggccctgcaggacatcgccagcagatgcaccgccaacgacctgaagtgcatcatcagactgatcaagcacgacctgaagatgaacagcggcgccaagcacgtgctggacgccctggaccccaacgcctacgaggccttcaaggccagcagaaacctgcaggacgtggtggagagagtgctgcacaacgcccaggaggtggagaaggagcccggccagagaagagccctgagcgtgcaggccagcctgatgacccccgtgcagcccatgctggccgaggcctgcaagagcgtggagtacgccatgaagaagtgccccaacggcatgttcagcgagatcaagtacgacggcgagagagtgcaggtgcacaagaacggcgaccacttcagctacttcagcagaagcctgaagcccgtgctgccccacaaggtggcccacttcaaggactacatcccccaggccttccccggcggccacagcatgatcctggacagcgaggtgctgctgatcgacaacaagaccggcaagcccctgcccttcggcaccctgggcgtgcacaagaaggccgccttccaggacgccaacgtgtgcctgttcgtgttcgactgcatctacttcaacgacgtgagcctgatggacagacccctgtgcgagagaagaaagttcctgcacgacaacatggtggagatccccaacagaatcatgttcagcgagatgaagagagtgaccaaggccctggacctggccgacatgatcaccagagtgatccaggagggcctggagggcctggtgctgaaggacgtgaagggcacctacgagcccggcaagagacactggctgaaggtgaagaaggactacctgaacgagggcgccatggccgacaccgccgacctggtggtgctgggcgccttctacggccagggcagcaagggcggcatgatgagcatcttcctgatgggctgctacgaccccggcagccagaagtggtgcaccgtgaccaagtgcgccggcggccacgacgacgccaccctggccagactgcagaacgagctggacatggtgaagatcagcaaggaccccagcaagatccccagctggctgaaggtgaacaagatctactaccccgacttcatcgtgcccgaccccaagaaggccgccgtgtgggagatcaccggcgccgagttcagcaagagcgaggcccacaccgccgacggcatcagcatcagattccccagatgcaccagaatcagagacgacaaggactggaagagcgccaccaacctgccccagctgaaggagctgtaccagctgagcaaggagaaggccgacttcaccgtggtggccggcgacgagggcagcagcaccaccggcggcagcagcgaggagaacaagggccccagcggcagcgccgtgagcagaaaggcccccagcaagcccagcgccagcaccaagaaggccgagggcaagctgagcaacagcaacagcaaggacggcaacatgcagaccgccaagcccagcgccatgaaggtgggcgagaagctggccaccaagagcagccccgtgaaggtgggcgagaagagaaaggccgccgacgagaccctgtgccagaccaaggtgctgctggacatcttcaccggcgtgagactgtacctgccccccagcacccccgacttcagcagactgagaagatacttcgtggccttcgacggcgacctggtgcaggagttcgacatgaccagcgccacccacgtgctgggcagcagagacaagaaccccgccgcccagcaggtgagccccgagtggatctgggcctgcatcagaaagagaagactggtggccccctgctag

SEQ ID NO: 275459 - DNA, 3030 bp, Artificial Sequence
  derived and/or modified sequence
atgtctctcgcctttaaaatcttcttccctcagaccttaagagccctaagtaggaaagagctgtgcctgtttcgcaagcatcattggagggatgttcggcagtttagccagtggtccgaaactgatctgctccatggacatcccctgttcctcagaaggaagccagtgttgagctttcaagggtcgcacttaaggagccgggcaacctatctggtcttcctgccaggtctccacgtaggcttgtgttcaggcccttgtgagatggcagagcagcgcttttgtgtggattacgcaaaaagaggaaccgccggttgcaaaaaatgcaaagagaagatagtcaagggggtctgccgcatcggtaaggtcgtgcccaacccatttagcgaatctggcggtgacatgaaagaatggtaccacattaagtgcatgttcgaaaaactagagagagcaagagccacaaccaagaagattgaggaccttactgaactggaagggtgggaggaactagaagacaacgagaaggagcagatcacacagcacattgccgatctgtcttctaaggcagccggcacccctaaaaaaaaggctgtggtgcaggccaaactgactacaaccgggcaggtgaccagccccgtaaagggtgccagctttgtgacctccacaaatccccggaaattctccggtttctctgccaagcccaataatagcggtgaagccccctcctctcctacacctaaaaggtcactgagctcctccaaatgtgatccgaggcataaagattgcctgcttagggagtttaggaagttatgcgccatggtagcagataatccttcctataatactaagacacagattatccaggatttccttagaaaagggagcgcaggagacggcttccacggagacgtgtatctcacagtgaaactgctgctgcctggagtgattaagaccgtgtataacctgaatgacaagcagattgtgaagcttttttcgagaatatttaactgtaatccagatgacatggcccgcgatcttgaacaaggcgacgttagcgaaaccattcgcgtcttctttgaacagagtaagagtttcccccctgccgccaagtcacttctcaccatacaagaggttgacgagttcctactgcggctgtctaaactgactaaagaggatgaacagcaacaggccttgcaagatatcgcgtcacgatgcacggcaaacgacctgaagtgcattatccgtcttattaagcacgacttgaagatgaatagtggcgccaaacacgtgctagacgccctggatcccaatgcttacgaagcatttaaggccagccggaatctgcaggacgtggtggagcgagtgttacacaatgctcaggaagttgagaaggagccaggtcaacgccgagctctgagcgtacaagcctctctcatgacaccggtccagcccatgctggctgaagcctgcaaatctgtcgaatatgctatgaaaaagtgccctaacggcatgttttccgaaatcaagtatgatggagagcgcgtccaagtgcacaaaaacggcgaccactttagttacttttccagatctctgaagcccgtattgccacataaagtagcgcacttcaaggactatattcctcaggcattccccggaggtcacagcatgattctggatagcgaggtactgctcatcgataataaaacaggcaaaccactgccttttgggaccctgggtgtccataaaaaggctgccttccaagacgccaatgtgtgtctgttcgtattcgattgcatctactttaatgacgtgagtttaatggacaggccactctgcgaaaggcgtaagtttctgcacgacaatatggttgaaatcccaaacagaataatgttctccgagatgaaaagagtgacgaaggcactcgacttagccgatatgattacccgggtgatccaggagggcttggagggactcgtgttaaaggacgtcaagggaacttacgagccaggcaaacggcactggctcaaagtgaaaaaggactatctaaatgaaggcgccatggccgacaccgccgatctcgtggtactcggtgctttctacgggcagggtagcaagggaggaatgatgtccatcttcctgatgggctgttacgaccccggctcccagaaatggtgtaccgtgacgaaatgcgctggtggccatgacgacgccaccctcgccagattgcagaatgagctggacatggtcaagataagcaaggatccgtcaaagattccctcgtggctgaaggttaataagatatactatccagacttcattgttcctgatccaaaaaaagctgctgtctgggaaattacaggggctgagttttccaagtccgaagcacacacagcggatggaatttcaatacggtttcctagatgtacacgtattcgggatgataaggattggaagagcgctactaatctcccccaactgaaagaactctatcagctttctaaggaaaaggccgatttcacagtggtggccggcgatgaggggagttctactactggcggatcctcagaagagaacaaagggccttctgggtctgcagtgtcccgaaaagcaccttcaaaaccaagcgcttctacaaagaaggctgaggggaaactgtcaaattccaattctaaagatggaaacatgcaaacagcaaagccaagcgctatgaaggtgggagaaaagctggccactaagtcctcccccgtgaaggtgggcgagaagaggaaagccgctgatgagacgctctgtcagacgaaagtgttattggatatcttcaccggcgttcgcttgtaccttccaccttccactccagattttagtaggttacgacggtatttcgtcgccttcgacggcgatcttgtgcaggaatttgacatgacctccgcaacccatgtcctggggagtcgcgacaagaacccagccgcgcaacaggtttcacctgagtggatttgggcgtgcatcagaaagcgcagactggtcgctccctgctag

SEQ ID NO: 275460 - DNA, 3030 bp, Artificial Sequence
  derived and/or modified sequence
atgagcctggccttcaagatcttcttcccccagaccctgcgggccctgagcaggaaggagctgtgcctcttcaggaagcaccactggagagatgtgcggcagttcagccagtggagcgagacagacctgctgcacggccaccccctcttcctgcggaggaagcctgtgctgtccttccagggcagccacctgcggagccgggccacctacctggtgttcctgcccggcctgcacgtgggcctgtgcagcggcccctgtgagatggccgagcagcgcttctgtgtggactatgccaagaggggcacagctggctgcaagaagtgcaaggagaagatcgtgaagggcgtgtgcagaattggcaaggtggtgcccaaccccttcagcgagagcggcggggacatgaaggagtggtaccacatcaagtgcatgtttgagaagctggagcgggcccgggccaccaccaagaagattgaggacctgacagagctggagggctgggaggagctggaggacaatgagaaggagcagatcacccagcacatcgctgacctgagcagcaaggctgctggcacccccaagaagaaggctgtggtgcaggccaagctgaccaccaccggccaggtgaccagccctgtgaagggggccagctttgtgaccagcaccaaccccaggaagttcagcggcttcagcgccaagcccaacaacagcggggaggcccccagcagccccacccccaagaggagcctgagcagcagcaaatgtgaccccaggcacaaggactgcctgctgcgggagttcaggaagctgtgtgccatggtggccgacaaccccagctacaacaccaagacccagatcatccaggacttcctgaggaagggcagcgctggagatggcttccatggagatgtgtacctgactgtgaagctgctgctgcccggggtcatcaagacagtgtacaacctgaatgacaagcagatcgtgaagctgttcagccgcatcttcaactgcaacccagatgacatggcccgggacctggagcagggagatgtgtctgagaccatccgggtcttctttgagcagagcaagagcttccccccagctgccaagagcctgctgaccatccaggaggtggatgagttcctgctgcggctgagcaagctgaccaaggaggatgagcagcagcaggccctgcaggacatcgccagccgctgcacagccaatgacctgaagtgcatcatccgcctcatcaagcatgacctgaagatgaacagcggggccaagcacgtgctggatgccctggaccccaatgcctatgaggccttcaaggccagcaggaacctgcaggatgtggtggagcgggtgctgcacaatgcccaggaggtggagaaggagcccggccagaggcgggccctgtctgtgcaggccagcctgatgacccctgtgcagcccatgctggccgaggcctgcaagtctgtggagtatgccatgaagaagtgccccaacggcatgttttctgagatcaagtatgatggagagcgggtgcaggtgcacaagaatggagaccacttctcctacttcagccgcagcctgaagcctgtgctgccccacaaggtggcccacttcaaggactacatcccccaggccttccctgggggccacagcatgatcctggacagcgaggtgctgctgattgacaacaagacaggcaagcccctgcccttcggcaccctgggcgtgcacaagaaggccgccttccaggatgccaacgtgtgcctgtttgtgtttgactgcatctacttcaatgatgtgtccctgatggaccggcccctgtgtgaaagaaggaagttcctgcatgacaacatggtggagatccccaaccgcatcatgttttctgagatgaagagggtgaccaaggccctggacctggccgacatgatcaccagggtcatccaggagggcctggagggcctggtgctgaaggatgtgaagggcacctatgagcccgggaagaggcactggctgaaggtgaagaaggactacctgaatgaaggagccatggctgacacagctgacctggtggtgctgggcgccttctacggccagggcagcaagggcggcatgatgagcatcttcctgatgggctgctatgaccccggcagccagaagtggtgcaccgtgaccaagtgtgccggcggccatgatgatgccaccctggcccggctgcagaatgagctggacatggtgaagatcagcaaggaccccagcaagatccccagctggctgaaggtgaacaagatctactacccagacttcatcgtgcctgaccccaagaaggctgctgtgtgggagatcactggagctgagttcagcaagtctgaggcccacacagcagatggcatcagcatccgcttcccccgctgcacccgcatcagagatgacaaggactggaagagcgccaccaacctgccccagctgaaggagctgtaccagctgagcaaggagaaggctgacttcaccgtggtggccggagatgagggcagcagcaccaccggcggcagcagcgaggagaacaagggccccagcggcagcgctgtgtccaggaaggcccccagcaagcccagcgccagcaccaagaaggccgagggcaagctgagcaacagcaacagcaaggatggcaacatgcagacagccaagcccagcgccatgaaggtgggggagaagctggccaccaagagcagccctgtgaaggtgggggagaagaggaaggccgcagatgagaccctgtgccagaccaaggtgctgctggacatcttcaccggggtgcggctgtacctgccccccagcaccccagacttcagccggctgcggcgctactttgtggcctttgatggagacctggtgcaggagtttgacatgaccagcgccacccacgtgctgggcagccgggacaagaacccagctgcccagcaggtgtccccagagtggatctgggcctgcatcaggaagaggcggctggtggccccctgctag

SEQ ID NO: 275461 - DNA, 3692 bp, Artificial Sequence
  derived and/or modified sequence
cggatttaaagagacaggcgctccaaccgtcgtgggctgcccgcggcctgtaatgagcaagttccgaggcctacggtgagcgccggagccggagaggcagctatatgtctttggctttcaagatcttctttccacaaaccctccgtgcactcagccgaaaagaactgtgcctattccgaaaacatcactggcgtgatgtaagacaattcagccagtggtcagaaacagatctgcttcatggacatcccctcttcctgagaagaaagcctgttctatcattccagggaagccatctaagatcacgtgccacctaccttgttttcttgccagggttgcatgtgggactctgcagtggcccctgtgagatggctgagcaacggttctgtgtggactatgccaagcgtggcacagctggctgcaaaaaatgcaaggaaaagattgtgaagggcgtatgccgaattggcaaagtggtgcccaatcccttctcagagtctgggggtgatatgaaagagtggtaccacattaaatgcatgtttgagaaactagagcgggcccgggccaccacaaaaaaaatcgaggacctcacagagctggaaggctgggaagagctggaagataatgagaaggaacagataacccagcacattgcagatctgtcttctaaggcagcaggtacaccaaagaagaaagctgttgtccaggctaagttgacaaccactggccaggtgacttctccagtgaaaggcgcctcatttgtcaccagtaccaatccccggaaattttctggcttttcagccaagcccaacaactctggggaagccccctcgagccccacccctaagagaagtctgtcttcaagcaaatgtgaccccaggcataaggactgtctgctacgggagtttcgaaagttatgcgccatggtggccgataatcctagctacaacacgaagacccagatcatccaggacttccttcggaaaggctcagcaggagatggtttccacggtgatgtgtacctaacagtgaagctgctgctgccaggagtcattaagactgtttacaacttgaacgataagcagattgtgaagcttttcagtcgcatttttaactgcaacccagatgatatggcacgggacctagagcagggtgacgtgtcagagacaatcagagtcttctttgagcagagcaagtctttccccccagctgccaagagcctccttaccatccaggaagtggatgagttccttctgcggctgtccaagctcaccaaggaggatgagcagcaacaggccctacaggacattgcctccaggtgtacagccaatgaccttaaatgcatcatcaggttgatcaaacatgatctgaagatgaactcaggtgcaaaacatgtgttagacgcccttgaccccaatgcctatgaagccttcaaagcctcgcgcaacctgcaggatgtggtggagcgggtccttcacaacgcgcaggaggtggagaaggagccgggccagagacgagctctgagcgtccaggcctcgctgatgacacctgtgcagcccatgttggcggaggcctgcaagtccgttgagtatgcaatgaagaaatgtcccaatggcatgttctctgagatcaagtacgatggagagcgagtccaggtgcataagaatggagaccacttcagctacttcagccgcagtctcaagcccgtccttcctcacaaggtggcccactttaaggactacattccccaggcttttcctgggggccacagcatgatcttggattctgaagtgcttctgattgacaacaagacaggcaaaccactgccctttgggactctgggagtacacaagaaagcagccttccaggatgctaatgtctgcctgtttgtttttgattgtatctactttaatgatgtcagcttgatggacagacctctgtgtgagcggcggaagtttcttcatgacaacatggttgaaattccaaaccggatcatgttctcagaaatgaagcgagtcacaaaagctttggacttggctgacatgataacccgggtgatccaggagggattggaggggctggtgctgaaggatgtgaagggtacatatgagcctgggaagcggcactggctgaaagtgaagaaagactatttgaacgagggggccatggccgacacagctgacctggtggtccttggagccttctatgggcaagggagcaaaggcggcatgatgtcaatcttcctcatgggctgctacgaccctggcagccagaagtggtgcacagtcaccaagtgtgcaggaggccatgatgatgccacgcttgcccgcctgcagaatgaactagacatggtgaagatcagcaaggaccccagcaaaatacccagctggttgaaggtcaacaagatctactatcctgacttcatcgtcccagacccaaagaaagctgccgtgtgggagatcacaggggctgaattctccaaatcggaggctcatacagctgacgggatctccatccgattccctcgctgcacccgaatccgagatgataaggactggaaatctgccactaaccttccccaactcaaggaactgtaccagttgtccaaggagaaggcagacttcactgtagtggctggagatgaggggagctccactacagggggtagcagtgaagagaataagggtccctcagggtctgctgtgtcccgcaaggcccccagcaagccctcagccagtaccaagaaagcagaagggaagctgagtaactccaacagcaaagatggcaacatgcagactgcaaagccttccgctatgaaggtgggggagaagctggccacaaagtcttctccagtgaaagtaggggagaagcggaaagctgctgatgagacgctgtgccaaacaaaggtattgctggacatcttcactggggtgcggctttacttgccaccctccacaccagacttcagccgtctcagacgctactttgtggcattcgacggggacctggtacaggaatttgatatgacttcagccacgcacgtgctgggtagcagggacaagaaccctgcggcccagcaggtctccccagagtggatttgggcatgtatccggaaacggagactggtagctccctgctaggtttgctgtcttccctctccctcaggccatactctcctttaccatactactggactggactcaggctggaggcagatagacacagtatagggggaatgggcttgcttctcccaaacccaccagttctccactgtctcttctggaccaggaattagttgctgtgggtgccacagctgaagtcagtttgtcttgctggtttaaatagatctttcagagctgggtgctgggtttgccatctttttgttttctttgaaaagcagcttagttaccctttttataaataaaatatcttgcagttatctttgtcctttccccacctacacccccaataatttccctagagattaaggagtaaaggctgggctatggcagctctgtccacaaagccttctctcccatccttgcctgttcctttgtacttccaggctcattttaaagttgtatttaaaggactgccctcggaaatgcttctgtttagcggaacttgtattcagcctgacacgctttgccaggaacaaacctcatgtgaaagaaaacaaaatgaatttttttactttc

SEQ ID NO: 275462 - DNA, 3030 bp, Artificial Sequence
  derived and/or modified sequence
atgagcctggccttcaagatcttcttcccccagaccctgcgggccctgagccgcaaggaactgtgcctgtttcgcaagcaccactggagggatgtccgacagttctcacagtggagcgagacagatctcctccatgggcaccctctcttcctcaggagaaagcccgtcctatcattccaaggatctcatctgaggtctcgcgccacctacctggtatttctgcccggcctccacgttggactgtgctccgggccatgtgagatggctgagcagcgtttttgtgtagactatgccaagcgtggaaccgcgggctgcaaaaaatgcaaggaaaagatcgtaaagggggtgtgcaggataggaaaggtagtgccgaaccctttttccgagtctggaggggatatgaaggaatggtatcacattaagtgcatgttcgaaaagcttgagagagctagggccacaacaaagaaaatagaagacctcaccgaactggagggctgggaagagctggaagataatgagaaagaacagatcacacagcatatcgcggacctatccagtaaagcggccggtaccccgaagaagaaagccgtggttcaggcaaagctaacgaccaccgggcaggtcacatcaccggttaagggcgcatcatttgtgacgtctaccaacccaagaaaattcagtgggttcagcgccaaacccaataactcaggggaggctccttcctcacctacgccaaagcggagcctgtctagttctaaatgcgaccctcgccataaggattgtctgttgagggagttccgaaaactctgcgcaatggttgccgataaccccagttacaacacaaagacccaaatcattcaggacttccttagaaagggcagcgcaggtgatggcttccacggagacgtctatctgacagtgaaactgttgctacccggggtgattaagactgtctataatctgaacgataaacagatcgtcaagctgttttccaggatattcaattgtaatcctgacgacatggcaagagacctggagcaaggggatgttagtgaaactattcgtgtttttttcgaacaatccaaatcatttccacccgcggctaagagcttactgacgatacaggaagtagacgagtttctgctgagactctcaaagttaaccaaagaggatgagcagcagcaagccctacaggacatcgcatctagatgtacggccaatgacctgaagtgtattatcaggttaatcaaacacgatcttaaaatgaacagcggagcgaaacacgtcctggatgcactggacccaaatgcatacgaagcctttaaggcctccagaaacctacaggatgtcgtcgaaagggtgctgcacaacgcacaagaagtcgagaaggagccaggccaaaggcgggccttatctgtccaggctagcctgatgactcctgtgcagcctatgcttgctgaagcgtgcaaatccgttgaatatgccatgaagaagtgcccaaacggcatgttttctgaaattaagtacgatggagagcgggtgcaggtccacaagaatggggatcacttcagctacttctcacggtctctcaaaccagtccttccacacaaagtggcccatttcaaggactatatcccccaggcttttccgggcggacatagcatgatcctcgacagcgaggtgctcctgatcgataacaaaacggggaaacctttgccgttcggtactctgggggttcacaaaaaggccgcatttcaggacgctaacgtctgcttgttcgtgtttgattgcatctatttcaacgatgtgtccttgatggacaggccattgtgtgagcgaagaaagtttctccatgacaacatggtggaaatacccaaccggattatgttctcggagatgaagcgcgttaccaaagctctcgacttggccgacatgattacgcgcgtcatccaggaagggcttgagggcctggtgctgaaggatgttaagggcacctacgagcccggcaagcggcactggttaaaagtgaaaaaagattatcttaacgagggggctatggccgacacggccgatctagtggtccttggggccttttacggtcagggatcaaaggggggaatgatgtccatctttctcatgggatgttatgacccgggtagccaaaagtggtgcacggtaactaagtgcgcgggtggtcatgacgatgcgaccctcgcacgtctgcaaaacgaactcgacatggttaaaatttcaaaagacccgtccaaaattccttcatggctcaaagtgaacaagatttattatccagattttatcgtgccagacccaaagaaagccgcagtgtgggaaatcactggcgccgagttctccaagagcgaggcccacaccgccgacggtatttcaatccggttccccagatgtacccgaatcagagacgacaaagattggaaatcagccaccaacctcccccagctcaaagaactttaccaactgtccaaggagaaagcagacttcactgttgtggccggtgacgaaggatctagcactaccggtggttccagcgaagagaataaaggtcccagcggcagcgccgtatctagaaaggccccctccaagccctccgcctccacaaagaaggctgagggcaaactgtctaactccaactccaaggacggaaatatgcagacggcaaaaccttcagctatgaaggtcggagagaagcttgccacaaaaagcagtccagtgaaagttggtgaaaagagaaaggctgctgatgaaacactgtgccagacaaaggtcctcctcgatattttcactggcgtacggctttatctccccccttcaactccagatttttcacggctcagaagatacttcgtggccttcgacggagatctggttcaggagttcgacatgaccagcgctactcatgtcctgggctcacgggacaaaaatcctgctgcacagcaagtgagcccagagtggatttgggcctgtattaggaaaagaaggcttgtcgccccctgctag

SEQ ID NO: 275463 - DNA, 3030 bp, Artificial Sequence
  derived and/or modified sequence
atgagtcttgcctttaaaattttcttccctcagacacttagggctttgtcccgaaaggagctctgcctttttagaaagcatcattggcgggatgtgcgacagttttctcagtggtctgaaaccgaccttctccatgggcatcccctcttccttcggagaaagcccgtcctatcctttcagggctcccacctgagaagtcgggctacctatctggtctttctcccaggcctgcatgtgggactgtgctccggcccatgtgaaatggcagagcagcggttttgtgtggactatgccaagcgcggaacagctggctgcaagaaatgtaaggagaaaatagtgaagggcgtgtgccgtatcggcaaagttgtgcctaaccctttttccgaaagtggcggagatatgaaagagtggtatcacatcaaatgcatgttcgaaaagctggagagagcccgagccaccacaaaaaagatagaggatctgaccgaattagaggggtgggaggaacttgaggacaatgagaaggagcaaatcacccaacatattgccgatcttagctccaaggccgcaggcactcccaagaagaaagcagttgttcaggctaagctaaccactaccggccaggtgactagccccgtgaagggggcatccttcgtcacctccactaaccccaggaaattttctggttttagcgctaaaccaaataactccggagaggccccatcaagccctacccccaagagatctctttccagctcgaaatgcgaccctcgccacaaagattgcctgctgagagaatttcgtaaactgtgtgctatggttgccgacaatccaagctacaacactaagacccaaatcatccaggacttccttagaaagggcagcgctggggatggcttccacggggacgtctacttgacagtcaagctgttattgccgggagtgataaaaactgtctacaacctgaacgataaacagattgtaaaactgttctctcgtatattcaactgtaatccagacgacatggctagggatttggagcagggcgatgtctccgagacaattcgggtgttcttcgagcagagcaagtcattccctcccgctgctaaatcactcttaacaatccaggaagtggatgagttcctcctgcggctgagtaagttgacgaaggaagacgaacagcaacaagccctgcaggatatcgcgtctcggtgcaccgcaaacgacctgaaatgtattattcgcctgatcaagcatgaccttaagatgaattctggggcaaagcatgtattggacgctcttgatccgaatgcgtatgaggcctttaaggcatcacgcaatcttcaagatgttgtggaaagggtacttcataacgctcaggaggtcgaaaaagagccgggacagcggagagccctgtcggtgcaggccagtcttatgactcctgtgcagccaatgctcgccgaagcctgtaagagcgtggagtacgccatgaagaagtgcccaaacgggatgttctcggagatcaaatacgatggagaaagagtgcaggtgcacaagaatggcgatcatttcagctattttagtaggtcgttgaaaccagtactccctcacaaagtggcacatttcaaggactacatcccgcaagcctttcccggaggccacagtatgatcctggacagtgaagtgctgctgatcgacaataagacaggtaaaccattgccgttcggaacattaggcgtgcacaaaaaggctgcctttcaggatgctaacgtctgcctgtttgtgtttgactgtatttatttcaatgatgtcagcctgatggaccgcccattatgcgaacgtagaaaattcttgcacgacaatatggtagagatccccaaccgcatcatgttctccgaaatgaagcgggttacaaaagccttggaccttgccgacatgattacccgtgtcatccaggaaggcttggaaggcctggtgctgaaggatgtgaaagggacatatgagcccggaaagagacactggctgaaggtcaagaaggactatctgaatgagggcgctatggctgatacagctgacctggtagtgctaggggctttctatgggcagggtagtaagggcggaatgatgtcgatcttcttaatgggctgctatgacccaggcagccagaagtggtgcactgtgactaaatgcgcgggaggacacgatgatgcaactctcgcacggttacagaatgagcttgatatggtcaagatatccaaagatcctagcaaaataccttcctggcttaaggtgaataagatttactaccccgacttcattgttccagatcccaaaaaagctgcagtgtgggagattacaggcgcagagtttagtaaaagcgaggcccacaccgccgacggcatttcaataagattcccgagatgcacaaggatccgagatgacaaagactggaaatccgccaccaacctccctcagctgaaagaactttatcagctgtccaaagagaaggccgatttcacggtcgtggctggggacgagggcagtagtacaacagggggatcctctgaagagaataagggtccctctgggtccgctgtttctaggaaagctccctccaagccttcagcctccaccaaaaaggccgagggcaaactgtctaatagcaatagcaaagatgggaatatgcagactgctaagccttccgctatgaaggtgggcgagaaacttgccaccaagtcatcccccgtgaaggtcggcgagaaacgaaaagccgcagatgagacgctttgccagacaaaagtcctgctcgacatattcaccggagtgcggctctacctgcctccgtctactccggacttcagtaggcttcgtcggtacttcgtggcattcgacggagatcttgtccaagaattcgacatgacttcagctactcacgtgctgggctctcgggacaagaatcctgccgctcaacaggtcagccccgagtggatatgggcatgtattagaaaacggagactcgttgccccatgctag

SEQ ID NO: 275464 - protein, 204 aa, Artificial Sequence
  derived and/or modified sequence
MHERYSNVQVAGPVDRTSSKDSPLHKALFWVAVAVLQLDEVNLYSAGTALLEQNLHTLDSLRIFNDKSPEEVFMAIRNPLEWHCKQMDHFVGLNFNSNFNFALVGHLLKGYRHPSPAIVARTVRILHTLLTLVNKHRNCDKFEVNTQSVAYLAALLTVSEEVRSRCSLKHRKSLLLTDISMENVPMDTYPIHHGDPSYRNKEKF

SEQ ID NO: 275465 - protein, 2502 aa, Artificial Sequence
  derived and/or modified sequence
NWEDNSVIFLLVQSMVVDLKNLLFNPSKPFSRGSQPADVDLMIDCLVSCFRISPHNNQHFKICLAQNSPSTFHYVLVNSLHRIITNSALDWWPKIDAVYCHSVELRNMFGETLHKAVQGCGAHPAIRMAPSLTFKEKVTSLKFKEKPTDLETRSYKYLLLSMVKLIHADPKLLLCNPRKQGPETQGSTAELITGLVQLVPQSHMPEIAQEAMEALLVLHQLDSIDLWNPDAPVETFWEISSQMLFYICKKLTSHQMLSSTEILKWLREILICRNKFLLKNKQADRSSCHFLLFYGVGCDIPSSGNTSQMSMDHEELLRTPGASLRKGKGNSSMDSAAGCSGTPPICRQAQTKLEVALYMFLWNPDTEAVLVAMSCFRHLCEEADIRCGVDEVSVHNLLPNYNTFMEFASVSNMMSTGRAALQKRVMALLRRIEHPTAGNTEAWEDTHAKWEQATKLILNYPKAKMEDGQAAESLHKTIVKRRMSHVSGGGSIDLSDTDSLQEWINMTGFLCALGGVCLQQRSNSGLATYSPPMGPVSERKGSMISVMSSEGNADTPVSKFMDRLLSLMVCNHEKVGLQIRTNVKDLVGLELSPALYPMLFNKLKNTISKFFDSQGQVLLTDTNTQFVEQTIAIMKNLLDNHTEGSSEHLGQASIETMMLNLVRYVRVLGNMVHAIQIKTKLCQLVEVMMARRDDLSFCQEMKFRNKMVEYLTDWVMGTSNQAADDDVKCLTRDLDQASMEAVVSLLAGLPLQPEEGDGVELMEAKSQLFLKYFTLFMNLLNDCSEVEDESAQTGGRKRGMSRRLASLRHCTVLAMSNLLNANVDSGLMHSIGLGYHKDLQTRATFMEVLTKILQQGTEFDTLAETVLADRFERLVELVTMMGDQGELPIAMALANVVPCSQWDELARVLVTLFDSRHLLYQLLWNMFSKEVELADSMQTLFRGNSLASKIMTFCFKVYGATYLQKLLDPLLRIVITSSDWQHVSFEVDPTRLEPSESLEENQRNLLQMTEKFFHAIISSSSEFPPQLRSVCHCLYQVVSQRFPQNSIGAVGSAMFLRFINPAIVSPYEAGILDKKPPPRIERGLKLMSKILQSIANHVLFTKEEHMRPFNDFVKSNFDAARRFFLDIASDCPTSDAVNHSLSFISDGNVLALHRLLWNNQEKIGQYLSSNRDHKAVGRRPFDKMATLLAYLGPPEHKPVADTHWSSLNLTSSKFEEFMTRHQVHEKEEFKALKTLSIFYQAGTSKAGNPIFYYVARRFKTGQINGDLLIYHVLLTLKPYYAKPYEIVVDLTHTGPSNRFKTDFLSKWFVVFPGFAYDNVSAVYIYNCNSWVREYTKYHERLLTGLKGSKRLVFIDCPGKLAEHIEHEQQKLPAATLALEEDLKVFHNALKLAHKDTKVSIKVGSTAVQVTSAERTKVLGQSVFLNDIYYASEIEEICLVDENQFTLTIANQGTPLTFMHQECEAIVQSIIHIRTRWELSQPDSIPQHTKIRPKDVPGTLLNIALLNLGSSDPSLRSAAYNLLCALTCTFNLKIEGQLLETSGLCIPANNTLFIVSISKTLAANEPHLTLEFLEECISGFSKSSIELKHLCLEYMTPWLSNLVRFCKHNDDAKRQRVTAILDKLITMTINEKQMYPSIQAKIWGSLGQITDLLDVVLDSFIKTSATGGLGSIKAEVMADTAVALASGNVKLVSSKVIGRMCKIIDKTCLSPTPTLEQHLMWDDIAILARYMLMLSFNNSLDVAAHLPYLFHVVTFLVATGPLSLRASTHGLVINIIHSLCTCSQLHFSEETKQVLRLSLTEFSLPKFYLLFGISKVKSAAVIAFRSSYRDRSFSPGSYERETFALTSLETVTEALLEIMEACMRDIPTCKWLDQWTELAQRFAFQYNPSLQPRALVVFGCISKRVSHGQIKQIIRILSKALESCLKGPDTYNSQVLIEATVIALTKLQPLLNKDSPLHKALFWVAVAVLQLDEVNLYSAGTALLEQNLHTLDSLRIFNDKSPEEVFMAIRNPLEWHCKQMDHFVGLNFNSNFNFALVGHLLKGYRHPSPAIVARTVRILHTLLTLVNKHRNCDKFEVNTQSVAYLAALLTVSEEVRSRCSLKHRKSLLLTDISMENVPMDTYPIHHGDPSYRTLKETQPWSSPKGSEGYLAATYPTVGQTSPRARKSMSLDMGQPSQANTKKLLGTRKSFDHLISDTKAPKRQEMESGITTPPKMRRVAETDYEMETQRISSSQQHPHLRKVSVSESNVLLDEEVLTDPKIQALLLTVLATLVKYTTDEFDQRILYEYLAEASVVFPKVFPVVHNLLDSKINTLLSLCQDPNLLNPIHGIVQSVVYHEESPPQYQTSYLQSFGFNGLWRFAGPFSKQTQIPDYAELIVKFLDALIDTYLPGIDEETSEESLLTPTSPYPPALQSQLSITANLNLSNSMTSLATSQHSPASLPCSKSAVFMQLFPHQGIDKENVELSPTTGHCNSGRTRHGSASQVQKQRSAGSFKRNSIKKIV

SEQ ID NO: 275466 - DNA, 7509 bp, Artificial Sequence
  derived and/or modified sequence
aactgggaggacaacagcgtgatcttcctgctggtgcagagcatggtggtggacctgaagaacctgctgttcaaccccagcaagcccttcagcagaggcagccagcccgccgacgtggacctgatgatcgactgcctggtgagctgcttcagaatcagcccccacaacaaccagcacttcaagatctgcctggcccagaacagccccagcaccttccactacgtgctggtgaacagcctgcacagaatcatcaccaacagcgccctggactggtggcccaagatcgacgccgtgtactgccacagcgtggagctgagaaacatgttcggcgagaccctgcacaaggccgtgcagggctgcggcgcccaccccgccatcagaatggcccccagcctgaccttcaaggagaaggtgaccagcctgaagttcaaggagaagcccaccgacctggagaccagaagctacaagtacctgctgctgagcatggtgaagctgatccacgccgaccccaagctgctgctgtgcaaccccagaaagcagggccccgagacccagggcagcaccgccgagctgatcaccggcctggtgcagctggtgccccagagccacatgcccgagatcgcccaggaggccatggaggccctgctggtgctgcaccagctggacagcatcgacctgtggaaccccgacgcccccgtggagaccttctgggagatcagcagccagatgctgttctacatctgcaagaagctgaccagccaccagatgctgagcagcaccgagatcctgaagtggctgagagagatcctgatctgcagaaacaagttcctgctgaagaacaagcaggccgacagaagcagctgccacttcctgctgttctacggcgtgggctgcgacatccccagcagcggcaacaccagccagatgagcatggaccacgaggagctgctgagaacccccggcgccagcctgagaaagggcaagggcaacagcagcatggacagcgccgccggctgcagcggcaccccccccatctgcagacaggcccagaccaagctggaggtggccctgtacatgttcctgtggaaccccgacaccgaggccgtgctggtggccatgagctgcttcagacacctgtgcgaggaggccgacatcagatgcggcgtggacgaggtgagcgtgcacaacctgctgcccaactacaacaccttcatggagttcgccagcgtgagcaacatgatgagcaccggcagagccgccctgcagaagagagtgatggccctgctgagaagaatcgagcaccccaccgccggcaacaccgaggcctgggaggacacccacgccaagtgggagcaggccaccaagctgatcctgaactaccccaaggccaagatggaggacggccaggccgccgagagcctgcacaagaccatcgtgaagagaagaatgagccacgtgagcggcggcggcagcatcgacctgagcgacaccgacagcctgcaggagtggatcaacatgaccggcttcctgtgcgccctgggcggcgtgtgcctgcagcagagaagcaacagcggcctggccacctacagcccccccatgggccccgtgagcgagagaaagggcagcatgatcagcgtgatgagcagcgagggcaacgccgacacccccgtgagcaagttcatggacagactgctgagcctgatggtgtgcaaccacgagaaggtgggcctgcagatcagaaccaacgtgaaggacctggtgggcctggagctgagccccgccctgtaccccatgctgttcaacaagctgaagaacaccatcagcaagttcttcgacagccagggccaggtgctgctgaccgacaccaacacccagttcgtggagcagaccatcgccatcatgaagaacctgctggacaaccacaccgagggcagcagcgagcacctgggccaggccagcatcgagaccatgatgctgaacctggtgagatacgtgagagtgctgggcaacatggtgcacgccatccagatcaagaccaagctgtgccagctggtggaggtgatgatggccagaagagacgacctgagcttctgccaggagatgaagttcagaaacaagatggtggagtacctgaccgactgggtgatgggcaccagcaaccaggccgccgacgacgacgtgaagtgcctgaccagagacctggaccaggccagcatggaggccgtggtgagcctgctggccggcctgcccctgcagcccgaggagggcgacggcgtggagctgatggaggccaagagccagctgttcctgaagtacttcaccctgttcatgaacctgctgaacgactgcagcgaggtggaggacgagagcgcccagaccggcggcagaaagagaggcatgagcagaagactggccagcctgagacactgcaccgtgctggccatgagcaacctgctgaacgccaacgtggacagcggcctgatgcacagcatcggcctgggctaccacaaggacctgcagaccagagccaccttcatggaggtgctgaccaagatcctgcagcagggcaccgagttcgacaccctggccgagaccgtgctggccgacagattcgagagactggtggagctggtgaccatgatgggcgaccagggcgagctgcccatcgccatggccctggccaacgtggtgccctgcagccagtgggacgagctggccagagtgctggtgaccctgttcgacagcagacacctgctgtaccagctgctgtggaacatgttcagcaaggaggtggagctggccgacagcatgcagaccctgttcagaggcaacagcctggccagcaagatcatgaccttctgcttcaaggtgtacggcgccacctacctgcagaagctgctggaccccctgctgagaatcgtgatcaccagcagcgactggcagcacgtgagcttcgaggtggaccccaccagactggagcccagcgagagcctggaggagaaccagagaaacctgctgcagatgaccgagaagttcttccacgccatcatcagcagcagcagcgagttccccccccagctgagaagcgtgtgccactgcctgtaccaggtggtgagccagagattcccccagaacagcatcggcgccgtgggcagcgccatgttcctgagattcatcaaccccgccatcgtgagcccctacgaggccggcatcctggacaagaagcccccccccagaatcgagagaggcctgaagctgatgagcaagatcctgcagagcatcgccaaccacgtgctgttcaccaaggaggagcacatgagacccttcaacgacttcgtgaagagcaacttcgacgccgccagaagattcttcctggacatcgccagcgactgccccaccagcgacgccgtgaaccacagcctgagcttcatcagcgacggcaacgtgctggccctgcacagactgctgtggaacaaccaggagaagatcggccagtacctgagcagcaacagagaccacaaggccgtgggcagaagacccttcgacaagatggccaccctgctggcctacctgggcccccccgagcacaagcccgtggccgacacccactggagcagcctgaacctgaccagcagcaagttcgaggagttcatgaccagacaccaggtgcacgagaaggaggagttcaaggccctgaagaccctgagcatcttctaccaggccggcaccagcaaggccggcaaccccatcttctactacgtggccagaagattcaagaccggccagatcaacggcgacctgctgatctaccacgtgctgctgaccctgaagccctactacgccaagccctacgagatcgtggtggacctgacccacaccggccccagcaacagattcaagaccgacttcctgagcaagtggttcgtggtgttccccggcttcgcctacgacaacgtgagcgccgtgtacatctacaactgcaacagctgggtgagagagtacaccaagtaccacgagagactgctgaccggcctgaagggcagcaagagactggtgttcatcgactgccccggcaagctggccgagcacatcgagcacgagcagcagaagctgcccgccgccaccctggccctggaggaggacctgaaggtgttccacaacgccctgaagctggcccacaaggacaccaaggtgagcatcaaggtgggcagcaccgccgtgcaggtgaccagcgccgagagaaccaaggtgctgggccagagcgtgttcctgaacgacatctactacgccagcgagatcgaggagatctgcctggtggacgagaaccagttcaccctgaccatcgccaaccagggcacccccctgaccttcatgcaccaggagtgcgaggccatcgtgcagagcatcatccacatcagaaccagatgggagctgagccagcccgacagcatcccccagcacaccaagatcagacccaaggacgtgcccggcaccctgctgaacatcgccctgctgaacctgggcagcagcgaccccagcctgagaagcgccgcctacaacctgctgtgcgccctgacctgcaccttcaacctgaagatcgagggccagctgctggagaccagcggcctgtgcatccccgccaacaacaccctgttcatcgtgagcatcagcaagaccctggccgccaacgagccccacctgaccctggagttcctggaggagtgcatcagcggcttcagcaagagcagcatcgagctgaagcacctgtgcctggagtacatgaccccctggctgagcaacctggtgagattctgcaagcacaacgacgacgccaagagacagagagtgaccgccatcctggacaagctgatcaccatgaccatcaacgagaagcagatgtaccccagcatccaggccaagatctggggcagcctgggccagatcaccgacctgctggacgtggtgctggacagcttcatcaagaccagcgccaccggcggcctgggcagcatcaaggccgaggtgatggccgacaccgccgtggccctggccagcggcaacgtgaagctggtgagcagcaaggtgatcggcagaatgtgcaagatcatcgacaagacctgcctgagccccacccccaccctggagcagcacctgatgtgggacgacatcgccatcctggccagatacatgctgatgctgagcttcaacaacagcctggacgtggccgcccacctgccctacctgttccacgtggtgaccttcctggtggccaccggccccctgagcctgagagccagcacccacggcctggtgatcaacatcatccacagcctgtgcacctgcagccagctgcacttcagcgaggagaccaagcaggtgctgagactgagcctgaccgagttcagcctgcccaagttctacctgctgttcggcatcagcaaggtgaagagcgccgccgtgatcgccttcagaagcagctacagagacagaagcttcagccccggcagctacgagagagagaccttcgccctgaccagcctggagaccgtgaccgaggccctgctggagatcatggaggcctgcatgagagacatccccacctgcaagtggctggaccagtggaccgagctggcccagagattcgccttccagtacaaccccagcctgcagcccagagccctggtggtgttcggctgcatcagcaagagagtgagccacggccagatcaagcagatcatcagaatcctgagcaaggccctggagagctgcctgaagggccccgacacctacaacagccaggtgctgatcgaggccaccgtgatcgccctgaccaagctgcagcccctgctgaacaaggacagccccctgcacaaggccctgttctgggtggccgtggccgtgctgcagctggacgaggtgaacctgtacagcgccggcaccgccctgctggagcagaacctgcacaccctggacagcctgagaatcttcaacgacaagagccccgaggaggtgttcatggccatcagaaaccccctggagtggcactgcaagcagatggaccacttcgtgggcctgaacttcaacagcaacttcaacttcgccctggtgggccacctgctgaagggctacagacaccccagccccgccatcgtggccagaaccgtgagaatcctgcacaccctgctgaccctggtgaacaagcacagaaactgcgacaagttcgaggtgaacacccagagcgtggcctacctggccgccctgctgaccgtgagcgaggaggtgagaagcagatgcagcctgaagcacagaaagagcctgctgctgaccgacatcagcatggagaacgtgcccatggacacctaccccatccaccacggcgaccccagctacagaaccctgaaggagacccagccctggagcagccccaagggcagcgagggctacctggccgccacctaccccaccgtgggccagaccagccccagagccagaaagagcatgagcctggacatgggccagcccagccaggccaacaccaagaagctgctgggcaccagaaagagcttcgaccacctgatcagcgacaccaaggcccccaagagacaggagatggagagcggcatcaccaccccccccaagatgagaagagtggccgagaccgactacgagatggagacccagagaatcagcagcagccagcagcacccccacctgagaaaggtgagcgtgagcgagagcaacgtgctgctggacgaggaggtgctgaccgaccccaagatccaggccctgctgctgaccgtgctggccaccctggtgaagtacaccaccgacgagttcgaccagagaatcctgtacgagtacctggccgaggccagcgtggtgttccccaaggtgttccccgtggtgcacaacctgctggacagcaagatcaacaccctgctgagcctgtgccaggaccccaacctgctgaaccccatccacggcatcgtgcagagcgtggtgtaccacgaggagagccccccccagtaccagaccagctacctgcagagcttcggcttcaacggcctgtggagattcgccggccccttcagcaagcagacccagatccccgactacgccgagctgatcgtgaagttcctggacgccctgatcgacacctacctgcccggcatcgacgaggagaccagcgaggagagcctgctgacccccaccagcccctacccccccgccctgcagagccagctgagcatcaccgccaacctgaacctgagcaacagcatgaccagcctggccaccagccagcacagccccgccagcctgccctgcagcaagagcgccgtgttcatgcagctgttcccccaccagggcatcgacaaggagaacgtggagctgagccccaccaccggccactgcaacagcggcagaaccagacacggcagcgccagccaggtgcagaagcagagaagcgccggcagcttcaagagaaacagcatcaagaagatcgtgtag

SEQ ID NO: 275467 - DNA, 7509 bp, Artificial Sequence
  derived and/or modified sequence
aactgggaggacaattccgtcatttttctgctcgttcaatcaatggttgtcgatctgaagaacttgctatttaatccttctaaacccttctctaggggcagccagccagcagatgtcgacttgatgatagactgtctagtcagttgctttcgtatcagcccacacaacaaccaacacttcaaaatttgcttggcccagaattcaccttctaccttccattacgtgctcgttaactcactccatcggattattacgaattccgccctggactggtggcccaagatcgatgctgtatattgtcacagcgtcgagctgaggaacatgtttggagaaacattgcataaagccgtgcagggatgtggagctcatcctgccattagaatggcacccagcctcaccttcaaggagaaggtcacttctttgaaattcaaagaaaagcctacggatctggaaacaaggagctataaatacctgttgctgtccatggtcaagctgatccacgctgaccctaaacttctactctgtaacccaaggaagcagggacctgaaactcagggtagcacagcagagcttataacaggactggtgcaactcgttcctcagtcccatatgccagagattgcccaggaagccatggaggccctgctcgtgctgcatcaactggactccatcgacctatggaacccagacgctccagtcgagactttttgggagatctcttcccaaatgcttttttacatttgtaagaagcttacttcccatcagatgctaagttccactgaaatcctcaaatggcttcgcgagatcttgatttgtaggaataagttcttactcaaaaacaagcaggcagaccgctcgtcgtgccatttcctcttgttctatggagttggttgcgacatcccttcttctgggaacacgtcccaaatgagtatggaccacgaagagcttttgagaacacccggggcgagtctccgaaaaggtaaaggcaattcttcaatggattccgccgccggttgttctggaacaccacctatctgccggcaagctcagacaaagcttgaggttgctctgtacatgttcctctggaaccccgatacagaggcggtgcttgtggctatgagctgcttcagacatctgtgtgaagaagccgacattaggtgtggcgtggacgaagtttctgtgcataatctactcccgaattacaataccttcatggagttcgcatccgtttccaacatgatgagcactggtcgagctgctttgcagaaacgggtgatggctctcctaagaaggatcgagcatcctaccgctggcaacacagaagcctgggaggatacacatgctaaatgggaacaggctactaagctgatcctgaactatccaaaggcaaaaatggaagatggtcaagctgctgagtccttacacaaaacgatcgtcaaacgacgtatgtcccacgtttctggtggcggatctatcgatctctctgatacggactccctgcaagagtggatcaatatgacgggatttctgtgcgccctgggcggcgtgtgtttgcaacagcggagtaactctggtttggcgacatactccccacctatgggaccggtctcagaaagaaaaggcagtatgatttcagtgatgtcctcggagggcaatgccgatacacctgtgtctaagtttatggacagacttctttcccttatggtgtgtaatcatgagaaagttggcctgcagattcgaacaaacgtcaaggaccttgtcggcttggagctgtcaccggccctatatccgatgctgttcaataagttaaaaaataccattagtaagttcttcgattcacaaggacaggtgctgcttaccgacactaacacacagttcgtcgaacaaacgatcgcaatcatgaaaaacctgttagataatcacaccgaagggtccagcgagcatcttggtcaagccagcatcgaaactatgatgctcaacctggtgcggtatgtgagggttctgggcaacatggttcacgccattcagatcaaaacaaagctctgtcagctggtggaggtaatgatggctaggcgggacgatctgtccttttgtcaggaaatgaaattccgaaacaagatggtggagtacctcactgattgggttatgggtacttctaatcaagctgcagatgatgatgtcaagtgtctgacgagagacctggaccaggcatctatggaagctgtggtgagcctgctagccgggttgccgctccaacccgaagaaggagatggtgtcgaactgatggaagctaagtcacagctgtttcttaaatacttcaccctgtttatgaacctgctcaacgactgttctgaagtggaggacgaatccgctcaaacagggggacgcaagagaggtatgtcacggagactagcgtcccttcgtcattgtaccgtactcgccatgagtaatctactgaacgctaatgttgactcgggcctgatgcattccattggcctcggctaccacaaagatttgcagaccagagccaccttcatggaggtgttgactaagatccttcagcagggaacggagttcgacacactggccgaaacggtacttgctgatcgcttcgagcgcctcgttgagcttgttaccatgatgggcgaccagggcgaactgcccatcgcaatggcactggcgaacgtggtaccgtgttctcagtgggatgagcttgccagggtgctggttactttgttcgatagtagacatctgctgtatcagttgctgtggaacatgttttctaaggaggtagaactggcagactccatgcagaccctctttaggggcaactctttagccagcaaaatcatgaccttttgtttcaaagtttatggggctacttatctccagaaactgctagaccccttactgagaattgtgatcacgtcgagcgactggcagcacgtcagttttgaagtcgaccccacaagactagagccatcagaatccctggaggagaatcaacgtaacctgctgcagatgaccgaaaagtttttccacgccataataagtagttcctccgagtttccccctcagctgagaagcgtatgtcattgtctgtatcaggtcgtttctcagcggttccctcagaattcaattggagcagtcggtagcgctatgtttctcagatttataaatcctgcgattgtctctccctacgaagcagggattctagataagaaacccccaccacgaatagaaagaggcctgaagctgatgagcaaaattttacagtccatcgccaaccacgtactgttcactaaagaagaacacatgcgcccctttaatgatttcgtcaagagcaacttcgatgctgcaagaaggttctttctggacatagcgtcagactgcccaacctctgatgctgtgaatcacagtctgagctttatctccgatgggaacgtgctagccctccataggttgttatggaacaaccaggagaagatcggacagtatctatctagcaaccgggaccacaaagccgtgggcaggaggccatttgacaagatggctacactgttggcctacctaggaccccccgagcacaaacccgtggctgatacacactggtcctctctaaatctgacctcatcaaagttcgaagaatttatgacacgacaccaagtgcacgaaaaggaggagtttaaagccttgaaaacgctgagtattttctaccaggccggaacctctaaagccggcaacccgatattttattacgttgctcggcggtttaagaccgggcagatcaatggtgatcttcttatttatcatgttctcctcacgctgaagccatactatgccaagccatacgagatagtggtggacttgacccataccgggcctagtaacaggtttaagactgactttttatctaaatggttcgttgttttcccaggatttgcatatgataacgtgagtgcagtgtacatctacaactgcaattcttgggttagagaatacacaaagtatcacgaacgactcctgaccgggctcaaaggaagcaaacggctggtgtttatcgactgcccggggaagctcgcagaacacatagaacacgaacagcaaaagctacctgccgccacgcttgcactcgaggaggatctcaaggtgttccacaacgctctcaagttggctcacaaggacactaaggtttcaatcaaagtgggctctacagctgtacaggtgacttcggcagagagaactaaggtgctggggcaatcggttttcctgaacgatatatactatgcgagcgaaatagaggagatctgcctcgttgacgagaaccaattcacgctgacaattgcgaaccaggggacccctttgacattcatgcatcaagaatgcgaggctatagttcagtcgataatccacattcggaccaggtgggagctttctcagccggactcaatcccccagcacaccaaaatccgccctaaggacgtcccgggcactttacttaacattgcactgctcaatctgggctcctctgacccctccctgaggagcgccgcttacaatttgctgtgtgctctgacctgcacattcaacctcaaaatcgaagggcaattactagagaccagtggactctgcatcccagccaataatactctcttcattgtctcaatatccaaaaccttggcagccaacgagcctcacctgacgctggaattcctggaagagtgtatttccggtttcagcaagtcaagtattgaactgaaacacctgtgtcttgaatatatgacaccttggctgtcaaacctggtcaggttttgcaaacacaatgacgatgctaaacggcagcgggtgaccgcaatcctggataaactcatcacgatgaccatcaatgaaaagcagatgtatccatcaatccaggccaagatctggggatccctaggacaaataaccgatctcctcgatgtcgtgctggactcctttatcaagacctccgctactggaggcttgggttccatcaaggccgaagtcatggcagatacagccgtggccctggcctccggaaatgtgaaactcgttagctcaaaagtgattggacgcatgtgcaaaatcatcgataagacatgcttgtctcctaccccaacactggagcagcacttaatgtgggacgatatcgccatcttggcgaggtacatgctcatgctttccttcaacaacagccttgatgtcgcggcccatttgccatatctgtttcacgtggtgacgtttttggtggcaactggcccgctgagtctgcgcgccagcacacatggcctcgtgatcaatataattcatagcctgtgcacttgctctcaactgcattttagcgaggagacgaagcaagtgctgcgcctctcactgactgagttcagtcttccaaagttttacttgcttttcgggatctcaaaggtgaagtcagcggcggtgattgctttcaggtcgagctaccgggaccgctcctttagtcctggctcctacgagagagagacatttgccctgaccagcctggaaacggtgaccgaggccctgctcgagataatggaagcctgtatgagagatattccaacttgcaaatggctggatcagtggacagagttagcacagagattcgcctttcaatacaacccctcccttcagcctagggcgctcgttgtgttcggatgcatatcaaaaagagtcagtcatggccaaatcaaacagatcattcgcattctgtccaaagctctggaaagctgtctgaaagggccagatacttataattctcaggttctaattgaggctaccgtgattgccctgactaaactacagcccctcctcaacaaagatagcccactgcacaaagcactgttctgggttgccgtggctgtcctgcagctggatgaggtcaatctgtactctgctgggacggccttgctcgagcagaacctgcataccctggactctctccggattttcaatgataaatctcctgaggaggtgttcatggccattagaaatccactcgagtggcactgcaaacagatggatcacttcgtgggtctcaacttcaactcgaacttcaattttgcattggtggggcacctgctgaagggctataggcatccgtcaccagccatagtcgcaagaacagtccgtatcctccacaccttgcttaccttagtgaataagcacaggaactgcgacaagtttgaagtgaatacccagtctgtcgcatacctggctgcccttctgacagtgtcggaggaggtgagaagcaggtgtagcctaaaacatagaaagagcctgctcctcacagacataagcatggagaacgtccctatggacacataccctattcatcacggcgacccttcatacaggacactgaaggaaacccagccatggtcctctccgaagggcagcgaaggctacctagccgccacttatcccactgtgggacagacctctcctcgtgcccgtaagagcatgagtctggatatgggtcaaccgtcacaggccaacactaagaagctactaggcactcggaagtcgtttgaccacctgatcagcgatacaaaagcgccaaaacgccaagagatggaatccgggataaccaccccacctaaaatgcgccgcgtggccgagaccgattacgagatggagacacaacgaatttcttctagtcagcagcatccacacctgagaaaagtcagcgtgtccgaatctaacgtcctattagatgaagaggttctgacagacccaaagattcaggcgctgctcctgactgtcctcgctacactcgttaaatacactaccgacgagtttgaccagcgcattctgtacgaatacctcgctgaggccagcgtggtgttccccaaggtgtttcctgtggtgcataatcttctagattccaagattaacacgttactgagtctctgtcaggatcctaatctgctgaatccgatccatggcatcgtccagtctgtggtgtaccatgaagaaagcccccctcagtaccagacttcctatctgcaatccttcggctttaatggcctgtggaggttcgccgggccattttccaaacagactcagatcccagactacgcggagctgattgtgaagttcttggatgccttgatcgacacctacttaccaggtatagatgaagaaacatctgaggaatccctgctgactccaacatcaccatacccgccagccttgcagtcccagctatctattacagctaatctgaacctgagcaatagtatgactagcttagcaaccagccagcactctcccgcatctctcccttgctccaagagcgcagtgtttatgcagctgtttccccaccagggcattgataaagagaacgtggagctgtctccaactacagggcattgcaacagcggacgcacccgccacggttctgcttcacaggtgcaaaaacaacggagcgcaggttcttttaagcgcaattccatcaagaagattgtctag

SEQ ID NO: 275468 - DNA, 7509 bp, Artificial Sequence
  derived and/or modified sequence
aactgggaggacaacagcgtcatcttcctgctggtgcagagcatggtggtggacctgaagaacctgctcttcaaccccagcaagcccttcagccggggcagccagcctgcagatgtggacctgatgattgactgcctggtgtcctgcttccgcatcagcccccacaacaaccagcacttcaagatctgcctggcccagaacagccccagcaccttccactacgtgctggtgaacagcctgcaccgcatcatcaccaacagcgccctggactggtggcccaagattgatgctgtgtactgccacagcgtggagctgaggaacatgtttggagagaccctgcacaaggctgtgcagggctgtggggcccacccagccatccgcatggcccccagcctgaccttcaaggagaaggtgaccagcctgaagttcaaggagaagcccacagacctggagaccaggagctacaagtacctgctgctgtccatggtgaagctgattcatgctgaccccaagctgctgctgtgcaaccccaggaagcagggccctgagacccagggcagcacagctgagctgatcaccggcctggtgcagctggtgccccagagccacatgcctgagatcgcccaggaggccatggaggccctgctggtgctgcaccagctggacagcattgacctgtggaacccagatgcccctgtggagaccttctgggagatcagcagccagatgctgttctacatctgcaagaagctgaccagccaccagatgctgagcagcacagagatcctgaagtggctgcgggagatcctgatctgcaggaacaagttcctgctgaagaacaagcaggccgacaggagcagctgccacttcctgctcttctacggcgtgggctgtgacatccccagcagcggcaacaccagccagatgtccatggaccacgaggagctgctgcggacccctggggccagcctgaggaagggcaagggcaacagctccatggattctgctgctggctgcagcggcaccccacccatctgccggcaggcccagaccaagctggaggtggccctgtacatgttcctgtggaacccagacacagaggccgtgctggtggccatgagctgcttccgccacctgtgtgaggaggccgacatccgctgtggggtggatgaggtgtctgtgcacaacctgctgcccaactacaacaccttcatggagtttgcctctgtgagcaacatgatgagcacaggccgggccgccctgcagaagagggtgatggccctgctgcggcgcatcgagcaccccacagctggcaacacagaggcctgggaggacacccacgccaagtgggagcaggccaccaagctgatcctgaactaccccaaggccaagatggaggatggccaggccgctgagagcctgcacaagaccatcgtgaagaggaggatgagccacgtgtctgggggcggcagcattgacctgagtgacacagacagcctgcaggagtggatcaacatgacaggcttcctgtgtgccctgggcggcgtgtgcctgcagcagaggagcaacagcggcctggccacctacagcccccccatgggccctgtgtctgagaggaagggctccatgatctctgtgatgagcagcgagggcaatgctgacacccctgtgtccaagttcatggaccggctgctgagcctgatggtgtgcaaccacgagaaggtgggcctgcagatccgcaccaacgtgaaggacctggtgggcctggagctgagccctgccctgtaccccatgctgttcaacaagctgaagaacaccatcagcaagttctttgacagccagggccaggtgctgctgacagacaccaacacccagtttgtggagcagaccatcgccatcatgaagaacctgctggacaaccacacagagggcagcagcgagcacctgggccaggccagcattgagaccatgatgctgaacctggtgcgctacgtgcgggtgctgggcaacatggtgcacgccatccagatcaagaccaagctgtgccagctggtggaggtgatgatggccaggagagatgacctgtccttctgccaggagatgaagttcaggaacaagatggtggagtacctgacagactgggtgatgggcaccagcaaccaggccgcagatgatgatgtgaagtgcctgacccgggacctggaccaggcctccatggaggccgtggtgtccctgctggccggcctgcccctgcagcctgaggagggagatggagtggagctgatggaggccaagagccagctgttcctgaagtacttcaccctcttcatgaacctgctgaatgactgcagcgaggtggaggatgagagcgcccagacaggaggcaggaagaggggcatgagccggcggctggccagcctgcggcactgcaccgtgctggccatgagcaacctgctgaatgccaacgtggacagcggcctgatgcacagcatcggcctgggctaccacaaggacctgcagacccgggccaccttcatggaggtgctgaccaagatcctgcagcagggcacagaatttgacaccctggccgagaccgtgctggccgacagatttgagcggctggtggagctggtgaccatgatgggagaccagggcgagctgcccatcgccatggccctggccaacgtggtgccctgcagccagtgggatgagctggcccgggtgctggtgaccctgtttgacagccgccacctgctgtaccagctgctgtggaacatgttcagcaaggaggtggagctggccgacagcatgcagaccctcttccggggcaacagcctggccagcaagatcatgaccttctgcttcaaggtgtatggagccacctacctgcagaagctgctggaccccctgctgagaattgtcatcaccagcagtgactggcagcacgtgtcctttgaggtggaccccacccggctggagcccagcgagagcctggaggagaaccagaggaacctgctgcagatgacagagaagttcttccacgccatcatcagcagcagcagcgagttccccccccagctgcggtctgtgtgccactgcctgtaccaggtggtgtcccagcgcttcccccagaacagcattggagctgtgggcagcgccatgttcctgcgcttcatcaacccagccatcgtgagcccctatgaagctggcatcctggacaagaagcccccaccccgcatcgagcggggcctgaagctgatgagcaagatcctgcagagcatcgccaaccacgtgctcttcaccaaggaggagcacatgaggcccttcaatgactttgtgaagagcaactttgatgctgcccggcgcttcttcctggacatcgccagtgactgccccaccagtgatgctgtgaaccacagcctgtccttcatcagtgatggaaatgtgctggccctgcaccggctgctgtggaacaaccaggagaagattggccagtacctgagcagcaacagagaccacaaggctgtgggccggcggccctttgacaagatggccaccctgctggcctacctgggccccccagagcacaagcctgtggccgacacccactggagcagcctgaacctgaccagcagcaagtttgaggagttcatgaccaggcaccaggtgcatgagaaggaggagttcaaggccctgaagaccctgagcatcttctaccaggccggcaccagcaaggccggcaaccccatcttctactacgtggcccggcgcttcaagacaggccagatcaacggggacctgctgatctaccacgtgctgctgaccctgaagccctactatgccaagccctatgagatcgtggtggacctgacccacacaggccccagcaaccgcttcaagacagacttcctgagcaagtggtttgtggtgtttcctggctttgcctatgacaacgtgtctgctgtgtacatctacaactgcaacagctgggtgcgggagtacaccaagtaccacgagcggctgctgaccggcctgaagggcagcaagaggctggtgttcatcgactgccctgggaagctggccgagcacatcgagcacgagcagcagaagctgcctgctgccaccctggccctggaggaggacctgaaggtgttccacaatgccctgaagctggcccacaaggacaccaaggtgtccatcaaggtgggcagcacagctgtgcaggtgaccagcgctgagaggaccaaggtgctgggccagagcgtcttcctgaatgacatctactatgccagcgagattgaggagatctgcctggtggatgagaaccagttcaccctgaccatcgccaaccagggcacccccctgaccttcatgcaccaggagtgtgaggccatcgtgcagagcatcatccacatccgcacccgctgggagctgagccagcctgacagcatcccccagcacaccaagatccggcccaaggatgtgcccggcaccctgctgaacatcgccctgctgaacctgggcagcagtgaccccagcctgcggtctgctgcctacaacctgctgtgtgccctgacctgcaccttcaacctgaagattgagggccagctgctggagaccagcggcctgtgcatcccagccaacaacaccctcttcatcgtgtccatcagcaagaccctggccgccaatgagccccacctgaccctggagttcctggaggagtgcatcagcggcttcagcaagagcagcattgagctgaagcacctgtgcctggagtacatgaccccctggctgagcaacctggtgcgcttctgcaagcacaatgatgatgccaagaggcagagggtgacagccatcctggacaagctgatcaccatgaccatcaatgagaagcagatgtaccccagcatccaggccaagatctggggcagcctgggccagatcacagacctgctggatgtggtgctggacagcttcatcaagaccagcgccactggaggcctgggcagcatcaaggccgaggtgatggctgacacagctgtggccctggccagcggaaatgtgaagctggtgagcagcaaggtgattggccgcatgtgcaagatcatcgacaagacctgcctgagccccacccccaccctggagcagcacctgatgtgggatgacatcgccatcctggcccgctacatgctgatgctgtccttcaacaacagcctggatgtggccgcccacctgccctacctgttccacgtggtgaccttcctggtggccaccggccccctgagcctgcgggccagcacccacggcctggtgatcaacatcatccacagcctgtgcacctgcagccagctgcacttcagcgaggagaccaagcaggtgctgcggctgagcctgacagagttcagcctgcccaagttctacctgctgtttggcatcagcaaggtgaagtctgctgctgtgattgccttccgcagcagctacagagaccgctccttcagccctggcagctatgagcgggagacctttgccctgaccagcctggagaccgtgacagaggccctgctggagatcatggaggcctgcatgagggacatccccacctgcaagtggctggaccagtggacagagctggcccagagatttgccttccagtacaaccccagcctgcagccccgggccctggtggtgtttggctgcatcagcaagagggtgagccacggccagatcaagcagatcatccgcatcctgagcaaggccctggagagctgcctgaagggccctgacacctacaacagccaggtgctgattgaggccaccgtgattgccctgaccaagctgcagcccctgctgaacaaggacagccccctgcacaaggccctcttctgggtggccgtggccgtgctgcagctggatgaggtgaacctgtacagcgctggaacagccctgctggagcagaacctgcacaccctggacagcctgcgcatcttcaatgacaagagccctgaggaggtgttcatggccatccggaaccccctggagtggcactgcaagcagatggaccactttgtgggcctgaacttcaacagcaacttcaactttgccctggtgggccacctgctgaagggctaccgccaccccagccctgccatcgtggccaggacagtgcgcatcctgcacaccctgctgaccctggtgaacaagcacaggaactgtgacaagtttgaggtgaacacccagagcgtggcctacctggccgccctgctgactgtgtctgaggaggtgcgcagccgctgcagcctgaagcacaggaagagcctgctgctgacagacatctccatggagaatgtgcccatggacacctaccccatccaccacggggaccccagctaccgcaccctgaaggagacccagccctggagcagccccaagggcagcgagggctacctggccgccacctaccccaccgtgggccagaccagcccccgggccaggaagtccatgagcctggacatgggccagcccagccaggccaacaccaagaagctgctgggcaccaggaagagctttgaccacctgatcagtgacaccaaggcccccaagaggcaggagatggagagcggcatcaccaccccacccaagatgagaagagtggccgagacagattatgagatggagacccagaggatcagcagcagccagcagcacccccacctgaggaaggtgtctgtgtctgagagcaatgtgctgctggatgaggaggtgctgacagaccccaagatccaggccctgctgctgactgtgctggccaccctggtgaagtacaccacagatgaatttgaccagaggatcctgtatgagtacctggccgaggcctctgtggtgttccccaaggtgtttcctgtggtgcacaacctgctggacagcaagatcaacaccctgctgagcctgtgccaggaccccaacctgctgaaccccatccatggaattgtgcagagcgtggtgtaccacgaggagagccccccccagtaccagaccagctacctgcagagctttggcttcaacggcctgtggaggtttgctggccccttcagcaagcagacccagatcccagactatgcagagctgattgtgaagttcctggatgccctgattgacacctacctgcccggcattgatgaggagaccagcgaggagagcctgctgacccccaccagcccctaccccccagccctgcagagccagctgagcatcacagccaacctgaacctgagcaacagcatgaccagcctggccaccagccagcacagccctgccagcctgccctgcagcaagtctgctgtgttcatgcagctgttcccccaccagggcatcgacaaggaaaatgtggagctgagccccaccaccggccactgcaacagcggccgcaccaggcatggcagcgccagccaggtgcagaagcagaggtctgctggcagcttcaagagaaattccatcaagaagatcgtgtag

SEQ ID NO: 275469 - DNA, 7509 bp, Artificial Sequence
  derived and/or modified sequence
aactgggaggacaacagcgtgatcttcctgctggtgcagagcatggtggtagacctgaagaatctacttttcaatccaagcaagccattcagtcggggcagccaaccagctgacgttgatctgatgattgactgtttagtgagttgctttcgtatctcccctcataataatcaacacttcaagatctgtctggcgcaaaattctccgtccacatttcactatgtgctagtaaactcactgcatcgcattattacaaactcggccctcgactggtggcccaagattgacgcagtgtactgtcattctgtcgagctaaggaatatgttcggagaaactctgcacaaagccgtgcagggatgcggggctcaccccgcaattcgaatggctccaagtttaacattcaaggagaaggttacctccctgaaatttaaggaaaaaccaactgacctcgaaaccaggagctataagtacctgttgctgtcaatggttaagttgattcacgccgatcctaagctgctcttgtgtaacccacggaagcagggcccggagactcaggggtctactgccgagctcataactgggctggttcagttagtgccacagagccatatgcctgaaatcgcccaagaggccatggaagcattgctggtgctgcaccagctggatagcattgatctgtggaaccccgatgctcccgtcgaaaccttttgggagatttccagccagatgcttttttatatctgcaaaaagttgacctcccaccagatgttatcttctaccgagatcctgaagtggctgcgggagatcctcatttgcaggaataaattcctgctgaaaaacaagcaagcagatcgctccagttgtcacttcctgctgttctacggagtcgggtgcgatattccgtctagcggaaacacctcacaaatgtcgatggaccacgaggaattgctgagaacaccaggcgcctcactacgaaaaggcaaagggaatagctccatggattcggctgcaggctgctccggcacacctcccatttgccggcaagcgcagaccaaactggaggtcgctctgtatatgttcctttggaacccagatacggaggcggtcttggtcgccatgagctgctttcgacatttgtgcgaagaggccgacattcgctgcggtgtcgacgaggtgagtgtacacaatcttctgccaaactacaacacctttatggaatttgcaagtgtctcaaatatgatgtccaccggccgggccgcattacagaagcgcgtgatggctctgttaagaagaattgagcaccccacagcaggaaataccgaggcctgggaggatacacatgctaagtgggagcaggcaaccaagctgattctcaactacccaaaggccaagatggaggacggccaagccgcagaatcattgcacaaaaccatagttaaacggagaatgtctcatgtgtcagggggcgggagcattgacctctcggataccgattccttgcaggaatggataaatatgactgggttcttgtgtgcattagggggggtatgtttacagcaacggtcaaattccggactggcaacatacagcccaccgatgggtcctgtgtcagagagaaaaggatccatgatatctgtcatgagttcagagggcaacgcggacaccccagtgagcaagttcatggaccgtctgctttccctgatggtttgcaatcatgagaaggtagggttacagatccggaccaatgtgaaggatctggtcggcctggaattgtctcctgccctgtatcccatgctctttaacaagctcaaaaacaccatatctaagtttttcgactcccaaggccaagtgctgttgacagacaccaatacacagtttgttgagcaaaccatcgcgatcatgaagaatctcctcgacaatcacacagagggcagctcagagcacctcgggcaggcaagcatcgaaaccatgatgctgaaccttgttcggtatgttcgcgtgctgggtaatatggtccatgcaatccagattaaaactaaactctgtcagctggtcgaggtgatgatggcccggagagacgatctctcattttgccaggaaatgaagttccgcaacaagatggtggagtacctgacagactgggtgatggggacctctaaccaggcggccgacgacgatgttaagtgtctgactagagacttggaccaggcgtctatggaggccgtcgttagtctgctggcgggtctccccctccagccagaggaaggggacggcgttgaactcatggaggccaaaagccaattgtttctgaaatatttcaccctgttcatgaacttgctcaacgattgctccgaggtagaagatgagagcgcccaaactggaggacggaagagaggaatgtccaggaggctcgcctctctccgccattgcacggtcctcgccatgtctaacctcctgaacgccaatgttgactctgggctgatgcactctataggccttgggtaccataaggatctccagacgcgcgcgacttttatggaagtgctgacgaagatcttgcagcagggtacagagttcgacaccttagctgagacggtgctggctgaccggtttgagaggctagttgagctggttactatgatgggcgatcagggagagctccccatagctatggcactggcgaacgtggtgccctgctctcagtgggatgagctggcccgggttcttgtgaccctgttcgattcacgtcacctgttgtatcagctgctctggaacatgttttcaaaggaagttgagctggccgactctatgcagactctgttcaggggaaatagcctagcatctaagatcatgacattctgttttaaggtgtatggtgcaacatatttacagaaattgctggatccactgctcaggatcgtgattaccagtagcgactggcagcacgtgagcttcgaggtggaccccacaagacttgaaccctcagaaagcctcgaggagaatcagagaaacctgctacaaatgaccgagaagtttttccatgcgattatctcaagttcctccgagttcccgccccagttacgcagcgtttgtcattgtttgtatcaggtggtctctcaaaggttccctcagaatagcattggggcggttgggtcagccatgtttctgaggttcatcaaccccgccattgtaagtccatatgaagctgggatccttgataaaaagcctccaccaagaatcgagaggggactgaagcttatgtctaaaatcctgcagtcaattgctaaccatgtgttgttcaccaaagaggagcatatgcggccttttaacgatttcgttaagtctaattttgacgcggccaggagattctttctggacatagcctcagactgtccgacatcagatgcggttaatcactcattatcctttattagcgatggtaatgtcttggcgcttcatcgactgctgtggaacaaccaggaaaaaattgggcagtacctgtcttctaacagggaccacaaggccgtgggaaggcgaccgtttgataagatggccacactcctcgcatacctgggacctccagagcacaagcctgttgctgacacccactggtcatcactgaatctgaccagtagtaaatttgaagagttcatgacacgccaccaggttcacgaaaaggaagaatttaaggccctgaagactctttctatcttctaccaggcaggtacaagcaaggccgggaatccaattttctactacgtagctcggcgattcaagacgggtcagattaacggagatctcctgatatatcatgtgttactgaccctgaaaccctattacgccaagccatacgagatcgttgtcgatcttacgcacacaggccccagcaatcgattcaaaaccgattttctgtccaaatggttcgtagttttccctgggtttgcttacgataacgtgtccgccgtatacatttataactgtaactcgtgggtgcgcgaatatacaaagtaccatgagagactgctcaccgggcttaagggatctaagaggttggtgtttatagattgtccaggaaaattagcggaacatatcgaacacgagcagcagaagctgcctgcagccacactggcccttgaggaagacctcaaagtcttccataatgctctgaagctagcccacaaggacactaaagtgtcaattaaagtgggatcaacagctgtacaggtcacgagcgccgagcgcacaaaagtgctgggacagtcggtttttctcaatgacatttattacgccagcgagatagaggagatctgtttggtggatgagaatcagtttacgctgactattgccaaccaagggacgccactcacatttatgcaccaagagtgtgaagccatcgttcagtcaatcatccatatccggaccaggtgggagctctctcagccggacagtatacctcagcacactaaaatccgaccaaaagacgtgccagggacacttctgaatatagctttgctcaatctgggaagtagcgacccctccctgagaagcgccgcttacaatctgctgtgtgccctcacctgcacctttaatcttaaaatcgagggccagctactggagaccagtggtttatgtattcccgcgaacaacactctgtttatcgtcagcatctccaaaacactagcagcaaacgagccacacctcacgcttgagttccttgaggaatgcataagcgggttttccaaaagtagtatcgagctgaagcatctttgtctcgagtacatgaccccgtggctaagcaacctcgtccggttttgtaagcacaacgatgacgccaagaggcagagggtgacagcaattcttgacaagctcataacaatgacaatcaacgaaaagcagatgtatccttctattcaggcaaaaatttgggggagccttgggcagataacagacttgctcgatgtcgtccttgattcatttatcaagacctcagctacaggcggcctgggttcgatcaaggctgaggtgatggctgacactgccgtagcactggcgtccggcaacgtgaagctcgtgagctctaaggtgattgggcgtatgtgcaagattattgataagacttgtctttctcccaccccaaccctagagcagcatttgatgtgggacgacatagctatcctggcacgctatatgctcatgctctcttttaataatagtttagacgttgcagcacacctcccttacttgttccatgttgtgacttttctggtggctaccggcccactaagtcttcgggcctccacgcatggcctcgtgataaatattattcacagcctgtgtacctgcagccagctgcacttctccgaggaaaccaaacaggtcctgaggttgtcgctgaccgaattttccctgcctaagttctatctgctatttggaatatcgaaagtgaagtccgcggccgtgatagcattcagatcgagttacagggataggtctttctcacctggttcctacgagcgggagactttcgctttgacgagcctggagactgttacagaggccctcctggaaataatggaagcgtgtatgagggacatcccaacgtgcaagtggctagaccaatggacggagctcgcgcagaggttcgccttccagtacaaccccagtttacagccgagggctctggtcgttttcggatgtatctctaagagagtttctcatggccagatcaaacaaattattcgtatcctatccaaggccctcgagtcatgcctgaaaggacctgatacttataatagccaagtgctgatagaagctactgtcatcgccttaacaaaactgcaacccttactgaacaaggacagccccctccataaggcactcttctgggtcgccgttgccgttctccaactggacgaggtgaacctctactcagccggaaccgcattactcgagcagaatttgcacacccttgattctttaaggatcttcaacgataaaagcccagaggaagtatttatggctattagaaaccctctggagtggcattgtaaacagatggatcacttcgtgggccttaactttaactccaactttaactttgctctggtcggacacttgctcaaagggtaccggcaccctagtccagcaatcgtagcaaggacagtgcgcatcctgcatacactcctgaccctggtaaacaagcacagaaactgcgacaaattcgaggtgaatacccagtctgtggcctaccttgcagcacttctgactgtctcagaagaggttagaagccgttgttcgcttaagcatcggaagtcactgctgctgactgacatctcaatggagaatgtcccaatggatacatacccaatacatcatggtgaccccagttatcggactctgaaagagacgcagccatggagttctcctaagggaagcgagggttatctcgcagcgacctatcccaccgtgggacagacaagtcccagggccagaaagagtatgagtttggacatgggccaacctagtcaagccaatacgaaaaagctcttaggcactcgtaaatctttcgatcacctcatatcagacactaaagcacccaagcgtcaagagatggagtctggcatcacaaccccccccaagatgcgacgcgtggcggagacagattatgagatggagacacagagaattagctcaagccagcagcatccacaccttaggaaagtttcagtgagcgagtccaacgtgctgttggatgaagaagtgttgactgaccctaagatacaagccctcctcctgacagtcctggccactctagtcaaatatactacagatgagtttgaccagaggatactgtatgagtacttggccgaggcctccgtggtatttcccaaagtgttccccgtagttcacaacttactggacagcaagatcaacacacttctgtctctctgccaagatcctaaccttctcaatcccattcatggaatcgttcagagtgtagtgtaccatgaagagagtccgccccagtatcagacctcctatctgcaaagctttggctttaacggactttggaggttcgcagggcccttcagcaagcaaactcagatcccagactatgctgagcttattgtgaagtttctggatgctctcatcgatacttatttgccaggaattgatgaagaaacctcagaggagagtcttctcaccccgacaagcccatatcctcccgctctccaatctcagctgtcaatcaccgccaacctgaacctgagcaattctatgacctcactggccactagccagcattcacccgcgtccctgccatgctccaaatcagccgtgtttatgcaactcttccctcaccaggggatagataaagaaaatgtggaattgagtcctactaccggtcactgcaattccggacgcactcggcacggaagcgccagtcaggtccagaagcagaggtccgctggatcattcaaacgcaatagcataaaaaagatcgtatag

SEQ ID NO: 275470 - DNA, 11031 bp, Artificial Sequence
  derived and/or modified sequence
aattgggaagataactctgtcattttcctacttgttcagtccatggtggttgatcttaagaacctgctttttaatccaagtaagccattctcaagaggcagtcagcctgcagatgtggatctaatgattgactgccttgtttcttgctttcgtataagccctcacaacaaccaacactttaagatctgcctggctcagaattcaccttctacatttcactatgtgctggtaaattcactccatcgaatcatcaccaattccgcattggattggtggcctaagattgatgctgtgtattgtcactcggttgaacttcgaaatatgtttggtgaaacacttcataaagcagtgcaaggttgtggagcacacccagcaatacgaatggcaccgagtcttacatttaaagaaaaagtaacaagccttaaatttaaagaaaaacctacagacctggagacaagaagctataagtatcttctcttgtccatggtgaaactaattcatgcagatccaaagctcttgctttgtaatccaagaaaacaggggcccgaaacccaaggcagtacagcagaattaattacagggctcgtccaactggtccctcagtcacacatgccagagattgctcaggaagcaatggaggctctgctggttcttcatcagttagatagcattgatttgtggaatcctgatgctcctgtagaaacattttgggagattagctcacaaatgcttttttacatctgcaagaaattaactagtcatcaaatgcttagtagcacagaaattctcaagtggttgcgggaaatattgatctgcaggaataaatttcttcttaaaaataagcaggcagatagaagttcctgtcactttctccttttttacggggtaggatgtgatattccttctagtggaaataccagtcaaatgtccatggatcatgaagaattactacgtactcctggagcctctctccggaagggaaaagggaactcctctatggatagtgcagcaggatgcagcggaacccccccgatttgccgacaagcccagaccaaactagaagtggccctgtacatgtttctgtggaaccctgacactgaagctgttctggttgccatgtcctgtttccgccacctctgtgaggaagcagatatccggtgtggggtggatgaagtgtcagtgcataacctcttgcccaactataacacattcatggagtttgcctctgtcagcaatatgatgtcaacaggaagagcagcacttcagaaaagagtgatggcactgctgaggcgcattgagcatcccactgcaggaaacactgaggcttgggaagatacacatgcaaaatgggaacaagcaacaaagctaatccttaactatccaaaagccaaaatggaagatggccaggctgctgaaagccttcacaagaccattgttaagaggcgaatgtcccatgtgagtggaggaggatccatagatttgtctgacacagactccctacaggaatggatcaacatgactggcttcctttgtgcccttgggggagtgtgcctccagcagagaagcaattctggcctggcaacctatagcccacccatgggtccagtcagtgaacgtaagggttctatgatttcagtgatgtcttcagagggaaacgcagatacacctgtcagcaaatttatggatcggctgttgtccttaatggtgtgtaaccatgagaaagtgggacttcaaatacggaccaatgttaaggatctggtgggtctagaattgagtcctgctctgtatccaatgctatttaacaaattgaagaataccatcagcaagttttttgactcccaaggacaggttttattgactgataccaatactcaatttgtagaacaaaccatagctataatgaagaacttgctagataatcatactgaaggcagctctgaacatctagggcaagctagcattgaaacaatgatgttaaatctggtcaggtatgttcgtgtgcttgggaatatggtccatgcaattcaaataaaaacgaaactgtgtcaattagttgaagtaatgatggcaaggagagatgacctctcattttgccaagagatgaaatttaggaataagatggtagaatacctgacagactgggttatgggaacatcaaaccaagcagcagatgatgatgtaaaatgtcttacaagagatttggaccaggcaagcatggaagcagtagtttcacttctagctggtctccctctgcagcctgaagaaggagatggtgtggaattgatggaagccaaatcacagttatttcttaaatacttcacattatttatgaaccttttgaatgactgcagtgaagttgaagatgaaagtgcgcaaacaggtggcaggaaacgtggcatgtctcggaggctggcatcactgaggcactgtacggtccttgcaatgtcaaacttactcaatgccaacgtagacagtggtctcatgcactccataggcttaggttaccacaaggatctccagacaagagctacatttatggaagttctgacaaaaatccttcaacaaggcacagaatttgacacacttgcagaaacagtattggctgatcggtttgagagattggtggaactggtcacaatgatgggtgatcaaggagaactccctatagcgatggctctggccaatgtggttccttgttctcagtgggatgaactagctcgagttctggttactctgtttgattctcggcatttactctaccaactgctctggaacatgttttctaaagaagtagaattggcagactccatgcagactctcttccgaggcaacagcttggccagtaaaataatgacattctgtttcaaggtatatggtgctacctatctacaaaaactcctggatcctttattacgaattgtgatcacatcctctgattggcaacatgttagctttgaagtggatcctaccaggttagaaccatcagagagccttgaggaaaaccagcggaacctccttcagatgactgaaaagttcttccatgccatcatcagttcctcctcagaattcccccctcaacttcgaagtgtgtgccactgtttataccaggtggttagccagcgtttccctcagaacagcatcggtgcagtaggaagtgccatgttcctcagatttatcaatcctgccattgtctcaccgtatgaagcagggattttagataaaaagccaccacctagaatcgaaaggggcttgaagttaatgtcaaagatacttcagagtattgccaatcatgttctcttcacaaaagaagaacatatgcggcctttcaatgattttgtgaaaagcaactttgatgcagcacgcaggtttttccttgatatagcatctgattgtcctacaagtgatgcagtaaatcatagtctttccttcataagtgacggcaatgtgcttgctttacatcgtctactctggaacaatcaggagaaaattgggcagtatctttccagcaacagggatcataaagctgttggaagacgaccttttgataagatggcaacacttcttgcatacctgggtcctccagagcacaaacctgtggcagatacacactggtccagccttaaccttaccagttcaaagtttgaggaatttatgactaggcatcaggtacatgaaaaagaagaattcaaggctttgaaaacgttaagtattttctaccaagctgggacttccaaagctgggaatcctattttttattatgttgcacggaggttcaaaactggtcaaatcaatggtgatttgctgatataccatgtcttactgactttaaagccatattatgcaaagccatatgaaattgtagtggaccttacccataccgggcctagcaatcgctttaaaacagactttctctctaagtggtttgttgtttttcctggctttgcttacgacaacgtctccgcagtctatatctataactgtaactcctgggtcagggagtacaccaagtatcatgagcggctgctgactggcctcaaaggtagcaaaaggcttgttttcatagactgtcctgggaaactggctgagcacatagagcatgaacaacagaaactacctgctgccaccttggctttagaagaggacctgaaggtattccacaatgctctcaagctagctcacaaagacaccaaagtttctattaaagttggttctactgctgtccaagtaacttcagcagagcgaacaaaagtcctagggcaatcagtctttctaaatgacatttattatgcttcggaaattgaagaaatctgcctagtagatgagaaccagttcaccttaaccattgcaaaccagggcacgccgctcaccttcatgcaccaggagtgtgaagccattgtccagtctatcattcatatccggacccgctgggaactgtcacagcccgactctatcccccaacacaccaagattcggccaaaagatgtccctgggacactgctcaatatcgcattacttaatttaggcagttctgacccgagtttacggtcagctgcctataatcttctgtgtgccttaacttgtacctttaatttaaaaatcgagggccagttactagagacatcaggtttatgtatccctgccaacaacaccctctttattgtctctattagtaagacactggcagccaatgagccacacctcacgttagaatttttggaagagtgtatttctggatttagcaaatctagtattgaattgaaacacctttgtttggaatacatgactccatggctgtcaaatctagttcgtttttgcaagcataatgatgatgccaaacgacaaagagttactgctattcttgacaagctgataacaatgaccatcaatgaaaaacagatgtacccatctattcaagcaaaaatatggggaagccttgggcagattacagatctgcttgatgttgtactagacagtttcatcaaaaccagtgcaacaggtggcttgggatcaataaaagctgaggtgatggcagatactgctgtagctttggcttctggaaatgtgaaattggtttcaagcaaggttattggaaggatgtgcaaaataattgacaagacatgcttatctccaactcctactttagaacaacatcttatgtgggatgatattgctattttagcacgctacatgctgatgctgtccttcaacaattcccttgatgtggcagctcatcttccctacctcttccacgttgttactttcttagtagccacaggtccgctctcccttagagcttccacacatggactggtcattaatatcattcactctctgtgtacttgttcacagcttcattttagtgaagagaccaagcaagttttgagactcagtctgacagagttctcattacccaaattttacttgctgtttggcattagcaaagtcaagtcagctgctgtcattgccttccgttccagttaccgggacaggtcattctctcctggctcctatgagagagagacttttgctttgacatccttggaaacagtcacagaagctttgttggagatcatggaggcatgcatgagagatattccaacgtgcaagtggctggaccagtggacagaactagctcaaagatttgcattccaatataatccatccctgcaaccaagagctcttgttgtctttgggtgtattagcaaacgagtgtctcatgggcagataaagcagataatccgtattcttagcaaggcacttgagagttgcttaaaaggacctgacacttacaacagtcaagttctgatagaagctacagtaatagcactaaccaaattacagccacttcttaataaggactcgcctctgcacaaagccctcttttgggtagctgtggctgtgctgcagcttgatgaggtcaacttgtattcagcaggtaccgcacttcttgaacaaaacctgcatactttagatagtctccgtatattcaatgacaagagtccagaggaagtatttatggcaatccggaatcctctggagtggcactgcaagcaaatggatcattttgttggactcaatttcaactctaactttaactttgcattggttggacaccttttaaaagggtacaggcatccttcacctgctattgttgcaagaacagtcagaattttacatacactactaactctggttaacaaacacagaaattgtgacaaatttgaagtgaatacacagagcgtggcctacttagcagctttacttacagtgtctgaagaagttcgaagtcgctgcagcctaaaacatagaaagtcacttcttcttactgatatttcaatggaaaatgttcctatggatacatatcccattcatcatggtgacccttcctataggacactaaaggagactcagccatggtcctctcccaaaggttctgaaggataccttgcagccacctatccaactgtcggccagaccagtccccgagccaggaaatccatgagcctggacatggggcaaccttctcaggccaacactaagaagttgcttggaacaaggaaaagttttgatcacttgatatcagacacaaaggctcctaaaaggcaagaaatggaatcagggatcacaacaccccccaaaatgaggagagtagcagaaactgattatgaaatggaaactcagaggatttcctcatcacaacagcacccacatttacgtaaagtttcagtgtctgaatcaaatgttctcttggatgaagaagtacttactgatccgaagatccaggcgctgcttcttactgttctagctacactggtaaaatataccacagatgagtttgatcaacgaattctttatgaatacttagcagaggccagtgttgtgtttcccaaagtctttcctgttgtgcataatttgttggactctaagatcaacaccctgttatcattgtgccaagatccaaatttgttaaatccaatccatggaattgtgcagagtgtggtgtaccatgaagaatccccaccacaataccaaacatcttacctgcaaagttttggttttaatggcttgtggcggtttgcaggaccgttttcaaagcaaacacaaattccagactatgctgagcttattgttaagtttcttgatgccttgattgacacgtacctgcctggaattgatgaagaaaccagtgaagaatccctcctgactcccacatctccttaccctcctgcactgcagagccagcttagtatcactgccaaccttaacctttctaattccatgacctcacttgcaacttcccagcattccccagcttctctgccttgctctaaatcagcagttttcatgcagctgttccctcatcaaggaatcgacaaggagaacgttgaactctcccctaccactggccactgtaacagtggacgaactcgccacggatccgcaagccaagtgcagaagcaaagaagcgctggcagtttcaaacgtaatagcattaagaagatcgtgtgaagcttgcttgctttcttttttaaaatcaacttaacatgggctcttcactagtgaccccttccctgtccttgccctttccccccatgttgtaatgctgcacttcctgttttataatgaacccatccggtttgccatgttgccagatgatcaactcttcgaagccttgcctaaatttaatgctgccttttctttaactttttttcttctacttttggcgtgtatctggtatatgtaagtgttcagaacaactgcaaagaaagtgggaggtcaggaaacttttaactgagaaatctcaattgtaagagaggatgaattcttgaatactgctactactggccagtgatgaaagccatttgcacagagctctgccttctgtggttttcccttcttcatcctacagagtaaagtgttagtcctatttatacatttttcaagatacaagtttatgagagaaatagtattataaccccagtatgtttaatcttttagctgtggactttttttttaaccgtacaaaactgaaagaaccatagaggtcaagcctcagtgacttgacaccataaagccacagacaaggtacttgggggggagggcagggaaatttcatattttatagtggattcttaagaaatactaacacttgagtattagcaataattacaggaaaataagtgcgaccacatatatcttaacattactgaattaaaactatggcttctaagtccttatccaaactcagtcatccaaactagtttatttttttctccagttgattatcttttaatttttaattttgctaaaggtggtttttttgtgttttgttttttgtaaaccaaaactatactaagtatagtaattatatatatatatatattttttcccctccccctcttctttcctaactaattctgagcagggtaatcagtgaacaaagtgttgaaaattgttcccagaaggtaattttcatagatgtttgcattagctccatagcaaaatggaatggtacgtgacatttagggtagctgatatttttattttgttaaataatttccaagaatagagtatggtgtatattataaatttctttgataagatgtattttgaatgtcttttaatcttcctcctcctctccaaaaaaatcagaaacctctttaagaaaacatgtaggttatatatgctagaattgcatttaatcactgtgaaaagactggtcagcctgcattagtatgacagtaggggggctgttagaattgctgctatactggtggtatggattatcatggcattggaattttcatagtaatgcagatccaatttctttgtggtacctgcagtttacaaaataatttgacttcagtgagcatattggtatctggatgttccaatttagaactaaaccatatttattacaaaaagatattaatccctctactcccaggttccctttatatgttaagatataatggctttgaggggggaaaaaataaacctaggggagaggggagtttcctgtagtgctgtttcattagaggatttcagtaaattaaattccacagctaattcaataaataatggtacatttaagtgttctgattttaataatatatttcacatttatccacacagtaacaatgtaatatgttaatgtaaataaaattggttttgatactcagaaataacaagaatttaattttttaaatttgtttacagtcctgggaaaagtaagaattatttgccaaaataagaggaaagaaaaccttagtattattaatgagtttaccatagaattgttggaaatactgaagacaggtgcaatttactaaacttttgtttttaaactattgtagaggctgcattagaagaaaatgtttataatgacagagcaactatgactatataaaaaagctgaaattagaactgtgtttagaaatagatcagtaacccagtgccaaggatgccaagctgccaccatggtcttggctctcccacaacccagtgtttctggggtaagtttcacagtttctaggccctggaatagcaggcagtgtaagcctttgataactttagttcgatgtttttcttgtttttgtttgttggtttggtgcatatgatagtgggtgttatgctattttgctcttcccatcaaaataaagaaacttccagaggtttactgttaaaaatactgatatttccataaacgggtttaccaagggtgtagtatttcataccgcctgaaatgatcagcattggcacaaatcaaaattcagccgcctttgaaatgcaaaaatacctttgactagtaagtacatcctaggagtttgaaaacttaactaaggtttaaaatttaccttgtttaaagaacttctgacttttgaggaaaatctagctttccaagtaactaaaatgtacatgagataaacctctcaccactatgtgtcccttgagaaatgcaacacttttttagtcttcatacttgtaatctataaaagaaattctgaagtttagaccaagttgcccatttctgcgtaattgacataagttctgttaaaaatattataagtaattcgtttcggtttgtagatgtttcccctgacttgttaaagaggaaaccaggaactcagtcatgtttttgtcctggataatctacctgttatgccagtactcccatccgaggggcatgcccttagttgcccagatggagatgcagttcagtagatttggggcaaagtggctacagctctgtcttccattcactcaacacctgttcatgactgagccaggtgcccaggacacatcctaaacagtcagcttctatcctgtgtcctagttggggagacagagtgccagccagcaaccctcccaggtttgtaggttttaggggttttcagttttgtttgggttttttgttttttgtttttgtttctacatccttccccgactcccaggcataatgaggcatgtcttactcaatgttatgcaatggatttaggcaaaaattcattcttagtgtcagccacacaattttttttaatgcagtatattcacctgtaaatagtttgtgtaaaatttgacaaaaaaagtatatttactatactgtaaatatatgtgatgatatattgtattattttgcttttttgtaaagcagttagttgctgcacatggataacaacaaaaatttgattattctcgtgttagtattgttaacttctttttgcgactgcgttacatcatttaaagaaaatgctgtgtattgtaaacttaaattgtatatgataacttactgtcctttccatccgggcctaaactttggcagttcctttgtctacaaccttgttaatactgtaaacagttgtacgccagcaggaaaaatactgcccaacagacaaaatcgatcattgtaggggaaaatcatagaaatccatttcagatctttattgttcctcaccccattttcctccttgtgtatgtacttcccccacccccctttttttaagtaaaatgtaaattcaatctgctctaaga

SEQ ID NO: 275471 - DNA, 7508 bp, Artificial Sequence
  derived and/or modified sequence
aactgggaggacaactccgtcattttcctcctcgtgcaatctatggttgtggatctgaagaaccttctgtttaatccgagtaaacctttctcacgtgggagccaacccgcagacgtggatttaatgatagattgcctggtttcgtgcttccgaatcagccctcataacaatcaacatttcaagatctgtttggcgcagaacagcccctccacctttcattatgttcttgtgaacagtctccacaggattatcactaacagtgccttggactggtggcccaagattgatgctgtgtattgtcacagcgtcgagctgcggaacatgtttggagaaacattacacaaagccgtacagggttgcggcgcacatcctgctattcgaatggccccatcacttacattcaaagaaaaggtcaccagtctgaaattcaaagaaaagccaaccgacttggagacccgttcatacaagtatcttttactctctatggtgaaactaatccatgccgaccctaagcttctcctctgcaaccctaggaagcagggtcccgaaacccagggaagcaccgccgagctgattacgggcctggtgcagctagtgccccaatcccatatgccagaaattgcccaggaagcaatggaggccctgctggtacttcaccaacttgatagtatcgatctgtggaatccagatgctcccgttgaaactttttgggaaattagctcacagatgctcttttacatatgcaaaaagttaacctctcaccagatgctgtcctccactgaaatcctgaagtggctgcgagagatcctcatttgcagaaacaagtttctgttgaagaataaacaggctgacaggtcctcttgtcactttctgctgttctatggagtggggtgcgatatcccctccagcggcaatacatcccagatgtccatggaccacgaagagcttctccggacacccggtgcgagtctgcggaaaggtaagggaaattctagcatggatagtgccgctggctgtagtggcactccgcctatttgtaggcaggcacagaccaaactggaagttgctctatatatgttcctttggaacccggacactgaggcagttcttgtggctatgagttgtttccgtcacctatgtgaggaggcggacattagatgcggggtggacgaagtttccgtccataatctcctgcccaattacaacactttcatggaatttgcatctgtgtccaacatgatgtccacgggccgtgccgcactccagaaaagggtgatggctctgttgaggcgcatcgaacatcccacagctgggaacacagaagcctgggaagatacacacgccaagtgggaacaggcaaccaagctgatcctaaattacccaaaggcgaagatggaggacggccaggccgcagagtccctgcacaagacaatcgtaaaaaggagaatgagtcacgtttcagggggaggttccatcgacttgtcagacacagacagcctgcaggaatggataaatatgacgggcttcctgtgcgcccttgggggagtgtgcctgcaacagaggagtaactcaggtttggccacctactcccccccaatgggccctgtgagtgaaagaaaagggtcgatgatttccgttatgtcctccgaaggaaatgcagatacacccgtatctaagttcatggatcggctcctgtcccttatggtgtgtaaccacgagaaagtaggactgcagatccgcacgaatgtaaaggatttggtaggcctcgaactgtccccagcactataccccatgttattcaataagctcaagaatactatttctaaattctttgactctcagggccaagtgctgctgactgacaccaacactcagttcgtggagcagacaattgcaatcatgaagaatctgctagacaaccacactgaaggatcaagcgagcaccttggccaagcaagcattgaaactatgatgctaaacctagtgcgctatgttcgggtcctaggaaatatggtgcatgctatccagataaagaccaaactgtgccagttggttgaggtgatgatggccagaagagacgacttgagtttctgccaagaaatgaaattcagaaacaagatggtggagtatctgacagattgggtgatgggaacttcaaatcaggccgctgatgatgatgtgaagtgcctcacacgggacttggatcaagctagcatggaggctgtggtcagcctcctcgctggtctgcccctgcagcccgaagagggggacggcgtagagttaatggaagctaagtcccaactgtttctgaaatatttcaccctttttatgaacctgctgaacgattgcagcgaggtcgaagatgagtctgctcagacaggaggaagaaaaagaggcatgtcccggaggctggcctcactgaggcactgtactgtgctggcaatgtccaacttgctcaacgccaacgttgactccggcctcatgcattccatcggccttggataccataaagacctgcagactcgggcaacctttatggaggtgttgactaagattctgcagcaaggcaccgaatttgacacccttgccgagaccgttttggccgatagattcgaacgcctggttgagttggtgacaatgatgggagatcaaggtgaactgcccatagccatggcactggctaacgtggtcccgtgcagccaatgggacgagcttgcgcgtgtgctggttaccctctttgattcgagacatctgctttatcaactactttggaatatgttctctaaagaggtggagctggcggattctatgcaaacgttattccgagggaactccctggcctccaagatcatgacgttctgttttaaagtgtatggggcaacctacctgcagaaacttcttgacccccttctcaggatcgtgattactagctccgactggcagcatgtgtctttcgaggtggatccgacccgccttgagccttccgaatccctggaggagaatcagcggaaccttcttcagatgacagaaaagttttttcacgctattatttcctcatcctcagaattcccgcctcaactccggtcagtctgccactgcctttatcaagttgtttcgcagaggtttccacagaactcaattggcgcagttgggagtgccatgtttcttagattcatcaatcccgcaatcgtgtctccatacgaagctggaattctggacaagaagcccccacctaggatagagaggggcctcaaactgatgtccaaaatcctgcaatcaatcgccaaccacgtcctctttaccaaagaagaacacatgcgcccttttaacgattttgtaaaaagtaattttgacgccgctcggaggtttttcctggatatcgcctccgactgccccacgtccgacgcagtgaatcattccctaagcttcattagtgacgggaatgtactggccctccaccgcctcttgtggaataaccaggagaaaatcgggcagtacctgagttcaaatcgcgatcacaaagccgtcggcagacggccttttgataaaatggccactcttctcgcgtatctggggcctccggagcacaagcctgtagccgacacgcattggtcgagcctgaaccttacatccagtaaatttgaagagttcatgacaagacaccaggtccatgaaaaggaagagtttaaagcactcaagaccctgtccatcttttaccaggctggaacctctaaggcaggtaaccccatcttctattatgtggcgcgacgctttaaaaccggccagatcaacggcgatctgctgatctaccatgtactcctgactctcaagccttattatgcaaaaccctatgaaatcgttgtggacctaacacacactggacccagcaatcgctttaagacggactttctgagtaagtggtttgtcgtgttcccaggctttgcatatgataatgtatcagctgtttatatctacaactgtaattcctgggtgcgcgagtataccaagtatcacgagcggctgctcacgggcctgaagggatccaaacggttagtgttcatcgactgtcccggtaaactcgccgagcatattgagcacgaacaacagaagctgcccgcagcgacccttgctctcgaggaggacctcaaagtgttccacaacgctcttaagctcgcccataaggatactaaggtcagcattaaagtcggttccaccgcggtccaagtaacgtctgcagagcgaactaaagtcctgggacagagcgtgttcctgaacgacatttactacgcaagtgagatcgaagaaatctgtttggtggatgagaaccagtttaccctcaccatcgcgaaccagggaacacctttaacctttatgcatcaagagtgcgaagcgatcgtgcaatccatcattcacatacggacccgctgggagttaagccagcccgattccattcctcaacacaccaagataaggcctaaggatgtgcccggaacactgcttaacatcgccttactgaatctggggtcctctgatccctcattacgtagcgctgcatacaatttgctgtgtgccctcacttgcacttttaatctgaagatcgagggacagctgctagaaacttcagggctctgtatcccggctaataatacgctgtttattgtctccatctccaaaacactagccgcaaacgaaccgcatctgaccctggaatttttggaggagtgtatcagtggcttcagcaagtcttctatagaacttaagcacctttgtctagagtacatgaccccatggctgtccaacctagtacgattctgcaagcataatgacgacgcaaaacgccaaagagttacggccattcttgacaagctgataacaatgaccatcaacgaaaaacaaatgtacccctctatccaggccaaaatttggggctctctgggacaaatcacggacctcctcgatgtggtgcttgactcattcatcaaaacaagtgcgacgggaggccttggaagcattaaagccgaagtaatggcagataccgccgtcgcattagcctcaggaaacgttaagctggtaagctccaaagtgatcggacgaatgtgcaaaattattgataagacttgtttgagcccaacaccgaccctcgagcaacacttaatgtgggacgacatcgccatactggccaggtatatgcttatgttgtcattcaacaatagtctggacgtggctgcgcatttgccttacctttttcatgtggttactttcttggtagctacagggccactttctctgagagccagcacccacggcctggtgatcaatataatccactcactctgtacatgctcccagttgcatttctctgaggaaaccaagcaggtactgcgcctttctctaaccgaattctcactgcctaagttttacctactcttcggcatatccaaggtgaaatccgcggcagtaatcgcctttcggtcttcgtatagagataggagtttttcaccaggcagctacgagagggaaaccttcgccctaacatcacttgaaacagtgactgaagctctgcttgagatcatggaagcttgtatgcgggatattcccacttgtaagtggctcgaccagtggacggagctggcccagcgcttcgcatttcagtacaatcccagtcttcagccgcgagcccttgtggtcttcggttgtatctccaagagggtgagccacggccaaatcaaacagattatccgaattctgtccaaggcgctggaatcctgtctgaagggacccgacacctataatagccaagtgctgatcgaggcaactgtaatcgctcttactaagctacagcctctgctcaataaagactcccccctgcacaaagcgctcttctgggtggccgtggctgttctgcaactagacgaggtcaatctgtacagcgcgggtacagccctgctagagcaaaaccttcatacattagactcactgagaattttcaatgataagagtcctgaggaggtatttatggctattcggaatccactggaatggcattgcaaacagatggaccattttgtaggccttaatttcaactccaattttaatttcgcactggtgggccatctattgaagggttatcgccacccgagtcccgctatcgtcgccaggaccgtacgcattctgcacacgctcctcacgctggtcaacaagcataggaactgtgacaagtttgaagtgaatacccagtcagtagcatacttggccgctctgcttaccgtcagtgaggaggtgcggtcccgatgctctctgaagcataggaagagtctcctcctcacagatatctcaatggaaaacgtaccaatggatacataccccatccaccacggagatcccagttacagaacgcttaaggagactcaaccatggtcaagccccaagggctctgaaggctacttagccgcaacctatcccacagtgggtcaaacatcccctagggcgcgtaagagcatgtcccttgatatggggcaacccagccaggcgaatactaaaaaactcttgggcacccgtaaatccttcgaccacctcatcagtgacaccaaggccccaaaaaggcaggagatggagtctggtattactacccccccaaaaatgcggagggttgccgagaccgactacgaaatggaaactcagagaatctccagtagtcagcagcatccacacttgaggaaagttagcgttagcgaatccaatgtcctgctggacgaagaagtgctaaccgacccaaagatccaagccctcctcctgacggtcctggctactctggtaaagtatacgaccgacgagtttgatcagcgcatcctctacgagtatctggctgaggcatccgttgttttccccaaggtatttccagtggtgcacaacttactggatagtaaaatcaatactctcctttccctttgtcaggatcccaacctgctgaaccctattcacgggatagtccagtccgtagtttatcatgaggaatctccgcctcagtatcagactagctatcttcagtcctttggttttaacggactgtggcgattcgctggacccttcagtaagcagacccagattccggattacgctgagctgatcgttaagtttctggatgcgttaatagacacttacctgcccggaatcgatgaggaaaccagcgaggaatcccttcttacacccacatcaccctaccctcccgcactgcagtcacagctgtctattaccgccaatctcaatttgagcaatagtatgacatcccttgctacctcccaacacagtcccgctagtctcccctgtagtaagtcggccgtcttcatgcagttgtttccacatcagggcatcgacaaagagaatgtagagctctccccgacaacaggccattgcaattccgggcgaacccgccatggtagcgcatcccaagttcagaagcagcgatcagctggaagctttaagcgcaactctatcaagaaaatcgtgta

SEQ ID NO: 275472 - protein, 172 aa, Artificial Sequence
  derived and/or modified sequence
MGGDAGDREPGPAARSLGEGQAGFATADHSSQERETEKAMDRLARGTQSIPNDSPARGEGTHSEEEGFAMDEEDSDGELNTWELSEGTNCPPKEQPGDLFNEDWDSELKADQGNPYDADDIQESISQELKPWVCCAPQGDMIYDPSWHHPPPLIPYYSKMVFETGQFDDAED

SEQ ID NO: 275473 - DNA, 101 bp, Artificial Sequence
  derived and/or modified sequence
gaaaaaaacggaattatcgaattgaatcgaatagaatcatcgaacggaccagaatggaatcatctaatggaatggaatggaataatccatggactcgaatg

SEQ ID NO: 275474 - DNA, 519 bp, Artificial Sequence
  derived and/or modified sequence
atgggaggtgatgcaggtgatagagagccgggccctgcggcccggtcactgggcgaaggccaggccggattcgccacagctgaccactcttcacaggaacgcgaaacagagaaggcgatggatcggctggccagagggactcagagcatccctaacgattctccagcccgaggcgagggcacccattccgaggaagagggttttgctatggacgaagaggactccgacggggagctgaacacatgggaattgtccgaagggacaaattgcccaccaaaggagcagcccggcgatttgttcaacgaagactgggattccgaactcaaggccgaccaggggaacccctacgatgcagatgacatacaagaatccatttcccaagagttgaagccctgggtgtgctgcgcaccacagggggatatgatatatgatccaagttggcatcaccctccacccctaattccttattattccaagatggtgttcgagaccggccagttcgacgacgctgaggactag

SEQ ID NO: 275475 - DNA, 519 bp, Artificial Sequence
  derived and/or modified sequence
atgggaggagatgctggggaccgggagcccggccctgctgcccggagcctgggggagggccaggccggctttgccacagctgaccacagcagccaggagcgggagacagagaaggccatggaccggctggcccggggcacccagagcatccccaatgacagccctgcccggggggagggcacccacagcgaggaggagggctttgccatggatgaagaagattctgatggagagctgaacacctgggagctgtctgagggcaccaactgcccccccaaggagcagcccggggacctcttcaatgaagactgggacagcgagctgaaggctgaccagggcaacccctatgatgctgatgacatccaggagagcatcagccaggagctgaagccctgggtgtgctgtgccccccagggcgacatgatctatgaccccagctggcaccaccccccacccctcatcccctactacagcaagatggtgtttgagaccggccagtttgatgatgctgaagattag

SEQ ID NO: 275476 - DNA, 519 bp, Artificial Sequence
  derived and/or modified sequence
atgggcggcgacgccggcgaccgggagcccggccccgccgcccggtccttgggcgaggggcaggcgggatttgcaactgcagaccattcatcacaagaacgggaaaccgaaaaagctatggacaggctagcgagagggacccagtctatccccaacgatagtcctgctcggggcgaggggacacacagtgaggaagaggggttcgctatggatgaagaggactccgacggagagctgaatacgtgggaactgtccgaaggcactaactgtccacctaaggagcagcctggggacttgttcaacgaggactgggacagcgagcttaaggcagaccagggaaacccctatgacgccgacgacatacaagagtcaattagccaagagctgaagccatgggtatgttgcgcaccccagggcgacatgatttatgaccccagctggcaccacccacctcccctgattccttattatagcaaaatggttttcgagaccggacagttcgacgatgcggaggactag

SEQ ID NO: 275477 - DNA, 519 bp, Artificial Sequence
  derived and/or modified sequence
atgggcggtgacgctggagatagggagcctggccctgctgcccgatcgctcggggaggggcaggccggattcgccacagccgatcattcctcccaggaacgggagaccgaaaaggccatggacagactcgcccgaggaacgcaatctattcccaacgatagccccgctagaggagaaggcacacacagtgaggaggagggctttgccatggatgaagaggacagcgacggcgaactgaacacatgggaactcagcgagggcacgaattgccctcccaaggaacagcccggtgacttattcaacgaggattgggatagtgagctcaaagccgaccagggcaacccttacgacgcagatgacatccaggagtccatttcccaggaactaaagccatgggtttgttgtgccccacagggggacatgatctacgacccttcatggcaccaccctccaccacttatcccctattacagtaagatggtcttcgagaccgggcagttcgatgatgctgaggactag

SEQ ID NO: 275478 - DNA, 1041 bp, Artificial Sequence
  derived and/or modified sequence
aacagccagccgcagcctggggcgggaagtcgcggggccgggctgggcgggggccgcggggccggggaagcgcctctggccggcctcgggccgccccgcgacacggagcgctgtttgggctcgcgctcgagctgaaaacggccaggccgcggggccgcggggctgcggggcggggaaagccgagggcgtgggtgggcgctctgggtcagcagagacggctgtccgcccgctgggcgccgctgcggatttggtaaatgggaggtgacgctggtgaccgagagccggggcccgctgccaggagcctgggcgagggccaggctggctttgctacagctgaccactccagtcaggagagagagactgagaaggctatggatcgactagcccgtggaacacagagcattcctaatgacagtcctgcccggggtgagggcacccattctgaagaggaaggctttgccatggatgaggaggactctgatggagaactgaatacctgggagctgtcagaagggacaaactgtccacccaaggaacagcctggcgatctttttaatgaggactgggactcggagttgaaagcagatcaagggaatccatatgatgctgacgacatccaggagagcatttctcaagagcttaaaccttgggtgtgctgtgccccacaaggagacatgatctatgaccccagctggcaccatccgcctccactgataccctattattccaagatggtctttgaaacaggacagtttgacgatgctgaagattgagtgtggagctttctgccttgtaggtgggcgggcctccacgtcaagatctcttttcctgtcttggaggtgaaaagtcatatctgagaaaatgtttgcagtgacccctagtctggggtacacagaccagtgttccttattgacagtgttcaataaggccccgtcattctcgccagtctgttgttgttcttaatgggctcctccttgaaatgtgtgtgtgtttgtgtcaagaggagttgtgttctttgtaaataaaggttaaaaagagaaa

SEQ ID NO: 275479 - DNA, 519 bp, Artificial Sequence
  derived and/or modified sequence
atgggcggcgacgccggcgacagagagcccggccccgccgccagaagcctgggcgagggccaggccggcttcgccaccgccgaccacagcagccaggagagagagaccgagaaggccatggacagactggccagaggcacccagagcatccccaacgacagccccgccagaggcgagggcacccacagcgaggaggagggcttcgccatggacgaggaggacagcgacggcgagctgaacacctgggagctgagcgagggcaccaactgcccccccaaggagcagcccggcgacctgttcaacgaggactgggacagcgagctgaaggccgaccagggcaacccctacgacgccgacgacatccaggagagcatcagccaggagctgaagccctgggtgtgctgcgccccccagggcgacatgatctacgaccccagctggcaccaccccccccccctgatcccctactacagcaagatggtgttcgagaccggccagttcgacgacgccgaggactag

SEQ ID NO: 275480 - protein, 120 aa, Artificial Sequence
  derived and/or modified sequence
MKVSEAALSLLVLILIITSASRSQPKVPEWVNTPSTCCLKYYEKVLPRRLVVGYRKALNCHLPAIIFVTKRNREVCTNPNDDWVQEYIKDPNLPLLPTRNLSTVKIITAKNGQPQLLNSQ

SEQ ID NO: 275481 - DNA, 363 bp, Artificial Sequence
  derived and/or modified sequence
atgaaggtctctgaagcagccttgagtcttctggtacttatattaatcattacttccgcgagccgatctcagccaaaagtgcctgagtgggtgaataccccctcaacatgttgtctcaaatactatgagaaggttttaccaagacggctggttgttggctataggaaagccctcaattgccatctccctgcaatcattttcgtcaccaaacgtaatcgcgaggtctgcacaaacccgaacgacgactgggttcaggagtatatcaaagaccccaacctgcctttactgccaacacgcaacctctccacagtgaagattatcactgcaaagaatggacaaccccagttacttaacagccagtag

SEQ ID NO: 275482 - DNA, 363 bp, Artificial Sequence
  derived and/or modified sequence
atgaaggtgtctgaggccgccctgagcctgctggtgctgatcctgatcatcaccagcgccagccgcagccagcccaaggtgcctgagtgggtgaacacccccagcacctgctgcctgaagtactatgagaaggtgctgccccggcggctggtggtgggctacaggaaggccctgaactgccacctgcctgccatcatctttgtgaccaagaggaaccgggaggtgtgcaccaaccccaatgatgactgggtgcaggagtacatcaaggaccccaacctgcccctgctgcccaccaggaacctgagcacagtgaagatcatcacagccaagaatggccagccccagctgctgaacagccagtag

SEQ ID NO: 275483 - DNA, 363 bp, Artificial Sequence
  derived and/or modified sequence
atgaaggtgagcgaggccgccctgagcctgctggtgctgatcctgataatcaccagtgcttccagaagccagcccaaagtgccagagtgggttaatacaccttctacttgctgccttaagtactatgaaaaagtgctgccacgcagacttgtcgtgggatataggaaggccctgaactgccatctccctgccatcatctttgtcactaaacggaacagagaggtctgcacgaatcctaacgatgactgggtccaggagtatatcaaagaccccaatctgcctttgctaccaaccagaaatctctctaccgtgaagatcattactgcaaaaaacggtcagcctcaacttctgaattcccagtag

SEQ ID NO: 275484 - DNA, 363 bp, Artificial Sequence
  derived and/or modified sequence
atgaaggtctcggaagcagcgttatctttgcttgtcttaattctgataatcacctcggctagtcggtcccagcccaaagtgcctgagtgggtgaacactccaagcacatgttgtctgaagtactacgaaaaagtcctcccacgcagactcgtggtgggttacagaaaagccctcaattgtcacctgcccgctattatctttgttacaaaacgaaatcgggaagtgtgcacaaatcctaacgacgattgggtgcaagagtacatcaaagatcctaacctcccactgttgccgactaggaatctgtcaaccgtgaagatcatcacagctaaaaatggacagccacagctgctgaacagccagtag

SEQ ID NO: 275485 - DNA, 1506 bp, Artificial Sequence
  derived and/or modified sequence
gttggcaagcggaccaccagcaacagacaacatcttcattcggctctccctgaagctgtactgcctcgctgagaggatgaaggtctccgaggctgccctgtctctccttgtcctcatccttatcattacttcggcttctcgcagccagccaaaagttcctgagtgggtgaacaccccatccacctgctgcctgaagtattatgagaaagtgttgccaaggagactagtggtgggatacagaaaggccctcaactgtcacctgccagcaatcatcttcgtcaccaagaggaaccgagaagtctgcaccaaccccaatgacgactgggtccaagagtacatcaaggatcccaacctacctttgctgcctaccaggaacttgtccacggttaaaattattacagcaaagaatggtcaaccccagctcctcaactcccagtgatgaccaggctttagtggaagcccttgtttacagaagagaggggtaaacctatgaaaacaggggaagccttattaggctgaaactagccagtcacattgagagaagcagaacaatgatcaaaataaaggagaagtatttcgaatattttctcaatcttaggaggaaataccaaagttaagggacgtgggcagaggtacgctcttttatttttatatttatatttttatttttttgagatagggtcttactctgtcacccaggctggagtgcagtggtgtgatcttggctcacttgatcttggctcactgtaacctccacctcccaggctcaagtgatcctcccaccccagcctcctgagtagctgggactacaggcttgcgccaccacacctggctaatttttgtatttttggtagagacgggattctaccatgttgcccaggctggtctcaaactcgtgtgcccaagcaatccacctgcctcagccttccaaaagtgctgggattacaggcgtgagccaccacatccggccagtgcactcttaatacacagaaaaatatatttcacatccttctcctgctctctttcaattcctcacttcacaccagtacacaagccattctaaatacttagccagtttccagccttccagatgatctttgccctctgggtcttgacccattaagagccccatagaactcttgatttttcctgtccatctttatggatttttctggatctatattttcttcaattattctttcattttataatgcaactttttcataggaagtccggatgggaatattcacattaatcatttttgcagagactttgctagatcctctcatattttgtcttcctcagggtggcaggggtacagagagtgcctgattggaaaaaaaaaaaaaagagagagagagagaagaagaagaagaagagacacaaatctctacctcccatgttaagctttgcaggacagggaaagaaagggtatgagacacggctaggggtaaactcttagtccaaaacccaagcatgcaataaataaaactcccttatttgaca

SEQ ID NO: 275486 - DNA, 363 bp, Artificial Sequence
  derived and/or modified sequence
atgaaggtgagcgaggccgccctgagcctgctggtgctgatcctgatcatcaccagcgccagcagaagccagcccaaggtgcccgagtgggtgaacacccccagcacctgctgcctgaagtactacgagaaggtgctgcccagaagactggtggtgggctacagaaaggccctgaactgccacctgcccgccatcatcttcgtgaccaagagaaacagagaggtgtgcaccaaccccaacgacgactgggtgcaggagtacatcaaggaccccaacctgcccctgctgcccaccagaaacctgagcaccgtgaagatcatcaccgccaagaacggccagccccagctgctgaacagccagtag

SEQ ID NO: 275487 - DNA, 756 bp, Artificial Sequence
  derived and/or modified sequence
atggcctcgcctaaactggtgaccagcgacaccgccgcaggaaagataagagacatcttgcacgacttagaggagatccaggagaagctgcaagaaagtgttacttggaaggaggccccagaagcccagatgcaaggagaattgttagaggccccaagctcatccagctgcccccttccggaccagagtcaccctgccttgagacgggcttccaggttcgctcaatgggccattcatccaacttttaatctgaaatccttgagttgctcactggaggtttctaaggactcacgcaccgttactgtaagtcatagaccacagccgtatcggtggtcctgcgagaggttctccacatcccaagtactatgttctcaggccctcagttcgggaaaacactactgggaggtggacacacgcaactgctctcactgggctgttggggttgccagttgggaaatgtccagagaccaggtcctgggtaggactatggactcttgttgcgtggaatggaaaggcactagtcagttgtcagcatggcatatggtgaaagaaacggtgctagggagtgataggcctggcgttgtgggaatttggctcaacctcgaagagggtaagctcgccttctactccgtggacaaccaggagaagctgctgtacgaatgtaccatttcggcatcatccccgctctaccccgcattttggttatacggtttgcaccctggtaattatctgatcatcaagcaggtcaaagtatag

SEQ ID NO: 275488 - DNA, 756 bp, Artificial Sequence
  derived and/or modified sequence
atggccagccccaagctggtgaccagtgacacagctgctgggaagatccgggacatcctgcatgacctggaggagatccaggagaagctgcaggagagcgtgacctggaaggaggcccctgaggcccagatgcagggcgagctgctggaggcccccagcagcagcagctgccccctgcctgaccagagccacccagccctgcggcgggccagcagatttgcccagtgggccatccaccccaccttcaacctgaagagcctgagctgcagcctggaggtgtccaaggacagcaggacagtgacagtgagccaccggccccagccctaccgctggagctgtgagcgcttcagcaccagccaggtgctgtgcagccaggccctgagcagcggcaagcactactgggaggtggacaccaggaactgcagccactgggccgtgggcgtggcctcctgggagatgagccgggaccaggtgctgggccgcaccatggacagctgctgcgtggagtggaagggcaccagccagctgagcgcctggcacatggtgaaggagaccgtgctgggcagtgacaggcctggggtggtgggcatctggctgaacctggaggagggcaagctggccttctacagcgtggacaaccaggagaagctgctgtatgagtgcaccatcagcgccagcagccccctgtacccagccttctggctgtatggcctgcaccctggcaactacctgatcatcaagcaggtgaaggtgtag

SEQ ID NO: 275489 - DNA, 756 bp, Artificial Sequence
  derived and/or modified sequence
atggccagccccaagctggtgaccagcgacaccgccgccggcaagatccgcgatatcctgcatgatctggaggagatccaggagaaactgcaggagtccgtgacctggaaagaagcccccgaggcccagatgcagggcgagctcctcgaagccccgtcttcgtcatcatgccctctgcccgaccagagccatcccgccctgagacgagcaagccgcttcgctcaatgggcaattcacccaacttttaaccttaagtcactcagctgctctcttgaggtttccaaagactcccgcacagtcactgtaagtcatcggcctcagccttacaggtggtcctgtgagcgctttagcacatcgcaggtgctgtgctcccaggcactgagtagcggtaagcattattgggaagtggatacccgcaattgcagccattgggccgtcggagtggcctcctgggagatgagtcgcgaccaagtacttgggcgcacaatggacagctgttgcgtcgagtggaaaggcacatcacagctgagcgcatggcatatggtgaaagagacggtcctgggttccgacaggcccggggtagtgggcatttggctcaatctcgaggaggggaagctcgctttttacagtgtggacaaccaggagaaactgttatatgaatgcacaattagtgcctccagccccttgtatcccgctttttggctgtacggcctgcatccaggcaactacctcatcattaaacaggtgaaggtttag

SEQ ID NO: 275490 - DNA, 756 bp, Artificial Sequence
  derived and/or modified sequence
atggcaagccctaagcttgtcacctccgacactgccgcaggaaaaatccgcgacattctgcatgacctggaagagattcaggaaaagctccaagagtcggtgacctggaaggaagcccctgaagcccagatgcagggtgaactgttggaggctccttcatccagctcgtgtcccctaccagatcagtcccatcccgctctcagaagggccagcaggttcgcccagtgggccatacaccctaccttcaacctgaagtcactgtcatgcagtctggaggtgtcaaaagatagccgaacagtcacagtgtcacaccgcccacaaccttaccgctggtcatgtgagaggttcagcactagtcaggtgctttgttcacaggcattatctagtggaaaacactattgggaggtggacactaggaactgctcccattgggctgttggggtggccagctgggagatgtcacgcgatcaagtgcttggcagaacaatggactcgtgctgcgttgagtggaagggaacctctcagcttagcgcctggcacatggtgaaagagactgtcctgggctccgatagacccggagtagtgggaatctggctgaatctggaggagggcaaactcgctttctactccgtggataatcaggagaagctgctgtacgaatgtaccatttctgccagtagtcctttgtacccagccttctggctgtacggcctacaccctggcaactacctgataattaaacaggttaaagtgtag

SEQ ID NO: 275491 - DNA, 1905 bp, Artificial Sequence
  derived and/or modified sequence
gagactcgcccggctcaaccccgacgtccgcgccccggccgcctgttggccatggcgggcctgggcctgggctccgccgttcccgtgtggctggccgaggacgacctcggctgcatcatctgccaggggctgctggactggcccgccacgctgccctgcggccacagcttctgccgccactgcctggaggccctgtggggcgcccgcgacgcccgccgctgggcctgccccacttgccgccagggcgccgcgcagcagccgcacctgcggaagaacacgctactgcaggacctggccgacaagtaccgccgcgccgcacgcgagatacaggcgggctccgaccctgcccactgcccctgcccgggctccagttccctctccagcgcggccgcgaggccccggcgccgcccggaactgcagcgggtggcagtagagaagagcatcacagaagttgctcaggagctgacagagctggtggaacatcttgtagacattgtcagaagcctgcagaatcagaggcccctatcagaatctggaccagacaacgaactgagcatcctgggcaaggagaactcctggaagccccgtcttcctcctcatgcccattgcctgaccagagccaccctgcactcaggagagcttctcggtttgctcagtgggccatccatccaacctttaacttgaagagcctttcctgcagcctggaggtgtccaaggattcccgtacagtgactgtgtctcaccgcccacaaccctatcgctggagctgtgagaggttttctaccagccaggtcttatgttcccaggccctgtcttctggaaagcattactgggaagtggacactaggaattgcagccactgggcagttggggtggcttcctgggagatgagccgcgaccaggtcctgggaaggactatggactcttgttgtgtggaatggaaggggactagccagctctctgcatggcacatggtcaaggaaactgtccttggctcagacagacctggggtggtgggcatctggctgaaccttgaggagggaaagcttgccttctattcagtggacaatcaggagaagcttctgtatgagtgtaccatctctgcctcctctcctttgtaccctgccttctggctgtatggcttacatcctggaaattacctgataataaagcaagtaaaggtgtaaggtttcctaagggattacaacacagtggtttcctggtctctctccctgtcatcaatcagggtagtaacttgacttaagaataccactttttagaaaaattacgatagagatgggatctcactaggttgcccaggctggtgtcgaattcctggtctcaagcagtcctcccacctcagcctcccaaggtgctgggattacaggtgtgagccaccacacctggccaagaataccacttttgaagttaatccttttgtgtgatacaggatgaacttgggatgtttgaaccctggacattccaaataaagaataggcccctgcctggctcctgggagataacctctaagccattagaatatcttgcctgataagagtgtttttgtttacctgtgggccttgggccatgcagtatcagcttgaccttgcaaggtcaagctgaggagactaagttagccatgtgggcagtgaagcatgccaatgtgatcaatccctagtaaaagccctggacacctaggcatgggtgagctactctggttggtaatactctgtgcacacatcattgtagccacacatcattgctgggagaattaagcattatcctgaagactctgccaggagaggataattggaagttctcttggaccttaccttatgtgcctttcttcattgctgattttaatctgtatcctttcactgtaataaactgtaactatgagtgcaa

SEQ ID NO: 275492 - DNA, 624 bp, Artificial Sequence
  derived and/or modified sequence
gcgcagcagccgcacctgcggaagaacacgctactgcaggacctggccgacaagtaccgccgcgccgcacgcgagatacaggcgggctccgaccctgcccactgcccctgcccgggctccagttccctctccagcgcggccgcgaggccccggcgccgcccggaactgcagcgggagaactcctggaagccccgtcttcctcctcatgcccattgcctgaccagagccaccctgcactcaggagagcttctcggtttgctcagtgggccatccatccaacctttaacttgaagagcctttcctgcagcctggaggtgtccaaggattcccgtacagtgactgtgtctcaccgcccacaaccctatcgctggagctgtgagaggttttctaccagccaggtcttatgttcccaggccctgtcttctggaaagcattactgggaagtggacactaggaattgcagccactgggcagttggggtggcttcctgggagatgagccgcgaccaggtcctgggaaggactatggactcttgttgtgtggaatggaaggggactagccagctctctgcatggcacatggtcaaggaaactgtccttggctcagacagacctggggtggtgg

SEQ ID NO: 275493 - DNA, 756 bp, Artificial Sequence
  derived and/or modified sequence
atggccagccccaagctggtgaccagcgacaccgccgccggcaagatcagagacatcctgcacgacctggaggagatccaggagaagctgcaggagagcgtgacctggaaggaggcccccgaggcccagatgcagggcgagctgctggaggcccccagcagcagcagctgccccctgcccgaccagagccaccccgccctgagaagagccagcagattcgcccagtgggccatccaccccaccttcaacctgaagagcctgagctgcagcctggaggtgagcaaggacagcagaaccgtgaccgtgagccacagaccccagccctacagatggagctgcgagagattcagcaccagccaggtgctgtgcagccaggccctgagcagcggcaagcactactgggaggtggacaccagaaactgcagccactgggccgtgggcgtggccagctgggagatgagcagagaccaggtgctgggcagaaccatggacagctgctgcgtggagtggaagggcaccagccagctgagcgcctggcacatggtgaaggagaccgtgctgggcagcgacagacccggcgtggtgggcatctggctgaacctggaggagggcaagctggccttctacagcgtggacaaccaggagaagctgctgtacgagtgcaccatcagcgccagcagccccctgtaccccgccttctggctgtacggcctgcaccccggcaactacctgatcatcaagcaggtgaaggtgtag

SEQ ID NO: 275494 - DNA, 1947 bp, Artificial Sequence
  derived and/or modified sequence
atggtgagcctgccccccccccagagcgacgtgaccctgcccggccccaccagactggagggcgagagacagggcgacctgatgcaggcccccggcctgcccggcagccccgccccccagagcaagcacgccggcttcagctgcagcagcttcgtgagcgacggcccccccgagagaacccccagcctgcccccccacagccccagaatcgccagccccggccccgagcaggtgcagggccactgccccgccggccccggccccggccccttcagactgagccccagcgacaagtaccccggcttcggcttcgaggaggccgccgccagcagccccggcagattcctgaagggcagccacgcccccttccacccctacaagagacccttccacgaggacgtgttccccgaggccgagaccaccctggccctgaagggccacagcttcaagacccccggccccctggaggccttcgaggagatccccgtggacgtggccgaggccgaggccttcctgcccggcttcagcgccgaggcctggtgcaacggcctgccctaccccagccaggagcacggcccccaggtgctgggcagcgaggtgaaggtgaagccccccgtgctggagagcggcgccggcatgttctgctaccagccccccctgcagcacatgtactgcagcagccagccccccttccaccagtacagccccggcggcggcagctaccccatcccctacctgggcagcagccactaccagtaccagagaatggccccccaggccagcaccgacggccaccagcccctgttccccaagcccatctacagctacagcatcctgatcttcatggccctgaagaacagcaagaccggcagcctgcccgtgagcgagatctacaacttcatgaccgagcacttcccctacttcaagaccgcccccgacggctggaagaacagcgtgagacacaacctgagcctgaacaagtgcttcgagaaggtggagaacaagagcggcagcagcagcagaaagggctgcctgtgggccctgaaccccgccaagatcgacaagatgcaggaggagctgcagaagtggaagagaaaggaccccatcgccgtgagaaagagcatggccaagcccgaggagctggacagcctgatcggcgacaagagagagaagctgggcagccccctgctgggctgccccccccccggcctgagcggcagcggccccatcagacccctggccccccccgccggcctgagcccccccctgcacagcctgcaccccgcccccggccccatccccggcaagaaccccctgcaggacctgctgatgggccacacccccagctgctacggccagacctacctgcacctgagccccggcctggccccccccggccccccccagcccctgttcccccagcccgacggccacctggagctgagagcccagcccggcaccccccaggacagccccctgcccgcccacaccccccccagccacagcgccaagctgctggccgagcccagccccgccagaaccatgcacgacaccctgctgcccgacggcgacctgggcaccgacctggacgccatcaaccccagcctgaccgacttcgacttccagggcaacctgtgggagcagctgaaggacgacagcctggccctggaccccctggtgctggtgaccagcagccccaccagcagcagcatgccccccccccagccccccccccactgcttcccccccggcccctgcctgaccgagaccggcagcggcgccggcgacctggccgcccccggcagcggcggcagcggcgccctgggcgacctgcacctgaccaccctgtacagcgccttcatggagctggagcccaccccccccaccgcccccgccggccccagcgtgtacctgagccccagcagcaagcccgtggccctggcctag

SEQ ID NO: 275495 - DNA, 1947 bp, Artificial Sequence
  derived and/or modified sequence
atggtgagcctgcccccacctcagagtgatgttacacttccaggccccacgaggctagagggtgaaaggcaaggagatctcatgcaggcgcccgggttacccggctctcccgccccacagagtaagcatgctggattttcttgctccagcttcgtgagtgacgggccacctgagcgaacaccatctctaccaccacatagtcccaggattgcatcccctggccctgaacaagtgcaggggcactgtcctgcgggccccggccctggcccttttagactgagtcccagcgataagtaccccgggttcggctttgaggaggccgccgcgagctcacctgggaggttcttaaagggcagccatgccccctttcacccatataagaggcctttccacgaagatgtctttcctgaggccgagaccacacttgcccttaaggggcacagcttcaagacaccgggccctttagaagcattcgaggagatccccgtggacgtggccgaagcggaagccttcctcccagggttttccgccgaagcttggtgcaatggattaccctatccttcacaggaacatggtcctcaggttctcggatccgaggtcaaagttaaacctccagttttggaatctggcgctggcatgttctgttaccaaccccccttgcaacacatgtactgcagcagccagcctccttttcaccagtattccccagggggtgggagctatcccattccctacctgggttccagtcattatcaataccaacgtatggcgccccaggccagcaccgatggacatcaaccccttttcccgaaaccgatctatagttactccatcctgattttcatggccctgaagaactccaaaacaggctcactaccggttagcgaaatctataatttcatgaccgagcactttccctacttcaagacagccccagacggctggaagaactccgtgcgacataatctcagtctgaataaatgttttgagaaggtggagaacaagagtgggtcctcttctcgcaaaggctgtctatgggccctgaaccccgccaagatagacaaaatgcaggaggagttacagaagtggaagcgcaaagatcccattgcggttcgcaagagcatggccaagccggaggagctggactcccttattggcgacaagcgagagaagcttggttcaccgctgctcggatgccccccccccgggctgtccggctcagggccaatacggcccttggccccaccagctggactttcaccaccgctgcactccctgcatcccgctccgggacctattcctggtaagaatccgcttcaggatctgctgatgggacacacaccatcttgctacggccagacctacctgcacctttctccgggactggcgcctcccgggccgccacaaccactttttccccaacctgatggccacttggagctcagggcacagcccggtactccccaggacagtcctcttccggctcacaccccaccctctcatagtgcgaagctgctggccgaaccatctcctgccagaactatgcacgacactctgcttcctgatggagatctcggaaccgacttagatgccataaacccctcgctgaccgactttgatttccaaggcaatctgtgggaacagttgaaggatgactccttggccttggatcccctcgtcctggtcacatctagtcctacttctagctccatgccaccgccccagcctcctccacactgctttcctccaggcccttgcttgactgagactggaagcggagctggagacttggcggcccccggatcaggcggttctggagccttaggagacttgcacctgaccacattatatagcgctttcatggaactggaaccaacacctcctactgcacccgctggaccatctgtttacctgagcccgtcttcgaagcctgtcgccctggcttag

SEQ ID NO: 275496 - DNA, 1947 bp, Artificial Sequence
  derived and/or modified sequence
atggtgtccctgcccccaccccagagtgatgtgaccctgcccggccccacccggctggagggggagcggcagggcgacctgatgcaggcccctggcctgcccggcagccctgccccccagagcaagcacgccggcttcagctgcagcagctttgtgtctgatggccccccagagaggacccccagcctgcccccccacagcccccgcatcgccagccctggccctgagcaggtgcagggccactgcccagctggccctggccctggccccttccggctgagccccagcgacaagtacccaggcttcggctttgaggaggccgccgccagcagccctggccgcttcctgaagggcagccacgcccccttccacccctacaagaggcccttccatgaagatgtgtttcctgaggccgagaccaccctggccctgaagggccacagcttcaagaccccaggccccctggaggcctttgaggagatccctgtggatgtggccgaggccgaggccttcctgcccggcttctctgctgaggcctggtgcaatggcctgccctaccccagccaggagcacggcccccaggtgctgggcagcgaggtgaaggtgaagccccctgtgctggagagcggggccggcatgttctgctaccagccccccctgcagcacatgtactgcagcagccagccccccttccaccagtacagccctgggggcggcagctaccccatcccctacctgggcagcagccactaccagtaccagaggatggccccccaggccagcacagatggccaccagcccctcttccccaagcccatctacagctacagcatcctgatcttcatggccctgaagaacagcaagacaggcagcctgcctgtgtctgagatctacaacttcatgacagagcacttcccctacttcaagacagccccagatggctggaagaacagcgtgcgccacaacctgagcctgaacaagtgctttgagaaggtggagaacaagagcggcagcagcagcaggaagggctgcctgtgggccctgaacccagccaagattgacaagatgcaggaggagctgcagaagtggaagaggaaggaccccatcgctgtgaggaagtccatggccaagccagaggagctggacagcctgattggagacaagcgggagaagctgggcagccccctgctgggctgccccccacctggcctgagcggcagcggccccatccggcccctggcccctcctgctggcctgagcccccccctgcacagcctgcacccagcccctggccccatccctgggaagaaccccctgcaggacctgctgatgggccacacccccagctgctacggccagacctacctgcacctgagccctggcctggcccctcctggccccccccagcccctcttcccccagccagatggccacctggagctgcgggcccagcccggcaccccccaggacagccccctgcctgcccacaccccacccagccacagcgccaagctgctggccgagcccagccctgcccggaccatgcatgacaccctgctgcctgatggagacctgggcacagacctggatgccatcaaccccagcctgacagactttgacttccagggcaacctgtgggagcagctgaaggatgacagcctggccctggaccccctggtgctggtgaccagcagccccaccagcagctccatgcccccaccccagcccccaccccactgcttccccccaggcccctgcctgacagagaccggcagcggggccggggacctggccgcccctggcagcggcggcagcggggccctgggggacctgcacctgaccaccctgtacagcgccttcatggagctggagcccaccccacccacagccccagctggccccagcgtgtacctgagccccagcagcaagcctgtggccctggcctag

SEQ ID NO: 275497 - DNA, 1947 bp, Artificial Sequence
  derived and/or modified sequence
atggtgagcctgccccccccccagagcgacgtgaccctgcccggcccaactagattggagggggaacggcagggagatctaatgcaggcaccgggcctccccgggtccccggctccgcagagcaaacacgctggcttcagctgtagctcctttgtgtccgacggccccccagaaagaacaccatcactgcccccccatagcccacggattgcctcgcccggtcccgagcaggtacagggccactgtcctgccggacctggcccaggaccattccgcttaagcccttctgataagtacccaggctttggcttcgaggaggctgctgcttccagccccggccggttcctgaaggggagccacgctccattccacccctataaacggccattccatgaggacgtctttcccgaggctgagactactctggccctcaaagggcatagttttaagacacctggccccctagaggctttcgaagaaattcccgtcgacgtggccgaggcagaggcatttttacccggattcagcgccgaggcctggtgtaacggcctcccctacccttctcaggagcacggtcctcaggtgctgggaagcgaggtgaaggtaaagcctccagtgctggagtctggggcgggtatgttttgttaccagcctcccctccaacacatgtactgctcttcccaaccccccttccatcagtactcacccggcggaggaagctacccaatcccttacctgggatcatcccactatcagtaccagcggatggcaccacaggcatctacagatggacaccagcccctgtttcctaagccaatatactcatactcaatcctaattttcatggcactgaaaaattcgaagaccggctctctgcccgtttccgagatttacaacttcatgaccgagcatttcccctacttcaagactgccccggacgggtggaaaaatagcgtgagacacaatctgagcctaaacaaatgctttgagaaggtcgagaataagagcggttctagctctcggaagggctgcctttgggccctgaaccccgctaagattgataagatgcaggaggaactgcagaagtggaaaaggaaggaccccatcgcagtcagaaaaagtatggccaagcccgaggagctggatagcttgatcggagacaagagggagaaactgggctctccactcctcgggtgccctcctccagggctttccggctcaggtccaatcaggcccctcgcccctcctgctggcttatcaccccccctgcattctctccatcctgcaccagggccgatccctggaaagaatccgctccaagatctcctgatgggccatacaccaagctgttatggacagacgtaccttcacctgtcacccgggctggcgcctccaggccccccgcaacccctgttcccccagcccgacgggcacctggaacttcgcgcccagcccggaacaccacaggacagccctctacctgcccatacccccccatcccacagcgcaaaactcctggccgagcccagccccgcccgaaccatgcacgacaccctcctacccgacggggatctcgggactgacctcgacgcgataaacccaagcttaacagacttcgacttccagggcaatctttgggagcagctcaaggatgatagcctagcactggatcctctcgtgcttgttacaagttcccccacatcctcttcaatgcctccacctcagcctccccctcattgctttccacctggtccctgcttaaccgaaactggcagtggagcaggggatctagccgcgcccggcagcggcggcagtggagctcttggcgacctgcaccttactaccctgtattcagcgtttatggagttggagccaactccacctacagcccctgccggaccatctgtatatctttcgccctcgtccaagcctgttgccttagcctag

SEQ ID NO: 275498 - DNA, 1947 bp, Artificial Sequence
  derived and/or modified sequence
atggtgtctttgcctcccccacagtccgacgtgaccctccccggtcccacaaggctcgaaggggagcggcagggcgatttaatgcaagcacccggactgccaggatctcctgcgccacagagtaagcatgcgggtttttcctgttcttcattcgtgtccgacggtccgcctgaaagaaccccaagccttccgcctcactcacctagaatagcaagccctgggcctgagcaggttcagggccattgcccagctggccctgggccaggtccctttcgtctcagtccttctgataagtaccccggatttggatttgaagaggctgcggcttcttccccaggcaggttcttaaaaggatcacacgctcccttccacccctataagagaccttttcatgaagatgtgtttccagaggcggagaccaccctggctttgaaaggccattcatttaagacccccggacccctggaggctttcgaggaaattcccgttgacgtggccgaggctgaggcatttctgcccggattttcagctgaggcatggtgtaatgggctgccatatccttctcaagaacatggccctcaggttctcggaagcgaagtgaaggtaaagcctccagtgctggaatctggcgctgggatgttctgctatcaacctccgctccagcatatgtattgctcctcccagcccccatttcaccagtacagcccaggcggtggcagttacccaatcccttacctgggctctagccattatcagtaccagcgaatggccccacaagcgtctaccgacggccaccagcccctctttccgaagcccatctactcctacagtattctgatctttatggcactcaagaacagcaagaccggtagccttccagtgtcagaaatatataatttcatgactgaacactttccctactttaagaccgctcctgacgggtggaagaatagcgtgcgccacaacctgagtttgaataaatgctttgagaaggtggagaataaaagcggctcttcgtctagaaaagggtgtctgtgggcacttaacccagcaaagattgacaaaatgcaagaagagctacagaaatggaaacgcaaggatcctatcgcagttcgcaagtctatggcaaaacccgaggagcttgattccctcatcggagacaaacgggaaaagctgggctctcccctgctgggctgtccaccccctgggctcagcggcagcggacccatcagaccactcgctccgcctgcgggattgagtccaccgctgcactcgctacacccagcccctgggccaatcccaggcaaaaaccccttgcaggatttgctaatgggtcacaccccgagttgttatggtcagacgtatttgcatttatcacctggtctggcaccacccggaccacctcagcctctttttccccagcccgacggccacctcgagttgagagcccagcccggaacgccccaggacagccccttacctgctcacactccacccagtcacagcgccaagctgctagcagagccgtccccagcgaggacaatgcacgacaccctcctgccggacggcgacttgggaactgatctggacgctatcaacccctccctcaccgatttcgatttccaaggaaacctgtgggaacagttgaaagatgacagcctggccctggacccacttgtcctggtcactagctctccaactagtagttcaatgcccccaccccagccacccccacattgtttccctccgggaccctgcctcaccgagaccgggagcggggcaggcgacctggccgcacctggttcaggcggttccggggcactcggcgacctgcacctaactaccctttattccgcctttatggagctggaacctacaccaccaactgcccctgccggaccatctgtttacctgtctccctctagcaagcctgtggccttagcctag
